United States Patent Application Publication US 2005/0228172 A9 - sequence listing, part 170

SEQ ID NO: 758807 - DNA, 636 bp, Homo sapiens
tttatacctgcaggtgacaggggatatgatggcttagcatggtctcagaggcctaacacatggtagaaagcaaaggagaagcaagcacctttttttataaggcagcagaagagagacattgggggcaagggaaagtgccccacttttatttaaaccattatacctcctgagaactcactcattatcataaaaacaggatgaaaaaaccacccccgtgacccaatcgcctcccaccaggttcctcccttgacatgtagggattacaattcaagatgagatttgggtggggaaacagacccaaaccatatcactacttcaatctctatatttgttgggttttttcaggctctttatttatgtctgatttaatattggtagattgtattttgctaggaatttattcatttcctcaattattcaatttattggcatatgattgttcgtaatagtccctcatccattttatttctgagatatcagttgtaatggytccactttcacttataattttattttactcttccctcttggttagccaagctgaaagtttgccaattttattttttcaaaatgccaactcttctttttgttattttttctatatttttctattctttactgtatttatttctgttc

SEQ ID NO: 758808 - DNA, 622 bp, Homo sapiens
caaacaaaataaataataaagaagaatgaacaaagcctttgagaaatatgggattatgtaaagtgagcaaatgtatggctcattagtgtccctgaaagagagggagagaaagcaaggaacttggaatacatatttgaggatattacccaagaaaatatcaccaatgtcactaaagaggtcaacatttaaattcaggaattgcagagaactcatgctggatattatgcaaaacaaccatccttgagacacatagtcaattctccaaagttgacatggaagaaaataatattaaaggaagctagagagaaggggcaggccacctacagtgggaaccccataaggctaaaggcagacctgtcagcagaaactatacaagccagaagagaytgagggcctctttttagtgttcttaaaagaaactccatccaagaatttcatattcagccaaactgggcttcataagcaaaagacaagtaagatcttctcagatgagccaatgttaagataatttattaccaccatgccatccttacaagaagtccttgagggagtgttaaacacagaaatgaaagacttactggccaccacataaacacacttaagtacatagaccattgatcga

SEQ ID NO: 758809 - DNA, 604 bp, Homo sapiens
aaatgccaatcttaggttctacaatagctatgttatctgcaggaataattggggaagctgcaaatcttgtgacttccaggaaaaaatggctggtaatcattttactaggcctatatcttagcagaacacagactcctctcatcctcttaacttggtgcctttgattagttttacaaaggtggtttagtttttgcaaaggactattatcatttaaactataaactaaatttctcccgaagttatttggtccatgcccagagatgagcaaagacagacagcctgtgatgatagaagcaagaagaagtcagtcatggcagatttctcttactgtcataattttgcgaaggtggtttcagaatttcaggattgtatagtaatcctgtttttaatgtttcaaggaacttccatactattttcaatcatggctgcactgttttayattcttgtcaacagtacaccagggttccaatttctccacattcttatcaatactttttttttttaaataatggccataacaggtgtgtgatgatatctcattgtggttttgatctgcaataattaaaatctccatattacccaaaggggtcttcagatttaatgc

SEQ ID NO: 758810 - DNA, 584 bp, Homo sapiens
ttgtcgcaatctcacctgagaacatgaacaaaagtggaaaatttttaaacaaaattatgagcggtcattgttttggactgagcttatgcactaggccccaacagaccagactaaaccaaaatggagtcattcatgctaaatgtgacataattaagctaagactttaaggatacgcttagatcctagaacacaccaggttttgttttctctcctgtaaaaaggatgttccagcataaggaggtaccctmtattctaaccctttcaaaaaaatgaataaataacctgaagtccctgttcccatcttacaaaacctactgttttgctatttcccagtggctttcaagcccaaataagtacatttatactggtgaaactgacatcaattactaaactttttgtccacctttaaaaattgagatgaccaaagagagaaattattaaatcgagtttaacctgaagctgcctcattacgtattttaactttggccaaaaggtttctttgtacatcacaaactagaacaagtggaggtgtaaacagactgaagcctacatctgtgccaatcaccaagttttggccaatcaaa

SEQ ID NO: 758811 - DNA, 617 bp, Homo sapiens
gtaccctctattctaaccctttcaaaaaaatgaataaataacctgaagtccctgttcccatcttacaaaacctactgttttgctatttcccagtggctttcaagcccaaataagtacatttatactggtgaaactgacatcaattactaaactttttgtccacctttaaaaattgagatgaccaaagagagaaattattaaatcgagtttaacctraagctgcctcattacgtattttaactttggccaaaaggtttctttgtacatcacaaactagaacaagtggaggtgtaaacagactgaagcctacatctgtgccaatcaccaagttttggccaatcaaatggagccaactgtttgaaccatgttcaaacatggcaaacaccaacctataaccaattcagctatttctatacctcacttttgttttctgtatgtcattttctttttctatccataaatcttccaccatgtggctgcactggaatctcagagcctactctggcttcagtgactgcccaatttgctaatcattctttgcttaacaaaattcctttaaatttaatttggctgaagtttttcttttatcatgtgtcctcctcaatttctttcattta

SEQ ID NO: 758812 - DNA, 617 bp, Homo sapiens
gtaccctctattctaaccctttcaaaaaaatgaataaataacctgaagtccctgttcccatcttacaaaacctactgttttgctatttcccagtggctttcaagcccaaataagtacatttatactggtgaaactgacatcaattactaaactttttgtccacctttaaaaattgagatgaccaaagagagaaattattaaatcgagtttaacctgaagctgcctcattacgtattttaactttggccaaaaggtttctttgtacatcacaaactagaacaagtggaggtgtaaacagactgaagcctacatytgtgccaatcaccaagttttggccaatcaaatggagccaactgtttgaaccatgttcaaacatggcaaacaccaacctataaccaattcagctatttctatacctcacttttgttttctgtatgtcattttctttttctatccataaatcttccaccatgtggctgcactggaatctcagagcctactctggcttcagtgactgcccaatttgctaatcattctttgcttaacaaaattcctttaaatttaatttggctgaagtttttcttttatcatgtgtcctcctcaatttctttcattta

SEQ ID NO: 758813 - DNA, 630 bp, Homo sapiens
ttaggagatcaagccattcctgatcccctaatcagtgatcacctctttttccaccacctgaatgcttttctcctcctgagggcaagggccatatgtgtgatccagtgcctggcacatggaaggaactcagtaagcattttgmaatgaatgaataaatgaactagatgataagtaaatttttcaggtactgaaactgtgtattgaatatttgtaaatattgatctggtcatgcaatgagcatggccaaggatttttaaactgtccaattgtttttgtgtcttctctgtcagtgaagttctaactcggcagttctgaatcagcagaatttctgtgctgtatcactttcatcttccataacatagcccatgcagctggatatgtcagtacaaattgctgacatagtatgtccattacctaatttgaccttttagcaaataagacctttctattataaagtgagaagaggtatatgtggaaaaagagatgctattttctattgaaggcagatgatttgacttagacaactatgtgacaactggcttcactcgtgttctcttggcatcttaaaagaacatttgaaccatatttgaaataccattatgttcctatctgcaagttccactgttggag

SEQ ID NO: 758814 - DNA, 630 bp, Homo sapiens
ttaggagatcaagccattcctgatcccctaatcagtgatcacctctttttccaccacctgaatgcttttctcctcctgagggcaagggccatatgtgtgatccagtgcctggcacatggaaggaactcagtaagcattttgaaatgaatgaataaatgaactagatgataagtaaatttttcaggtactgaaactgtgtattgaatatttgtaaatattgatctggtcatgmaatgagcatggccaaggatttttaaactgtccaattgtttttgtgtcttctctgtcagtgaagttctaactcggcagttctgaatcagcagaatttctgtgctgtatcactttcatcttccataacatagcccatgcagctggatatgtcagtacaaattgctgacatagtatgtccattacctaatttgaccttttagcaaataagacctttctattataaagtgagaagaggtatatgtggaaaaagagatgctattttctattgaaggcagatgatttgacttagacaactatgtgacaactggcttcactcgtgttctcttggcatcttaaaagaacatttgaaccatatttgaaataccattatgttcctatctgcaagttccactgttggag

SEQ ID NO: 758815 - DNA, 630 bp, Homo sapiens
ttaggagatcaagccattcctgatcccctaatcagtgatcacctctttttccaccacctgaatgcttttctcctcctgagggcaagggccatatgtgtgatccagtgcctggcacatggaaggaactcagtaagcattttgaaatgaatgaataaatgaactagatgataagtaaatttttcaggtactgaaactgtgtattgaatatttgtaaatattgatctggtcatgcaatgagcatggccaaggatttttaaactgtcmaattgtttttgtgtcttctctgtcagtgaagttctaactcggcagttctgaatcagcagaatttctgtgctgtatcactttcatcttccataacatagcccatgcagctggatatgtcagtacaaattgctgacatagtatgtccattacctaatttgaccttttagcaaataagacctttctattataaagtgagaagaggtatatgtggaaaaagagatgctattttctattgaaggcagatgatttgacttagacaactatgtgacaactggcttcactcgtgttctcttggcatcttaaaagaacatttgaaccatatttgaaataccattatgttcctatctgcaagttccactgttggag

SEQ ID NO: 758816 - DNA, 630 bp, Homo sapiens
ttaggagatcaagccattcctgatcccctaatcagtgatcacctctttttccaccacctgaatgcttttctcctcctgagggcaagggccatatgtgtgatccagtgcctggcacatggaaggaactcagtaagcattttgaaatgaatgaataaatgaactagatgataagtaaatttttcaggtactgaaactgtgtattgaatatttgtaaatattgatctggtcatgcaatgagcatggccaaggatttttaaactgtccaattgtttttgtgtcttctctgtcagtgaagttctaactcggcagttctgaatcagcagaatttctgtgctgtatcactttcatcttccataacatagcccatgcagctggatatgtcagtacaaattgctgamatagtatgtccattacctaatttgaccttttagcaaataagacctttctattataaagtgagaagaggtatatgtggaaaaagagatgctattttctattgaaggcagatgatttgacttagacaactatgtgacaactggcttcactcgtgttctcttggcatcttaaaagaacatttgaaccatatttgaaataccattatgttcctatctgcaagttccactgttggag

SEQ ID NO: 758817 - DNA, 598 bp, Homo sapiens
ttaatgagttggttcgttggttggttttgtagaggtgcctgtttgatccatcactgaaaatagagagaggctctttatgttttaggtacaccctcctaactgcttaacctatcaacaattttatatactggctgtggaaggtaaagtagagaaaagaatcttcttagactgctttttgtagagatatgaacactttatcttcatttttctctcttccagcaaaagaaattctataaccatctttgttgattcattttgatgtttcataaatttccttgcaaaaaaataactctgctaagaactttagcttgtctcttttctytccatgatcttattgggctttcatctctttacttagttgtttagaattgtgcttcttaatttttataaacatatttttaggtagaggaagagcatcttttttgtcattgattacattatattcagagaatttgatcagtatgttatctatcctttgacattaaggtttgtttcatggcctcactacatggttactttttgttcaggttctctatctgcttgaagataatttatgtttcatgaaacttaacagttttctgtatataaataaagcttg

SEQ ID NO: 758818 - DNA, 641 bp, Homo sapiens
aaaactaacttgagtttcagtttcaccttttttcacaatttaggtaatccatttgaaaatcctaaatgcattgggaaatatttggaggttgcagcttttggttagaatctaaatagttataagaataaacaagcaattttactctgttcatctcacagacatcatcaagtagaagcaattgctgaaatggactgaccaatagctacacaaggaatcatattactttagttctagctttgtaacagccaaaataatgagacctcaggctataaaacatcaatctatcctgtccttaggacaatgatcttgaataggcaatatattagtcattttagactgccatgacaaaaaccatagactaggaagctcaaacatttattttttcacattctggaggctggaagtccaagatcaaggtgccggcaaagctggtttctggtgcagcctcttttctttgcagatagctgccttcttactgtgtgttcacatggkcttgtcctctgtgcacttgtggagagagaaagagggagagagctccatgggttcttcctcttcttctatcaggacaccactcctatcgaattagtgccccacccttataacctgatttaacctaattacctccttaaaggccctatctc

SEQ ID NO: 758819 - DNA, 570 bp, Homo sapiens
ttattgcctacctcctttttttgccagttacaaaatgggggccaagaatattagtttgtaaagtgttttgtgaatcatagatgcccagtattctcaagcataaagatcttcaagatgtgcaatttatgagtctttgaaagttatttgtgcaccatgtcttgccattttctttcttttcatttcacctccaatcactttactgctcttatgtgaaacagatggaatagaataaatagtactccagttagggggtgtgtttgatttcctactaaaagaatagtacttacgggaactgaaggatgtcttctcattttgtcccaggataaaatgcacaaaggaagggcgtgtcagcygtcagcttctaactagagttggaaggaaaaaaagtgaaagttcataggaaaagagaagtgaatttaggtgacttccatagcccaagaacttttatttcggtttaataaaaattgtgcacactgttgcaactgctctctggactggatcctctttgctttttgtttagaaacaaataaaaatagctaaattattaatgcgaagtaaattggttactat

SEQ ID NO: 758820 - DNA, 570 bp, Homo sapiens
ttattgcctacctcctttttttgccagttacaaaatgggggccaagaatattagtttgtaaagtgttttgtgaatcatagatgcccagtattctcaagcataaagatcttcaagatgtgcaatttatgagtctttgaaagttatttgtgcaccatgtcttgccattttctttcttttcatttcacctccaatcactttactgctcttatgtgaaacagatggaatagaataaatagtactccagttagggggtgtgtttgatttcctactaaaagaatagtacttacgggaactgaaggatgtcttctcattttgtcccaggataaaatgcacaaaggaagggcgtgtcagctgwcagcttctaactagagttggaaggaaaaaaagtgaaagttcataggaaaagagaagtgaatttaggtgacttccatagcccaagaacttttatttcggtttaataaaaattgtgcacactgttgcaactgctctctggactggatcctctttgctttttgtttagaaacaaataaaaatagctaaattattaatgcgaagtaaattggttactat

SEQ ID NO: 758821 - DNA, 537 bp, Homo sapiens
tataaaaagagcaaagacgctgtgattattttctgaaaatttgaccccatatccccgtgcagttaatcaagcaattacttaatctaaaagtcaaaggggtctcctccccaacaaaccaagttccaaacttcaaatccctcttttaaaaaggttccaacccacacttagcagtaatagaaattacagatgagagagagaagacagaggtatatactatatagacattgtattaatatcttcttgtgacrtttacaaaaattgaaccatattatactacagagaaaacctcaataaattccaaccaataagtgttattcagaccatattcactgaccacaacagaaaaaaaaaagatacaaatagattaatgttatagaaagaaacgaggaatgagacccactcctgagagattaagccatccaaatttcactggtaaagggaaaaaagcaaaactacacttgtagaatatttaagagaataacaataatgggaacattacatatgtatgctaaagctggcatttctaattaaagagga

SEQ ID NO: 758822 - DNA, 537 bp, Homo sapiens
tataaaaagagcaaagacgctgtgattattttctgaaaatttgaccccatatccccgtgcagttaatcaagcaattacttaatctaaaagtcaaaggggtctcctccccaacaaaccaagttccaaacttcaaatccctcttttaaaaaggttccaacccacacttagcagtaatagaaattacagatgagagagagaagacagaggtatatactatatagacattgtattaatatcttcttgtgacgtttacaaaaattgaaccatattatactacagagaaaacctcaataaattccaacyaataagtgttattcagaccatattcactgaccacaacagaaaaaaaaaagatacaaatagattaatgttatagaaagaaacgaggaatgagacccactcctgagagattaagccatccaaatttcactggtaaagggaaaaaagcaaaactacacttgtagaatatttaagagaataacaataatgggaacattacatatgtatgctaaagctggcatttctaattaaagagga

SEQ ID NO: 758823 - DNA, 686 bp, Homo sapiens
ataacctaatttaattcctataacctctctatggggcaagtgctattaaatattattatctccattttaaatggtggaaactgaggcacacagaggttatacaaatttcccaaggtcactcatcttgtaagtgttgtaggcgtgattcaataccaggcagcctgatgccaaaaccccttgatatgaacccctgacactcgggtttaaaacttgttagcatattagaattgcttaaagaatttaaaaaatttcagaagmccaagatgtgccccaggccaattaaattacagtctctgtgtatggaatattagtgacagcatttttaaaaacttcatttatgggttgagttcagtccccccaaaaagatatgttgacaccctcccctttgatacttaagaatgtcactttattcataaataggtcagtgcaagatgtaactgctaaagttaaatgaagtcatattggagtagagtgtgcccttaatcaatatgactggtgtctttataagcagatgcccgtgtaaagttggggcctgatgagttgtgattggcctctgattagagcacagcatagccgaagaagagagtgtacacaaaagaaaagaagtccagaatggtaggtgaaggcaattttctttggcttccaacttcccatcttctcctgctttcccctatttttagtagtct

SEQ ID NO: 758824 - DNA, 612 bp, Homo sapiens
accatgtaataagatatgccaccatttatttaaacattttcccattatgggcacaagtcactcctccccacaatattctgtggttacaacaatgtactgaaggaatcgtagtacacaacatctttgtacattcttacaagtattctataggataaattcctggaagggaaatgtctgggtcaaagcataagctaaattttaaatttttgatgttacaggccgggtgtggtggctcacacatgtaatcccagcactttgggaggctgaggcaggtggatcacaaggtcaagagatcaagaccatcctggccaacatrgtgaaaccctgtctctactaaaaatacaaaaaaaaaaaaaaaaaaaaaaaattagctgggcgtggtggcacgcacctgtcctcccagctacttgggaggctgaggcagaagaatcacttgaaccaaggaggtggaggttgcagtgagccgagattgcgtcattgcactccagcctggcgacagagccaagactgtctcaaaaaaacaaatttgatgttaccaaactaccttccccaccaactgcagatgatcttacatttttgccagtcgtgagtgcagtgcaaaaaacaaatctt

SEQ ID NO: 758825 - DNA, 609 bp, Homo sapiens
gaggtcaggagttcgagaccagcctggccaagatggtgaaaccctcatctctactaaaaatagaaaaattagccaggcatggtggcgggtgcctctaataccagctactcagaaggctgaggcaggagattcgcttgaacccgggaggtggatgttgcagtgagctgagatcacgccactgcactccagcctgggcaacagagcaagactccatcccaaaaaaaaaaaaaaaaaaaggaaagagagagtataatttaatcttctctgtggaaataaacagcaaaaagaagaggtactactgtgttacaagtagctatggaacttataaaatatgtattagtaattctcattaagtgtaatatactctcagtctccaataatctggcaaacatgaaygtaaatatttttcccttgggtttgaataaaggtttgtgaaaatataaaataattatgtgtatgtgctctacgtgacttttttttgcaaatttataacgccagaagtaaacatgtatcttttcaccttctcctctttgaaaccatgcgaaattggaactgagtcacagtccaagaaataagcccatgagaggggtctgtctcatgtctgagggg

SEQ ID NO: 758826 - DNA, 557 bp, Homo sapiens
ttcactttataaaggtggatgctgtatttggtgcatatatacacattagtgttatatctacagtgaattgtggcatttatcattaaaagtgtcccttttatcatacttaatacattttggcttaaattatactttaatactggtmtagcaactcatggcttcttgttgtttctgattgtctgcatatctttgcctgtcccttttttaggtgaatcattttgttttaggtaagtcttttgtatacagtatagattcgggtcttgtttgtgagttgaaacccctttttttaataggtgaattaaaccatccacatttatgaatattactaagaaatttgatctcaactgtcatactgtgttatgattactgtgtgcattactattttattcttcattatgtgttttgtttgcatttttattaaacttttttggcatttaggaagttttctgtctgttctgttggttatctttgtatttatatccctttaatgctgttaatcccctgttttattcatttataatttcacttgtcatttttaatagtatttttttatttgc

SEQ ID NO: 758827 - DNA, 515 bp, Homo sapiens
aggagctgtggggttctgcaggttatggatcccaaacttggcagtactggccaaacctctgtaccaagtcacaaagggaggcgaccacgaaccttttgaataggggtctcaacagcagcaagccttctgtgagttgaaagaaaaactcatgtcagccccagccctgggtctgcctgacctgacaaagccatttacactatatgcatcagagagagaaaaaatggcagttgaggttttgacccagactgtgggaccctggccgaggctggtggcctacctctctaaacaactagacggggtttctaaargttgccccccatgtttgagggccttaacagcaactgccctgctagaacaaaaagcagataaactgactcttgggcaaaacctgaacataaaagccccccaatgctgtggtgactttaatgaataccaaaggacatcattggctaacgaatgctagactaaccaagtacaaaggcttgctctgtgaaaatccccacataaccattgaa

SEQ ID NO: 758828 - DNA, 688 bp, Homo sapiens
tagcttatggaacagccccctttgaagatctccaggtggacttcacagaaatgccaaaatgtggaggtaacaagtatttactagttcttgtgtgtacctactctgggtgggtggaggcttatccaatacaaactgaaaaagctcgtaaagtaacccatgtgcttctccgagatcttattcctagmtttggaccacccttacgaatcgcctcagataacgggctggcgtctgtagctgacttggtacagaaaacagcaaagttattaaagatcacatgaaaactacatgctgcctaccagccacaaagttcagaaaaaggtaaaacacataaactggcactcaagcagctactgaagaaatattgccaggaaattcatttaaaataaaatcaagtttttgcctatgctcctcctccaagtcaggtgcacccccaccaaacaaactaggtagttgccctataagattttgttcagtcggccaccccgcaaatcataagtcccccaaattaaaagtaacctccaggaactaggggaattaaccttaaaaaaagcaaatgcaggcttcaggaatagccatacaaagtgttcataattaagcacacaaaaatgcctataagcctgacactcctttaaatctggtgactctgtttcggttaaaaagtaaaatctaatttctctaggatccatat

SEQ ID NO: 758829 - DNA, 581 bp, Homo sapiens
ttggacaaaggatgctgcaagacacatggtgtgcccaacccctggctggcccatagcgtttatgatggggctggctagtggggaacatgtagtactcccagcccaagtgccacagtgcatagagcaacattggggtaacaccactgtgggatgggtacctgtcacagcctttgcaaacataacacatgtcactaccaaggtcaggccctgattgactttgtgccccctgggagtctatgggtctgtggggacacagagtagatttacctacccgygaactgcactggacattgtacctgggggtggccttatgtgcctgccactgttctccccatgttgccctgatgcccgcataactgggagatgctacactcttagtttgtgtgagtgcaatgagcccccagcagttctaccctttggcagtgactatccctggagtgggtgtcataattgtagaagcacaggttactgctcgagcagagcacaccactcgggctctgaattacacccaagtggcccttctcttgttaacagatgaggctgatcagatcagaaaggtggtgttgcaaaactggatggcc

SEQ ID NO: 758830 - DNA, 581 bp, Homo sapiens
ttggacaaaggatgctgcaagacacatggtgtgcccaacccctggctggcccatagcgtttatgatggggctggctagtggggaacatgtagtactcccagcccaagtgccacagtgcatagagcaacattggggtaacaccactgtgggatgggtacctgtcacagcctttgcaaacataacacatgtcactaccaaggtcaggccctgattgactttgtgccccctgggagtctatgggtctgtggggacacagagtagatttacctacccgcgaactgcactggacattgtacctgggggtggccttatgtgcctgccactgttctccccatgttgccctgatgcccgcataactgggagatgctacactcttagtytgtgtgagtgcaatgagcccccagcagttctaccctttggcagtgactatccctggagtgggtgtcataattgtagaagcacaggttactgctcgagcagagcacaccactcgggctctgaattacacccaagtggcccttctcttgttaacagatgaggctgatcagatcagaaaggtggtgttgcaaaactggatggcc

SEQ ID NO: 758831 - DNA, 619 bp, Homo sapiens
aacaagacaaaaacatttccccaccaagcacatccatatgaggggtatgcttatgcatattagtgttcccaggtacaaagctgcttcatttcagctgccatgacttgactttcattgttttaagggcaatttgaatgcatgggattcactggaacacagatgcactctcctcatctttcaaaacaatcagcagttagattacaacaggctttgattaatgcagggcttgcatgagaatgcaagccaacgtgtgtctaattgtttagcaacaaacataggcccccatttaatgctctggaaattagcactctctttaagagccaaatcaaatattgtattctggctctgcagaccacaggcatctaacagtccgcaggtactactgttgtcctctagaataactgtgctggtttagtatacaaagacttttggttaggggagtctggattttcagcaaggtctttaaaragtgtgcagtgttgctagtcctttacatacgctggaatttaatgtcggtaccacttaacatcagatcttcatctgggtagaacaatttctgtaggaaagacatggtaacagaataccaaaatctgaacttaggttaagagcaaagaaatac

SEQ ID NO: 758832 - DNA, 591 bp, Homo sapiens
gctgacatccttatcttaccctaattaccacccaaaggtcccacttctgaccaacatatgaatttgataattatctttccagcaaatgaaaatttcggggacacatttaaagcctagcaaggtttgaggtggagagggagagtaatttttaagtaagaaaggtaacacaaaaggcattttaagaatgatagccttacctcataaaaaataaaacttttttagccgggcatgttggcacatgcctctaatcccagctactcaggaggctgtggcaggagaatcacttgaacctgggaggcagaggttgcagtgagctgagatcatgccattgcactccagcctgggcaacaagagcgaaaactccgtctcaaaaataaataaataaaaaataaaacttttcatatggcaaaagatactgarcaaagccaaaaccaaaagatagattggggaaaaagcatttggaaaacatcgcaggcaaagggttcatagcatgactacactagaaaacccttcatattagtaaaggtaccaaagaaaatctagtaaaacctgactaaatattataaaagaaaatgtatgaaagaaaaaatg

SEQ ID NO: 758833 - DNA, 633 bp, Homo sapiens
atacaccatggaatgctatgcagccataaaaaatgatgagttcatgtcctttgtagggtcatggatgaagctggaaaccatcattctcagcaaactatcgcaaggacataaaaccaaacaccacatgttctcactcataggtgggaattgaacaatgagaacacatggacacaggaaggggaacatcacactctagggactgttgtggggtggtgggagggatagcattaggagatatacctaatgctaaatgacgagttaatgagtgcagcacaccaacatggcacatgtatacatacgtaacaaacctgcacgttgtgcacatgtaccctaaaacttaaagaataataataaaaagaaaaagagtaaaaagttcatattaccttttagtcatctcttctataggataaatgctctattcattttacctctctttatatgagctattttycaaattaaattagctttttattccaatcctgactttttagaagtatgacaaataaaactggatagaaataatacacaaagtaaaatattgccaagctatcaattcctagtcttgtaaagtcacattgcttttcatacaacccagtaacagattggctttgtccatgacagcactgcattcct

SEQ ID NO: 758834 - DNA, 626 bp, Homo sapiens
agtgtaagacaattcttgacctcattctttaaacaatggatcaatttgaaaactagatggcattgctgagcttccatgaatagttaaatacaattaatacatgtgttaaaaataatttgaggaagatattttgaagatccaaaggcaagcacaaatataaatcctaactgttggccttccttcctgcatacagtctagtcttcaaaagttgcccagagttatcccatctcactcacagaagtcagtgtccttttgatagcagacaasgcctgcattgtctgttcctgcctgaattctaaacccattgcccctcactacctaacttctgacttctctggacacctttttctgtcttgtttccttcaggcacacttgctgccctttctcaaaaaaccctttttgcctcaggccatggcacttgctgttccctctgcctgaaactctcttctaccagacatttacctgtataggctattcccttacctcctttaggtctctgttcacatgccaccatatcagaaacgtctttcctatttctaccagttttaacacaacaaatttttaaatattttacctttatatctacagctctacatgctactagtaggaattaagaaacaaaggaa

SEQ ID NO: 758835 - DNA, 626 bp, Homo sapiens
agtgtaagacaattcttgacctcattctttaaacaatggatcaatttgaaaactagatggcattgctgagcttccatgaatagttaaatacaattaatacatgtgttaaaaataatttgaggaagatattttgaagatccaaaggcaagcacaaatataaatcctaactgttggccttccttcctgcatacagtctagtcttcaaaagttgcccagagttatcccatctcactcacagaagtcagtgtccttttgatagcagacaaggcctgcattgtctgttcctgcctgaattctaaacccattgcccctcactacctaacttctgacttctctggacacctttttctgtcttgtttccttcaggcacacttgcygccctttctcaaaaaaccctttttgcctcaggccatggcacttgctgttccctctgcctgaaactctcttctaccagacatttacctgtataggctattcccttacctcctttaggtctctgttcacatgccaccatatcagaaacgtctttcctatttctaccagttttaacacaacaaatttttaaatattttacctttatatctacagctctacatgctactagtaggaattaagaaacaaaggaa

SEQ ID NO: 758836 - DNA, 577 bp, Homo sapiens
tattcaagtctctgtttaaatatcacctccaaagacaggctttccctgaccatacatactaaagtgttaccttccccaacccacttgtctctagcccccttaatctacatcattttgctttacagcatccttatatgtattagaaataaagtttaattcattttcaatatttggccaggatctgttatttgccttttaccttctggtaggcttaacaaacagatgcttactttaacactgttctgacatcccggaaatatataatattaatatttgtataaggacagatgttactaccctatttaataagtgtaacaatgttagtamtgtcaacaaggcatgacatttagatttatttaaaaatattcgctatatgctacttgaatgaaaaccccttatgtgctctataggttgaaattatcttagtctgaatcattactatgtgtttagtatagcaagagaagaatttaaagaataattattataaaaattgttatttttatgttaaagatttcagaacttatggttcaagaaatagattgataattaatataaatattagattataatagcaaga

SEQ ID NO: 758837 - DNA, 577 bp, Homo sapiens
tattcaagtctctgtttaaatatcacctccaaagacaggctttccctgaccatacatactaaagtgttaccttccccaacccacttgtctctagcccccttaatctacatcattttgctttacagcatccttatatgtattagaaataaagtttaattcattttcaatatttggccaggatctgttatttgccttttaccttctggtaggcttaacaaacagatgcttactttaacactgttctgacatcccggaaatatataatattaatatttgtataaggacagatgttactaccctatttaataagtgtaacaatgttagtaatgtcaacaaggcatgacatttagatttatttaaaaatattcrctatatgctacttgaatgaaaaccccttatgtgctctataggttgaaattatcttagtctgaatcattactatgtgtttagtatagcaagagaagaatttaaagaataattattataaaaattgttatttttatgttaaagatttcagaacttatggttcaagaaatagattgataattaatataaatattagattataatagcaaga

SEQ ID NO: 758838 - DNA, 514 bp, Homo sapiens
agctaataaaaatttatagagaaatcttaaaaagacttgagacaaggttactgcaacaaccttggagcagactccctgggataaaactctctgactagttctctaacattgtacaagttgattaacctctgtgtgcctcagttttctgatttttaaattggatataataataggacctatcttatggggttcttatgaggcttagataagtaaaaagtacttagaatagcacttggcaaawagaacttaatgagcggtagctatgattactgttgttagtggttaatgtggtttggcactgtgtgcccacccaaatctcatgttgaactttaatccccagtgttgggggagggacctgatgggaggtgattggatcatggggcaaatttcccccttgctggtctcatgatagtgagtaagttctcatgagatctggttgttaaaaagtatgtagcacctcccccttcgcggtctgtcttcctcctactccgacacgtggagaaggtgcttgctt

SEQ ID NO: 758839 - DNA, 514 bp, Homo sapiens
agctaataaaaatttatagagaaatcttaaaaagacttgagacaaggttactgcaacaaccttggagcagactccctgggataaaactctctgactagttctctaacattgtacaagttgattaacctctgtgtgcctcagttttctgatttttaaattggatataataataggacctatcttatggggttcttatgaggcttagataagtaaaaagtacttagaatagcacttggcaaaaagaacttaatgagyggtagctatgattactgttgttagtggttaatgtggtttggcactgtgtgcccacccaaatctcatgttgaactttaatccccagtgttgggggagggacctgatgggaggtgattggatcatggggcaaatttcccccttgctggtctcatgatagtgagtaagttctcatgagatctggttgttaaaaagtatgtagcacctcccccttcgcggtctgtcttcctcctactccgacacgtggagaaggtgcttgctt

SEQ ID NO: 758840 - DNA, 595 bp, Homo sapiens
ctaattacttttaaattatacagcatttcttgcataaattctttttttataactttttttctctttcatgactttcgcagacaattctacactatgcctcaattttctattgcaaacatttctttctttaaacaaccagttaatttatttcagaacaagaatttaccatataacattctttttacataaattctgccccccaattttttttccctttttttctcccttttttttgaaggtgataaccatttttttccaaagcgaacttcctttatatckgtgaactagactgtctaaggccacaagattagaagttactataatacatgttacactgttaacttttagcaaactttacttttgttgaaaaccttttaagtttgagattttaattatctgttgctattaatagatgttgtttagtccaaattaacttagaattggtatagatggctttttttttttccttcaattatgtgagaggaaccatctatcgtcctgtcctgaagggagttcctcctaggtctggttggacctttgtatggtaattaagacttagatcccctattaggaaacctgccgggttaagggaatt

SEQ ID NO: 758841 - DNA, 593 bp, Homo sapiens
ggagaaagctctgtgcctcccctcccccgaatgcatagaaaaaatggagaagagaacgtaggagtaggaggagaggatgacaagcagagtccccacaatattcacaccagccaaaatagaacttatgctttctttcaggattgtgtcagaacaagagagcttgaaaagtgggggactgtcacagaagaagtgatggatgacattggagtcacagaatgacaagctgctgacatggcttgtgttgaccatgaagttcagcaaccctgcagcaaaagccccggctgccatttttaggtagacggtcctggacatgatcaaggagtaaagcagcgggcgacatatggccgcatacckgtcataggccattaacccaaagaggatgcattcggttgtcgccagggagataaagaagtacatctgtaggaagcagccagcaaaagagatggttttcttctctgataataaatctgccagcatctttggggtgatggtagttgagttacaaacgtccacaaaggacaggttagccaggaagaaatacatgggtgtgtgaagctgggaatcgatcctgattaagaggatcatcccgagat

SEQ ID NO: 758842 - DNA, 520 bp, Homo sapiens
ttggatgcatagcgtaacaccaaattattattcttccctatcaaaatgcaaaattacacaaatgattttaaatatagaatcggtgtttatttgcaactctagaattgggtaacatcacttctataaaataggataagagatccattgagctgagcagaggagcttggctttacaggcagaaaaggattggagaaagcagaartagggggaaaaaaagtagcttggggctgggcgcggtggctcgtgcatgtaatcctagcactttgggaggcagaggtgggaggatcacaaggtccggagtttgagaccagcctgaccaacatagtgaaaacccatgtctactaaaaaacaaaaaattagcttggcgtggtgacgggcgcctgtaatcccagctgcttgggcgactgaagcaggagaatcacttgaacccgagaggccaagtttgcagcgagccgagatcgtgccactgcactccagcctgggagacagagcaagactctgtctcaaaaaaaaaaaaaaa

SEQ ID NO: 758843 - DNA, 651 bp, Homo sapiens
acaaaacataatatggaaaactggaaatatcagcaatttagaatccttgtttctgtaggtccaggcatctgggggctttctgtgattccttacatggaagcatctttttctaaaccttatatttcctaccacataaaggacacaacccatgaataagctgctttcaattttcgagattacattcatcttctatatgaatgagtgcatttttgaaccatttactggatgctctcaaaggttgacaactttgtttaaaccttctctttctaacataggtccacctattaaatagaaagcccttctggaagccacaaaactgatttcaattttcctaccaggtatagaagagaagcyaggtgggatcctgtatttatccactccctagtctgtcaatcttaagaatcataaggtatagactatgccatcatcaatcatttaaagaacattacaatctagagcagtgttataaagtattaaaaaatactgttgcaaacagtgctataattgttagagaaaacgtagagtcatggaacaagtaccatctgttgaacaagtggccttgagtcatctcaatcttgacaagaatttgatgtgtgcaattattattcacaatttaaaaattagtaaacattagtttaaatgagtagttca

SEQ ID NO: 758844 - DNA, 547 bp, Homo sapiens
gcaacctttaaaaactatttaaggctgtgcacgttggcgcacacctgtaatcccagcactttgggaggccaagggaggtggatcacgaggtcaagagatcaagaccatcctggccaacatggtgaaaccccgtctctactaaaattacaaaaattagctgggcatggtggcacacgcctgtagttccagctactcgggagtctgaggcaggaaaatcacttgaacccaggaagcagatgttgcagtgagccaagatcatgccactgcactccagcctagggacagagcaagactccatctcaaaaaacaaaaaacaaaaacaaaaacaaaaaaccacactcacacgcacacacaactatttaaaagtagaargaggaggaggaagaggaagaggaagaagaagagctgtacactatgcaaagaagaagatggatggaacagataaagtcaatccaaggctcatggtatgctcagcagagcagatactgcttgaagcccctccctaaaggcttcatgcaacctaaaaggagaattcaacctagaagga

SEQ ID NO: 758845 - DNA, 593 bp, Homo sapiens
attctgtcaatggtgttgaaattgggaaaggaaaaagatggttatatataatttaagtggtaaatttttaaaagaatggtggtcccttataccaaaatatattttccagtaatatcagctttacaactaggtataataggtgaatgtttttgyggtataatttaaaagcccccactaatcaaaaatatctccattgcctgaaattctactgatgaagatggaattctactgatgggtcaagatataatctgactctcatagtgatatcaggttggtagaacaggaggtgaaggcaatggttgcttgggcagatattttgacagggaagagaaaggacccaaagaggtgtgaaaggtgtagagagaaggggaagcaggctgaagggtatccaaggtaaataaaacttgccccacagtgtttcccaggctgatcaggaatgccaatatgcaaacaggcaattatattcttattttcaacctacctagtcatgattttacagagagaaaattagttcctttcagcctatttctactgtgaattttggtgttctttatttatctgccaaatctgtggtacctgacaatctcccaacc

SEQ ID NO: 758846 - DNA, 593 bp, Homo sapiens
attctgtcaatggtgttgaaattgggaaaggaaaaagatggttatatataatttaagtggtaaatttttaaaagaatggtggtcccttataccaaaatatattttccagtaatatcagctttacaactaggtataataggtgaatgtttttgcggtataatttaaaagcccccactaatcaaaaatatctccattgcctgaaattstactgatgaagatggaattctactgatgggtcaagatataatctgactctcatagtgatatcaggttggtagaacaggaggtgaaggcaatggttgcttgggcagatattttgacagggaagagaaaggacccaaagaggtgtgaaaggtgtagagagaaggggaagcaggctgaagggtatccaaggtaaataaaacttgccccacagtgtttcccaggctgatcaggaatgccaatatgcaaacaggcaattatattcttattttcaacctacctagtcatgattttacagagagaaaattagttcctttcagcctatttctactgtgaattttggtgttctttatttatctgccaaatctgtggtacctgacaatctcccaacc

SEQ ID NO: 758847 - DNA, 593 bp, Homo sapiens
attctgtcaatggtgttgaaattgggaaaggaaaaagatggttatatataatttaagtggtaaatttttaaaagaatggtggtcccttataccaaaatatattttccagtaatatcagctttacaactaggtataataggtgaatgtttttgcggtataatttaaaagcccccactaatcaaaaatatctccattgcctgaaattctactgatgaagatggaattctactgatgggtcaagatataatctgactctcatagtgatatcargttggtagaacaggaggtgaaggcaatggttgcttgggcagatattttgacagggaagagaaaggacccaaagaggtgtgaaaggtgtagagagaaggggaagcaggctgaagggtatccaaggtaaataaaacttgccccacagtgtttcccaggctgatcaggaatgccaatatgcaaacaggcaattatattcttattttcaacctacctagtcatgattttacagagagaaaattagttcctttcagcctatttctactgtgaattttggtgttctttatttatctgccaaatctgtggtacctgacaatctcccaacc

SEQ ID NO: 758848 - DNA, 671 bp, Homo sapiens
ctgcattcagacatgttgatgactaacaattgctgtgtttgaatgagaggccagacaactgttactgcttgtaaagctcttcagctataatgagagtgttatatccagatgtcttattgagagacatctttataatagtaaaaaaattgcaacctgcagttgattttgtattcactggctacttatgtaggaaaaacagcatattggtataaaaagtaaagttaccctaattgatgattgagctgatcaagattcctaatggaagtgtgttgggaaaattccatgattgttcatttttggcttattcttatggagattgcaccagttggatgttttccactgaaaaatgttaccaagcaactatcgccagaacttytgttgcatctttactgtccttaaggctctatatactatttcctgcttatcatgattgtaaaagagaaaaaaaatagtcctagctcataagggagaattttcccccttcttgtatcagtgctgtgtatctgtctctgtgtatgtttgtgtgaaattgttttctttgatttaccttgttctctttcagtttgtccttatagttgggttgttccttatctttccagatagcgtgtaaatcctcttgaaaacagccactgggtttttacctccttgtaggatgcccaggctctagcata

SEQ ID NO: 758849 - DNA, 487 bp, Homo sapiens
ttaacacccatccatctaccccagtccggagaaaaccaacccctccttcccttcagtctctcactctaccttgtacagatgaccctcaatttatgacagggttatgtcccaataaacccatcataagttgaaaacgtttcaagttgaaaacgcatgtgataccccccaacctacggaacatcattgctttagccttgcctccctaaaattgctcagaatacttacaccagcacagctgactgggacatgcactgcccascattgccagagagcatcttatcacctatcactagcccggaaaagatcaaaatgcaaaatctgaaatacagtttctactgaatgcatctcactcttgcaccattgtaaagtcatttaagtagaaccatcgtaagtcacggaccgtctatagttccttttcttaaaaatgcctgtaacactttagtgcacttacagcaagcctctaaaaggcagtatcttatcctgtcat

SEQ ID NO: 758850 - DNA, 492 bp, Homo sapiens
tatggagcacttgaaaagtggctagtacaactgagatgttctgtaagtgttaaaatgacagattttgaaaacttggtataaaaaattaatgtaaaatatcctgttaataattaaaaaaaaaaaaaagaaaaggaaagasaagaaaaaagagagagatgagggctcactatgttgcccaggctagccctgaactcctgggctcaggcaattctcccaccttggcctcctgagtaggtggtgccaccatgcccaattaataattattttacattaattatacagtgaaatctaaataccatggatgtgtgtggtttaataaaatatgttattaaaattcatcccagcagatgttttcaccttttttaatgtggctattagaaaatataaaatttcacctgcatcttacattatatctccattgaacagtgctgtttggagcaagcgggagagctgaacattcatttacagaaataattgcttttttagatgcaa

SEQ ID NO: 758851 - DNA, 620 bp, Homo sapiens
agcttccgactctcacgtgtggggggcttcccagttaggaaaaacaaagggagtcagtctctcccctcctaccctggcaggaggaccacaatcaggtgagttaggtctggctaatcaaacactcccgtccaggggtctgattctagagctatgctggcaaatatgcaggccactagcccatgcagctatggagcacttgaaaagtggctagtacaactgagatgttctgtaagtgttaaaatgacagattttgaaaacttggtataaaaaattaatgtaaaatatcctgttaataattaaaaaaaaaaaaaagaaaaggaaagagaagaaaaaagagagagatgagggctcactatgttgcccaggctagccctgaactcctgggctyaggcaattctcccaccttggcctcctgagtaggtggtgccaccatgcccaattaataattattttacattaattatacagtgaaatctaaataccatggatgtgtgtggtttaataaaatatgttattaaaattcatcccagcagatgttttcaccttttttaatgtggctattagaaaatataaaatttcacctgcatcttacattatatctccattgaacagtgctgttt

SEQ ID NO: 758852 - DNA, 547 bp, Homo sapiens
gaaaggatttctccactgtgtttatttgtgtttatgtgggaataccattcaggaaaatttttcttagccaagactagcagattgcatcacatggcactgcagggagtaaggggctggaggtggtggtggccactgttaccttaaattcaactctgtctaaaagtcatcatctttcttgtaaaatcatgtcttcctgctgtctcccatttctgttaatcagtattctcctggccacctggtctcaagtctcagattaaaatttgattcccttcttgctctttctctatatcacattactcaacaaattttgttgacttsactgttgggaatttgtggccacatttcacctgattcttagtaccttatgttttcccacatcctaataggctctcttcttatccattctacattttggatgtgtctgatcttccttaaacttttctttcagtaacacttaggttctcaggaacatataactttctaaaactctaaaacatgaagttcttggcattcaagtttctcaacaccctgtccttgactggttttt

SEQ ID NO: 758853 - DNA, 547 bp, Homo sapiens
gaaaggatttctccactgtgtttatttgtgtttatgtgggaataccattcaggaaaatttttcttagccaagactagcagattgcatcacatggcactgcagggagtaaggggctggaggtggtggtggccactgttaccttaaattcaactctgtctaaaagtcatcatctttcttgtaaaatcatgtcttcctgctgtctcccatttctgttaatcagtattctcctggccacctggtctcaagtctcagattaaaatttgattcccttcttgctctttctctatatcacattactcaacaaattttgttgacttgactgttgggaatttgtggccacatttcacctgattcttartaccttatgttttcccacatcctaataggctctcttcttatccattctacattttggatgtgtctgatcttccttaaacttttctttcagtaacacttaggttctcaggaacatataactttctaaaactctaaaacatgaagttcttggcattcaagtttctcaacaccctgtccttgactggttttt

SEQ ID NO: 758854 - DNA, 614 bp, Homo sapiens
gaaaaaacaaaaaaggggtataggaggccaactaccaccttaatcaaaactacatttagccttatttactttaaattttttgactgctggtatggatggtaagactccagcagaaagacattggcaaatgttagaggaaaagaggaaagtttatccaaaagtgttatggaaaacgccggaaaaaggaaaatggaaaggtccagtggatttactgatgaggggaagaaggcatgcttgtgtttttacaggagatggacaaaccgtgtgggtgccctcaaggtgcgtgcgactatggaatgggagactggaggaacmcagggtggccaaccatgggcccagtccctctgatacaagccatgagtcagctaagcctgagtgcaaagatggagagaaggccaaccggagtcacgacacagttctaatgttacatttgtaaagagtatcaccactcaatttacagtttgtgtttttaatccttatgtctttttggcagctaagaaggaccagctctaggtaaacaatacccaattgacctataaatcttgccagttatatcactgcattaatcatagcacattgcaaacatgtaatatctctactttgttgattttagg

SEQ ID NO: 758855 - DNA, 596 bp, Homo sapiens
tgagcggggcctcttccagttttctgagtcatgcagaagcctctggcagttctagagggtgcatctgcgtctcccactcttccagcgcaagccggctccatattacgctcccagtcctaaaacagaatgactaacgtgggattcccaccgtggcgagtgtgtgtgcatgtgtgtgtgcgcatgcactctcccagggaatctcccacccgcctccaggctggcccgcagcctctctgccttctgtacmtcttccagagtggccatgtgggaagcagtccacgtgagaatgtcagtacagggactgaggaggctgggccttggggggcccccctggctccctggcctaattgcctctgaccttgggttttgcattcctcacttgcaaagtgtatacaagggtagtgtatgaatctaagctttcttctggaccctcacagcctctccatctctatgccctagacagccttccccacaatgagatagcagtaaaaatgacaattgcagctgctgtttactcagcaccaatagttgattatctcatttaacccccacaacagacccctgatggatgagaaggctgaggatcagcgaggccc

SEQ ID NO: 758856 - DNA, 555 bp, Homo sapiens
ttggccatggagtttggatctggagacagttattggggatccacacctgtgaagagaaaaggaaggaacaagttggggcagagagaagagctgagctgtgactcaggctagacaaagccccagttaacctagcagggagctggctggcgtgagttctgcccagcagcgtgacccacatccagtggaaacaaaaggctgacctctaagccctgctgcactcygccgcctgatctgggctgccccaggagggccatgacctagggcggggtggctctcctagcagaggtagaccttggaggagccgacagctgcaggccacctgctgacagcagtatagctgccagtgcaccacacctgctagccattttagtgaggagtgtgatggcatcttcctgtgactttaatctgcatttccaagatgttaataatgcttatatgataattggctatttagatgtgctttttggtgcagtctctgttcacagctttttgcccactttaaaaactgggatgtctgtctttttctttctctttttctttttgagacagggtctt

SEQ ID NO: 758857 - DNA, 632 bp, Homo sapiens
agataaaggaaggctaagagagagacgaagaggagggcagagagcccaagagtgacagacgaaggaagagactgagagaggtagacacagagagagctagggaaagagacagagagaggccgattgccatgtgtggccccagcgaggcagctgttttgcrttttactcagtttgttttcagccctgacttccatatcctataaggccacctgggttccaagcctgtccctgaatctccacgaccctgagctgtacttgcttccaatgaagacccgattaccttgtgcggacttgagggaggccctctttctcgtgcagcctgaaatgtgtccccggtgctgggtggtcattcctttcttgtgtgtcagcctcacctcaagaactaggagtgtctggagggtaggaagacgctgccacccacttgcatcctctaatcttccacagctgaccccagtgggtgaaggtcagatagctgagttgagcagttacttcatcatctctaccaggaagcattcaagggcgttacaaggtgctcatacccttcagatgtgcttgggacaatggccccagcccctgggcctccctgctaggtcctggttgtgggactggggagaaactggtgggggcaacag

SEQ ID NO: 758858 - DNA, 623 bp, Homo sapiens
aatggtgccagttgcttcagtcattactttgaatttagtgtcaaacatgtgtagtgacctgcatgaaaatgttctgcctctctggcttccatctgagatgatcctgccccatgtcagcccagccttcatctctgccagttctcaggcaacatacttgtaaccagtcgcctccctgcacactcctctgaacrtgcctatttatttcattcaggataagggtgaattttgatcacataaacatacattcatttacttctcctaatccatctttaggaaatctatgtgaagaggacagcatccactttgaatgagcccattacagctcacctttatttggttccctgtaacttcatcatccctcgataatcctccaagaaaaatgaggcataagataaaatctttgagaggacatgaagagcttcattgaatgaacggtcattccctctgttattcaggtaatgtcaatgtgttttgtattaataaattctagatccaaaaaaattaataaacaaacatggtaataattattaatataattcacaccataattttctgctgttttaaaaaagatgggcttctcccatatacttcacttaaacttttaatgcatttagatttttaga

SEQ ID NO: 758859 - DNA, 636 bp, Homo sapiens
ataaccagaagtccagggagagtgctttggatgttaggagtaagatttaagctttgtttcctataattctctcaggaatgccctctgccatggatcatctgcattcttaggctgggcttctcatgatcataagaagggggttgccaaaaaaagtttcgcattcatttttgaatcaaartggcaaggaatttagaattgccataaataagttcaacaaatcagaattcaaccctggaactagaacatacctctaaagccatactattgcttcatgacagggaatgcgtggattgaaagctgtactgtcaatcccaatgctcactacaacaaaacaatatgacaagacagtaaaaaggggtgtagtgacaaaggaaccattattattgaatacctacaatatgcagacacttcatgtaccttgctttatttattttttacaataacaccatgagatggggcttgttaacattttagcaataaggatacaaatatccagaggttaagtaacttattcatagaaagagagaagtagaatcagtccactttacactaatgtatgacctgagatgttgatatcttgctgtaatttaataatgtggcatgaccttgatgtgactttggaaaataaagattttg

SEQ ID NO: 758860 - DNA, 599 bp, Homo sapiens
ttatatattgttttgatctttttgtacctatgtttttagtataaaatttctggatgcaggtagggctgtcaactaatcaataacaaataaacaaataataatcttcatgcttggtgttcaaccatgcaggaaataaaatcttatagaacgtacagaagagccaggaaggatcacacactccactgtgctaactrcatacgaaggagaaggggaagaaggctcagttttagtggaaaggaataggaaagagaagaggcctcttcctttatcagctccctcacagcttcagcagcactatctcaccccactaaccaaacatccaaaggacttggaggcagaaaagaaagcttccggagaccttggaattatgtatgcatctatctatgtatctatctatatatctaagtatctatgtttctatctacgaatcagccattttatcttccacctctatcatctaagttaacctttctctaatatttctctaaggctaatctcatcatctttgtcttaaagaagcagactcagaattaagtaatgttttcaacgtcaaagaataagtagatctgggatttgaacctatgcccatttgtatgtga

SEQ ID NO: 758861 - DNA, 599 bp, Homo sapiens
ttatatattgttttgatctttttgtacctatgtttttagtataaaatttctggatgcaggtagggctgtcaactaatcaataacaaataaacaaataataatcttcatgcttggtgttcaaccatgcaggaaataaaatcttatagaacgtacagaagagccaggaaggatcacacactccactgtgctaactgcatacraaggagaaggggaagaaggctcagttttagtggaaaggaataggaaagagaagaggcctcttcctttatcagctccctcacagcttcagcagcactatctcaccccactaaccaaacatccaaaggacttggaggcagaaaagaaagcttccggagaccttggaattatgtatgcatctatctatgtatctatctatatatctaagtatctatgtttctatctacgaatcagccattttatcttccacctctatcatctaagttaacctttctctaatatttctctaaggctaatctcatcatctttgtcttaaagaagcagactcagaattaagtaatgttttcaacgtcaaagaataagtagatctgggatttgaacctatgcccatttgtatgtga

SEQ ID NO: 758862 - DNA, 599 bp, Homo sapiens
ttatatattgttttgatctttttgtacctatgtttttagtataaaatttctggatgcaggtagggctgtcaactaatcaataacaaataaacaaataataatcttcatgcttggtgttcaaccatgcaggaaataaaatcttatagaacgtacagaagagccaggaaggatcacacactccactgtgctaactgcatacgaaggagaaggggaagaaggctcagttttagtggaaaggaataggaaaragaagaggcctcttcctttatcagctccctcacagcttcagcagcactatctcaccccactaaccaaacatccaaaggacttggaggcagaaaagaaagcttccggagaccttggaattatgtatgcatctatctatgtatctatctatatatctaagtatctatgtttctatctacgaatcagccattttatcttccacctctatcatctaagttaacctttctctaatatttctctaaggctaatctcatcatctttgtcttaaagaagcagactcagaattaagtaatgttttcaacgtcaaagaataagtagatctgggatttgaacctatgcccatttgtatgtga

SEQ ID NO: 758863 - DNA, 604 bp, Homo sapiens
ttaaaacagcgcctggccaagggggacctctttcaatctcaatttgctggaccactgacagcactgaacttgaacaaagtggcttgttttcacagccgaggacttggcaactctaagggcccaacttacaaacgtggaaagataggcacagagaaaagataagcagacccagcttcccccactgcagccagagccaggtgctgaaatcacagatctgaccaccattgcccaccctccctgccccgccaccacttacttccaccggctccccttggctcttcattagagtccagtcaacaccccccsaggtgtgcagagccctccagctcatctttagatgccccctcccttgcactctgttcctccattctgatcttttaaaaaaaattttatatttcattgacaataatagtatatatttacactatttatatactataaactatataaactatatttatactatttatatactatagtgtatatatttataaactatagtgtatatatactataaatagtgtatatatactataaatagtatatgtatttatttactataaatagtatatatatactataaacagtataagtatttatatac

SEQ ID NO: 758864 - DNA, 669 bp, Homo sapiens
ataaactctgcagtgaaggctctttagattcaaatctatgttgaactatttcaattttatgattttttttttttaaaaaacagagagtaacccaaagcttaccaggtgatccttcttagtaaaagggatttgtgggctgtggatcagcttcccactgattcatctgagatgaagacaggaccctccatcctgcaaaaatgggtttgaaaaaagaaaggaactctccatttacacgtgagaatggctcagccctaagaatgctgcttgcaggttcactgttctgcatttagaatccaggcctagagaagcagcayggcttgcctctgctgtgaatcagactctatcttgtgttgttttagagtcatgtctacatagctgaaagatgatttggatctttttcaagaagagagtggtaaggtgaggtacagtgaggcagaagacaatgctggtcaatgctttaaaatcactctctgagaggaaaacccttggtttctactctctgctgatttctgtgttaaaaatactcccaccgtggttgaacgaggtcactgaattcagagttagggaaagaggcacacaatcagctctcacgagctgactctagcccttcactgggcagaacgcttttctcctcttctacagctgcccacggaatgctctgaatctagg

SEQ ID NO: 758865 - DNA, 661 bp, Homo sapiens
cctgtgctaagagcttgagagcttgacatgtaccaacttatactattcacagtgacctccaagggagatgctattactgccattttccagttaaagaaaccaaggcttaactaagtgagccaaagtgcttatctagtttattcacagatacctccagtgacagggaccatgyagttcttctccagccagctctgactctcagaaactgcttctctataaggtgtaatgtgtctccctataaatcaagcagtagttattaactgctaaaattctggcaccatgctaggcattttagatttaaacaaattatgggtgttatttgtatatttatatatatttcaccttattttaagagctatttggggaaaatagaaggaaacttctgatatataacaatggcaaaatataaataagattagagaagcaggatcagggaacgtgtaagtaaaattgaaaactatcatgaccagattaaaaatatactatacatattatatagaacaagaaagagtgcatcaatttatttcgtatttcacctggacttcctggcaaccaaaataaaatgggagacattgtcaattcacagttcttattaatcaaatgatcattaaaacggggtagccattttcttgaaatgaaattgtgagaaaactctctcata

SEQ ID NO: 758866 - DNA, 613 bp, Homo sapiens
tccctcctgacctaatcacctcttaaaggccccgcctattaatatcaccctattggccaccagtttcaacacatgaattttggaggggatagattcaaatcatagcaccagtctactgtgaactatgtgacctgagtcacattcttaccattttgctggaaaaagaaacgttaattccggtcaatttaaactacattgaatcccaaactcaaattacccgagggaaactggaaacttgctgaaaggtattaacattctggcaccccctagtggccacctgaatattctgtaaaacccgattttttttcccattttgcttttctttggtgtggcacgtttttcgttttcagtttatttactattacttcaccccatttttaaaccttttagaaaataaaagggaacatcakttcatacagaagacacttctaacttgtcgattcccactaatcttacatttcttggggcagccaccacctgtatcttctgtgtatttgtcctacacacaattgaacacagtagttgctcaatgaatgactgattgataggtaatgcagtccagtgtttgaaatatttcttgttttgttttgctttgttttttgagatggagtct

SEQ ID NO: 758867 - DNA, 627 bp, Homo sapiens
atctgatatacacatatagttcattttacataattggttcattcctgaataaacccaaatttaataaataaatggtgattatacttggcacttaatactcgaagaaatgtgatgatttgtaaattacaaataattttttaaagtatttagtaaaaacgagtaaacaccttacaatgtactggttttggaaatctaacttttcaaacgctgagtgacattaatctttaacgttatcttttctttgtatttcagaaatacatgtaattatttctgcaagaaaacacaattttaaacaarttttagtttatatctttctggctttttatcaaccgaaagggaacagaaaattcattggaaatatttcatcatagattaattcattcaaaaaataactactcatggccttctgtatggaaggtaatgtgctaagctcaggggaaaacaaaaatgagtaagtcacattcttaagacttcagaagtttacaatctagtatgtcaataatttatttggctttaaaaatgctgttagaataaacatttttttaaaaactatttgaattgctttattcaaactgggaatctgttttttgaatttccatgcacacgcaatagcatgaattttacaaa

SEQ ID NO: 758868 - DNA, 507 bp, Homo sapiens
agggagaatttgagacccagtgagatggaaaaataaatgaaactttagtgtagtctttcatttaggacaaactgtaccaatctctaccagtgattctgaggttactaccatttttttcagtctctggttcctgagggttgttgcttatagattataaattaaatatccagggtataattcaatattaccaacaaaccaaaataataaaatagagtcctagactgtcattaaaatcttctgcctacawtgatggtcttattttttttcttcacgtttttacacatgaatattttggtcttttttatttcttgtctctctgtctttacctagttctttcttctgtctatctaaaatgattattctgctctttgttataatagctttagatggccaaatcataccctggtgttctaagattagcagatcatttcatactagaaaaaatagaactggtcctaaggagaatagaccagcaatcaaaattaatgtctgttgggttgagggtga

SEQ ID NO: 758869 - DNA, 624 bp, Homo sapiens
ttgcaaatgatttttatgatagggaacactaactatgaatcccaatttagcaaaaatattatccctgccattaaaaaaaaaagttcagttcttctcactagtagacaactataacaaaaatttgtactcaatttttattatattttgattttcatcaattaaaaatttgtggaaatttgttttccctcttgttacataaaaatctgtacagtatcttcaattttgcctgttggcccacagagtccaaaatatttactatcacaactttttattaagagacaaggtctctgtctgtcactgagacttcagtccagtggtgcggtcatagctcgctgcagccttgaactcttgggcttaagtgatccttctcacctcagcctcctgagtagctgggactacaggcacatgcaattgtttctatgttttgtagagattgggggggtctcactttgttgcccaggctggtcttgaactcctggcytcaagtgatcctcccatcttggcctcccaaagtgtgggattataggtgtgagtcaccacacctagccactatcacaccttttgacccataaaaaagcctttacaaaaaaggcttgctgaattcttaaacagaccatggaatta

SEQ ID NO: 758870 - DNA, 538 bp, Homo sapiens
aaaaaaaaaaaaaaaggtcaaatatacggtagacatttaccatctggagaaaagcctattcaacatctgaaccatttctttgttgaggaatttttttttgccctgtgaatcggttaagcttctcactatatgagcagaaaaagtcaaatgctttaccttcccaacccsctttgagctaggatattggcaattgaattagagtcagcaagtcagatgtgcctgctaaggagtctgagataataaacccaagatgcaggtacaatgaagaattaaatttttgacagtggcacagcattcttcttccagggagtaacactgcctgtgccaccatctgcaattgaatagggaatgcttccctgcaatctgtggaatatgtcctcagtctcagagcagcagtgtccctccagactgattctgtagcatgaattctatgtaattctggctggctgaactcccctttttcctgtcagttttccgtgcccggttcgccagcctcgctggcaattccacgagccacgtggaatattctttaaaaaaa

SEQ ID NO: 758871 - DNA, 621 bp, Homo sapiens
tctgcaattgaatagggaatgcttccctgcaatctgtggaatatgtcctcagtctcagagcagcagtgtccctccagactgattctgtagcatgaattctatgtaattctggctggctgaactcccctttttcctgtcagttttccgtgcccggttcgccagcctcgctggcaattccacgagccacgtggaatattctttaaaaaaaaaatcattgaggtgaaattacataaaattaattattttcaagtgaagaattcagtggaattgattctactcacatgttgttcaactgcttcctctatggcatctccaatactccaaagtaaaaccctcttaccaatgaagcagtttttccacactgtccactcgccccagttcctgcaaaccaccaatatgcattctgtctctacagatttatctattctggatattttattataaacacatttttaattataaatatatratagttgtacatatttatgaggtacatgtgattttttgatatagacatacaatgtgtaattatcaaatcagggtaattgatttatccaatacctcaagcatttatttcttttggttagtaacattccaattccacttttagttattttgaaa

SEQ ID NO: 758872 - DNA, 628 bp, Homo sapiens
actgtatttttggaccaattaaccatccctagtatagtcaccctactgatctatcaacactaggtcttatttcctgtatcatactgtatgtttgtacccattattcaacctattttcattcccccacatctttctggcctctggtaaccaatctacgtcatgacatcttttttagctctcacatacgaaggagaacatgtgctatttgtgtttctgtgcttggcttattacacttaacataataaccttcagttccatctatgttgctgcaaatgacaggatttcattttattttaaggctggataatattccattgtgtatatatactacattttctttawgtattcatccactgataggcacttcggttgattccatattttggctattgtgaatagtgctgcagtaatcatgggagtgcagatatctatttgatttattgatttcctttcttttggatatacactcagtagtggaattgccagaacatctgatagttctatttttagttttctgaggaagcttcatacagttttctatagtggcggtactaatttacagtcccaccaacaatgtacaggtgttcccctttttccacatcctcgttagcattgattattccctgtg

SEQ ID NO: 758873 - DNA, 628 bp, Homo sapiens
actgtatttttggaccaattaaccatccctagtatagtcaccctactgatctatcaacactaggtcttatttcctgtatcatactgtatgtttgtacccattattcaacctattttcattcccccacatctttctggcctctggtaaccaatctacgtcatgacatcttttttagctctcacatacgaaggagaacatgtgctatttgtgtttctgtgcttggcttattacacttaacataataaccttcagttccatctatgttgctgcaaatgacaggatttcattttattttaaggctggataatattccattgtgtatatatactacattttctttaagtattcatccactgataggcacttcggttgattccatattttggctattgtgaatagtgctgcagtaatcatgggagtgcagatatctatttgatttattgatttcctttcttttggatatacactcagtagtggaattgccagawcatctgatagttctatttttagttttctgaggaagcttcatacagttttctatagtggcggtactaatttacagtcccaccaacaatgtacaggtgttcccctttttccacatcctcgttagcattgattattccctgtg

SEQ ID NO: 758874 - DNA, 608 bp, Homo sapiens
actggatcctcatctctcaccttacataaaaatcaactcaaagtgaattaaagacttaaatctaagacctgaaactataaaaatttgtgcagattagttacatatgtatacatgtgccatgttggtgtgccacacccatcaactcgtcatttaacattaggtatatctcctaatgctatccctccccactctccccaccccacaacaggccccggtgtgtcatgttccccttcctgtgtccatgtcttcttattgttcarttcccacctatgagtgagaacatgcggtgtttggtttttttgtccttgcgatagtttgctgagaatgatggtttccagcttcatccatgtccctacatagggatgcattccctacttaggcaagcatttcatgaccaagaacctaaaagcaaatgcgataaaaacaaagataaatagcggggacttaaactaaagagcttttgcagggcaaaaggaacagtcagcagagtaaacagacaacccacatagtgggaaaaaatcttcacagtctgtacatctgtcagacgactaatatccagaatctacaacaaactcaaatcagcaagaaaaaaaaaaaacaatctcatc

SEQ ID NO: 758875 - DNA, 609 bp, Homo sapiens
aacactccaggcaggacagaaaacaatctcagaagaaacaaacccatgagttctgaattctatttccttattctgtgtgactttgttaacattgggaatgttatcaaagctctctgagcctctgtatattaatttatttaataggaaatgataatatatacttcataggcttgtcataaatattaaatgacacaacctgtttaaaatcaatagcacagctttagagatgtattcaatagatgctggttccctgtgtctactagttttctataccacttgtcctcttctyctggtaaaatgtacctggacttcacttatctatctaaacctctagttcagataatgcaacgtaataatctgaggctgaggcagatctcaaatgaaaagaagaaaataatccaagtgaaatttcaatatttgatggaagtgaacctgaggtgtacagtgagtccagtcaaatggaaaaatctttagaatcctagtaatgtgagcataccaaaatgacttcttcaaattggattgtcagcgtattgcatcagttctagaggtactgggagagaaagatttccttgataagtaactgaagctaatttgcaaatattcttaaag

SEQ ID NO: 758876 - DNA, 609 bp, Homo sapiens
aacactccaggcaggacagaaaacaatctcagaagaaacaaacccatgagttctgaattctatttccttattctgtgtgactttgttaacattgggaatgttatcaaagctctctgagcctctgtatattaatttatttaataggaaatgataatatatacttcataggcttgtcataaatattaaatgacacaacctgtttaaaatcaatagcacagctttagagatgtattcaatagatgctggttccctgtgtctactagttttctataccacttgtcctcttcttctggtaaaatgtacctggrcttcacttatctatctaaacctctagttcagataatgcaacgtaataatctgaggctgaggcagatctcaaatgaaaagaagaaaataatccaagtgaaatttcaatatttgatggaagtgaacctgaggtgtacagtgagtccagtcaaatggaaaaatctttagaatcctagtaatgtgagcataccaaaatgacttcttcaaattggattgtcagcgtattgcatcagttctagaggtactgggagagaaagatttccttgataagtaactgaagctaatttgcaaatattcttaaag

SEQ ID NO: 758877 - DNA, 559 bp, Homo sapiens
cagaatttctttttggttcctttttaaattgctatcattgtattgattccctatttgttgagtcattgtgcttctagttttctttagtttttttttttttttttccagtgtcctttagtcctttaccctttaagcatatttgagacagkgggtttatagtcttttttttcttctgttttccagagactcgctctgtagcccaggctggagtacaggggtgtgatcttggctcactgcaacctccgcctcctgggttcaagcaattctcctgtctcagcctcctgagtagctaggacaacaggtgcgtgccaccacacccagctaatgttttgtatttttagtagagacagggtttcactgtgttagccaggatggtcttgatctcccgatttcatgagctgcctgccttggcctcccaaagtggtgggattacaagtgtgagccaccacacccagcctataatgtttttatagtaccaaaacttgtgctccattattatcagtttctttgggttttctttcttatgtgaaagggctattgtttcttttttgcaggcatc

SEQ ID NO: 758878 - DNA, 559 bp, Homo sapiens
cagaatttctttttggttcctttttaaattgctatcattgtattgattccctatttgttgagtcattgtgcttctagttttctttagtttttttttttttttttccagtgtcctttagtcctttaccctttaagcatatttgagacagggggtttatagtcttttttttcttctgttttccagagactcgctctgtagcccaggctggagtacagkggtgtgatcttggctcactgcaacctccgcctcctgggttcaagcaattctcctgtctcagcctcctgagtagctaggacaacaggtgcgtgccaccacacccagctaatgttttgtatttttagtagagacagggtttcactgtgttagccaggatggtcttgatctcccgatttcatgagctgcctgccttggcctcccaaagtggtgggattacaagtgtgagccaccacacccagcctataatgtttttatagtaccaaaacttgtgctccattattatcagtttctttgggttttctttcttatgtgaaagggctattgtttcttttttgcaggcatc

SEQ ID NO: 758879 - DNA, 607 bp, Homo sapiens
actcctagaaacacacaaactaccaaaactgatttgaatagaaatagacaatatgaatatatttataatagaatattaaatcagtaataatctctcaacaaagaaaaactcaggggtggatgcaatcactggttaatgctaccatacatttaaagaagaattaatactaatccttctcagcaagcacagaaaaagatgctcaacattattagtcattaagcaaatgcaaatgagaytcataattagataccacttcatatccactaggatgggtatgaaaattaatgataataacaatcattagcaaggttgtagagaaattggaacggtcttagattgctggtaggaatataaaatgttgcagcactgtagtaaacaatttggcattttctcaaaatttaaatcagatgacccaggaatttcactcccatatgtctaaccgggagtattgaaaaaatatgttcacttgaaaagttataggccaaagtgtataaacctggagttacgtaggataaaaataagtctatagagctaatgtacagcatgagtatagtagttgataatgctgtattttatactgaaaattagttaagtgactagatattag

SEQ ID NO: 758880 - DNA, 607 bp, Homo sapiens
actcctagaaacacacaaactaccaaaactgatttgaatagaaatagacaatatgaatatatttataatagaatattaaatcagtaataatctctcaacaaagaaaaactcaggggtggatgcaatcactggttaatgctaccatacatttaaagaagaattaatactaatccttctcagcaagcacagaaaaagatgctcaacattattagtcattaagcaaatgcaaatgagattcataattagataccacttcatatccactaggatgggtatgaaaattaatgataataacaatcattagcaaggttgtagagaaattggaacggtcttagattgctggtaggaatataaaatgttgcagcactgtagtaaacaatttggcattttctcaaaatttaaatcagatgacccaggaatttcactcccatatgtctaaccgggagtattgaaaaaatatgttcacttraaaagttataggccaaagtgtataaacctggagttacgtaggataaaaataagtctatagagctaatgtacagcatgagtatagtagttgataatgctgtattttatactgaaaattagttaagtgactagatattag

SEQ ID NO: 758881 - DNA, 610 bp, Homo sapiens
gctatggcagccatcgtctggaaagggtacaatgtggttcatgcctccagggtcatgataggactcactgactcagctgatgctgccggggaccacagtgggagacttcagcatctacattagcaggaacatcatccgtgttaggaaatccatggatgggtcccagagagatatccagctgtggtaccagagcagtgagctggtgaactgggcagtggagggccatcacagcagtgcctaccctgcctgacagctcttgatcacccaagcatcccatcaggaccaactgctttggtcacaaaaactcaagcaggcacccaattctgtctctcccaaaacacatccaggtcgaccttytatccacctagactcagagaagtttgagccaccaactttatgttcctttttgtatcctaatccagcataaaactgaaccaaattctctttgtgccagataaacttcgggatgtattcaaaagtcggtaatgtgaccttctccttctccaaagaagagacattaaaattcacggtgccaagcaaaacaaaacagaacaaagctaaaataacaacagcaaaattcccacagaactcaatttacacctaatacaaa

SEQ ID NO: 758882 - DNA, 622 bp, Homo sapiens
caagataatatctgcagtctcaaccttatgggtgttctagttgcagagtcccctgacacttgagtgttctgctgttggtttgaattcaaagtacctaacctcaagtcatcatgtatcttcttgctttccagacattagttatttaaactttctgtgtttcagcttcctaatctgtaaaatggagacrttaatagtacctatctcatagacttgttgggaatattacacacacacacacagacacacacacactcagtgctagccatcactattacgccttgacactacattgctaattaaattaggctgtacttatcctcaccctctgaaaatgcggtggaaataacacaatttggaattattatcagtccaaatccatcagccttgtgacccattgcaagtctgaatttctccatgaaatctctcctgacaaattcaaggccaattaatttctcttttttaatgccagtttttgcactagtcatatacagtaatttgatatgtatttttctccaaaccaaactgtaggctcttagtggtatgaatttgcactcctgctgtcttaccctcagtgctttgctatctatagacatgacaagcacttagtagataatttttcaaa

SEQ ID NO: 758883 - DNA, 578 bp, Homo sapiens
agaaaaaggaaaaaaattttaaaaaaaggctattcctggcctgccatggtaactcatgcctgaattccaacactttgggaagctaatgcaggaggatcacgttaggccaggaattcaggactactctgggcaccatagtgagaccccatctctacaaaaagtaaaaaaattagcatggcatagtggtgacctgcctgtagtcccagctactcaggagactgagacaggaggatcgtttgagcccaggagtttgaggctgcactgagctatgattgcaccactgtactccagcctgggtgacaaagcaagactctgtctctaaaacaaacaaacaagcaaaagggctattttctttgaaaagtagtatcaaagttcaacacaatcaagaattttsggttcaatgcccaaatttgttttcatttatagtactttcaaaaagaatttaaaggaatcacataatgaaagacacaagcaaaacattaaaacaagagccaaataataaagtcatttggagaaatatgattaataccaggaagcttctgattgttcagactgtaattctaggcagtcaggttgaa

SEQ ID NO: 758884 - DNA, 578 bp, Homo sapiens
agaaaaaggaaaaaaattttaaaaaaaggctattcctggcctgccatggtaactcatgcctgaattccaacactttgggaagctaatgcaggaggatcacgttaggccaggaattcaggactactctgggcaccatagtgagaccccatctctacaaaaagtaaaaaaattagcatggcatagtggtgacctgcctgtagtcccagctactcaggagactgagacaggaggatcgtttgagcccaggagtttgaggctgcactgagctatgattgcaccactgtactccagcctgggtgacaaagcaagactctgtctctaaaacaaacaaacaagcaaaagggctattttctttgaaaagtagtatcaaagttcaacacaatcaagaattttcggttcaatgcccaaatttgttttcatttatagtactttcmaaaagaatttaaaggaatcacataatgaaagacacaagcaaaacattaaaacaagagccaaataataaagtcatttggagaaatatgattaataccaggaagcttctgattgttcagactgtaattctaggcagtcaggttgaa

SEQ ID NO: 758885 - DNA, 602 bp, Homo sapiens
ccttcagtcctttcttggaggcagcaggggtgagaggaagatgagaaggaagaagaggaggggaaggcagaggagagagaaaagagagcatgatagtgggccccagaggaagaggacctagcttctcaccttggaaatctacctaaaattcaccaataactttcacattcatcatccttttcccccccgcatctgtaraatagatggggttattaacatgtgtaaggttttattgttcccatttgacagaagggaaaagctgagattcaggggaataaagtgacttgcccatggcaacgctgctggaaagaagtagagtggatccaccttggtatttgggtcaatgtctggaaccttcgccattgttccagggcttcagactcacccttgagactcagtgacccttggtgaatctcctctctggccctctgttctcttgtttagaaatgaggtgctgggcccagatcatcttggaaggcccttccagactggttcttgctcccaagtggagcccaggtctgcctggtcctcagatgggaggagcaaatgtcacggactctctctgacttggttgctgatgggaattttctgcctcaagttct

SEQ ID NO: 758886 - DNA, 560 bp, Homo sapiens
tgtttggtgatgagcagtagggcatgggtgggacccatggaagatggacgttggtttgactgcagcttgttggaggtgtggataaggcacttaggaactttgctccttcattagtccaagggtagcaagggcagttccactacaaaggcttgagaaaagaggtttycagttgtgcctgggggctttgtctaggaagttatagagcttctaatggcttgatagccccagcaaggggtggctggaggcccaagcctggaggaactgcccagcaaggagataaaggaatgggcacccacgtgacagtctggccaattttgcatagggctactgcagtatgctgggggtctgctccagtccctagtcacctcggatttttcagtaccacttacctgggcaggggaggttcctgtggtttcatgttgctcctgagtgggctgtcgtcttgccttgcttttctccattctccatgggtcgagttgtttccttgattagttccagtgggtgtacctgcatgtttcagttgaaggtgctgtatttactcaccctttccattcctctct

SEQ ID NO: 758887 - DNA, 560 bp, Homo sapiens
tgtttggtgatgagcagtagggcatgggtgggacccatggaagatggacgttggtttgactgcagcttgttggaggtgtggataaggcacttaggaactttgctccttcattagtccaagggtagcaagggcagttccactacaaaggcttgagaaaagaggtttccagttgtgcctgggggctttgtctaggaagttatagagcttctaatggcttgatagccccagcaaggggtggctggaggcccaagcctggaggaactgcccagcaaggagataarggaatgggcacccacgtgacagtctggccaattttgcatagggctactgcagtatgctgggggtctgctccagtccctagtcacctcggatttttcagtaccacttacctgggcaggggaggttcctgtggtttcatgttgctcctgagtgggctgtcgtcttgccttgcttttctccattctccatgggtcgagttgtttccttgattagttccagtgggtgtacctgcatgtttcagttgaaggtgctgtatttactcaccctttccattcctctct

SEQ ID NO: 758888 - DNA, 560 bp, Homo sapiens
tgtttggtgatgagcagtagggcatgggtgggacccatggaagatggacgttggtttgactgcagcttgttggaggtgtggataaggcacttaggaactttgctccttcattagtccaagggtagcaagggcagttccactacaaaggcttgagaaaagaggtttccagttgtgcctgggggctttgtctaggaagttatagagcttctaatggcttgatagccccagcaaggggtggctggaggcccaagcctggaggaactgcccagcaaggagataaaggaatgggcacccacgtracagtctggccaattttgcatagggctactgcagtatgctgggggtctgctccagtccctagtcacctcggatttttcagtaccacttacctgggcaggggaggttcctgtggtttcatgttgctcctgagtgggctgtcgtcttgccttgcttttctccattctccatgggtcgagttgtttccttgattagttccagtgggtgtacctgcatgtttcagttgaaggtgctgtatttactcaccctttccattcctctct

SEQ ID NO: 758889 - DNA, 560 bp, Homo sapiens
tgtttggtgatgagcagtagggcatgggtgggacccatggaagatggacgttggtttgactgcagcttgttggaggtgtggataaggcacttaggaactttgctccttcattagtccaagggtagcaagggcagttccactacaaaggcttgagaaaagaggtttccagttgtgcctgggggctttgtctaggaagttatagagcttctaatggcttgatagccccagcaaggggtggctggaggcccaagcctggaggaactgcccagcaaggagataaaggaatgggcacccacgtgacagtctggccaattttgcatagggctactgcagtatgctgggggtctgctccagtccctagtcacctcggatttttcagtaccacttmcctgggcaggggaggttcctgtggtttcatgttgctcctgagtgggctgtcgtcttgccttgcttttctccattctccatgggtcgagttgtttccttgattagttccagtgggtgtacctgcatgtttcagttgaaggtgctgtatttactcaccctttccattcctctct

SEQ ID NO: 758890 - DNA, 472 bp, Homo sapiens
aaaaactcaataaactaggtattgaaggaacatacctcaaaataataaaagccatatatggtaaacccacagtcaattcatatggaatgggcaaaagctgcaagcattccccttgaaaactggcacaagacaatgatgtcctctctcatcactcctattcaatatagtattggaagttctggccaggkcaatcaggcaagagaaagaaataaagcatattcaaatagggacagaggaagcaaatttatctttgtttgcggatgacatgatcctatgtctagaaaacctcatcatctcagcacaaaagcttcttatgcggataagcaacttcagcaaaatctcaggatataaaatcagtgtgcaaaaatcactagcattcctgtacaccaacaacaggcaagcagagagccaaatcatgaatgaactcccattccaaattgctagaaaaagaataaaatacttaggaatacaa

SEQ ID NO: 758891 - DNA, 472 bp, Homo sapiens
aaaaactcaataaactaggtattgaaggaacatacctcaaaataataaaagccatatatggtaaacccacagtcaattcatatggaatgggcaaaagctgcaagcattccccttgaaaactggcacaagacaatgatgtcctctctcatcactcctattcaatatagtattggaagttctggccagggyaatcaggcaagagaaagaaataaagcatattcaaatagggacagaggaagcaaatttatctttgtttgcggatgacatgatcctatgtctagaaaacctcatcatctcagcacaaaagcttcttatgcggataagcaacttcagcaaaatctcaggatataaaatcagtgtgcaaaaatcactagcattcctgtacaccaacaacaggcaagcagagagccaaatcatgaatgaactcccattccaaattgctagaaaaagaataaaatacttaggaatacaa

SEQ ID NO: 758892 - DNA, 577 bp, Homo sapiens
aacagtattcatattaaatttaaatgtctcttaactagaaatggcaaatgaaaatacgttctagtacataagaaatgttcattttgactcagtaattttgcttctagcaatttggaataattagaaatgtgagcaaatatccatgtatgcaattatttattataccatcatttataggagtaaaaacactagaaatatctaaaagggaaataattcagtaaattatgaataaccacatgctggaaaattatgtacctgttaaaataatggttacaaacagcctttcattgatttggaaaatctcatgtrtaatgtaaggggttttaacagtataaaatacaattttattaatctgtgattttttttttaccaacataaaatatatgtctgacaaaaagtgtttacatgttcccgaaggttttccaagctaaaacagttttggccaagctaatgaaatagaacttgtttaaacattataggcctttgaaaacaatttccccagggaagtgcctggccctactttgggacaagcacttctttagctcccttctacgtggagattgaacggctttctaaa

SEQ ID NO: 758893 - DNA, 577 bp, Homo sapiens
aacagtattcatattaaatttaaatgtctcttaactagaaatggcaaatgaaaatacgttctagtacataagaaatgttcattttgactcagtaattttgcttctagcaatttggaataattagaaatgtgagcaaatatccatgtatgcaattatttattataccatcatttataggagtaaaaacactagaaatatctaaaagggaaataattcagtaaattatgaataaccacatgctggaaaattatgtacctgttaaaataatggttacaaacagcctttcattgatttggaaaatctcatgtgtaatgtaaggggttttaacagtataaaatacaattttattaatctgtgatwttttttttaccaacataaaatatatgtctgacaaaaagtgtttacatgttcccgaaggttttccaagctaaaacagttttggccaagctaatgaaatagaacttgtttaaacattataggcctttgaaaacaatttccccagggaagtgcctggccctactttgggacaagcacttctttagctcccttctacgtggagattgaacggctttctaaa

SEQ ID NO: 758894 - DNA, 555 bp, Homo sapiens
tgttcaagtggaccgcttctctctaaccaggagagctgcctggacctggactcatacagagggaaatgtgcaggaagagatgcagtgaaggaaaccaactagacttgtgcatgacatttagttctgagcctcctagcagscaagtcaaaaagaacaaagtatatcatgtaacagaataaatttttttttacactgagccctgactggaatttttcacgtttatttatgcaccagaagatttcttagtgttcatgcataccttttctttcatgttgttctgaatcctgtgtaggaagaaagtgatcagcatcagggtcaaatttagaaggggtgcaagagtgaggaaggtttagcagcatgagagaaggtccaatggtcatgccaatgagataaccagactgccagaaactctatcttattcactatggtgttcccaccttctagaataatacctggcacatagaagaataaataattgttggataaaacaatgaaaatcttaaaacctttgcgttgtcacattttggcctcttgcatgttacagctttcaaatgc

SEQ ID NO: 758895 - DNA, 622 bp, Homo sapiens
gacgaatttgtgttagttcttctttaaatgttaggtagaattcagcagtaaagctgtcaggtcctggactcttctttgatgggagactttttattactgattcaatcttgttacacattattgatctattcagattttctatttcttcatacttcaatcttggtaggttgtatttgtccagaaatttattatccatttcctctagattttctaatttgtcagtatatagtttttcataatagtcttttatgatcttttgtatttctgtggtatccattgtaatgtctccttttttatctcattttaattatctctcttatttttagtctagctaaagatttgttaattttgtttaccttttcaaaaatccaackttttatttgtttattttttgtattttttttagtctctatattgtttatgtctgctctgatctttagcatttctttctgactactactttttgactgtttttccttgtttttctagctctttgaggtactactttaggttatttagttgagatctttctacttttttgatgttggcatttactgctttaaacttccctcttacaactgcttttgctgtattctctaggtttgtcatgtttccattttca

SEQ ID NO: 758896 - DNA, 535 bp, Homo sapiens
tgataaatgtgtcattaagcaattttgtcgttgtgcaaatatcataggatgtacttaccaaacctggatggtatagcctactacacatctaagctaatagttttgctccgaggcaataaacctgcacagcatgtgagtgtactaaatactataggcaattgtaactcagtaagtatttgtgcatctaaacatgtttaaacatagaaaagacaaagtaaaaatatgatataaaagataaaatargatagaactgtgtagggcacttaccgtgaatggagcttgcaacactggaagttgctctgggtcaggcagtgagtgagtggtgagtgaatgtgaaggctaggacagtaccgcacactagtgcagaccttataaacactgtacacttaggcaacactaaatttataagaagatttttttctttcttcaataataaattaaacttagcttactgtaaattttttactttataaatttttcaacttttaaaaactttttgacttttgtaataacgcttagcataaaacacaaacac

SEQ ID NO: 758897 - DNA, 621 bp, Homo sapiens
ggaggaggaatgggaggggctgatcttgctttctcagagaggcagaagaagtaaaggaagtgggagagacaggagaggcaggcatacttagtgtaaattttattgaaaaaaaattcaagtataaatagacctatgcagttcaaacttgtgttgtttaaaggtcaactgtttttgtgacttatttcacttaacatgacattaagttttcccctcgatgtggcatataataggagtttcctctatttaaaggctgaataatattccattgtatgcatatctagttaatccaatcatctggtgatggacatttaggtttattttacctcttggctattgtgaataaagctacaatgaacataggtgtgtaaatatctctttgagtccctgttttcaattgttttggataattactcagaagtgtgattgctggatcatgtrataattattttattttattttttaacttattttaggtttggggtacatgtgaaggtttgttctataggtaaacttgtgtcatgggggtttgttatacaggttatttcatcacccaggtgttaagcctagtacccaatagttatttttttctgatcctattgagggatcctcctcccaccctat

SEQ ID NO: 758898 - DNA, 609 bp, Homo sapiens
cttgccctcttcccaccctccaccttccagtaggccctgctgtcagttgttcccctgtttgtgtccatgtgtacttgacatggtttagctctgtgtccccactcaaatcccatgtaaattgtaatccctaatattggaggaagggcttggagggaggtgattggatcatagaggtggtttctaatggtttggcaccatccccctagtgctgtctcatgatagagttatcgtgagatctagytgtttgaaaatgtgcagaacctcgccccaccctcctaccagccatataaagatgtgcttgcttcccctttgcccttcaccatgattgtaaatttcctaaggccccccccagaagcagaagcctgtacagcctgcggaactgtgagccaattaaacctgttttattcacaaattacccagtctcagatagttttttatagcagtacaagaatggactagtacagtacttaatgtttagctcccactgatcattgagaacgtgcagtatttggttttctgttcctgccttaatgcacttaagataatgacctccagctacatccatgtttctgcaaaggacacaatctcagtcttttatagggctgtgta

SEQ ID NO: 758899 - DNA, 640 bp, Homo sapiens
agagataaagcctagtcgatcatagtgaattagctctttgatgtgctgctggatttggtttgctagtattttgttgaagatttttgcatctatgttcattgagaatattggcctgaagttctcttttttgtgtgtgtctctgccatgtttaggtatccagataatgctagccacacagaatgagttagggaagagtcccacctcctcaatttcttaaattacttttagtaggaatgataccagctttttatacatctggcagaattcagctgtgaatccatctgtcctgggcttattctgattggtaggcttttcattgctgatccaatttcataactcattattggtctgttcagggattcaatttcttccttgttcaatcttgggaggttatttgtttctagaaatttatccatttcttccaggttttccagtttgtgagtgtagargtgttcatagtagtctctgagagtttttgtatttttgtggggtggttggtaatgtcctccttgtaattactcattgtgtttatttggagcttctctcttttcttcttcattagtttaactaacaatctatcgatcatacctattctttcagaaaacaaactactggatccattgatttttttgtatggttt

SEQ ID NO: 758900 - DNA, 629 bp, Homo sapiens
gcttggcttcagtggacatgaggctggtggtctccatgtgcatgttcacagtgctgggtggcagtggcagcataagatggggatggggccaacagccaccagtgaccattcatacattcacagcagcagcagtgggggtgtggggagcagggtggggttgcttgcatctgwgtgagtgttgatgtcagcagtggcagtgcagccagttgcctgctcatcagggaagcaggggcagcaggatgtgctcacacaggcagcagctggatggcacagtacacatgcacacacacacccagtgggggagaaaaagtgaactctgcctgtgtccatgctggcaaagcagtgggggtgtggccatgggttagtgcatcctggcaatgcaggcatggaggaggctgcagtgggagagggtgtgggtgggctgttgcgtgtcagtggaggctgcactgatagagctctctgatgctcaggtgcagtctgctggtgaaggagctatgatgtgagcctccaggaagcaccttgattgagcatccaagactgtgctgcaaacatgtgcagccagactggggccccatgagaggccagcagacaagggtgctgtcagttagaactggatccatctaaccagc

SEQ ID NO: 758901 - DNA, 662 bp, Homo sapiens
ctcatgatagtgagtgagatctcatgagatctgatggttttataagtgtctggtagctcctcctgcattcattttccatcctgccaccttgtgaagaaggcgccttgcttcccctttacctctgtcatgattgtaagcttcctgaggcctccccagccatgtggaactgtgtcaattaaacctgttttctttataaactacctagtctcaggcagttcgttatagcagtgtgaaaatggactaatacagtaaattgatactggggagagtggggtactgccataaagatacctgaaaatgtgaaagtgactttggaactgggtaacaggcattggtgggaacagtttggagggytcagaaaacaagaagatgtggaaaagtgtggacttgttgaatgactttgaccaaaatgctgatagtgatatggacaatgaagtccaggctgagatagtctcagatggagatgaggaacttgggaattggaataaaggtgcttcttactatgctttagcatagggactatcagcatgttgcccctgctctagagatctgtgaaactttgaactagagagagattgatttagagtatctggcagaagaaatttcgaagcagcaaagcattcaataggtgccctgcatgctcttaaaagcattcagtttta

SEQ ID NO: 758902 - DNA, 626 bp, Homo sapiens
tatgtttttatttatggagattcacatttaaaattaagtactcatatatctgttaattaatttccttaagcaaagtttacacaaacggctataagtgaaaatatttttgcgtggataaaaattctaggttacagatattaaaacatggcactatttttagctggattatacttaactytgtgaaaaagaaaaaatctggctgcaccatattttttgaactcttagaataaagaaagagattctgttgaatggcagtatgcctaggagtccctctttttttttagctcctagtagctgacagttctaactccgagagatgactacgagactgtgctccagtgtttaccaacagaactaaatcaacaaaataagtgtctgacaaatttctattcacagaaggcaagccactgaaatctggtgtgtgcgacagaaaacatggcttagagaagaagtaaaaacaatagtaactctccctccgttcaatcctatgtaaaccctttccaagggaggttagaggtgcatatgtctcatggatgctcaggatcacaggatgctgatctccagtaagggctcttcagcagaagcctcgactcaggaagggaatggaggaggattagaaggagagg

SEQ ID NO: 758903 - DNA, 615 bp, Homo sapiens
gttattctacatttattacagttagaggtgtattcaaatctggtaactctttatgattactcttcctgcttccaatgtttcttctgtttctttagggttctctgtgaaagatatatatagcttcatgtaggttcattctagtcctgctgctcattgaagttccctttaatattttcttagccttttttctaggtttctttcagaattctatttcaarttacaatgatggttctacttcctgtaactctttttagataaataaatgtttgaaaacaaaaaaaaaactcataaattttttgcactgtttaagtataaactagctgatgtgctatagaaatttgagcttgattttttaaaagattaaacaaataaatgctcataaattcatgtattttctacatacagtcaccaactgcctgtaacctggcagaatccagatttataaacaagcaaaaataacctttatttatcaatgtatttccgagagcgtgttgtccagcataattagaaactacctctgagtgttacagagaaagttttgccctaatcccttgtcagagagaaagtcgcagaatcgcttgtatgaattcctcaaagtactacccagtttagatg

SEQ ID NO: 758904 - DNA, 615 bp, Homo sapiens
gttattctacatttattacagttagaggtgtattcaaatctggtaactctttatgattactcttcctgcttccaatgtttcttctgtttctttagggttctctgtgaaagatatatatagcttcatgtaggttcattctagtcctgctgctcattgaagttccctttaatattttcttagccttttttctaggtttctttcagaattctatttcaaattwcaatgatggttctacttcctgtaactctttttagataaataaatgtttgaaaacaaaaaaaaaactcataaattttttgcactgtttaagtataaactagctgatgtgctatagaaatttgagcttgattttttaaaagattaaacaaataaatgctcataaattcatgtattttctacatacagtcaccaactgcctgtaacctggcagaatccagatttataaacaagcaaaaataacctttatttatcaatgtatttccgagagcgtgttgtccagcataattagaaactacctctgagtgttacagagaaagttttgccctaatcccttgtcagagagaaagtcgcagaatcgcttgtatgaattcctcaaagtactacccagtttagatg

SEQ ID NO: 758905 - DNA, 605 bp, Homo sapiens
tctgtatctttgaatctaaactctgtctcctgtagacagcatatagttggatcacgtttttaacaatctaacctgatcatctgtcttttgattttttgtataatccattcaccccaacctttttttttttttttttttttttttttgagatgatgtctccatctgtcactcaggctgtaattcagtggcatattcttggctcactgcaacctctgccttccragctcaatctatcctcccacctcaccttcttaaatagctggaaatacaggcgggtaccaccaaggccagctacattttcgacttttagtagggatggggtttcaccatgttgcccaggctgctctcaaactccagggatcaagcaatccacccaccttggcctcagaaagtgttgggattacagatgtgagccaccatgcccggccagtgcagtcacttttaatgttagtagtgatatggctggatttatatctgccattttgctttttctgtgcttaatgtcccattgcttcttttattcctctgttccccatttattatcttcttttgttttatgtagatatgttctaatgcaacctttttatttctttaatacatttaat

SEQ ID NO: 758906 - DNA, 605 bp, Homo sapiens
tctgtatctttgaatctaaactctgtctcctgtagacagcatatagttggatcacgtttttaacaatctaacctgatcatctgtcttttgattttttgtataatccattcaccccaacctttttttttttttttttttttttttttgagatgatgtctccatctgtcactcaggctgtaattcagtggcatattcttggctcactgcaacctctgccttccaagctcaatctatcctcccacctcaccttcttaaatagctggaaatacaggcgggtaccaccaaggccagctacattttcgacttttagtagrgatggggtttcaccatgttgcccaggctgctctcaaactccagggatcaagcaatccacccaccttggcctcagaaagtgttgggattacagatgtgagccaccatgcccggccagtgcagtcacttttaatgttagtagtgatatggctggatttatatctgccattttgctttttctgtgcttaatgtcccattgcttcttttattcctctgttccccatttattatcttcttttgttttatgtagatatgttctaatgcaacctttttatttctttaatacatttaat

SEQ ID NO: 758907 - DNA, 462 bp, Homo sapiens
agcttttatgaggcactatattagaactttctgaagttttaacaaaatagcttatagtcccatccagagtttgacctttggtgtggtcctttcttaatttgaaaatcatttccaacctggaaacactggaaatgaaaaatagtcttattttcaagmccaacacgtccttagtccttgatatttattaacagtttttttcttattcctcaacttattcctttcatattttatcaaaggcttagaaaggaagccaggtgacaattgtaatattatgctagaaatctccttagctatatcattatattcaagaagcacatgaggtacatattctattttttttttcacattacagagggcaatggtgttgataaactctccatcattatgtaacaagggacacattcctgtatttgcagtagtttttttgttgtttctgtttttgtttttgtttttttttccatt

SEQ ID NO: 758908 - DNA, 571 bp, Homo sapiens
aaatctatcccttggacagagagtcaggatttgggatcattgatctatggagtgaccacacctactctgctttgccccattttctaaaccgtatggtttccagacgttctgagttttccaagtcttttaaaatccatgtaatgtgatatgcaccaagtaataatttatttctaaaagtgatttacacagattttcactgtctacttttgtacatttctgtactatttgattttttaaaaaaatatatagtttggccataagaaaaaaataaacataaacatttagctcaactcacaggggaccagtgatggggttgagggtaggttttgcctccaagtatgagtgaggcaaacagcctcctgtgtaccataggggtgccagccactcaggctcatttcccctcaagttytgctttataatgcagtttaagacttaggagattggacaggtttaaattcctcaaaggagccatgttgacccatccaaaggaaccatccaatagcttacagagtgaattgaaaacctgccttctccctccaaagcaaatgtttgcacaaataaaacacccagc

SEQ ID NO: 758909 - DNA, 645 bp, Homo sapiens
tttttgtctttctccaaataaactgtgaggtttgtgaagttaggaagcctgtctgccttgttcaccactgtggccctggctcccagcacacagcaggtgttcaagaagaatactattgtagaaatgactttgaaatcattcatttacttttaaaaataatatatagttagatggctttgatactttgattattaggatcaaatcacttgcaacacagctcacaatgagtggagacatctgttgatgggactagagagtctttacgacaaatgttttagtctatcaagaaaaactacccaccttgaaaggaaatgataccattaatgcacggcagcaacataattttgggtggtaaggactcctagaccctgtgacaaaatcctcagcaacacaagggcacagacgagtgacccagcagcacccaggattcagctgtttatctggtgtggctaagtgctatatttgcacgcaatttaaacrctggttttctctggtcttctagtctcctttcattaagcacttttgaattctttgctttaaaagaaaataagagaaaatatcccatagcatgttccagatattaagaatctaaacaagtaatctccaagagtaaagtatgagatattgaactgggttccctggagc

SEQ ID NO: 758910 - DNA, 596 bp, Homo sapiens
aaattagattctagaagctcaggtttctttgatataatattgctctggtataggtttttcatttatcagatacttattgtgcacttactatgttctcagtgcatgagatacaatggtccctgtgctcatggagcctccattctaattgagaagaaatagaaataataaataagaatattttagatagaggtagatgtttatgaagaaaatgaataggatgtttagtayggagtaatggtgattggagataactttaggcaggaaacagaagcatctacctgctatgcaccaggagttgcggtatatgttagtgacacagttgggaaacagtagccagagagagaaggatgaggtcaaacatcagatctacataaaggtggctcagaaatgaagatagagttgtcctacaaagctaggcctatgaaccatctctggtggtagaacaacaaaacattttgtagggaggcctttcgtcccctatgatgtcaccacaaatatattacttccttacttacatctctcttgttccagaaataatttttggtaactgcatcaaaaacctaggaatgacaatataagtatccaacaatggtgaa

SEQ ID NO: 758911 - DNA, 596 bp, Homo sapiens
aaattagattctagaagctcaggtttctttgatataatattgctctggtataggtttttcatttatcagatacttattgtgcacttactatgttctcagtgcatgagatacaatggtccctgtgctcatggagcctccattctaattgagaagaaatagaaataataaataagaatattttagatagaggtagatgtttatgaagaaaatgaataggatgtttagtacggagtaatggtgattggagataactttaggcaggaaacagargcatctacctgctatgcaccaggagttgcggtatatgttagtgacacagttgggaaacagtagccagagagagaaggatgaggtcaaacatcagatctacataaaggtggctcagaaatgaagatagagttgtcctacaaagctaggcctatgaaccatctctggtggtagaacaacaaaacattttgtagggaggcctttcgtcccctatgatgtcaccacaaatatattacttccttacttacatctctcttgttccagaaataatttttggtaactgcatcaaaaacctaggaatgacaatataagtatccaacaatggtgaa

SEQ ID NO: 758912 - DNA, 544 bp, Homo sapiens
taataaaatgcatttcaaacacaagcacagatttcattttggagatttaaaaaatattacattgttgtagggacaagaatgtccaccttcacctctcttatttaacatagtaatgggaaatctaggtgccacagtaaggcgattaaaaagggcattaagattggaaaggcagaaaaaaactttttttttttttttttttttttttggkggagtttcactcttgtccaggctggagtgcagtggcgtgatctcaactcactgcaacctccacctcctgggttcaagcgattctcctgcctcagcctcccgagtatctgggattacaggcaggcaccaccacgcctggctaattttgtattttaagttatcagactgaaaacacaaaatataattcataaaagaaaaaatgataagttggacctcatctaaatgaatcatgtttgttctgtaaaagatcctgtgaagagcttaaaagacaaggtacagacggggtgaagatgtctgtaaaccacatatctaacaaaactgtttgtgtccaaaacat

SEQ ID NO: 758913 - DNA, 585 bp, Homo sapiens
ctctagatgaatgtttatagcagctttattcctgatagccaaacactaaaacaaccgaaatgcccttcaatgggtgaatggttcaagaaactgtcatatatctatactatgggatattgcttagcattttatgctgaatgaactattgatctctcaagtgaattatgttgagtttaaaaattgtgtaattttcttgaaattacacaattatagacatgaagaacaaattagaagttgctaggagggagggtcagggagggggaaaggggtgactggttataagaggagcactgggtatctctgatggaaatattcagtatcttgactgtaatgaagttcacattaatctacacatgttttgaaatacacatatgctcacaaaggagtgcagataaaacagrtaaaatctgaattaggcagagaattgcatcaatgtcaatttcttggttgtgttactgtatcatagttgtgcaagatattgccattggcggagactaggtaaagtgtataggaaatttctgtattgtttcatatgactccacgtgaatctacaattatctcaagtcaaaaagttaaaaaaaatgc

SEQ ID NO: 758914 - DNA, 520 bp, Homo sapiens
ttttattttctttaaactattataaatgagatttaaaaaaatttctttttagttaggtcattatttgtgtatagaaattctactatatgttggttttgagtcctgcaactttaatgattttattagttctaactggtgtgtgtgtgtataattgttgggaattttttttttacatggaggatcatgacatctacaaatagagataattttacttcttcctttccaatttggatatttttctttcttgtttgattgttcttgctaatacttctagtactgtgttgaacagtactagagtgggcatycttaccttttacaggatcttagctttcagagtttttttctccattgattataatgttagccatgggtatttcataaatggcatttattatgttgaaaatcttttcttctatacctaaactgttgagagatttttcaagaaaggatgttagattttgtcaatgctgttttgtgtcaatggagctaatcatgtggtttttatctttcattctattaa

SEQ ID NO: 758915 - DNA, 621 bp, Homo sapiens
catcttggctgtagctggattgaaaaggaacaacacagtatttgggaaggattcctaatccccagaatagtggatacaccccattagcagagattatggcatatatgcaacagacagaagaggccaactatagcaagaattctgcaactgtgtgagcttctcaagatctcgccaatccttacttcattcatgctgmtatagggtgtgttatacaacaaaatgcctactgatcatgccaacacctatttaaaatccttcaatgattcctccaaacttttccaaataaagcaccttagcttaatatagcacatggagcctgctcaggctgcaataaacagactattagagaatgacacagtgtgtacatggacagacttgcggctcactgtgagtcactactctgggcatcactatcttgtttctaatcattgaaaggatccacgtgtgtcagatatcaatatataacagcattgctgagagatgtagttattacattaaacccaaagcaagaaaataagcaggatgtggaactggtcctcttccagaaaggaaaatacaatcagctttatgattggctaaaaatagtttaccagtgaaacttgccattgatttttccagatt

SEQ ID NO: 758916 - DNA, 621 bp, Homo sapiens
catcttggctgtagctggattgaaaaggaacaacacagtatttgggaaggattcctaatccccagaatagtggatacaccccattagcagagattatggcatatatgcaacagacagaagaggccaactatagcaagaattctgcaactgtgtgagcttctcaagatctcgccaatccttacttcattcatgctgctatagggtgtgttatacaacaaaatgcctactgatcatgccaacacctatttaaaatccttcaatgattcctccaaacttttccaaataaagcaccttagcttaatayagcacatggagcctgctcaggctgcaataaacagactattagagaatgacacagtgtgtacatggacagacttgcggctcactgtgagtcactactctgggcatcactatcttgtttctaatcattgaaaggatccacgtgtgtcagatatcaatatataacagcattgctgagagatgtagttattacattaaacccaaagcaagaaaataagcaggatgtggaactggtcctcttccagaaaggaaaatacaatcagctttatgattggctaaaaatagtttaccagtgaaacttgccattgatttttccagatt

SEQ ID NO: 758917 - DNA, 602 bp, Homo sapiens
tcaggtttttttttttttttgtggatggagtctcactctgtcaccaggctggagggcagtggtgcaatcttggctcactgcaacctccgcctcctgggttcaagcgattctcctgcctcagcctcctgagtagctgggattacaggcaagcaacaccatgcccagctaatttttgtatttttagtagagacggggtttcactatgttcatcaggatggtctccatctcctgacctcatgatccgcccgcctctgcattccaaagtgctgggattacaggcctgagccaccgctcctggcctcaatttttgttagaagttacattcttttaaaaagtgaagaagtacattagattacaagttagctttggtcttaacagttaggttaattatggatttaaaaatgagttaggaatcrctctctgttaatcacagatagatagtaagtcaacggaaccttcaacaggctttataatcctatagttgtgtctcaattttaagacttgaggttcacctttgctaaggtctggtgattccatttgtagaaactgttcactgagcaaaagataaacaagctaattttatgagtagaattattttagca

SEQ ID NO: 758918 - DNA, 665 bp, Homo sapiens
gcatcctacataaaacactcaaaagcaagctcccaggaatgggaacggccccagagtgtcactaatgcatcattgcctgtgtttattctagggcaatgtgtgatcctacaagtattagtaaataatttttccaaggtaccttcccgatcgatattttacactatttgcccggatgcaaaataaaagatctggcttcaaagccaaaattgtcacttcctagctgtatccccttcaataagttacttaccctcattcagtttcccttcctgtaaaacacacttcctagtatttgcagcagacgacgctggttatgtatgtaacaacctgtattctcctttgctttcttatttacccaatcatcattttctttggagaggtaaagtgctagtaattcacattcytaatattcctttcatctaatggtgtccaggggataagatctttgtcaatgagtctatgttgttgggtgcagccctctggagggtggggctatatccttttctggttgcctctccctactcagaatgtggctgggctgcagttgtcgtatgcatgccgggtcagtgccacgctgcaaagaaagcccagaaaatgccagaaggagcccagaacccagaagaagacaacatatgagccctcggatgtctctctccacgtttttataa

SEQ ID NO: 758919 - DNA, 569 bp, Homo sapiens
atgtccttggccttcacacgcactcaccgtccacttactgagtcacccagagcaacgtcaaggcccacaagctctgtttatagtaagtatcttatataggcatcccatttttttttttatcattaaacagtgtttttaccttagtttttcaatgtttagttaggtttagatacacaaatttcttaccattgtgttagagttgcctgcattattcagtacagtcacatgtggtgtgagtttgtagcctaggagcaagcrgctgtaccctatagcccagcaggctctactatctaggattgggcaagtgcacagtgcactgtgtgatgtttgcaaaacgtcaagaatcgcctaaggaagcatttctcaggacacatgatgcatggctgtattcactaatgggtaagcaatcaaactgtgtgccttaatcatggctcaatccagaaaggctgagtaggcagcacagttctaatcacacctttcatttcatttgttggatgtgcagtttgaggtgtccccagtaccactctcgagttaagtaatttgatagaaggctgcacagagctcaggaa

SEQ ID NO: 758920 - DNA, 569 bp, Homo sapiens
atgtccttggccttcacacgcactcaccgtccacttactgagtcacccagagcaacgtcaaggcccacaagctctgtttatagtaagtatcttatataggcatcccatttttttttttatcattaaacagtgtttttaccttagtttttcaatgtttagttaggtttagatacacaaatttcttaccattgtgttagagttgcctgcattattcagtacagtcacatgtggtgtgagtttgtagcctaggagcaagcggctgtaccctatagcccagcaggctctactatctaggattgggcaagtgcacagtgcactgtgtgatgtttgcaaaacgtcaagaatygcctaaggaagcatttctcaggacacatgatgcatggctgtattcactaatgggtaagcaatcaaactgtgtgccttaatcatggctcaatccagaaaggctgagtaggcagcacagttctaatcacacctttcatttcatttgttggatgtgcagtttgaggtgtccccagtaccactctcgagttaagtaatttgatagaaggctgcacagagctcaggaa

SEQ ID NO: 758921 - DNA, 594 bp, Homo sapiens
ggcagcacagttctaatcacacctttcatttcatttgttggatgtgcagtttgaggtgtccccagtaccactctcgagttaagtaatttgatagaaggctgcacagagctcaggaaggtcattatgtgcatggctatggcttgtgacagtgaaaagagacagtttaaaggcaaaaaagggaagaggtacatggkcagagtccgggagacagcaggttcaaacttgcggttgtccactcccagtagagttgtgccgacagcattaattctcccaggaatgacgtgtgaccccacgcacagaggattgcagaccacagaagctctcctgagcctcggtgcctatagaagtttaactggagtttgtcacagagtgtcacacaggcatgctgtccacccacattgctgaccttagtcttcagtcctaccagaggggtgctccaataccatgtggctggaccaagtggccaaaggcccccaccattaatcacgtgaacacatagactatctgctgtggcctaaggtccccaggtaaacgaagacactctcataagctaggacattccaagggtttagaggctacttcccagcatcaggt

SEQ ID NO: 758922 - DNA, 594 bp, Homo sapiens
atccttccctgtcttctaccgatttggcttcttagcgtcatttcaaactgtttgcaaacctttctattttggaacattttcctatctggaatcccctaagctattcccggcctatctgcctgctcctcagcctctgtgttgttttatctgcctattcttgacctcaaaatgttcacaacgctccaggctcagccacgggctggcttctttgctactccagtcactgactacctcacgtgttgctttcttactgtgtgacagtctctgtgcagactcagaatgagaacaataaacmagacagaaaatccgctgctaccatgggcctacatgatagttggaagggtgctgagtcgacgaaggatacagtttgtgatcgtgttacgtgctgtccacatagcaacataaagcaggtagatagagaaggggaaggagtcctgccggtttagccagggtgcacagggagggccattttgcagatgacatctgagctgatacctgtgtgctgagcaggctgtgacaggaagacctggctgaagagtattttgggtggaaggagcggcacgagcaaagaagcatgattgcgttttcaagggt

SEQ ID NO: 758923 - DNA, 528 bp, Homo sapiens
cgagcaaagaagcatgattgcgttttcaagggttcaacatggtgctgagtcccattctaggtcacatcaatgattcccatgcttttcagtctcatctcttggaagaaagtgaataccatgtttctctaagagatctcggctctctaatccagacacacatgcatataaccaacagaccaactgaggtttcctcttggttgcctgtggggatctgagatcagcaatggaactcttgaccttccaaatcgtgatgtgttcttctattgctttagccaccatggtgagtgctaccaccsttggctcagtggcttcagagaggcaactccatttccctcaattcttggaagcaaaccactcacacatttctctcacattttttctcgaacgcaatgaaatctgtctgctgcccttcaaccctcactcagcatgccagcccaacacttcacccttctgtctgaatgacttcaacatcctcctctccttcttcctctaattggctttgcctgggtctgtaggagtagcgacgat

SEQ ID NO: 758924 - DNA, 528 bp, Homo sapiens
cgagcaaagaagcatgattgcgttttcaagggttcaacatggtgctgagtcccattctaggtcacatcaatgattcccatgcttttcagtctcatctcttggaagaaagtgaataccatgtttctctaagagatctcggctctctaatccagacacacatgcatataaccaacagaccaactgaggtttcctcttggttgcctgtggggatctgagatcagcaatggaactcttgaccttccaaatcgtgatgtgttcttctattgctttagccaccatggtgagtgctaccaccgttggctcagtggcttcagagagkcaactccatttccctcaattcttggaagcaaaccactcacacatttctctcacattttttctcgaacgcaatgaaatctgtctgctgcccttcaaccctcactcagcatgccagcccaacacttcacccttctgtctgaatgacttcaacatcctcctctccttcttcctctaattggctttgcctgggtctgtaggagtagcgacgat

SEQ ID NO: 758925 - DNA, 646 bp, Homo sapiens
gctcacgtcatgcctgaggtgtctcctctgcacaccccttcttcccccgacttctcactcctcttgtgtcgataactgtctgttccccaaggcttggaattccttgaagcaaaggttagaattctattttatctttttctttcccttttctctatcctccttcccttctttatcttttattcttcttttgtttctcattcctactctttttattccttctcttattttttcctgcctgtcttcgttttgaataatctttttaaaaaaacttagattatttgggttactagaaccacttaagaaagagagagatgagagttcttggctcggacacgtgtgccaaaactaggaagccactaataatttggctgtaggcgctggtcacttttccgtatggctctcatgagctgtgacgtgatctgcagggtgcctacacttctttctgtgagkctgccccttctcggggcgcctgtgaggatgcccatgccctcccctctgcgggagctgcctccctctgagacactccctcttcctccccctgcacttgccatgatgcccagtggctgccgtggcccagtggcatccaaccagctctggctttcatcactaagggcttcatattactgtgtgcatcatagctaaagtt

SEQ ID NO: 758926 - DNA, 570 bp, Homo sapiens
ttctcatttttagtatttgtcgtacttaaatacaatagtaatgatatgagtaacaacaaagcaaaaccttttatattcagcaattgtttaaattacacacttttagataactgggaaggagtgtgagaaaagtcactaaaatcccggtttgtgcggagatgtcactttagaaggaagacattagaaaacaaacaaaaaacccaactaaataaaacgtagtcacacagtgccaaatacattaggacaatgaaatagggggaagaaataaattcttgaaaatatttataaaatgaagaaaaattacaaccctgtataattcctcccacccagatcatgaccaagcaaagaatggcattgcattctaaatgcttctactttctctttgacttcatattatcttgtgaasagttttgggctaatagaatgcaattaaaaataattactaaatggatggtttggttttttttttaacttttaagttcatgggtacatgtgcaggtttgttaaaaggtaaacttgtgtcatgggggtttgttgtacagattatttcatcacccggtaaataagcct

SEQ ID NO: 758927 - DNA, 570 bp, Homo sapiens
ttctcatttttagtatttgtcgtacttaaatacaatagtaatgatatgagtaacaacaaagcaaaaccttttatattcagcaattgtttaaattacacacttttagataactgggaaggagtgtgagaaaagtcactaaaatcccggtttgtgcggagatgtcactttagaaggaagacattagaaaacaaacaaaaaacccaactaaataaaacgtagtcacacagtgccaaatacattaggacaatgaaatagggggaagaaataaattcttgaaaatatttataaaatgaagaaaaattacaaccctgtataattcctcccacccagatcatgaccaagcaaagaatggcattgcattctaaatgcttctactttctctttgacttcatattatcttgtgaagagttytgggctaatagaatgcaattaaaaataattactaaatggatggtttggttttttttttaacttttaagttcatgggtacatgtgcaggtttgttaaaaggtaaacttgtgtcatgggggtttgttgtacagattatttcatcacccggtaaataagcct

SEQ ID NO: 758928 - DNA, 552 bp, Homo sapiens
acaggatttaaaaagttcatcggtttaaagggtgcgtgatcactaatcctcccgaggcaccatttgtttaaattaagctctatatactcacatatcagcctagaaaaacactcttgatggcctggagtcttttgaaatcagtcaaaatgacatatataatcatactacttgcaaaattattggaaacatctcgtacagtgaggtctaagtttcgtcctgttccagaatcatctttaaagcttttcttttttcctttctttttttttttttttttgcttaartacaaacatctaggccctaccccagacctattgaattattcaggaatggagtccaggaatctatcttttcttttctttcttttttttttttttgagacagagtttcgcttttgttgcccaggttggagtgcaacggcatgatctcgactcactgcaacctccgcctcctgggttcaagcgattctcctgcctcagcctcctgagtagctgggattacaggcgcgtgccaccacgcccggctaattttttgtattcttagtagagacagggt

SEQ ID NO: 758929 - DNA, 470 bp, Homo sapiens
ccaaatttattttctaacgtgtttcagaagtttaagttttgaaacttcaaggttttgcattcatttgagatggtcttaggcagcggaggcattttccacaaagttgttgcattgtttcattcctgagaaatgttgaagtttgagttttaatggtattgtgtgtcttgaattacagtaggaattttccaaacaaaactcarataaatttaaacatgtacttgtgagttttaaaaatttggtgaaaattcataaaccttttttccctagattgtgttgtcctcatatttctgacctgtctgtagggtactgtttgttctggagattttttttcaggtggtgggtggtagccgaactctcttatttgcttgtgtcagtgtcatccttaattgtctgttttagagtgtggtgaatcctatggcaagccaactggtgtagattatacttgtcatattttgcagagctctctcacg

SEQ ID NO: 758930 - DNA, 618 bp, Homo sapiens
tcttaaagtcgaacagtaagaaattttttctaatgattttgataatgtgtttaaattttacttgtggaaataaattattaaaaattcaaatacatgtggataatctgaagtgtgtaataattggtcaaaataatagaacaggccaggtgcagtggctcacgcctgtaatcccagcactttgggaggccaggcgagaggatctcttgaatccaggagtcygagaccagcctggacaacatagtgagaccttttctctacaaaaattaaaaatattagcagggcatggcagtgtgcaactgtagtcccagctactaaggaggctgagacttgagcctgagaggtctgctacagttaggctgtgattgtgccactggtctccagcctggacaatagagtaagactctgtttcaaaaaaaaaaaaggaccaattttaaccattcaagatagttattttaattattttaatgtagatttttcattgtttagtaatcttaaaatatcagatgttattaaatatttaataatgaacctcatctgcatatttgatagtcttaaactttcacaggaaattattttaggatattatcttataaagtcttattttatgaaacttggatc

SEQ ID NO: 758931 - DNA, 478 bp, Homo sapiens
tctcacattgctggcctcaagccatctccccacctcagcttcatgacttgtgcatgttcttccagatggtttactgtctccaacttgcaaaaccttggccatagatactgtctggtttaaatctctcaacaagccatgatgttttgccctcatgaygatgagcctgcttcatctcagaggtgaggaaacagactcagaaaggccctagcagttggggagtggggcgtcgccacctgctctgatttgaaggaaaggtcatctcagtgtatagaacttcctatagaaatatctgtctgcttagtacaccaaacagagcacgcttgccagatcctataaaggaccctttaatcagaacaaggaaggccagaggaaagcaagcctgttcccacctattgttgctgagtttatggctctttacacacatctgctactgagaggtgcagtggagaaacacgtagtcgggaagtaccaggaaagc

SEQ ID NO: 758932 - DNA, 594 bp, Homo sapiens
tgagcaaaccagatacttactgctgaagtgagaaaaaaaaaaagacattatatcaactcccactcaaatcgagctgcagtaggcagctaggactcacaggcttagaaaatgagacggagcccactctattataccagctgctcagccctatacgtgtctaagtktttagtgctgggtagcactaaaggagatacaactatgtttatatccagcttatttcctagcaaatgtttctttataataaaaaaagaatacaaataaaaatcagctcaactattttaagctatttatcctattcccaaatatgacaagaaaaaaaaagaaacgcttacaaaagtttcttaaatgctttcttaatgatttagactaatagcataaaaggtagcacagaaattaaccaaatttagatgccaccttaatcctggattgtacttcataactaactttcggaatagaagtgaccagaatctaaaataaaaaggtaagtaggtacagaaatataatcaaggggaataaatacgtatagcacataacaatgaactcttaattcttgaaaattagaaggcttaactccacaataaaaaaataagcaaa

SEQ ID NO: 758933 - DNA, 636 bp, Homo sapiens
ttgaataatctcctgcctggtaggtattcagctgtatctgttacatgtaatttgagtacttaggaacatttgtcgctgttccagctttcacttgaatttcaaaagctgctgcttttagtttgatagaaaaacttcatggtaaaaatcaccaagatgccatgaactacagttggtataaaaattatgcaaatattaatgctgtatgtgcagatgtatctcattaaggaattggagattgtaaggtctaattgggaagtttgacagctgttattaaactatcatgggttccctttgtggatgtactcactggtattttcattytagacatgcaggagaggattcattgactagctttttggaagagtatagattcattatgctttttaaattaaactgatgtgtctttaagtgaggaaaaatatgcatggtgtttctctaaaccttcatcagtttgctttttcccacaaatgggtttttagaaattcaagaaacagtacatgtagtgggtttcaaacaaacttcctacgcaaaacattgctccactgtggcccttttacatcctttttgggaattactgttgatgtaattacctgattcagtactgaatgccactgtgttgctgaccgggccttcacc

SEQ ID NO: 758934 - DNA, 636 bp, Homo sapiens
ttgaataatctcctgcctggtaggtattcagctgtatctgttacatgtaatttgagtacttaggaacatttgtcgctgttccagctttcacttgaatttcaaaagctgctgcttttagtttgatagaaaaacttcatggtaaaaatcaccaagatgccatgaactacagttggtataaaaattatgcaaatattaatgctgtatgtgcagatgtatctcattaaggaattggagattgtaaggtctaattgggaagtttgacagctgttattaaactatcatgggttccctttgtggatgtactcactggtattttcattctagacatgcaggrgaggattcattgactagctttttggaagagtatagattcattatgctttttaaattaaactgatgtgtctttaagtgaggaaaaatatgcatggtgtttctctaaaccttcatcagtttgctttttcccacaaatgggtttttagaaattcaagaaacagtacatgtagtgggtttcaaacaaacttcctacgcaaaacattgctccactgtggcccttttacatcctttttgggaattactgttgatgtaattacctgattcagtactgaatgccactgtgttgctgaccgggccttcacc

SEQ ID NO: 758935 - DNA, 636 bp, Homo sapiens
ttgaataatctcctgcctggtaggtattcagctgtatctgttacatgtaatttgagtacttaggaacatttgtcgctgttccagctttcacttgaatttcaaaagctgctgcttttagtttgatagaaaaacttcatggtaaaaatcaccaagatgccatgaactacagttggtataaaaattatgcaaatattaatgctgtatgtgcagatgtatctcattaaggaattggagattgtaaggtctaattgggaagtttgacagctgttattaaactatcatgggttccctttgtggatgtactcactggtattttcattctagacatgcaggagaggattcattgactagctttttggaagagtatagattcattatgctttttaaattaaactgatgtgtctttaagtgaggaaaaatatgcatggtgtttctctaaaccttcatcartttgctttttcccacaaatgggtttttagaaattcaagaaacagtacatgtagtgggtttcaaacaaacttcctacgcaaaacattgctccactgtggcccttttacatcctttttgggaattactgttgatgtaattacctgattcagtactgaatgccactgtgttgctgaccgggccttcacc

SEQ ID NO: 758936 - DNA, 612 bp, Homo sapiens
ctatgggctttagaatatagttggggaaaaggctactggatacctggtattgctgcagaaaacttctttcagttgagcatcacagcaccaaatagcagctaatcaaataataaactctacttttctatagttcattattttgaactataggagtagttggtttttgtactcgctgcctacataagttatgctcccatgattattttccttgtattgaaaaacaaattaatgtccttaaagtctgcatagagrtctgcctaaatttcacttaagggcacatttctatgaacttgcagggctcatcaaaagggaaagaaatttagaataagggaatgccatttacacatttgttcattggatttctctgctctcatttgggacttagcttaatgcatgtgatgagatgatacagaggactaaaaaagaaccaaaaacccaaacaataaaccccactcaaaatcagctccattaatatgaagaaatatgcaagtactggacatcagacaaggtgaaaaggctgccaaagatctggcaagttatattagggatttctgctgttagcactgagcccagtggtatgagatgaacattggaaataaaataaaaaactag

SEQ ID NO: 758937 - DNA, 491 bp, Homo sapiens
attgtggcattattcatgatagctaagatatacaaacaacataagtgtccattgaaggatgaatggataaaaaaattatgatacaggcacacacacacacacacacacacacacacacacacacacacacacacacacacacacaccatggagtactattcagccttaaaaaaggaggtactgctatttgtaataacatgattaacctgaaagatattatggtaagtgaaataacccasacacacaaagaaacgtactgcatgatcttacttatatgtagaatctaaaaagaagtcaagctcacagtaacagagagtagaatggactgggactgggaagttgggggaaaggggagatgttggtcaaatggtacaacattcagttataggataaataagttctggagatataatgtacagcatggtgactatagttgataacggtgtattacacatttgaaatttgctgggagcagaaaaagcaatattcac

SEQ ID NO: 758938 - DNA, 498 bp, Homo sapiens
catgcttcttcccctattctaatccccagcaaccactgatctgctttctatcatcagatccatcagacacacaccattctgtctcttccagaatatcacacgaatcatacagtatgttctcttctgagtctacgttctctcactcatgatgtttttgagattcatctatattgttgtgtgtatcacagggtagtttctttttattgctaagtagtatttaattgtgtggatataccacaatttgtttatgcattcaccagttcatgggcattttgttgtttccaagttttgactaytgtgaaattaaagcgctattaacattgttatacaagtctttgtgtgggtatgtttattctctctctctgttgaaatacctggccatgtgcagtggttcacgcctgtaattccagcaatttaggagggcaggattgcttgagctcaggagtttgagactagcctggacaacatggtgaaaccccgtctctgaatctaaaaaaa

SEQ ID NO: 758939 - DNA, 542 bp, Homo sapiens
agcgttgaattttcaaagtagaaaaagcacaaaggcacaaaatagagcattcaaagattacaattctgagaggtggttgtagaggttgagtgaacagttttactggcatactttgtgacttcagatttcaataggagtctgggcccttctcatggagaatgtggatgtctctcatttttcttgacatatgagaaggaagtggccatggggtccasagtctatgttcagtgaacacagaggccaagagccagagtgggctcccttcatagatgaaagctttgtgtttgcagattcttgctatacaggaggaatgaacgtttttggtgagaaagctgggaaaagagaagttgtgggatttgaacatcacagttcacaaaaaagataggaacattttcctaaaaataaataattatgaattttgctgacttaatatataaaggaaaatacaattttgtgtgatttttacacaatatccaaatagttttaaaggaggtggttaaaggataaataaaaatttaaggtataagatacagtgaacctta

SEQ ID NO: 758940 - DNA, 542 bp, Homo sapiens
agcgttgaattttcaaagtagaaaaagcacaaaggcacaaaatagagcattcaaagattacaattctgagaggtggttgtagaggttgagtgaacagttttactggcatactttgtgacttcagatttcaataggagtctgggcccttctcatggagaatgtggatgtctctcatttttcttgacatatgagaaggaagtggccatggggtccacagtctatgttcagtgaacasagaggccaagagccagagtgggctcccttcatagatgaaagctttgtgtttgcagattcttgctatacaggaggaatgaacgtttttggtgagaaagctgggaaaagagaagttgtgggatttgaacatcacagttcacaaaaaagataggaacattttcctaaaaataaataattatgaattttgctgacttaatatataaaggaaaatacaattttgtgtgatttttacacaatatccaaatagttttaaaggaggtggttaaaggataaataaaaatttaaggtataagatacagtgaacctta

SEQ ID NO: 758941 - DNA, 542 bp, Homo sapiens
agcgttgaattttcaaagtagaaaaagcacaaaggcacaaaatagagcattcaaagattacaattctgagaggtggttgtagaggttgagtgaacagttttactggcatactttgtgacttcagatttcaataggagtctgggcccttctcatggagaatgtggatgtctctcatttttcttgacatatgagaaggaagtggccatggggtccacagtctatgttcagtgaacacagaggccaagagccagagtgggctcccttcatagatgaaagctttgtgtttgcagattcttgctakacaggaggaatgaacgtttttggtgagaaagctgggaaaagagaagttgtgggatttgaacatcacagttcacaaaaaagataggaacattttcctaaaaataaataattatgaattttgctgacttaatatataaaggaaaatacaattttgtgtgatttttacacaatatccaaatagttttaaaggaggtggttaaaggataaataaaaatttaaggtataagatacagtgaacctta

SEQ ID NO: 758942 - DNA, 542 bp, Homo sapiens
agcgttgaattttcaaagtagaaaaagcacaaaggcacaaaatagagcattcaaagattacaattctgagaggtggttgtagaggttgagtgaacagttttactggcatactttgtgacttcagatttcaataggagtctgggcccttctcatggagaatgtggatgtctctcatttttcttgacatatgagaaggaagtggccatggggtccacagtctatgttcagtgaacacagaggccaagagccagagtgggctcccttcatagatgaaagctttgtgtttgcagattcttgctatacrggaggaatgaacgtttttggtgagaaagctgggaaaagagaagttgtgggatttgaacatcacagttcacaaaaaagataggaacattttcctaaaaataaataattatgaattttgctgacttaatatataaaggaaaatacaattttgtgtgatttttacacaatatccaaatagttttaaaggaggtggttaaaggataaataaaaatttaaggtataagatacagtgaacctta

SEQ ID NO: 758943 - DNA, 623 bp, Homo sapiens
aaattgcagaacatcagataaagaaaatttaaaagatgtttatagaaaaaagagtcccccaaaataaataaaaattggaaaataatattttctttttttctttttcttttttattgtactttaagttttagggtacatgtgcacaacatgcagattagttacatatgcatacatgtgccatgttggtgtgctgcacccattaactcgtcacttaacattaggtatatctcctaatgctatcccttcccctccccccaccccacaacaggccctggtgtgtgatgttccccttcctgtgtccatgggttctcattgttcaattcccacctatgagtgagaacrtgcggtgcttggttttttgtccttgcgatagtttgctgagtatgatggtttccagcttcatccatgtccctacaaaggacatgaactcatcattttttatggctgcatagtattccatggtgtatatgtgccacatacacaatgtctatcattgttggacatttgggttggttccaagtctttgctattgtgaatagtgccgcaataaacatatgtgtgcatgtgtctttatagcagtatgatttataatcctttgggtatatacccagtaatgggatggc

SEQ ID NO: 758944 - DNA, 572 bp, Homo sapiens
attttatatagagagaaagagaaactacaaacaactgaagatataggagacttaaacaactgaagatataggagacttaaacaactgaagatatagcagacttaagcctaacctagatataagttacatcccattgaaaaataaaaatttattcaatttaaagcacagctccctatcattatattaaaaacctctttactgcctcatttcactgagtaaatctaactgctaagcaagaataaaaccttctctcattaaactggcatctttattcccttgaggttcgaattctatttgctcccctggaggattttattttattttattttattttatttatttatttatttatttatttatttatttatttatttawttaattttgagacaaagtctcgctcttgtcccccagactggagtgcaatggcgcaatctcggctcactgcaacctccacctcccgggttcaagcaattcccccggaggattttaatagttaaaaatacgtatttcctttctttgattctctcagacaaatttcctgtttggtatttcactcagttttaagtaaaac

SEQ ID NO: 758945 - DNA, 602 bp, Homo sapiens
gtataaatgcccatatctgacagttcaggatttcttgctttttagggtttcactaaagttttaggttactaaggataaaaatgttagttaacatgtaattctgtataaaaaatgcaccgaaagtgttatgttactagtggaaaaaaagaataattttgtctaattcagaagttatctaaaagttagctcaaattacagaattgaaaagattatttatgaaactagtaaggaatcattaagtaggggagaaagatgtggaaagagtttaaatmataaaatattatttaaatcctgatagagaatgagagacatttgactaataaatattttcatagttaaagctcttagtcttaaagtaaaataagaagtattgtaaagaaaggcattgacagttcggcaatttttttttttttgataccattaagcatggagctgaatttagtgtggagccaaatttcacatacatgcttgcgttgcttcacactatgtttactcttttgcatggatagtgctagagtactaattggtcatgttcccaaagtgaatttcttgattacacaggatgtatgatgatattagtaaacttaagaatattaaattgt

SEQ ID NO: 758946 - DNA, 642 bp, Homo sapiens
aagattatttatgaaactagtaaggaatcattaagtaggggagaaagatgtggaaagagtttaaataataaaatattatttaaatcctgatagagaatgagagacatttgactaataaatattttcatagttaaagctcttagtcttaaagtaaaataagaagtattgtaaagaaaggcattgacagttcggcaatttttttttttttgataccattaagcatggagctgaatttagtgtggagccaaatttcacatacatgcttgcrttgcttcacactatgtttactcttttgcatggatagtgctagagtactaattggtcatgttcccaaagtgaatttcttgattacacaggatgtatgatgatattagtaaacttaagaatattaaattgtatatcaggaataaaatattcagtatgtggggttttggaggccttagataacactgtactctccaggataaattgcataggaaaattgagggccggttttctgtttatttgtttttgcttctatttttaattcatttgctgtttattaacctctggctttgcttgtgtatccatatatataaaaccatgatcctttttagtttctagtggaaggcttttatttcgttctgtgaatagttattttgt

SEQ ID NO: 758947 - DNA, 631 bp, Homo sapiens
gtcaaggtgggtggatcacctgaggtcaggcgttcgagacaagcctggccaacatggtgaaaccctgtctctactaaaaatacaaaaattagcctggtgtggtgtaatcccagctactcaggaggctgaggcaggagaattgcttgaaaccaggaggcggaggttgcagtgagccgagatcatgccactgcactccagcctgggtgacagagcaagactctgtctcaaaaaaaaaaaaaaggatcatttagggttttttgttgtcagtagtttataatttgagttaatagcatttacttaatgagtgggactgttamttttatgtgtcaacttgactagcccaagtgatgtctgtttagttggtattcctgggtgtgcctgtgaaaccagcccaattgtctcataaaactagtgattatggtttcttttgaacaaacacagaaattgaccctcccagacttaaaacttaaagttacatttgtcttatctgagttcctttttcaggaaaccaatcatcaggtctaccagataatatcagggaactggaagtccccattttaattggtcagggagatggatttgagactgatctcccattctcctcagctgtggcacccgaataaaggcttct

SEQ ID NO: 758948 - DNA, 521 bp, Homo sapiens
agctctcatcttttttggacctgtcatcagaatcacctttatggatctgttcagggtaatacatgttttcccagcattcacttcaaaactgttccagcctctacccattatgtaatactaatgatgcttctacattttcaggaatgttgtagcaacattcccactccttggtaccaatatctgtcttagtccatttacactactataaccaaatacctgatcctgcgtaatttataaaaaacagcaattaattttttgagattctggagggcagaataaatcccakattaaggcaatggcattggtttatagtgagggtcttcttattgcataccacaaggtggaaagagtaaaaaggtaaaaaagagacaaactctttgtattcacatagcagaagtgcagaagggagtgaacccactccttcacattatttttaagggccctcatcccatccgtgaaggcactgccctcatgacttaatctcctcctaaagacctcacttcttaatacgatcacattgg

SEQ ID NO: 758949 - DNA, 566 bp, Homo sapiens
ctgttccagcctctacccattatgtaatactaatgatgcttctacattttcaggaatgttgtagcaacattcccactccttggtaccaatatctgtcttagtccatttacactactataaccaaatacctgatcctgcgtaatttataaaaaacagcaattaattttttgagattctggagggcagaataaatcccagattaaggmaatggcattggtttatagtgagggtcttcttattgcataccacaaggtggaaagagtaaaaaggtaaaaaagagacaaactctttgtattcacatagcagaagtgcagaagggagtgaacccactccttcacattatttttaagggccctcatcccatccgtgaaggcactgccctcatgacttaatctcctcctaaagacctcacttcttaatacgatcacattggcaattaagtttcaacacataaatttttgagagaaatggaaaccacagccatattatgagaaagacatcaagcaaattataaatgagagacattctacaaaacacctgaccagtacttctcaaaagtactcaaa

SEQ ID NO: 758950 - DNA, 567 bp, Homo sapiens
ttttaggttttaatttgcctggaatacctttttcatcccttcattttcagtttatttgcatatttataggaaagtaaattttctgtaggcagcatatagttgagtctttttttttcaaatctagtccgtcactaagtgtcttttaattggttgttattgataggtaatggcttactactgtcattttgttgcttgtttcctkgttgctttgtaacttctttcttcctttcttatgtcttcctttgtgcttaagtgattttatctggtttattttctcctttttattcttgatgtaacctacaataatagtttttcccttgtggttacagtgaggcttaccaaaaacatcttagagttataacaaattatttttaactaatgacagcttaccattgatcacaaaatataaagaaaacaaacaaaaactacaaaaaaaaaccctctacattaactccatttctcctacattttgacttgtctcaattttcgtatatttatattatctgttcaattattgtcttttttatagttacagttttgcctttagtctttatactgtaaagatat

SEQ ID NO: 758951 - DNA, 567 bp, Homo sapiens
ttttaggttttaatttgcctggaatacctttttcatcccttcattttcagtttatttgcatatttataggaaagtaaattttctgtaggcagcatatagttgagtctttttttttcaaatctagtccgtcactaagtgtcttttaattggttgttattgataggtaatggcttactactgtcattttgttgcttgtttccttgttgctttgtaacttctttcttcctttcttatgtcttcctttgtgcttaagtgattttatctggtttattttctcctttttattctygatgtaacctacaataatagtttttcccttgtggttacagtgaggcttaccaaaaacatcttagagttataacaaattatttttaactaatgacagcttaccattgatcacaaaatataaagaaaacaaacaaaaactacaaaaaaaaaccctctacattaactccatttctcctacattttgacttgtctcaattttcgtatatttatattatctgttcaattattgtcttttttatagttacagttttgcctttagtctttatactgtaaagatat

SEQ ID NO: 758952 - DNA, 620 bp, Homo sapiens
tttgtagagaatgtttctgtgtaatctttaattcattgtataaaaaaggagatgttttaattcattatttcattgacactttatcacataagaaaatgtcccttttttctctacgtcttgcttaaacattatgctgatttccctttacctagrgtattggttgagtaggaataagtctcctgttctccttgagggccctggaatatactcagatcacctttattttatttaatgaagacctgaaaactgaatgtcacctttgtacatattgtatgctctcactgatagtggcttcatttggcatgaatcaaatgatagctcaaaaagtcctcacttttcagtaacaaggtagagaatttaaaaattatcatatatgttgaattattcaataaataaccatgaataattaatgccaaggagtgcaacaaaagccatcacagcttgctttactgagactttccctcagaagataggcgttattgattttcaaaagagagctttggaactgggagcccaaaagcagtaagtaaagcaatttatataagaagtctacacatgaataaataataacagaatgaatgagtcacctcgctaaagaaatacttcatggcaggggttga

SEQ ID NO: 758953 - DNA, 660 bp, Homo sapiens
ctagatattcatgatgttctctctgtcggagttgccttccataagattgacaattctttacattactgtgtataatgcagcatagaggttcttacgtcactctgatctggagactgatttagagatgctgtgttttggggcatgtagaccactttgacaccttcagtattgagctcatagggttctgggcagtcccttactggcacggtacttgatgacttcagggacaaaatattgatggaaccaatctagagaaagggttctcattatctaggccatctttttgcacaacccaaagacaggmagatggtgtttatcctttcctttcaagattcagggattaccagctttatagataagagcagtcctgatcataaacctgcctacatttgtacaaaacagtagagttaacctgtcctttatgccttaaatcttggtgcttgctttttttcccatgctaataaatgtcctttttgccatttttcccccagaataggacactttcatctatattaaatacttgttcaggaagatatcctttctcctcaatgattttcttaatggtgcctgggaactcatttgctacctcttggttggtagaagttcgttctcctgttatcttaatatatcaaaagccaaacctctttttaaaattatcaa

SEQ ID NO: 758954 - DNA, 660 bp, Homo sapiens
ctagatattcatgatgttctctctgtcggagttgccttccataagattgacaattctttacattactgtgtataatgcagcatagaggttcttacgtcactctgatctggagactgatttagagatgctgtgttttggggcatgtagaccactttgacaccttcagtattgagctcatagggttctgggcagtcccttactggcacggtacttgatgacttcagggacaaaatattgatggaaccaatctagagaaagggttctcattatctaggccatctttttgcacaacccaaagacaggcagatggtgtttatcctttcctttcaagattcagggattaccagctttatagataagagcagtcctgatcataaacctgcctacatttgtacaaaacagtagagttaacctgtcctttatgccttaaatcttggtgcttgctttttttcccatgctaatwaatgtcctttttgccatttttcccccagaataggacactttcatctatattaaatacttgttcaggaagatatcctttctcctcaatgattttcttaatggtgcctgggaactcatttgctacctcttggttggtagaagttcgttctcctgttatcttaatatatcaaaagccaaacctctttttaaaattatcaa

SEQ ID NO: 758955 - DNA, 639 bp, Homo sapiens
ttgagtagatgaactgttgggccctagtggaatgtaactagaatgagaagtaagctcagaaatttcatgtacagtccctatcccatggggtcttggtacataggaaaacctgatagaattggctgacctgtaaatcagtgatgctcaaattcaggtatagttagaattgtaaaggcacacagcccagctccaacatcaatcaagcagaatctctgggcaactgcctytctgtgacagttttccaaatgactctgctgctccatgaaattttaggacttattgctattgttgaatcaggcgactaatttcagggatctaaaaaggccttatgatccatcatcttttccttcatctgcccacaatcccccagcattggccaacatggcaaactcccatctgagtaccttggaacttaatcagtgtggggcagagaacctggaacggataggctgtccgggaacagtgacaggacggctgaggtgagagaaaggagacaggccagctgtttcctgacgcccttgctcagtacaagcactgaacctgagatctcggtaggtttgtatggatctgcagagatcgccctaggttgggttgctatgggagcaggtctttaactggaggagttctgagaacgtttta

SEQ ID NO: 758956 - DNA, 646 bp, Homo sapiens
tcctgctttctcaggggcatcttatagaggcaatggactttatccagttccctggctctccatttgtgaattgcaagttcaaggcatccagcctctctgcactgtgtcccccactataagacagaagcagtaatgctgactgcttacaataatgatgagtgaatagaagaattcatgtgaagtgctttgcatatcttccacacagagggagttaataaataggtgctactgttattaatgcaggtattaaagggcagactctatataagtggcctgtttaaagagcacctaaactagtgcaatccataaagaaatttaatataaatatagtatcataataattcaaaaaaattttyacaatgcacaaacctgttagcttagttttcaaaacttttgcaagaaacaatacatatggtcatttttaaaagactgtggaagtttcgtggtgttttctataattattaaccaggttcaattttgctatgtaattagaatgactcttcttgggttatttgaaattccaaaagaatatttttaaaactgacaaggcaacttttaaatctaagaaacttcacacatccaatccacaaatgttaaaagaatgggatcaagataagaactataccaaaagcactgttaatgaaag

SEQ ID NO: 758957 - DNA, 528 bp, Homo sapiens
aaataaaggtgttttaagacttacaaaagctgaaataattcatcgccagcggatttacactacaagaaatgataaaatgaagtttttaaggtattcacttcatcaagagaacattatagtcctaattatttgtggacttagtaacagagtttcacattatatgaaacaaaaactaatagagctgcaagktgattcataaaagaaaaaaaactaataagctggacctcatcagcatttaaagcctttcccttgtgaaaagcactgttaagagaataacaagtaaagccacagactcggagaaaatattttcaaaatacatatttgataaaggacttgtatccaaagtatacaaagaactcttaaaactcatcaataagtaaatgaaaaccccagttttaaaatgggcaaaagaactgaacatttcaccaaagaagatattcagatgacaaataaatatcgaaaagctattcaacatcatctttcacttgggaaatgcaaattaaagcaacaatcaccacacacataata

SEQ ID NO: 758958 - DNA, 629 bp, Homo sapiens
actagaagcccaaactcagatccaagttctgccacttagagatttatggtcttagacaacttaattaagatcggaggccagatggggtagcccacgcctgtaatcccagcactttgagaggctgaggcggatgcatcacttgaagtcaggagtttgagaccagcctggccaacatggtgaaacctcgtctctactaaaaatacaaaaattagctggatgtggtggcacgcacctgttgtcccagctactcaagaggctgaggcggaagaatcctttgaacctgggaggtggaggtygcagtgagccaagattgtgccactgcactccagccaggggtctgggagacagagcaaggctccataaaaaaaacaaaacaaaacaaaaaaaaaaacagatcagggaccctcagccccttgtttgccaaatggggctaacatccatccagcagagctgttgtgaacatcaggaggaggagatgttcagcatgtagccagtgcctagcggccttctgtgcttgcttcagtaccagcatttgcagtaagtgaatctgaaatattaattcattaggacaatctaaagcacatatgacattaatacccagactcttcagtctacaaaagaccttggtg

SEQ ID NO: 758959 - DNA, 630 bp, Homo sapiens
aggctaaatcactggacaaagttctctctcatctcagcattaaggtgacaggaagacagagcactttttggaaatggaaaaggaagatacagtcaaggaagacctggaataacaccacaaatgtctaaacttatcaaaaagacaggagtatctcaattgctgtgctctgagggcagagatggaaatcacaaacgtgccaatataggagcagaatgaaaggtcgaaagagatttccaactgaatttaaccccatagggctttggcatcctagtaaaacttgaaacacagactttgtgaatgcttcttctctcagatacttctgagtctctgctctggtctttgcctggcagcagaactctgggtctaggctgcactgacagctgggcactcagaaccaaagtgaggcatgtgagaaactttggattgcattaattgaaartcagagttgctgtgggaactcccaactctacttaggaatgatattcgtgtagtttttactcaacaaatatttatggagcacttgctgtgtgccaggtgctgttctaggtacgggtatacagcagggagcaaaacagaaaaaaattccctgccctcatatgaccaatattctagtgcaatggacaaaaataa

SEQ ID NO: 758960 - DNA, 589 bp, Homo sapiens
cttactaaggcaacacaatttcaaaagagagacaaaagacttgaagacatttcaccaaagaagatatatgaatggcaaataagcacatgtagagatgttcagtcattagggaaatgcaaattaaaactgcagtagggtatcactacatgcctactagaatggctaaaattaaaagactgacaataccatgtgctgacacgatgggatgcaactygaactctatacactgctggcaaggaacacaaattggaagagctgatttggaaaacaactggggagtttctcaaagttaaatatacccttaacatatgttcccagtaaccctattcctagaaaataaccccactcgtttccccaagaaatgagaaaattatctacataaaaatgtatatgtttataatgacttttgtcataatcaccaaaaaatggaaacaaccaatgccaatttaaagcttaagaaaacctacatccatccaatgaaatacttactcagcaattaaaaggaacaaactactgatgcatgcaataacgttaagctaaatgaaagaagctagacacaaaagactaaatactgtattatcctatttat

SEQ ID NO: 758961 - DNA, 589 bp, Homo sapiens
cttactaaggcaacacaatttcaaaagagagacaaaagacttgaagacatttcaccaaagaagatatatgaatggcaaataagcacatgtagagatgttcagtcattagggaaatgcaaattaaaactgcagtagggtatcactacatgcctactagaatggctaaaattaaaagactgacaataccatgtgctgacacgatgggatgcaactcgaactctatacactgctggcaaggaacacaaattggaagagctgatttggaaaacaactggggagtttctcaaagttaaatatacccttaacatatgttcccagtaaccctattcctaraaaataaccccactcgtttccccaagaaatgagaaaattatctacataaaaatgtatatgtttataatgacttttgtcataatcaccaaaaaatggaaacaaccaatgccaatttaaagcttaagaaaacctacatccatccaatgaaatacttactcagcaattaaaaggaacaaactactgatgcatgcaataacgttaagctaaatgaaagaagctagacacaaaagactaaatactgtattatcctatttat

SEQ ID NO: 758962 - DNA, 589 bp, Homo sapiens
cttactaaggcaacacaatttcaaaagagagacaaaagacttgaagacatttcaccaaagaagatatatgaatggcaaataagcacatgtagagatgttcagtcattagggaaatgcaaattaaaactgcagtagggtatcactacatgcctactagaatggctaaaattaaaagactgacaataccatgtgctgacacgatgggatgcaactcgaactctatacactgctggcaaggaacacaaattggaagagctgatttggaaaacaactggggagtttctcaaagttaaatatacccttaacatatgttcccagtaaccctattcctagaaaataaccccactcgtttccccaaraaatgagaaaattatctacataaaaatgtatatgtttataatgacttttgtcataatcaccaaaaaatggaaacaaccaatgccaatttaaagcttaagaaaacctacatccatccaatgaaatacttactcagcaattaaaaggaacaaactactgatgcatgcaataacgttaagctaaatgaaagaagctagacacaaaagactaaatactgtattatcctatttat

SEQ ID NO: 758963 - DNA, 555 bp, Homo sapiens
tagcctaaatgcatcaattaaaagagatgttgtcagagtggatcaaaaaacaagacccaactgtatgttgtctacaataaaccaactttcaatataaagacacataaattaatgaaagtggtttgataaaaaatatatcatgctaacactaatcaaaagaaagcaaaaatagctatactaatgtcagacagagcagacttccaagcaataaacttatcagggataaatggcatgacataatgataaagaagtcaattctccaaaaaggcaacaatccttaacgtataggctcctaacaatacagcatcaaactatgtgaggcaaatactgatagaaytgcaaccagaaagatgaatccactgttataattagagacttcaacaccctactatcaggaatagacaaatccagcaggcagaaagtcagtaagaacatagttgaactcaacaataccatcaatcaactggacacaacagccatctagagactactttatccaacaacataatacacatcttctcaagctcacatggaacattcaccaaaataaaacac

SEQ ID NO: 758964 - DNA, 618 bp, Homo sapiens
ttttttaaacacaaagtttttcaaacagtaaaaagttactagattctggttacttcattgtaccttgaaggagtctgcctttattaaaaactgtctggagatgaaaaaaatcaacgatattatgcaaatggatgaaaaggctggcatatattacctcttcttagaaaccataaagaaaatgaaaaagcacatcagcaaaatgttaagtattcaaagatcaaacctgatttgaaaagtataatatgtgtagttattggtgctatgaaatagtttatatttagaggataaaatataaaaccaaatagttaacactatcatattgaataaaawcatttgattattcgaataaggcaagaattcaaaatattgtccaattgctttagttacaacatgtatagatcccagatagaacaaataacaattttgttagatttatagatttctaaaatcctgtatttctatatgtgaatatagattttgctagcagatgacataactgtggaatcatctgatctacatatttaatagactacttataaacacagactagaaaccaaaataatgtgaggggaaggagatcttttgatctgagaccatgtagttctgttcttgtaacgt

SEQ ID NO: 758965 - DNA, 554 bp, Homo sapiens
tttgacaaattcctcgagctcctacccttggggtggggacctttcgcctcccgtgaggtgccggctctcccgtgcttcgctgactgcccgcattgggtggggagattcgcctctggtgccgagggaaaactgcgttaggcgagggtggaagctctgtcggacccgtgcgagcacgtgggtgcgcgcgggccgcggagtgagcagcagccaggattcctctccagatcgcgcccccgccgcatttcattgcctgaaacggcccacgccccgcgatggcccagcagacacccggcacagcacagcgtcactgcgcggcccccgcagcgcacggacccccccmccctgcccgaccccagacccgcagccgagcccgtctggtatgtggtgggtggagagggtaccaactaagcatcccaaagtccttcagggagcaactccgcgcagttttctcttcccgacccgcagcctccgcagcagccgctcggagcacccccgggcaggtgccccgcgcgagctcagcgccttccccgcggatccccggcccctgcgggacc

SEQ ID NO: 758966 - DNA, 590 bp, Homo sapiens
ataataaaattaacctctgttcaaatttgctattgtttcttatggcagaaaaaaaattccctgatgagtccctattattgaatttttatttcaattaatatacttttcaactccagaatttttatttgattattttcttaaaaacaaaattcctatctccttattcacattatctgtttggtgagaatcattctcatactttcttctgactctttagacatggcttgctttattttagttctttgtgaatatttaaaatagcaaatttaaagtctttgtaataagcccagtagctgagctcatccgtgacactttctttgattgcgtttttgttgttgttgtttttgtatatcaatcgcactttcttgtttccttgcatgtctcatattttttaataaaacctggatatcataaataatacaatgtgccagatttcaaaatyagaatctgccccttattactatttgttgttgttgttgttgcttatttttcatacttttggtctgtttagtgacttcctaaactaattctatactctttatcatgtggagcctctgaaatctctgctcagttagcttagtggtcaccta

SEQ ID NO: 758967 - DNA, 528 bp, Homo sapiens
tctgactaagttgattttaaggactggtctccagttctgaaattcttgcctcagcttggtctagtctgttgctagggcttccaactctgttttgaaattcctgtaccgaatttgtcaattccagaagtttagtttggttctttcttaaaatgcctatgtcatctttcaagtcttcactcatttttctatgttctttggattggatttcaactttgttttgaatcttgttgagctttcctgacatccaaattctgaattctgtgtttgtcatttcagacatttcagtcttattactatccatttctagggagctactataatctttcagaagtaaggaaatactctgactttctgagttgccagcgtycttgcactaattcctattcatctgaggggtctggtgtttcttttctttttgaaattgctactatttagatgggaccttttattttcatattctttttactttgaggatttgactgcagtgtatattgtgggtaatcaattggctttgtatctgagtgcttg

SEQ ID NO: 758968 - DNA, 552 bp, Homo sapiens
gatttaaatattaataagctctactcttaaatgccaaaataactgtcactctagttaaacttaaacgtctttcccaagatgctgagaataagaatatagtactgatatgtgattattaaagataacatttaaatttttatttattattaaatgcaattagaaacatagacatctcaaaataactatatttaacaatttattagtaaatatttggtgagtcatataaggaccttacctcttgggtgtaattaggtaatataagtttctttaactagaaagcctagtacagtgccttcaaataatttaacatgctagtggaaataatgtttattattttttaagttgaaaaacaactgtgtttrcatattttctacacacaaatggttgtagaatgagggaaataaaagagaactacttaaaacaattggttgagttctatcaaatttagttgaaaacaatatttgcccctaaagattaaaaggctctatgaattcaacaatttagcatttttgcttcagtgaaatgagcttacagatttgcatgtcattttaa

SEQ ID NO: 758969 - DNA, 552 bp, Homo sapiens
gatttaaatattaataagctctactcttaaatgccaaaataactgtcactctagttaaacttaaacgtctttcccaagatgctgagaataagaatatagtactgatatgtgattattaaagataacatttaaatttttatttattattaaatgcaattagaaacatagacatctcaaaataactatatttaacaatttattagtaaatatttggtgagtcatataaggaccttacctcttgggtgtaattaggtaatataagtttctttaactagaaagcctagtacagtgccttcaaataatttaacatgctagtggaaataatgtttattattttttaagttgaaaaacaactgtgtttacatattttctacacacaaatggttgtagaatgagrgaaataaaagagaactacttaaaacaattggttgagttctatcaaatttagttgaaaacaatatttgcccctaaagattaaaaggctctatgaattcaacaatttagcatttttgcttcagtgaaatgagcttacagatttgcatgtcattttaa

SEQ ID NO: 758970 - DNA, 617 bp, Homo sapiens
aaacttaactgcaactagctcacgtacttgctacattcaagtcctgtgttgtggtgagcatactagtcgttcatttgctgccaaaattgcatgattaatctgtggcttcaaaatcaaaacaaaaactcagcaatgaaatacaggttgaagaggactattttccacggaggaagcgggagatcatctcgtggttctggagggaaacatyctttctctctgcttttctacttctgagaaatatttatgacactggcttgagcacaattctcagattcttgactgtgagatttcttgccatatctttttgaaaactggacttttcttgatgatctggaaattgttgggagctcatctgacacagagttcagtaaaaaggctccaacgtcataataattcctgccacagagattcagcaatgactgtctcacccagttgctgtagggcttgtctgtgctactccccaaattgcacaacttagtaattttggcaaaagtttccaacaatttaggagaatgatccaaagttatctggcatcatgcatgtattaacttactctctcatcctgaagaaggtactattattaccattttaggagtgtataaactgagtttatatgt

SEQ ID NO: 758971 - DNA, 617 bp, Homo sapiens
aaacttaactgcaactagctcacgtacttgctacattcaagtcctgtgttgtggtgagcatactagtcgttcatttgctgccaaaattgcatgattaatctgtggcttcaaaatcaaaacaaaaactcagcaatgaaatacaggttgaagaggactattttccacggaggaagcgggagatcatctcgtggttctggagggaaacattctttctctctgcttttctacttctgagaaatatttatgacactggcttgagcacaattctcagattcttgactgtgagatttcttgccatatctttttgaaaactggacttttcttgatgatctggaaattgttgggagctcatctgacacagagttcagtaaaaaggctccaacgtcataataattcctgccacagagattcagcaatgactgtctcacccagttgctgtagggcttgtctgtgctactccccaaattgcacaacttagtaattttggcaaaagtttccaacaatttaggagaatgatccaaagttatctggcatcatgcatgtattaacttactctctcatcstgaagaaggtactattattaccattttaggagtgtataaactgagtttatatgt

SEQ ID NO: 758972 - DNA, 614 bp, Homo sapiens
tggacttttcttgatgatctggaaattgttgggagctcatctgacacagagttcagtaaaaaggctccaacgtcataataattcctgccacagagattcagcaatgactgtctcacccagttgctgtagggcttgtctgtgctactccccaaattgcacaacttagtaattttggcaaaagtttccaacaatttaggagaatgatccaaagttatctggcatcatgcatgtattaacttactctctcatcctgaagaaggtactattattaccattttaggagtgtrtaaactgagtttatatgtattaattttcctaaagtcacataaataatgagaatgagagccaggaatctaaccctggcaaatctgattttatagctctcctcttcccaatatattttattgccatgattaaagatttgtgtgtgtgtgtgtgcgtgtgtgcatgtgtgtgcatgtatgtgtgtctttgagagacagagacggagagaaagaaatacagagagaaaagaaggaacagtttttcctcttcctaatgtttggaaagattttctttacattttgtaacttcatctggatatctttataaaatttaacttttgaaaaaatgtt

SEQ ID NO: 758973 - DNA, 614 bp, Homo sapiens
tggacttttcttgatgatctggaaattgttgggagctcatctgacacagagttcagtaaaaaggctccaacgtcataataattcctgccacagagattcagcaatgactgtctcacccagttgctgtagggcttgtctgtgctactccccaaattgcacaacttagtaattttggcaaaagtttccaacaatttaggagaatgatccaaagttatctggcatcatgcatgtattaacttactctctcatcctgaagaaggtactattattaccattttaggagtgtataaactgagtttatatgtattaattttcctaaagtcacataaataatgagaatgagagccaggaatctaaccctggcaaatctgattttatagctctcctcttcccaatatattttattgccrtgattaaagatttgtgtgtgtgtgtgtgcgtgtgtgcatgtgtgtgcatgtatgtgtgtctttgagagacagagacggagagaaagaaatacagagagaaaagaaggaacagtttttcctcttcctaatgtttggaaagattttctttacattttgtaacttcatctggatatctttataaaatttaacttttgaaaaaatgtt

SEQ ID NO: 758974 - DNA, 625 bp, Homo sapiens
tttgaattaaattttacatgaagtataaatgagttgattaaacaatcttatttgtacactacttagttttaaaggtacaaaagttacaaaatattggtagaaattaaataattctgactaagaatatgctgtgctattacacccaaaaaraaacgtttttctccgctatctaataaaacatagactggagattaatgggcagagggagacaggtggagaagtttctcctgtctaatatatactgcttttcaggattttttcttatccttctgcctgctcttatttgaaatatttttcctccgttcctttacaaaatttgtatcttatagaaaagtctgataaaaaaaagtgagaaatttcatttaatccttgatcctatagataaccactgtagtggttgggtatatattttccggggttagggatgcatatgtgactatgtgaaagttagtgtattttctctagacttgttcttatatatattttctaagatttagatcatgatagaaaggctatttgaaataatatttttctttgtaacaatgcatcttgactctgcatgtagagactcagagggattttgcaactttatcctccactgaaaatataatataacatttagatt

SEQ ID NO: 758975 - DNA, 625 bp, Homo sapiens
tttgaattaaattttacatgaagtataaatgagttgattaaacaatcttatttgtacactacttagttttaaaggtacaaaagttacaaaatattggtagaaattaaataattctgactaagaatatgctgtgctattacacccaaaaagaaacgtttttctccgctatctaataaaayatagactggagattaatgggcagagggagacaggtggagaagtttctcctgtctaatatatactgcttttcaggattttttcttatccttctgcctgctcttatttgaaatatttttcctccgttcctttacaaaatttgtatcttatagaaaagtctgataaaaaaaagtgagaaatttcatttaatccttgatcctatagataaccactgtagtggttgggtatatattttccggggttagggatgcatatgtgactatgtgaaagttagtgtattttctctagacttgttcttatatatattttctaagatttagatcatgatagaaaggctatttgaaataatatttttctttgtaacaatgcatcttgactctgcatgtagagactcagagggattttgcaactttatcctccactgaaaatataatataacatttagatt

SEQ ID NO: 758976 - DNA, 562 bp, Homo sapiens
tttaacatggttgtaaggtcagatctgcaaaacagggtgttcagagatatctagtgctactaactcccctgtgtcccataaataaccactttactggttttatgtttacccatccattcattatcgttaatataagtaakcaggaatatatatttctatctgtcttttcagagagaaacagtagcatactacatatactttttcttactttgcttttttttttcagttaacattagtaaggttcatgtatttccttctgcttttgatttttaggaatgaccttttttaatgaattgatccatctgattgatttctaaaaattgcctgttccaaggtggttcaattctgctttccagcaaggcctaccactctgggtaaggggcaaagagcccctagaattccatgtgcagcagcttgcaagagaataggctattttgtggtttcttcctcttctgaacatcatgacctcactgcttcttcgtgacagagtggggtcttgtgagatgctgggagcagcaccagggcaggagctggagacttaggagtcaggctctactaatgg

SEQ ID NO: 758977 - DNA, 612 bp, Homo sapiens
gtcaaggaatggggcttaaaaatattaaagacaattctagaagcatattttcgtattgagagtgagaagtcagagggacacatgaggctactgatggggcagacagcgtagaattaagaggtggcaaaaagaaagyagacctctcccactccaagtttgccttctgcaagagaacaggtaccagcccagaaaaggcagctgcagttgccgcatctgtcagacgctgagggcctggaagactccacggagagcaatgggtgctctgagtgctcaccttcatgcctcgggaatggggcgatattgatattgattggagtaaaagaaatctttacatgaggtcataaatggcccctgaccatgtctgaggaatcctggagaacagatataagggttaatttcatgtcaacctgactgggctagggggtgcccagttagctggtaagacattatttctaggtgtgtctatgaggacattttcagtcagtagactgagtaaagatctctctcccagtgtggatgggcaccatccaatccgccaagggcccaaacagaacaaaaggcagaggaggggtgacttcactccctcttcttgagtggcgacatccatcttct

SEQ ID NO: 758978 - DNA, 633 bp, Homo sapiens
aatccagactgaaaaaggaaaaacagtagagtcaatgaacttcctaccaggcagtgatgctggaattacagaatcaaagaacagtagggacaatgaggaccttagaatccattatgtccaagtccttgaattacagatgagacattcaaatctggaaagatgaacaagctggttcaaggttttgcagaaaatgagcaacagagctgggrccaggttctgcagctcactggctgtgcatcccaggacaagttacttctctaagcacaagttccataacacaatgggaatgttacccttcttctctgggctgctagaggaccaaggaggtgaagcctgaaaaccctaagccctgtgaagaggaaatttgtctcctaaacctagtccaggcacccccagtgaaatttttacccaagatcttctttccctatattgcctagggagtatttaggaaaacatggaattagctaaattactttttcagcattactatcatcattattattattatttgagacagggtcttgttttgtcatccaggctgaagagctgtggtacaaacacggctcactgcagccttgacctcctgagctcaagcaatcctccttcctcagcctcccgtgtagccagtatcat

SEQ ID NO: 758979 - DNA, 633 bp, Homo sapiens
aatccagactgaaaaaggaaaaacagtagagtcaatgaacttcctaccaggcagtgatgctggaattacagaatcaaagaacagtagggacaatgaggaccttagaatccattatgtccaagtccttgaattacagatgagacattcaaatctggaaagatgaacaagctggttcaaggttttgcagaaaatgagcaacagagctggggmcaggttctgcagctcactggctgtgcatcccaggacaagttacttctctaagcacaagttccataacacaatgggaatgttacccttcttctctgggctgctagaggaccaaggaggtgaagcctgaaaaccctaagccctgtgaagaggaaatttgtctcctaaacctagtccaggcacccccagtgaaatttttacccaagatcttctttccctatattgcctagggagtatttaggaaaacatggaattagctaaattactttttcagcattactatcatcattattattattatttgagacagggtcttgttttgtcatccaggctgaagagctgtggtacaaacacggctcactgcagccttgacctcctgagctcaagcaatcctccttcctcagcctcccgtgtagccagtatcat

SEQ ID NO: 758980 - DNA, 631 bp, Homo sapiens
tcccagggctctggaggcttgctgaggaagagtctttcccaccaggaaggggcaaatacaaagctaggcagggtgtggctggaatcctaagcaggggaggacaatagagccttatccttgagtcccagagcacttttgccctggtggctcttgtgtagggtctgaatctttgtaaggtctgaatccaagcagagattttcccaggcccctcagacgactggggcttatactctgctcactctgcccatctcctgrttggtaagcttggtgtgtgtgtgtgtgtgtgtgtgtgtgtgtgtgtgtgtgtgtgtgtcccctcctagagttctttgaacaacagcaaagaaaaaaatctatgtactggcattcaggtacatcctgcaccccctttatcctctctatacaacctgtccagggctcagccacaagccagttctcctgcctgaactctgaagacagatcgctttatccccgactcccacacgacaccatctgctcccgttgctcctcttgacaagcacacagagctcagtcttccgaccttcttcctgtttccctaactatttaaatccaaacaaattagacttctgactcgacaggattgaccacatgcatttaattcaactcctgc

SEQ ID NO: 758981 - DNA, 586 bp, Homo sapiens
aagacaggagtgtgcatgacatcttcctttctcctgggcacatgggcttactgacatggggaggagaaccaagaccctgatgtgggacccaaggctggctggcagctcattctctatccagtgatattttagaaaagacctgtgctaagagggacaggatgctgctgatggctgagatttgagagagagagagggaggcttttgctcccatcttttmaggaacaaacaactttcctgttgtagagaatgcttgcgtgattaggagcttgagttcttgaagcagagagtcctgaattcagatctcagctccgccacttactctatgaccttgggcaaatcgcttcatccccaggacgaagtttcccccatctgtaataataataggtctaccaatagcagagagggtaagtggatggtacgtggagacaggctgcctgtttcaaaccccagtcttgccatgtacttgctgtgtggcctcaggaagcttaagtcaacctctctgtgcttcaatttcctcccttgtaagatggtaataataacaacatcttcaagactaaatgagttaacatgtgagaaacaatgcaaa

SEQ ID NO: 758982 - DNA, 586 bp, Homo sapiens
aagacaggagtgtgcatgacatcttcctttctcctgggcacatgggcttactgacatggggaggagaaccaagaccctgatgtgggacccaaggctggctggcagctcattctctatccagtgatattttagaaaagacctgtgctaagagggacaggatgctgctgatggctgagatttgagagagagagagggaggcttttgctcccatcttttcaggaacaaacaactttcctgttgtagagaatgcttgcgtgattaggagcttgagttcttgaagcagagagtcctgaattcagatctcagctccgccacttactctatgaccttgggcaaatcgcttcatccccaggacgaagtttcccccatctgtaataataataggtctaccaatagcagagaggrtaagtggatggtacgtggagacaggctgcctgtttcaaaccccagtcttgccatgtacttgctgtgtggcctcaggaagcttaagtcaacctctctgtgcttcaatttcctcccttgtaagatggtaataataacaacatcttcaagactaaatgagttaacatgtgagaaacaatgcaaa

SEQ ID NO: 758983 - DNA, 422 bp, Homo sapiens
tcatggctcacattctgaggtttcagagcagctcctcctctcctcccccacagtggaggaagccagccatttgcctgggtggagtatctgcgggtcaggtctttagaaatctaaatgtccacataggccaccactcacccctgtttaccacctgcagtcccagctttcatgtgagccgaggagggagccccttgagagtataaccagaggcttgatytgcgttctcagacctcctgggtggctagacaaggccctttcagctgccatgggaaggcgggtggactgtgctggtgcggggctgccctgatcccacaatggccccctgactccaaggcccagaggacacctgaaccacatctggctgagcctcctcaggccctgtgccttctctctgcagccaaggagacagaggtggagtgggc

SEQ ID NO: 758984 - DNA, 567 bp, Homo sapiens
caaagagtggttcagttggtctctgtgggtagggaggtgtcttgcaggacatgaggcctgacctatgcctttgggaatgggtaggatgtttgactagatggaagggaagagagaagaagatgaagagagaagacatgatgttagcaaaggttgagtagggcacagtgttgggatgttagagtaatagttaggaggcagcacagctagaggaggatcatattgggtgttactcaagtggggggctgagaatggtgaatgcagaggggtctgtgtgtgggctcagatgttggaacctctgtccaacccagcccctgttgtgtgccttgaacttttttcttgtatctttctctggtgttccatacaggcaaagtctgttcccctgtatcagtcaggatagcctagataatgctgcagtaacaaacaascccaaatctcagtaacattaacattaaacaaccaacaaccaaacaatccaaatcttagtaacattaaacaaccagggcacagcttggtggggcagttccgttttaaccagttgccatgacagagaaaaaggagctctggagg

SEQ ID NO: 758985 - DNA, 485 bp, Homo sapiens
ctaggtgtcaggatccctcaaaagcacagtggctctgtcgggacagcagggcgctctttctgcccagggtctggagggggtcgcgggaagccggggccgcccagcgggctgggcgcggctccctctggggtctgtctgcggcaggcccaggctagcaaggaaasaaggccttgctgccgggactacgcccggatggtccagggcgcgggaaaccctcttgccctcctgcaaaccgaagaccagaaggaatagctggcgagccgcctgcagggagggctggactgagagtggtccctctgttctgtcctggccacaccggcccgtgcatttcctgggatgggatctgcgagtctgcgaaggccactgggcaccctgcatctcccaccagcggccaaaggcaggaaaagtagtaaattcaaagccagttgagggtcatctactcctttcttctcaccattgttcctaaatgtccccggtttgtcttg

SEQ ID NO: 758986 - DNA, 550 bp, Homo sapiens
aagttacactagagatgttgtatgttttactctgaaataaagaccacttcaaacagtatactttgtgatatttattaaaattacttcatgagagagaaaatacataggccaacaactgctcgaagcatcatacaggaaagggaatgatgccaggcagcaggttataggaargggttaagcggcagctatttttcctatggaaacgtctagctttatttaagatcttatggattaatcagggggagaaaatatcatgttagaaaaattaacaaatagcctttataaaaataattttagaattatgcttaaaaatcttcaagagataagggtctaacagtcactttttagtactctaattcaagaagagcacctttggagacagaatgtaaagagcagattgagggcagagatttaatttttcttgtttatgttaatactcagatcccaaattagttgttggcacgttgtagacatgcactgaaacatgtatccaaaataaataaaagaatagatagaagattgctgaagagcaaaaattactgttctagtg

SEQ ID NO: 758987 - DNA, 649 bp, Homo sapiens
tcaagtcatgacttcaaaaattagcatgcagacttggctgggagagttctctgatggctggaagatgtgtgtgggtgtgtttatgcacattttgttttttatactagctgcatttgacctatttttccccacagtggggatggcttgttgggcccatgaacactttgaggagcaggtctctgggaaggcattttatgaatcagaatggctggttgcccatgtagtaatcatgaagaaggagatgcatgttgaatgtaaagaaggatcctttgacagacaaaccaagctcacactagcttatgggaaaagagaatgcactggatcatagaacagaaaattctagctccagatatggctggatccaggggctcaaatgctgtgggtatctctgtctctcctgtacttctgatgggcattattcttargacaactcacttcttgctgcaaccaagtggcccttggtcagttggagacctgctttgtccatggtgtaaatatgtaaaatagggtcaataatccctgtgtcacagggtttacaagggtcaagttagacaatgtagataacgaacccaacacagcacctactgcaggatcagtactctagttcagtatccagcacatggtggaggtattttttgtgtttttaata

SEQ ID NO: 758988 - DNA, 583 bp, Homo sapiens
ggaatattaggaggaattctattcctgtcatcctattactagaatatcttcctatccctcttcatttcttttacctttatacatactcatgttttcagctacggtgctaatgaacacataatatatcctgcttgttaaaacttaatcatgaagtattttttgtattccgaatggtcttcatagtgtttctaacaagtgcatactttgccaaatggacagactgtcattatcctgttctgtgttcagatggagaacttaggcatttgttttgtttttcgtttgtttttactgtccagtttagaacttgtggttgagccgtggattgctggactctggccagccctcagaaagcattttaggtcaagcagaggacaagaggagataagtggcgcactcccggtggcatcacctgcatcctcgaggacagacctygtgaagtcagagctgctacacattgaatctcaagtcgagcttctgagattcgatgattcaggaagaaaggattctgaggttttgaagcaaaatgcagtgaacagcaaccaatccaatgttgtaattgaagactttgagtcctcacttaccc

SEQ ID NO: 758989 - DNA, 641 bp, Homo sapiens
agtgctcacagtgtgtgggtggagttgatattttgggttctaatgtttacaagaaacaatcttaataaccctactgtttttgcttgtattacaggaaattttgaacacacataagaattgaaagaaaagtataagaattgaaagaaaagctggctcagtggctcatgttgtattcccagtgctttgggaggccacggcaggaggattacttgaggccaggagctatgatcacgccactgctctccagcctgagtggcagagcaaaacccatctctaaaaaaaaaagtataagtttgcaagttcctctattcagcatgaaaattaccataattttccaatcatgtttcatctattctttaactttttctttttttttttttccactggaatgtttctagagaaatccaagctatcatattattttatcctaaatacttcagtattcatctataattgataagctttttttctttttwtatctaatcattcagccattgttacaaataacaaaattagttattattccctgtcatcatttaatgtgtagtctatattctaaatttcctgtactatctcaaaaatattttttaactgttgatgtttttgaatcaggatccaaagtccacgtatgacttttagag

SEQ ID NO: 758990 - DNA, 478 bp, Homo sapiens
acaataacttacctaaactttcagaattcaacaacattttctctttccaatgtccattaaacatatttctgttaagggaaagtgaggaatcgatcaaatatttaacaaaagttataatactagtaataagaaggcagccatttgcctagaactttataatttttgaaaacactctcccatatcttttttgtctcaatagaacatttgctggtagtttttyttttttctcaatctacactgagttaacacttgtataacccgcatactaagaaacagaagactatagatggaaagctccagttcatacagcttggctgcctggatgtacagaggaagatcaaggtcttgtcaagatgatgtcacttgttgagatggtgtgtgaatgaatggcttgtcaagatggtgtaagaaccagccttggaaccaactttgtgattcgagttttcttggtttaaaaaaaaaaaaaaatccaatgaca

SEQ ID NO: 758991 - DNA, 630 bp, Homo sapiens
gctcccagaattcccatgtgttgtgggaaggatcctgtgggaggtaattgaatcatggggacgggtctttcccatgctattctcatgatagtgagtaagtctcacaagatctgattgttttaaaaaggggagtttccctgcataagctctcttctcttgtctgccatcatgtgagaagtgcctttcaccttccaccatgatcatgaggcctccccagccatgtggaaaygtgagtccaataaacctctttcttttgtaaattgtaaattgcccagtctggggtatgcctttatcagcagcgtgaaaacagagtgatacagcggctaagtccctcagctgtactgggtcttgtgacagtagctcacatattttacagagaaacttcttacaaagaaattacaactttctcacttccccttgaaaatactgaagcaaaagaaaaacttaataacctacagatatgttctgaaacaaaggcagaatttaactgctcttatacacaatggagtcatgatcttttgttaaagtcatccacctggaaaaataaaaacatgatttagaccttttctgaacctgttctttgcctgttaacctttagaaaatgaattaaagctgtgaaaggtgctgagt

SEQ ID NO: 758992 - DNA, 630 bp, Homo sapiens
gctcccagaattcccatgtgttgtgggaaggatcctgtgggaggtaattgaatcatggggacgggtctttcccatgctattctcatgatagtgagtaagtctcacaagatctgattgttttaaaaaggggagtttccctgcataagctctcttctcttgtctgccatcatgtgagaagtgcctttcaccttccaccatgatcatgaggcctccccagccatgtggaaatgtgagtccaataaacctctttcttttgtaaattgtaaattgcccagtctggggtatgcctttatcagcagcgtgaaaacagastgatacagcggctaagtccctcagctgtactgggtcttgtgacagtagctcacatattttacagagaaacttcttacaaagaaattacaactttctcacttccccttgaaaatactgaagcaaaagaaaaacttaataacctacagatatgttctgaaacaaaggcagaatttaactgctcttatacacaatggagtcatgatcttttgttaaagtcatccacctggaaaaataaaaacatgatttagaccttttctgaacctgttctttgcctgttaacctttagaaaatgaattaaagctgtgaaaggtgctgagt

SEQ ID NO: 758993 - DNA, 629 bp, Homo sapiens
tctgagatttatctggcgtatgttgtgaagtaggacttcacttttaatttttctcagatgactaatgatctgtctgtcctagcatcatgaattgaataatccattccttatccccactgatttgaaatgccacatttatcattttttattttccagaatgttttccattgtatttctgggctatgcagatgatatgtctgtaacttatgtaccagtattatactgtgttagttattaggtagctttgtactatttttagcatctgttagccgtctcctttttctctcttttttccttggaaatttcctgggttcattgatatttattttggtctttagactataatacagtattactgttatytattttgttgctcaagttgttctggcttaattttggaagagtaattctccccagttggctcctgtgcccttcaatatacctccatccttgtcttgtgactacttccttagtttccgtcacctcaagatacttcaggctcatcttgtattttctctgccccagccctgaaattaactgtttctccaaggaaccctggattagagaaggaaatttaggaactaagatctatgcactagatgtgctcattgctacaggagtgtcactac

SEQ ID NO: 758994 - DNA, 555 bp, Homo sapiens
tgtctttatctggttaaaaaaacacatatttttaccagatatagaattccaagttgatggttatttttccttagcacattgaaaatattgtatcattttcttggtttagattttactgtcaagaagcccattcttagtccaatggttttccagcttaagtaatctatctgtagtaccattaggatctcttccttgtctttggcattctgcagtttcactatgttgggtgtgtgtgcgtgtgtgtgcatgtgtgtgtgtgtatccacatgtggctgctcatatgtatgtatatatatgaacatatgttcattctgcttagaatttgttggactttatgaaactgaagrtttatgtctggaaaattattctcagtcattatggtccccatttctctcttcttccagactcttgatttgttttgtctgatttattactttattctttgtaatagttaacccatcttttattttttcagatctacctgaataaaaataagattactgtttgggaaagtgaaggaggaaatgaatattgtatgggcaacctattaaagtc

SEQ ID NO: 758995 - DNA, 603 bp, Homo sapiens
agcagccagaaagagcagacagtaaaacacagacaagacagctcaggcacagagggaagtgaagggaaagtctcttgggtaactgccaaacttcaccctcatacaatggaccccagtaaaacagtaggccttaataagcatattcctttcccttcaggtgcactaagatagggaacctaaaagcagacttggagggtatgcctgcagctgcagaaagatgtatgggaacagacacgcaactctccctcccagataagcacaacaaagagacacagaagcagtccaaacctctaataaactctcccaccctgaatccttaaaaactcttagtctgggcagggcgtggtggcttaggcctgtaatcccagcactttgggaggcttaggtgggtggatcacgaggtcaggagttcgagaccagtctgkccaacatagtgaaaccccatgcctactaaaaatacaaaaaattagcctggtgtggtggtgtgtgcctgtaatcccagctatttgggaggctgaggcaggagaattgcgtgaacctgggaggcggaggttgcagtgagccaagatctcgccattgcactccatcccaggtgagagtgtg

SEQ ID NO: 758996 - DNA, 386 bp, Homo sapiens
actaagtctacatcaatcaaccacattcacaattacataatagtgcttgtcatcacttgccctccatcctctcagcttgtttaattctcccaacatgaccattttttaagctcatcaggaactccagtccattgccccattcctttcttacaatccatcatccctctattttatttcacctttctctttatccagcttagattatgtctttccacagcactcttgccaatatcckaaactcccactttctgttggcctcacctgtatggcaaaacgctgcccctggataaaaccaactctatgtgttctttgtgcctacatctgcacatcctagtgctatttgaaagaggccctacgtggattggtaacccccaaaattcatttta

SEQ ID NO: 758997 - DNA, 537 bp, Homo sapiens
atcccagctacttggtggaggttgcagtgagctgggattgtgccactgcactctaggctgggtgacagagcgagactctgtctcaaaaaaaaaaagaagatgggagtagcagaaggaatgcgggacgtgaaattggaaatcctgggtcctgctttcaaatcttttatgtaaatatgtgattttasataagtcacttaatgcttgagcttgctttctcttctgtaaagtacaagttatatgtaaagttccttctaacatagccatttcattggccagataagaaagaaaaaggagtactgtcatgatctgccacctacttaggccccttctgcaatgtgaaatggacactgtgagtataaaaacatactcaaaagtatattttttaattctctcactcaacagtcaacacaaaagacttctgtgaccaaatgtgggggatttctccccactaacaagcaatcagttttgcagcagacaccagctggatgtcctctaattcagttctcacactgtcaccctagaaatagcgtctgattc

SEQ ID NO: 758998 - DNA, 537 bp, Homo sapiens
atcccagctacttggtggaggttgcagtgagctgggattgtgccactgcactctaggctgggtgacagagcgagactctgtctcaaaaaaaaaaagaagatgggagtagcagaaggaatgcgggacgtgaaattggaaatcctgggtcctgctttcaaatcttttatgtaaatatgtgattttagataagtcacttaatgcttgagcttgctttctcttctgtaaagyacaagttatatgtaaagttccttctaacatagccatttcattggccagataagaaagaaaaaggagtactgtcatgatctgccacctacttaggccccttctgcaatgtgaaatggacactgtgagtataaaaacatactcaaaagtatattttttaattctctcactcaacagtcaacacaaaagacttctgtgaccaaatgtgggggatttctccccactaacaagcaatcagttttgcagcagacaccagctggatgtcctctaattcagttctcacactgtcaccctagaaatagcgtctgattc

SEQ ID NO: 758999 - DNA, 531 bp, Homo sapiens
actataggataattatgaggactgagtgaggcagtgcacacaaagttcttaggctggcgcataataagtgcccaatacaacaattttttattgtagttgacgtttagatagttggttttcaataagcatgtttttcttaaacctgattatttaaagtcatccaatgattcatttgttttccttaatttcagttgttagttggagaaatgtttacagcctagtgaaaatgtgtgyggtagaccagtaagatcacctacttaataaaatcatctatttgctaggttaaattttgctctgtattattaattatggaaattgattttcttgctttgaaactttattatgtttacccagttatttatcctagtgaaataaattatcaacgaaaatgctgcttctaaaattttcattgggatgattgataacttagaaatgtcatatttattgaagaaatagaattatttttattcagaacaaattcactttgtgattatgcacatttaattttatttatagacttttacatcccag

SEQ ID NO: 759000 - DNA, 531 bp, Homo sapiens
actataggataattatgaggactgagtgaggcagtgcacacaaagttcttaggctggcgcataataagtgcccaatacaacaattttttattgtagttgacgtttagatagttggttttcaataagcatgtttttcttaaacctgattatttaaagtcatccaatgattcatttgttttccttaatttcagttgttagttggagaaatgtttacagcctagtgaaaatgtgtgcggtagaccagtaagatcacctacttaataaaatcatctatttgctaggttaaattttgctytgtattattaattatggaaattgattttcttgctttgaaactttattatgtttacccagttatttatcctagtgaaataaattatcaacgaaaatgctgcttctaaaattttcattgggatgattgataacttagaaatgtcatatttattgaagaaatagaattatttttattcagaacaaattcactttgtgattatgcacatttaattttatttatagacttttacatcccag

SEQ ID NO: 759001 - DNA, 643 bp, Homo sapiens
agtgacacaggaaatcacactccagcactcagagatagcaggcctccgggactgaatgacaatgctgtaagaaattttcgctagggaatgtttgacaggagatgccacttctaactctgtgctttcagtttctaagttcaagtgagttggtaagaaaaatcctgctaaagacatttatatgatcttcagacataaggagacagtaaaggaatatgcagtagcagctacagtaaaaatgtttttagtttctatagtcaaaagatacatgcagaggatggcttccaaaaccaagtgcaaaaagggtatagtcaaatcatcaagtggtcttacaaaatgatttaaaaaaaaaaaacctgagtaatataaactattttctacaaaggctaagtgaggtcaaaaatttacaatacagtgagaaagggatggattatgctcttaagagcaggggatcttgttaccaccctcttytcatgtctaaaaatattattgaatgaatacttttacagagcttataatgtgccaggcactgttctcacagccttacatattaaatcatccaatctttaaaatataattatctgagacaggtattacaactatctccatgctacagaagaggaaacaagcacagagaggtcaacta

SEQ ID NO: 759002 - DNA, 623 bp, Homo sapiens
cttgctaaatgtctcttggtttctgagtagacaatcaacagatgctgtttaatgctgttggtaaatctaaaaatgacaatcactgactgtgaaactaacgaaatgtgtttcaggaatcttgacttgcaggggccctttgcaaagcattgggaggagccctaacaatgtgtagttgtaattctgtgttctttttcttaaaagggtgtgctcccagatgagtaaattcggtacccacaaaatttggatgcactactgagcttctaccttcttttggaagggaactatgcatttggagggccaggaagctaaagtatccttagctgtagggtaaatctatctctcttttctggcaaccaccaatataactaaagacagaaatcattgacattggttgcttcaggggaycatcttggtagagttggggtggggtgcagaaagaggcaggtgtgtacttttcattttatagacactgctgtgattttatgtgtttaattttaccctattatcttaaatatatatgtattttttaatagtgacaagtaatttacaattcactagtcaacatgctcttttctcttccatgcatacaaaagccataggttgaaggcaaaagataggactgc

SEQ ID NO: 759003 - DNA, 623 bp, Homo sapiens
cttgctaaatgtctcttggtttctgagtagacaatcaacagatgctgtttaatgctgttggtaaatctaaaaatgacaatcactgactgtgaaactaacgaaatgtgtttcaggaatcttgacttgcaggggccctttgcaaagcattgggaggagccctaacaatgtgtagttgtaattctgtgttctttttcttaaaagggtgtgctcccagatgagtaaattcggtacccacaaaatttggatgcactactgagcttctaccttcttttggaagggaactatgcatttggagggccaggaagctaaagtatccttagctgtagggtaaatctatctctcttttctggcaaccaccaatataactaaagacagaaatcattgacattggttgcttcaggggacsatcttggtagagttggggtggggtgcagaaagaggcaggtgtgtacttttcattttatagacactgctgtgattttatgtgtttaattttaccctattatcttaaatatatatgtattttttaatagtgacaagtaatttacaattcactagtcaacatgctcttttctcttccatgcatacaaaagccataggttgaaggcaaaagataggactgc

SEQ ID NO: 759004 - DNA, 606 bp, Homo sapiens
catcctacaaatcacttacccaaatcagactgtcaagattatagatcctgcctcagaattgtttggtacatttctatgtgaaatcttcttcaaaaataaattcatcaacataaattaacatgagacttttcttggttttctgacatggtgaatttcagaatagacaatgaattaaatattttaatggaaagagggaaacacaaacttatccctaaactagtacatgaggtactcatacgctttataaaaattagtatgaaaattaatgtaacacatgtaaacgaagcattttaattttttacaaagattattttgaaaacagttcaatagcttttaaatgaatatggaaggtcaataatacatatataattttatatatggatatttttgtataaatataaatatccmtatttatacataaatacccatatattaaaaatatattatacacacacgcacacaaaataatgacaaataagaccactgtatagtttttaaattcatataagtataaagtctatatacctgagccaacctctttttcctcctcttcaatgttgtttttgatgctatcatattcctcatcaatggtctggttaccacgca

SEQ ID NO: 759005 - DNA, 558 bp, Homo sapiens
ttttgtgtctagcttcttttaatcagcacaatatttaaaaaattcattcatatggttgttccttctatgtcactgattcatttatctactgttaccagactgtcctgattactttagtgttataataagtcttgaaattagacagtgaatcctccaactttgttctttgagatagtttagcaattctaggtcctctgattttccataaaaaatttagaatcaacttttctggtkgaatgaatgtaagtgatgatagtggatatctttgcctagcaaacagtcataagggaaagcatcattttttcaccactgagaataaagctggctgcaatttttttgtgtggatgtcatcttctactctggtttcctgaaaggttttatcataaatgaatgttattctctcaaatattttctctgcatatactgagatgatcatacagatttgcctccattgaataatttcaatatggtgacttgcatggattatttttccatatgctaaaccaaccaaccttcctgggtcatgatttattccccttttacatactgcttggttca

SEQ ID NO: 759006 - DNA, 572 bp, Homo sapiens
actggagtggcctgaaaaactatcatgtggtagggctacgatgtcacttggagcccatttgagatgaaggaaaaagctttaacccagatataagattgaagttttaaagcaaatggacttacacaaattgaggaaaaggatttgagaactctgctatctatgagaaactgtgggcagttctacaaagcactgctgtgtgaagtaagtagagaaaaacacagtctttcatggttgaactccgtgaagttaagactgtataaggaacaagataactgtctgcaaatcagaggaaacttctctgtggaccagtacaggctcacagattgatttttaggaaagacctaatctggtccaagccttcactttacaggaggaaaatcagtgtttggcacacacttcagggggagagagagagctccsttgatgaaaaaaggagacttgaaccttgaagcctaggtttgagaatcgaatacaattgagactaatttgagtatgtgtttgtgtgagtttggaggtttgaaaagctctgattagagcttttgttgtagagagagttggcattgcttaaagtt

SEQ ID NO: 759007 - DNA, 636 bp, Homo sapiens
ttactctctctttatttaatgactaccactggtattttttaatatgtaaattcaatagtttttctttttccttttttagtggtacaggtaatagaagaatagaaaaagagagttgagggagggacaagaactactttgaaattagagaatacatttacagcctcatatgttcagttcatttttatatatatagttctgggatatttttggaataattatgattttctgagaatcatgctgacagaaaacatcgtctctttcttttaagatgttacatttcaaggtacccccttatgtttgcagtagtcatacttccggaatctgggggacaatttcaatttttttaaaagatactctgccccaacataagatcatgggccattgaattcaggctgagttttattttttgatagctttattcatgattactgttatatataaagccaaatatagcatgaatcawacatggttagcttttcaccctaattctcattagtacttatttgttgaatgtctgaatctaaaaagggaatgtgctaatagaatattactcaatatccatataaaacttaaatatctatacaaatacagtttctttaaccaagcaaatgattaatgtttaggagcatagttcat

SEQ ID NO: 759008 - DNA, 560 bp, Homo sapiens
tttgagacggagtctcgctctgtcgcccaggctggagtgcagtgccgtgatctcggctcactgcaagctccacctcctggattcacgccattctcctgcctcagcctcccgagtagctgggactacaggcgcccgccaccatgcccggctaatttttttgtatttttagtagagacgggttttcaccgtgttagccaggatggtctcgatctcctgacctcgtgatccgcctgcctcagcctcccaaagtgctgggattacaggcgtgagctattggctatttttaatgtaaaactttgaaattgtattcagctatggaaaaattctactagagagcttatggatgaaatcatagcatcagtagttgaattaatgtggkatatatttctcatgcatttccacctttaattatgaaaacacctggagctcagggaaggtaaggaacctgcacaacatcacacagcttctaaatggccaagatagagtcaaacctgagtttccctgatttggagaaattgtactattcaacactgattatggttgtatagtctttagcagat

SEQ ID NO: 759009 - DNA, 546 bp, Homo sapiens
ccatgtgaagtattctggtgtctcatctaagagccaaagaaagtcatagatatgttttaagtatgagataaggacatcatcaaaaatgaagttataaaagattaccatctacagtatagaaaatagtgtggagagagattaagagtagttgaaacatttgtaatggtttacactagaaaaaagaatagtttggagtacaataggggcagtggatacaggaagaaagggatagatttgaaaaatacataaatccatcttttttcaggtaaaatcaacaggacttggtattgggttggatataaggacatgcgaaagaggagtaccaataatgacttaaatgaataataaaatgaaagcgagccacccactagacattatttatacaaatctatctatctayctacctacctacctacctacctgtcatctatctctgtatacataacatttatagctttattatctttttctctatcatctatattcataaccatactttacccacatatttatctattatgtctatttatatagaaaagcatgggt

SEQ ID NO: 759010 - DNA, 562 bp, Homo sapiens
catgcgtgggacgaatgtttccttcctgctctttgtcggacacacagatatgtctatgtcttttgctgcattggcactgtatattcttactagtatagttccatgcttaaatcctggtggtgtaaaagcatcagtgctggagtcagacatccattttagtcatgtgacttccagtaagttattttctttccaccagccttaattttctcatctgcaaaatagccacgatggccatttctcttgatggtagagcattgatacaatgacttttcaatctatccatacgtgggacgaatgtttccttcctggtttttgtcggacacacagacatgtctatgccttttgctgcattggccctgtatattcttactaatatagttccatrcttaaatcctggtgatgtaaaagcatcagttttggagccagacatccatgttactcatgtgacttccagtaacttattttctttccaccagccttaattttctcatctgcaaaatggccatgccatgatggccatttctcttgatggtagagcattgatacaatgttttgtgaagag

SEQ ID NO: 759011 - DNA, 605 bp, Homo sapiens
tgcattggccctgtatattcttactaatatagttccatgcttaaatcctggtgatgtaaaagcatcagttttggagccagacatccatgttactcatgtgacttccagtaacttattttctttccaccagccttaattttctcatctgcaaaatggccatgccatgatggccatttctcttgatggtagagcattgatacaatgttttgtgaagaggctgcatggtgtgaaccaggtagcaacatrcaacaactgtccagacacttaataaagaagacattccgtttattttgtagagctgaatcgtttctcggtggttgaattgcatgtttattactatctcccaattttattactacaaggcaaattcctttaaatccaggaaggatttttttctagaaagatatgggttctaggttccatcattacaccaaggttgttacactagaaggctaaatttgccacctgtttgatatcttaggaaagaatttaacttttctgtttttcaaagatgaatctgttgcatacagtaagaggtgtgtaatacttaatactctcacattaagtaaaataattaactggctagtcacacacattttcaaaat

SEQ ID NO: 759012 - DNA, 495 bp, Homo sapiens
tcctttcctttctctttctttttttctgaggtatattaaacctacaggaaggcacatgtggtacaggtatggagcttgacaaatttgcaccaaatgaatttctcttgtaatcagcatctgcaccaaatcacaggaaattaccagggttccagaagctcctctccactcactacctgctgcccagcataaccacttcctcggcttctgaaagcatccactggttctgcctgttttggtactttatgtaaatgattacacagaccgtatgctcctgtgattggcttctttcactgaacatgagctattgctgtgtgcaattgtagatcatcaattctcattctaccgtgtcctttaaaaaactgttgytggtggtacaagtctgaaaatctattaaatttcagcagcaagtgaaatttccattctactaccaaaaaataatttaaattcagcagtccatttaaatatcaaatcctctcacttctatctggtaaccaa

SEQ ID NO: 759013 - DNA, 590 bp, Homo sapiens
aaaaatcactctcagttaagaaccactgcggtggggcgaagaattgtccttggattctgtttcttttcattataatactttgtgtctcctggagttactcattgccttcctttttttcctctttagttaatataatttactttgttcataatcttaggttttgccaagctcttcactgaccttgccattttcccggggatcctcccatcagaatattttgtcttctgttccgatgaatatgttctctagacctgctgcatagatcaggacttctttttacttgatacaaaatttgttttaaatatacacatttaaaatgggagaaattttcaaaaygcagaaacgaatgcaaaaattcttgattttcttgattttcttcatgtcaccagcaagtacggactccactgtatacagtgagctttgtgcaaccagagctggctttaggtaacagacaaacctttcaaaaacagaatatagtctatttagaaataatattttattgtactagtggagcttgctattaaaaatcagactaagcaggcagggcacggtggctcatgcctataatcccagcactttggacgtcgagg

SEQ ID NO: 759014 - DNA, 486 bp, Homo sapiens
ttgtttgcactacagggatactatgctgtagtgcaaactatgcatgtgagggatctaggttgtgtgctccttatgagaatctaatgcctgatgatctgtcactgtctcctgtctcccccagatgggaccatctagttgcaggaaaacaagctcagggctcccacagattctatattatggtgagttgtataattatttcgttatatgttacaatgtaagaataataaaaataaagtgcacaataaaggtaatgtgcttgaattatcccagaatcatccccaaactccactggtctgtggaaaaattgtcttccacgaaactggttcctggtgcrgttcctggggactgctgctttaagccactaagtttgtggtagttacaaaggtcataggaaaaaacccaggaacccacttgttgttagagagaccgacttcctggttcaaagcctgggataacacactattgcaaatacttagaaagtcaggt

SEQ ID NO: 759015 - DNA, 657 bp, Homo sapiens
acaagaagatataacaatcctaaatagatatgcacctaatcctgaagctcccagatgtataaagcaattactactagacttagaacagagatagacaatgacacaataacaatgaggaacctgagcactccactgatggcgctaaacaggttattgaggcagaaaatcaacaaagaaacattagatttaaactgcactctgaaacaaattgacctaacagatatttatagaacattttaaccaagaaaagcagaatatacattcttatcatcagcacctggaacattctccaagatagactatataatagtccagaaaacaagtctcaatagatttttaaaaatcagaatcatatcaaatatctccttggactactgtggaattaaaacagaaatcagctacaaaaaggaaccctcaaaactatacaaatacatggaaatgaagcaatctgctcctgaatgatttttgggtcaacaatgaaatcgaaatgaamatttaaaattcttttgaaaggggtaacaatgacacaagttatcgaaacctttgggatacagcaaaagcagtgctaagagaaaagtttataggcactaaacaccaaaaagtctgaaagatcacaaattaacaaactgagaccacaaattgaggaactagagaaac

SEQ ID NO: 759016 - DNA, 645 bp, Homo sapiens
acacctgcatgcatatgtttattgcagcacaattcacaattgcgaagatgcagaagtaacctaagtgcccatcaacccatgactggataaagaaagtgtgtgtatatatatatatatatatatatatatatatatgtatatgtatatatatatatatatacactttatatatatatatatacacatatgtgtgtgtgtrtatatatatgtgtgtgtgtatatatatatatacacatacacatgaaatactactcagctataaaaaaagaatgaataatgtcttttgcaggaatttggatgggactgggggacattaccctaagtaaagtaactaaggaattgaaaaccaagtactgcatgttcttagttataagtgggagctaagctatggatttgcaacagcatacataatggtataatggacattggagactcagaatgggggaagtggggagggtagtaggaatgaaaaactacctattaggtacaacgtatgctacttgggtgcactaaaatcccagacttcacccctataaaattcatccatgtaaccaataacctcttatgtctttaaagctagtgaaattaaaaacttaaacaaattaatgacaaagaaattttgtcacatagacttatgtgagtgga

SEQ ID NO: 759017 - DNA, 645 bp, Homo sapiens
acacctgcatgcatatgtttattgcagcacaattcacaattgcgaagatgcagaagtaacctaagtgcccatcaacccatgactggataaagaaagtgtgtgtatatatatatatatatatatatatatatatatgtatatgtatatatatatatatatacactttatatatatatatatacacatatgtgtgtgtgtgtatatatatgtgtgtgtgtatatatatatatacacatacacatgaaatactactcagctataaaaaaagaatgaataatgtcttttgcaggaatttggatgggactgggggacattaccctaagtaaagtaactaaggaattgaaaaccaagtactrcatgttcttagttataagtgggagctaagctatggatttgcaacagcatacataatggtataatggacattggagactcagaatgggggaagtggggagggtagtaggaatgaaaaactacctattaggtacaacgtatgctacttgggtgcactaaaatcccagacttcacccctataaaattcatccatgtaaccaataacctcttatgtctttaaagctagtgaaattaaaaacttaaacaaattaatgacaaagaaattttgtcacatagacttatgtgagtgga

SEQ ID NO: 759018 - DNA, 582 bp, Homo sapiens
attgatccagtttctcagcaatctctttgttcccctttgcccccttggagcaaaactcctgggaaattgtctatggttactgtctccaatttatttcctgccattcactcataactgactccattcagaatttgtcctttctactccaccaagtggtagaaagatgtctccagtaaatatgcttaaactcaactcttccgctttccccacaaacctggttttcaattagccttctgaattctgtgactggcaattgtacttgctcaagccaaatggccrgagtcactctatttctattttgttgcctttgttgttctcgcatgccacattcattctttcaaaaaattttattggtttgccttcaaaatttctcaattttagtcacttgccatcatgtatactgctacctcttgccctaaacaccactaaaagtttgcttagataactgccatagccacttaactagatctcttattcaatcttgccccctctacagtcattgccaacatgtgtgaaagtgatatttcaaaacatgaatcaaatcattttgcttatttctgaaaaccctatgaaactttctgt

SEQ ID NO: 759019 - DNA, 572 bp, Homo sapiens
catgaggggagataaatatcaatcaatcccaaaagtaatcccactctatatatgctgtcagatgaagcaccatattgttggactgtatgtattctaagaattttcctggtgttcttcacccctgatatgatctacatctgaggttttgtgatgctacttgtttctcaccagagagtstagaagaggagcatttttagaatctctaggaaaagattgaaacctcggacaattttctcagtcctaggatgctgatataatttaaattacaattaatattaaacatactcttttgctataggttctcatactctgggtatcctttactactagtccagtacaatagttaagtacagagaattccaacttgccctgttgataacatgagctggatagccttactgatgtcattattatttttttctttttggaactttacagacaaatccatgatagtaaaatttttgcaagctttctctctctaccaatagccagagaagaatttggtggtataatctaagctgcacttaatatgttatatagccaagggaaaaataaaatgctataaaaatcta

SEQ ID NO: 759020 - DNA, 645 bp, Homo sapiens
ttctccatgcacactcttattctattctggcaggaaatttaattggtgcattttgattaaacttccaaattgatggctctcttatgctctgacttgtaataattgaaatgattaaagatgtagtttcttctttccaaagcttttcacttatcagttgctcctgttttattgagaaaggtgcttgtagtgatgttatattaagccaaactactttctgatttggttcaaacagactaacacacaaatgctaattaatatttagcatttagatatctgtatccaaattaaattggcacccagaggatgaaagattgaattattcagctgctgttgaaagctatatgtcataccgtgtttacaattgtagttatcagaagtcggctttcattattctaccaaatgtgtttaytttctcatagagcattcaaatcttcatggttggctatctatatagaagataatattaaaggttttaaacttgaacaatttatataaaataaaaaaattaaaatctctagtcagataatgtcatttaagggccatttttggatgccttcccatatgcaaagatactaccaatgtagtatcttttgcatgtgttcccatatgcaaagatcaaccatttctgaagcagaatgcttattt

SEQ ID NO: 759021 - DNA, 486 bp, Homo sapiens
gttggaaactatacaaaaacatggaaatgcaatgatatgttcccgaatgaccagtgtgtaataaaaaatttaagaaggaaactgaaatatatcttgaaacaaatgataatggaagcaaaacataccaagacctatgggatacagtgaaatcagtactaagagggaattttatagctacaagtgcatacctcaaaaaggtagaaaaacatcaattgaacaacctaatgatgcatcttaaagaattagaaaagctagagcaaaccaaatccaaaattagtagaagaaaagaaataataaagatcagagctgaaatcaataaaattggtagaaagaaaacaayacaaaagataaatgcaacaaaaagtgtttttttaataaaagataaaaaaaccttttgccagactaagaacaaatgagagatacccaaataaataaaatcagaaatgataaaggagacattaccactgataagcagaaattcaaagg

SEQ ID NO: 759022 - DNA, 615 bp, Homo sapiens
  misc_feature 5: n = A,T,C or G
agganacataatttgccctggcttttgactcttaaatctatcttcactttcactaccagaatattttatcttttggttgtttcccacctcctcattagatagagtgcagatttctcagcataatttatgaagccctccatgatccagcctcatcttgcatcattttctctttaccttctstacctctgccttgtcattacggtagtcaaccatttgcaattttcccaacacaccacactgatttgcaccttcctcttttttgttccatctgcctagaataattttgttcatatacttcctcctttgcctggcaaattcagatcacatctccagtctctgccttccgttttcccagagcaccctttacctcccacatagcacatggtaatgagcttgtgttagtgtcagtccctctgctaacgtataggtctaatggtcaagattttccccttcaacttgatttccccagtcttcacacaatgcctaccccatagtagatgctgattgtctattgagttgcatagtataccttagtctgcacaatatatttatttatccattcatctatctatatattcattcattgatttattcattcaagcaacagtttttaat

SEQ ID NO: 759023 - DNA, 591 bp, Homo sapiens
aaatcaaatgtttggatattgagaatagcattatgatgagggtccagagtatgttattaataataatggtataattttgagcttctgttatatacacaaacatatgtatagctacaccaaggattgtgctcaagttttgacttatattagcttgtttaagcctcttccacacactatttaaggcaagtactattattatcatcattttatggatgacaaaactgagaagctgaaaatttaggaaacttgcccaagatcacacagccaagaagcagacaccagaaccagagccccaggctcacaaacttcactaccttgactcctaggctctatgttattctgaccatctctcagccaggaagtcactcccttttatacaaatgacattgttggtgctkatggttaaatatttctattctcacaacatgtgaaagagagatccttgtgatttgttacctaagccccaagggtttctcctaccatttcagagagatagaagcttttctttgcccctgaactgtgactaagaaaacagaaaggaggaaaaagccatcagaagactaaaaatctctcatctttgcaaataagaat

SEQ ID NO: 759024 - DNA, 531 bp, Homo sapiens
caaaagatcaataatggagaatataaatgtttgtgcagagctgcttgggcactcaggtttggagcaggactaggaaggccctgggctttgaattgcttttgttcgatgttagtgtcctggaaatagacctctctacataccacgttttgttgggagatggtattgccatccaaagtgagactttcaatgttcctttccattccttgttggcatacaaagactgcataacacatgaatttccccaatgtgttcacagtgttgtgccttttgttgactccataagtttttattcttactttctttactctcagattttccagaaaaaaattaagcagactcttacagccctaattaatgctatcaggcatctgccctaatcatrtattacttgatactgattttcagttatgtcatttccttccactaagatcatgagagtctcacaaactgtccattgtattcacttcagggtctccagcactcgaaaccacaagctgtcttttctcttctttcctccttccctctctccat

SEQ ID NO: 759025 - DNA, 646 bp, Homo sapiens
atggcagagggggaaatgaaccaggcctgactttctctagagcagtggttttcaactaggggtgactttgcccccactctgcaaccttacagggacatttggaaaagtctggagacatttttgtttgccacaactgggagggggtgctactggcatctagtgggtagagggcagggatgctctaaacatcctacaacacacaggaaccgttggccagtccgtgtcggtaaacatctcttgtgcaggcacttcttgccaaaacattttgcattttgtacaatattcccagtctccactgaagtgttgtctttatctcctctcttgctctgccttcatctagaagctgtgatggaacaatttagatcaagccatccccaggaaaagctttcattgaacaacagagcaagggaaagcccaatgtattctgcagccccrtttcagttaaggttcaagttcactaatgccagaaaggaattcattaatgccttacaggctgcaggacaaatgttaatagcttcacctttaatttaagctcagttttatttttatagctggtcccttggtggcaactagatttattgggacattttgaacagctgaggcaaatcaataaagtatataagcacatgcgattcttgtgttattt

SEQ ID NO: 759026 - DNA, 597 bp, Homo sapiens
ggagggacctggtgggaggtgattggatcatgggggtagttttccccaggctgttctcatgttagtgagtgacttctcatgagatctgatggttttataaaggggctcttcccccttctctctctccctctctcctgccaccrtgtaaaacgtccctgcttccccttccaccatgattgtaagtttcctaagctctccccagccatgagaaactgtgagtcaattaaatctctttcctttataaattactcaatcttgggcagttctttatagcagtgtgaaaacagactaatacacatatgtactgagtcaagtgaaactttcatggcaacagcagcagcagcaacagcaatggcagcagtgacatcatcatcattatctaggagcactccctacccatagcaaaggtctgctccattggacacagcagggagaatgcagtagctatcttaacaaatcaaggaacctcatattccctcttaattctcatttctgcagcagctaatcatgggatggaagaaagatttggagaatgaagcatgctcttttatgctccagctgtcatattttagtttgcctgaaaaaattctgtcaccc

SEQ ID NO: 759027 - DNA, 597 bp, Homo sapiens
ggagggacctggtgggaggtgattggatcatgggggtagttttccccaggctgttctcatgttagtgagtgacttctcatgagatctgatggttttataaaggggctcttcccccttctctctctccctctctcctgccaccatgtaaaacstccctgcttccccttccaccatgattgtaagtttcctaagctctccccagccatgagaaactgtgagtcaattaaatctctttcctttataaattactcaatcttgggcagttctttatagcagtgtgaaaacagactaatacacatatgtactgagtcaagtgaaactttcatggcaacagcagcagcagcaacagcaatggcagcagtgacatcatcatcattatctaggagcactccctacccatagcaaaggtctgctccattggacacagcagggagaatgcagtagctatcttaacaaatcaaggaacctcatattccctcttaattctcatttctgcagcagctaatcatgggatggaagaaagatttggagaatgaagcatgctcttttatgctccagctgtcatattttagtttgcctgaaaaaattctgtcaccc

SEQ ID NO: 759028 - DNA, 565 bp, Homo sapiens
acatagtcaatactcactgttctcatggatattatattctagtaaagtgctaaagtgctataaataattaaataaacaagataatagttgtcttaggttagatactccagaagcaaactctaacatgaagtttggatgaagaggacttattaggagatgttccagaaaaatatgcaagaggagtggggaagtggagggaaggaggccaagccgagtacaaaaatcaagcaagcctcacaaaaggtaacttttgaactcaatcctatgaggagttctggagacagtgtagactccagggrtgatgaacctggaatgttcagacccggcgggtggactgcgctttcggtggttccagttcccgggaaaagtagggtcctgcagcccgagggcagccctgggaggcaggtgctggagttgggggccatgagagctgatgttacaacaatgggcgctgataactaccagcaaggaaattaaccaggtgacaggatgaagagaatctaggggcctgtgaagaccacttcatacagtgcagtcaacgaaggcctcgctgagccgggcacac

SEQ ID NO: 759029 - DNA, 598 bp, Homo sapiens
acaaaactaagagttggtttttgaaaaactaaacaaaattgacaaacccttagcaagactaagaaaaaaagagatactcaaataaataaaacaaaaaatgaaagaggagacattacaatagatgcctcagaaataaaagggatcataacggactattacgaataatcacacaccaaaacactggaaaacccagaagaaatggatagagtctggaaatatacaacctgccaaaactgaatcatgaagaaatagaaagcccaaacagaccaatagcaaatatggagatkgaatcagtaatcaaacagctctcaacaaagaaaagcacaggaccagatggtttcatgggtgaattctattaatcattaaaaaaaagaattaataccaatctttcttaaaccttccaaaaaatagaagagagaattcttccaaactcacattatgaggccagcatcactctgataccaaagccaaagacaccagaagaaagaaaagtacaggtgagtatctctgatgaacatagatttttaaatcctccataaaacactagaaagccaaactcaacaacatactaaaagtattatatactgtggctaaatgg

SEQ ID NO: 759030 - DNA, 557 bp, Homo sapiens
gcagaaccctaagatggggacctgctggcagctttggagctctttgtcccgtacaagtccccaggtttccattatttacaaacaaaattctgggggagcaggaacagacccgggaggagggccctgctgtcccagtcccgcctgtaccagctgcagtgtgtgtctgggcgagtcttgggggaaaacacattttccagcgtatctcttcctactggatattgaggaaaccaggggttggcagggtgcarctgctggcctaatctgacctagttttgtcaataaagttttattgaaacagccacatccctttttttatgtgttgtcgctggcagttttcacagcacaaggcagagttgagaagttgcaacagaaattgtatggcccacgaagcctgaaatatttactgttgggccttttgtagtaaaagcatgtgtaaactggagtactgttattcttgtccatccaggagtcccaaaccaagcatcacgtccaaaccacttggagagcggttttaaatgcatattcttgggtaccgggtttactgaattagaatcttt

SEQ ID NO: 759031 - DNA, 595 bp, Homo sapiens
tcctgggctcaagcagtcctcctgcctcagccaccccaattagctaggactacaggtgtgtgctaccacacttggctaatttttttttttttaatttttttagagttgggtctcactgtgttgttcaggctggccttgaacttctggcctcaggataccctccaacctcagcctcccaaagtgytaggattacaggcatgtgctaccacagccagcttgtatcaacaattttaaaaacaattaatttatcaaagatttacttaagtcacaagaactgaaaaaacatttgggttaattactacatattttatatgagcacttgtttacttaaactaatcagaataaatttttttagggatttctggctgactatatgagattttattatgtagacacagcatacaacatagtatatatatataatataagcatatctacacagatatacatacttataaataaattcttatggcttttgttttagagttttggtcatgaaatagtaaaacactcaccaatttataaaaaacagtaggatccagattatctttctgacaaaatggaataaggccaaacttaatgttcttttttaaaa

SEQ ID NO: 759032 - DNA, 581 bp, Homo sapiens
aacgataacaaatatgttactggcttatacattcactataccacccttttaatcattactttagagtatactccttctacttattcaaaaaacaaaaacaacaaaaaaaaggtaactgtaaaacagccccagacaggtccttcaggargtattccatgagaaggcattgttgtcataggaggtgactgctccatgcctgttaattcccctgaagaccttccagtgggacaggaggtggaggtagaagacagtgacattgatcatcctgactctctggaggcctcagctaatgtatgtggtgtgtgttcatttttaacaaaaaagttttaaaaataagaaatgtttgaaatcgtaaaagcttataagaataaggatatgaaagaaaatatgtacagctatatgtgtttgtgttttaagctaagtatgagtacaagagttaaaaagtttaaaaatttttaagtttataaagtaaaagttacagtaagctaaggctaatttactattgaagaaaaatattttataaatttagcatagcctaagtgtgcagtgtttgtaaagcctgcggtgttctacagtaatgc

SEQ ID NO: 759033 - DNA, 615 bp, Homo sapiens
aaaatcctactggggtcctagttttctaatgtttaaagtgacagcatggaactaacaaatgaaggattgtttgtttgtttgtttgtttgtttgtgtctcaattttctctgtgatttataatccagcctgtgctttggaaaagctcacatattaagataattgtcagcaattttctggcttttgcgaaagtatctgtgcttgcacagtggagacagaagatagtgtgacaagtggcagaaaataaatgcctataccagcaacttggggccactttacctcaggctctgttgcccacttccctacatctaaaccattacagattccagttgagtctacttctttcttcaaagtaagactttatttattaggaaattttgggttcacagcaaaattgagcaaattgagcacagtgtacagagacttcccttatatccccagcccccacacatacacagcctctcccactattaacatcmccctccagagtgatacatttatgaggaacttgcattgacacaccattatcagctaaagccaacactcagtgtacattagggttcatttctggtggtgtacattctatggggttttttttgtttgttttttttttggaga

SEQ ID NO: 759034 - DNA, 544 bp, Homo sapiens
aacaaatcagacaaaaagtgaactaaggggatgtaacatggggcacatggaataaccagtatagttgcatgactgtgaactgttcaagctcaccactaagttcagtctgtctcagaccttttcaaggtggcaggcagctggcagcaatctgtwtaaaacatttaatataatagattaatagattaatggattagtggatcccatgctcatgcactaagctacaattcctgctattgcaactggtcttgagagtgcaatagatctatctcttcagtcgaccattcttttagaccctcttcacttcgaccagcacctcagtaggtcctgaatacttactaaatgggatgacctacaaaacctttttgtgcaaggggtctgagaccttctttgctttgctcttcctgaactggatttgctacaattgtacatttccagctacctctgagcatagaagcaccaagaggaatcttactgcttattttctgccctcctagtgtgtagccatagcctcatgtcctcatggtaatcaggaaagtattaatac

SEQ ID NO: 759035 - DNA, 547 bp, Homo sapiens
cgggtagagatgctcctcacttcccagatggggcggcggccgggcagaggtgctcctcacttcccagatggtgggtgggcagaggccctcatcacttcccagatggttggcagccgggcagaggtgcacctcacttcccagatggttggcggcctggcagaggagctccacacttcccggactgttggcagctgtgcagaggtgctcctcacttsccagactttgggcagctgggcagaggtgctcctcacttcccagactttgggcagctgggcagaggcgctcctcacttcccagaaggttggcaaccaggcagaggtgctcctcacttcccagatgattggcagctgggcagaaatgctcctcacttcctggactgtcagcagctggtcagaggtgctcctcacttcccggacagttggcaacgaggcagaggcgctcctcacttcccagactgtgggcagctgggcagaggcgctcctcacttcccagatggttggcagctgggcagaggtgctcctcacttcccagactttgggcagctggg

SEQ ID NO: 759036 - DNA, 547 bp, Homo sapiens
cgggtagagatgctcctcacttcccagatggggcggcggccgggcagaggtgctcctcacttcccagatggtgggtgggcagaggccctcatcacttcccagatggttggcagccgggcagaggtgcacctcacttcccagatggttggcggcctggcagaggagctccacacttcccggactgttggcagctgtgcagaggtgctcctcacttgccagactttgggcagctgggcagaggtgctcctcacttcccagactttgggcagctgggcagaggcrctcctcacttcccagaaggttggcaaccaggcagaggtgctcctcacttcccagatgattggcagctgggcagaaatgctcctcacttcctggactgtcagcagctggtcagaggtgctcctcacttcccggacagttggcaacgaggcagaggcgctcctcacttcccagactgtgggcagctgggcagaggcgctcctcacttcccagatggttggcagctgggcagaggtgctcctcacttcccagactttgggcagctggg

SEQ ID NO: 759037 - DNA, 726 bp, Homo sapiens
atcaggaaatggagaataagctctgcctttggtggatattttagtattacaatgagattataatgaggaaaaatcagtgaaaggtcagtgctggagaccatctcgtcttcagccagctagatctcatttggttctttggagcaatgccagatcttgcagcaatcttgcaagatgaccaggttcttatcaggaacgttagagttccactttagaaaccttgagaggccaggggcagtagctcacacctgtaaycccagcaatttgggaggccaaggaggatggattgcttgaggttaggagtttgagaccagcctggccaacatggtgatacaccatctttactaaatatacaaaaaatagccaggcatggtggtgtgtgcctgaagtcctagctactcaggaggttgaggtaggagaatcacttgaacctgggaggcagaggctgcagtgagcggacattgtgccattgcatcccatcgtgggtgacagagtgagactctgtctcaagaaaaaaataaaataaaaccttgagagacatcaccaaaggagataaatggttgagctcttctttttatggataggattttggcctagtccactaagttgggagaggacagctttttggtatggaactggaatcagctatgttaagggaggcaagaaggttggagtggaaacattcctggacatgtgaggcccattgggatcctgagaacaatgtctttt

SEQ ID NO: 759038 - DNA, 586 bp, Homo sapiens
ataaaagggataaaaccaataatctccgcttccaccttatgaaactacataaagaggagcaatttatatctgaagtagaacatgagcaaaataaataataaatattagggcagaaatcaataaaactgcaaacagaaaaagtgacactgaacaccaggcagrccaaaggctggttctttggaaagaacaatattgtatagttcccatatatttgaaaatttgggggttacattttcaatattgatttctagtttgatccctccatggtcagagaacacattcactgtgattttaattattgcaaatatgttgagaggttatgtgggcaggatatgtcctatcttggtatatgttgtgggcacttggaagaaaaaaatgtgaacttctattgttatgggttggagtgttctataaatgtcagttagatctcgtgggttgatgatattgttgagtcctaaatccttgctgattttctgtccagttgtcctatcgaagattaacaaggggttttgaagtctccgtgtgcaattgttttgttagtttctgccacatgcactatatcgctcttttgcttggtgtctacgca

SEQ ID NO: 759039 - DNA, 586 bp, Homo sapiens
ttctttttattaatgtttgcatagtataccattttccttccttttatattcaatctacttatactgttatatttgatgtgagtgtcttgtagataacatacagttgggacatttctttttattcatcaattgtctttttcaaagtttcataatttgcatatttaatatattgatattgatatattaaaatttaagtctgcactctacttttttgctgtatctttttttgcttctctgttttctttttgctgccttcttttgggttacttgaacatctttacaatttcattttaattttgcctaattttggggtatctctttttataatgattttcaaattggttgtcatrgtatttcctttatatgcatagcttctcacagtatgttggcatcaatatattaccatttaaaataaatatagaattttaccttttttatgtcatgtttcctcccccattgtaaatagattgttttttaaaagtaatttatctgcatatattaggaaaaaaacagtattacaactttgatacaactatcacacatgatttagcaatgcattatatccatctatcttctcatttttgta

SEQ ID NO: 759040 - DNA, 640 bp, Homo sapiens
tcatcaaaatattgaataagatgggaggcagacaggtgaaaagaaagcagatcatgagaaagggcctggccgaagtagtgtgggctgttcctgaagccttggggcagaacagtccaggtgagttgttgggattggtgggtgtcacggtcagtccaagtaaaggcaaaaagaggctgagaggagggatacaaggggatagtaaagaaggtgtctttgaggtcaataacaaaatagtgagttgtggaagggggtattgaagataggagggtgtagaggtttggcactataaggtggatgggaaagacgatttgattaataaggcaaagatcctgaaccaacctgtaagatttgtctggttcctggatgggtaggataggggagytgtaatgtagcaggatgagccatggacaaaacctctcagacaccgagttgtagaaggaagggctttattcagctgggagcatcggcaagctactgtcttaaaatcggagctccttgagtgcacaatttctgtccattttaagggctcacaacactaaagattttacatgaaagggtcgtgattgattgagcaatctaggggttatgtaacagggtcttcatgcactggtagtcagagtcaaacagaacagaacaggga

SEQ ID NO: 759041 - DNA, 582 bp, Homo sapiens
ttttctcttattaatcttccttttgtcagtttattttcagcaaacatttagaggacaaatggagttttcttcctttctcccaatataagcaagttcccttaaaattcaggcggcttacaaagcagcaagaaggtttgtgcacgggctatggcactgtgatttggctcccctactcaggcatcagtaaaattttgtggagccctaggctacagccmactgatgctaatatagttggatccacttcccctgctactgagctaggctgggacagttttgggcacattagatatgtgcgatataatgattgcaaatcatttccagtttcatctgtatcaaactgctttctccatgtacataggcatcatctctgtggatctgtagtaaattgcttgatcttatagtggtaagaacaatggcataacaccattaccgaatactgacatgtatatatagcatcatgtcaataaattttatttttgatttttttagaaaggaacaatgttaaactcacagaaatgttccaagtataggacaaagtaaccccttccctaaccgggatcatatgagagtcttttggagacc

SEQ ID NO: 759042 - DNA, 523 bp, Homo sapiens
cctgaccaactgaaattaggagtttatatagcagggaagaaatgtgggaaaacaggaattagggaggggtaaggaagataatttggtcaacaggaagcaggaggtcagtgaggcaatcataatgggtgaaggttctgatgtctcactgtcccrattcagtgatatgtaagtttcagctccttgatagtatctgggaggcctgttcattggtttactgaaaaaacaaacaaacaaacaaacaaacaaacaaaaaactcagataagacagatgtaactatcttgagttttaagactgggggagtcaatttctatgtttatacaaaaaaacataaacattagttccatgggataatagggcctattacaattgcattctagaaacaatattttgcaccctgagtgcctttccccactggtttctttgctctgttgggtatgacaagaatgaccaaattcctaagattaagtttcccactacaacctttcaaagccaaggatatagtagtcatgaaagctgatatta

SEQ ID NO: 759043 - DNA, 670 bp, Homo sapiens
aataatattggctgttggttttgacagatcatcagaccttaaaagaaatgcaacaggatgattacagacaaagtcattgtggaagagctatgactagatgtttttaaaatgagccataatccaaaaaaaaaaaaatgctttccaagtggatgctaatcgaaatgccattaatgagcaggggcttttaataatgagaatgattcaacacatggrcttcagtcagtcatctttcccagctttccctgggagtctcatgaaccaatgttatggaggtctctgtggggactcaataatttgagtttcccccaaccgagatttagagtgctactggctcttctgaacacctaatttgccaagaagaatgacccctcctgaacccttcacattgtatcacacatcagggctcagactaacatctgatgtcaggtgattctagtgtcactgggtgcaccagactcagattttggacacaaaatttcctgaagcagccaacagttgtgcctcttttgaatggcagctccttgcttgctgtaggaaactgataggggctgagtatctcagagctagagcaccaggcaggacgctgcgaccttaactaaccattctcactttggtacctacaaacacaatcaataaaactggacaggcccaacagatccaaatcattaaa

SEQ ID NO: 759044 - DNA, 591 bp, Homo sapiens
ctgaatctttaccaggaaggagattcttttttttctttctttttgtggaaaatgcggtctcgctatattgcccaggcaggtctcgaactcctgggttcaagctatcttcctacctctgcctccctaacagctaggataataggcgtgagcctatgatattacccagccaggagggaaattctgagaggtgtgccaacaggcatgaaccttgaggacattgtgctagatggaataagccagccacaaaaggacaaatacattgcgatttcacttacatgaggggcccattatgggcaaattcaaatacagaaagagcaatggttaacaaamggaggaagttggtgttcaatgggtatggtttccttttgcgaagatgaagaagttctggagatggacggtggtaggggatatgcgacaatgtgagtgcacttaatgccagttataacacggggagtgcgtgtgcacacggctctgggagttctcgtgcagcactcagagctcagcgtgggcgagggcgtcacccctctgggggcgtccatggggccttggagaagggaggctccggggcaccagagcagtctaccgggagag

SEQ ID NO: 759045 - DNA, 625 bp, Homo sapiens
gatcttttcatgtccatcttctccattgccaaaatactcttttaaaaaggtagaattattttttaaattgtagaagtcatatcacagtggtaccatttgacctttgtttttccttctgaatcagtctttatattgctccctacaaatcatacttcaagtgacgtttcctttggatttgaggttgaaaacccaaacatgagaccaacatcctataagcagtgcggaagtccatggcagaagttctcaggctgtgtgctgtgtgtggaactcttgttcatacatcgcagtgtcagaggccatttcctctttttatagggaggcttgggagaarggcgggtggcaacactgtctcattgatgactcacgttcctgtgtctgtgagcgttagggagaatgacagagctctccggaacagcgtcctcagggcctgcagcactactcagtggggtctgattccttctgctttttatagtgaggcgttcatagagtgtcacagccttcatgaggaaacgggaaatgagatgggggcccaagcagacagaccagacttgggaggaagaaaagaaaagaaaaaaaggagaaaaatagagaggggaaagagggtgattaaaggcagataaagaaa

SEQ ID NO: 759046 - DNA, 625 bp, Homo sapiens
gatcttttcatgtccatcttctccattgccaaaatactcttttaaaaaggtagaattattttttaaattgtagaagtcatatcacagtggtaccatttgacctttgtttttccttctgaatcagtctttatattgctccctacaaatcatacttcaagtgacgtttcctttggatttgaggttgaaaacccaaacatgagaccaacatcctataagcagtgcggaagtccatggcagaagttctcaggctgtgtgctgtgtgtggaactcttgttcatacatcgcagtgtcagaggccatttcctctttttatagggaggcttgggagaagggcgggtggcaacactgtctcattgatgactcaygttcctgtgtctgtgagcgttagggagaatgacagagctctccggaacagcgtcctcagggcctgcagcactactcagtggggtctgattccttctgctttttatagtgaggcgttcatagagtgtcacagccttcatgaggaaacgggaaatgagatgggggcccaagcagacagaccagacttgggaggaagaaaagaaaagaaaaaaaggagaaaaatagagaggggaaagagggtgattaaaggcagataaagaaa

SEQ ID NO: 759047 - DNA, 530 bp, Homo sapiens
agtgctacattagccttactttccatggaccattctatgaggctctgtatagattccccattatagaactactcacaatggctggtatttatctacttttctaaatttctatatttgtttgtctacttttccatatcacagactcaagtgggcagggctcttgttcatctgagagtgcttggctccaagcttgtcttttccaggcatttgttagatagatgctctttttgaagacaagaccaagaacgtaagatctgcagtgrcgtgagaccagcctggccaacatagtgaaaccccatctctattaaaaatacaaaaaattagccgaccatggtggcgggcacgtgtaatcccagctactcgggaggctgaggcaggagaatcacttgaacccaggaggcagaggttgcggtgagccgagatcatgccactgcactccagcctgggcaacagtgtgagactccgtctcaaaaaaaaaaaaaaaaaaagatctgcagtgatatagactaggcaggggtgtaggcagtggt

SEQ ID NO: 759048 - DNA, 604 bp, Homo sapiens
ctcactgtggatgtaattggggttcaggtgaaagtcctcacctcacttcctggtgttgtagcttcaggagtctgcagggtggcaaagtcaagtgattcgagccaggattgtcttacgtggggcccagctttggagggttctgaaagctccttgaaagtgactgtaaagctatgacagagattcccagacttygagattttacaaagaagccaaggaataaagaaagcttttaatgggggattaaagaaagatgcccaatttaaaaaacaacaaacttttttccctgtaatagcgttaaaaataaactactaacgggctgggtgcagtggctcatgcctgtaatcctggcactttgggaggccgaggcgggtggatcacctgaggtcagtagtttgagactagcctggccaacatgccaaaaccccgcctctactaaaagtacaaaaattagctgggcgtggtggtgcacagctgtaattccagctattcaggaggctgaggcaggagaatcgcttgaacccaggaggcagaggttgcaatgagccgggattgcgccactgcactccagcctgggcgatggagcaagactccgtctgaaaaaaaa

SEQ ID NO: 759049 - DNA, 604 bp, Homo sapiens
ctcactgtggatgtaattggggttcaggtgaaagtcctcacctcacttcctggtgttgtagcttcaggagtctgcagggtggcaaagtcaagtgattcgagccaggattgtcttacgtggggcccagctttggagggttctgaaagctccttgaaagtgactgtaaagctatgacagagattcccagacttcgagattttacaaagaagccaaggaataaagaaagcttttaatgggggattaaaraaagatgcccaatttaaaaaacaacaaacttttttccctgtaatagcgttaaaaataaactactaacgggctgggtgcagtggctcatgcctgtaatcctggcactttgggaggccgaggcgggtggatcacctgaggtcagtagtttgagactagcctggccaacatgccaaaaccccgcctctactaaaagtacaaaaattagctgggcgtggtggtgcacagctgtaattccagctattcaggaggctgaggcaggagaatcgcttgaacccaggaggcagaggttgcaatgagccgggattgcgccactgcactccagcctgggcgatggagcaagactccgtctgaaaaaaaa

SEQ ID NO: 759050 - DNA, 604 bp, Homo sapiens
ctcactgtggatgtaattggggttcaggtgaaagtcctcacctcacttcctggtgttgtagcttcaggagtctgcagggtggcaaagtcaagtgattcgagccaggattgtcttacgtggggcccagctttggagggttctgaaagctccttgaaagtgactgtaaagctatgacagagattcccagacttcgagattttacaaagaagccaaggaataaagaaagcttttaatgggggattaaagaaagatgcccaatttaaaaaacaacaaacttttttccctgtaatagcgttaaaaataaactactaacgggctgggtgcagtggctcatgcctgtaatcctggcactttgggaggccgaggcgggtggatcacctgaggtcagtagtttgagactagcctggccaacatgccaaaaccccgcctctactaaaagtacaaaaattagctgggcgtggtggygcacagctgtaattccagctattcaggaggctgaggcaggagaatcgcttgaacccaggaggcagaggttgcaatgagccgggattgcgccactgcactccagcctgggcgatggagcaagactccgtctgaaaaaaaa

SEQ ID NO: 759051 - DNA, 607 bp, Homo sapiens
atctagctaatctagtggggacagagaacttttgcgtctagctcagggattgtaaaggcaccaatcagcagcgtgtcaaaatggaccaatcagctctctgtaaaacagaccaattggctctctgtaaaatggaccaatcagcagaatgtgggtggggccagataagagaataaaagcaggctgcccgaatcagcagcggcaatttgcttggatctgcttctgggtcgtggagggtttatatttttttttttttttttttagttttagctgtttgcartaagtcttgctgctgcttgctgtttgggtccacattgcttttatgagctataacactccttgagaaggtctgtagcttcactccttgaagccagtgagatcacgaactcaccaggaagaacgaacaattccagacgcgccattttaagagctgtaatactcaccgtgaaggtctgcagctttactcctgagccagtaagaccacgaaccccacagaaggaagaaactctgaagacgtccgaatgtcaggaggaaccaagtctgaccacactgcttttaagaactgtaacactcacttcgagggtgcacggcttcattcttgaagtcagtg

SEQ ID NO: 759052 - DNA, 607 bp, Homo sapiens
atctagctaatctagtggggacagagaacttttgcgtctagctcagggattgtaaaggcaccaatcagcagcgtgtcaaaatggaccaatcagctctctgtaaaacagaccaattggctctctgtaaaatggaccaatcagcagaatgtgggtggggccagataagagaataaaagcaggctgcccgaatcagcagcggcaatttgcttggatctgcttctgggtcgtggagggtttatatttttttttttttttttttagttttagctgtttgcagtaagtcttgctgctgcttgctgtttgggtccacattgcttttatgagctataacactccttgagaaggtctgtagcttcactccttgaagccagtgagatcacgaactcaccaggaagaacgaacaattccagacgcgccattttaagagctgtaatactcaccrtgaaggtctgcagctttactcctgagccagtaagaccacgaaccccacagaaggaagaaactctgaagacgtccgaatgtcaggaggaaccaagtctgaccacactgcttttaagaactgtaacactcacttcgagggtgcacggcttcattcttgaagtcagtg

SEQ ID NO: 759053 - DNA, 630 bp, Homo sapiens
aaaaactgagtgctttttcaataatagctgctgaattagagaatttctgtttggggcatttactgccttgctatggaacattaactgaagctccccctatgctaatggaaataatgtttcccagaagagtccatgataaaataaaaatggtttacacaaaatcttgctacctagtaagtagagagcctcttttctaggactaattgcgaggagctgctaaattctrcagggcctaatagctctcatgagctgtttggcttgcaaatggcatttccaaggtaaacaaacatcttgttttaaaagctgctgctctggttaaagaagggtcaagaaaatcttttttcttttacgttatttgggtaaagtatgtttttgcaagcaaatttacttttgagtcctccaaaattcagattgtaattttatgacaatatggttgtctgcataagttcaataatagttttttttttttgattggagacactggttattttaccaagactgaaactaaaatagcctatttttaggtaaagtttcagcaaaaccaactcaaaaggagtctatatggccagtcaattcttgctgcattttatgcagatagtcagataagcataataagcctaaaacttacct

SEQ ID NO: 759054 - DNA, 630 bp, Homo sapiens
aaaaactgagtgctttttcaataatagctgctgaattagagaatttctgtttggggcatttactgccttgctatggaacattaactgaagctccccctatgctaatggaaataatgtttcccagaagagtccatgataaaataaaaatggtttacacaaaatcttgctacctagtaagtagagagcctcttttctaggactaattgcgaggagctgctaaattctgcagggcctaatagctctcatgagctgtttggcttgyaaatggcatttccaaggtaaacaaacatcttgttttaaaagctgctgctctggttaaagaagggtcaagaaaatcttttttcttttacgttatttgggtaaagtatgtttttgcaagcaaatttacttttgagtcctccaaaattcagattgtaattttatgacaatatggttgtctgcataagttcaataatagttttttttttttgattggagacactggttattttaccaagactgaaactaaaatagcctatttttaggtaaagtttcagcaaaaccaactcaaaaggagtctatatggccagtcaattcttgctgcattttatgcagatagtcagataagcataataagcctaaaacttacct

SEQ ID NO: 759055 - DNA, 625 bp, Homo sapiens
tgacatgattgccttttttgttatgcttccttgtggactgtgatccccccaaatcaaaaggagaactctatgtttaggatttctcattcattggcaaagagaggtaacctgtagatgtcatctgactcagttaatagaacaacagtgcaccagttcattaaactgtcatatcctgaatgcccccccaaaagtagtatacaagagaattccattattttagaagtcccctctgttggatctcaaggaaatttgctgaaaaatattgaggctctacctcattataatgccttcctcaatttttcctcttcagataagcaagacccctacaccctcaatatgcctccttagaggcctgttccctaaacatgttagaaatcacatatcttagctcccaacaaattaagcaatttattgaaactaaacagtccacatactcactttggggatccacaaatctatacttgcccaaataccaaaaagatggagcygggtactttctcgggtgaactttgttaccttggtgaggaatggcatccaatgtgtacatgattagaaatctctccccaactttatgaattcttgtgatgaagctgcattggcaatagacactcagaagagaggaatt

SEQ ID NO: 759056 - DNA, 576 bp, Homo sapiens
gggaaacttctagggggtatttggacccaagaagattctgtaactggacccttgagccacctctccggccagctcccacactgtggagtgtactttcgttttcaataaatccctgctttggttcttttgttgcttcattctttctttgctttgctgggcgttttgcccagttctttgttcaaaatgccaagaacctggacaacttgcagtcacaaccctctatcagtgacataccttggcaagccagccaggaggaaaagtaggcccaaagtttgggatttttctcctttccccttgtaaatctttctctctctctcttcctttccaactcagtgcccttggtggacagcacctaagcatggagacttcatgcaagtktctgcccagggtcactatctagtgaaactgaaaggtttccacatggaagcacctgaccgccaccgcccagttcaggtgagggatctgagtcctttttcttattttcatttttctgagtcctatttctttttccctttttctgagattttttttccttttctccgttttcagtctttcagcaacagtttcctagtagct

SEQ ID NO: 759057 - DNA, 541 bp, Homo sapiens
tgcgcacttaggacttttgtcctttctatggtgccaattatttgttaccaaactgaacttcagtctaagtgcctagtgtagcaaaaccagacactgacatcaggattgcagtgacagaaagagaggcatttattacagggcaccaagcaaagagaatrgggctggtaacacttaagcctggaactccccaatggcttataggtaagggttttaaaggtggggacgcagagattataggcaagtcataaatcaatacatgaaggctatacattggtttaacctaaaaaggtgacatatctccaagcaggggcccagagctcataggtggattcaaagattttccgatttgtaattggttaaggaggcaaagctttgtctaaaaattgggatcagcagaaaagaatgttaggtctgggtcaggggcgtgaccttctctccaagccactcaggaagaaatttagaacaaagaacagcagagttcagtcctcagtttctccttatttgaggtctccgtgacagtggatccactgatggggatttc

SEQ ID NO: 759058 - DNA, 632 bp, Homo sapiens
ttttcagaaattcaaaaaagagtcacgtattatgtcaatgttaagttctaagtttagtgattaaggtgaaataatatgaggtaaaaattactcttgagaattcctgagagaggtcttatattcaaagtcaatacatctttcaatccaatagcatacctttttcttccagcattgaatcaggcaactatttcattagttaagcamgtgaataagtatttggtttacatttagggaccatgttataaactgatgctttttaacattaaggtcatccctgctgagatttgcagaaatggagacagactgaaaaaatagaacaaccatgtatctcatgttctgttcacttctagggatctactctgtgtgaatgatgggtgggacctccctgccacgtctcttatgatctgtctctccactttttgtcaagtatgttgggtgaatttgagttaagtgctttgtgatgagactacatttattgccattttatttgtgtattcactcaacatctatagacagttagtaaggtagaacagtaggtattgttgagaaagtggaaatggataggatgtgagttctgcttttaaggagattactgtttagtggggagataagacatgtatgtattttagtat

SEQ ID NO: 759059 - DNA, 632 bp, Homo sapiens
ttttcagaaattcaaaaaagagtcacgtattatgtcaatgttaagttctaagtttagtgattaaggtgaaataatatgaggtaaaaattactcttgagaattcctgagagaggtcttatattcaaagtcaatacatctttcaatccaatagcatacctttttcttccagcattgaatcaggcaactatttcattagttaagcacgtgaataagtatttggtttacatttagggaccatgttataaactgatgctttttaacattaaggtcatccctgctgagatttgcagaaatggagacagactgaaaaaatagaacaaycatgtatctcatgttctgttcacttctagggatctactctgtgtgaatgatgggtgggacctccctgccacgtctcttatgatctgtctctccactttttgtcaagtatgttgggtgaatttgagttaagtgctttgtgatgagactacatttattgccattttatttgtgtattcactcaacatctatagacagttagtaaggtagaacagtaggtattgttgagaaagtggaaatggataggatgtgagttctgcttttaaggagattactgtttagtggggagataagacatgtatgtattttagtat

SEQ ID NO: 759060 - DNA, 639 bp, Homo sapiens
cattctgcacacaatatacaatatcagcagtcaacacctctgcaagtggaatacagaaactgccacttctgcttaactagttggagtgatgtgacaaggattagttatgcgtgagagggtatcagtagacccatgtggtctcaaaataatgactttccttcttaccctgaaatcaaatcatcttagctgggaatgattaaaaatatttaattattgctttgaaatcaagtatgttatttggttctacttttttcactattgtgtcatatttttaastataattttaagaacctcacaaaaaatattggtataattccatatatactgtaaacagatttatttctgagaccagaagctctcttttttatgggtaagtaaatatttgcaagcatggttccattccggtagaatcattttgcagtcatttgttttgtttgttgttcattatttttgttttatacatttgtaaacaggtaagaacagatttttttcatagcaattatgaaattaatacttagacattttaacatgggagtgccagtttagctgcctgagaaccaataaagaatttaatttcctattctcattttcacatttcatggatcgtagtttcaaaggagttctaattataagagtacc

SEQ ID NO: 759061 - DNA, 546 bp, Homo sapiens
acacaatgttccatacaaagacatttataagcagattcttataatactactttaaaaaataccaattttggcatgctcttttaagcagagacaaaacagatattttgccaggaggattcagtagcagagaacaaaaataacgtaaatttggtggaatcagaaaatacatcttataaaaacaaatataaaactctgaagaaataatgcaatttacttaggtaaaatatgaaattggataggatgttgaaagctgtgtacccaaayaagattatctatatcttcaccaaaatgtgaatatctaacgaagagcaacatatattgaattttaaaataatagaattttcaaagaaatagaccagattatatcatacagtgcttaatgaccaaaattagattaattttattggaattaaaaaattatagcactacctggaatctggtcattaatctaaaataaatttaaaaaataattttcaaactccataatatgtaatttcatacatgtagcaataaattattctacataaaagaaagaaaattaattgc

SEQ ID NO: 759062 - DNA, 572 bp, Homo sapiens
ataaagtgtagttcacaaataaatggtgactttagcatttcaaacttactttttattgatcaaatgagtaaaaggatatagactgcctcaggtaaattatctaccatttcactgaagcagtttattcacatggcctttctgtatttatttcataggtttgcataataaggattcacatacacagttgagctctccttccttcgggctagttacctagctgtcctaatcacccggtaattaaaacaaaacccactccagataattggcagttttctctaattgaaaactgggtagacaataatttggtctagggaaatgccctactctcatactgtaatatgaattaccatctgtccattaaattagccmccgtaaaatattaacatataaatgactactatagggctattcttaaagtggccctaacatttaattttttttttcattttgttgactcacccatttctttctagggaacaataaggaactgtattctagggttgatggcaggaaagggcaataacttttgtcccacaatgcagacatgttaagaatatttagaatatctaacc

SEQ ID NO: 759063 - DNA, 594 bp, Homo sapiens
aagatgtttttctcatttaaattgtcattctagggacagaaagtaagttttgaaaagaagtagcttttatggaagagaggtgcctgagaatttcaaaaggatttaagacaaggggaatgagaagagattgaatgaaagaagagaaaacagagagaaagagtaattaaaaaaaagaaaagaaaagaaaacaaagataatcccaaagagcagtgtgcacagttttgctgcaatcagtaccattctggtcaagtctccgtcatctgctctaggcttagttcctctctgccctaggctgcttctggtaaaaccgcackctcagcttgttgggcgtcttcatggagcctgttatttgctgtgggtctaagaaagggaaagcttcaggcttcaggcatctgtacctcctatctgttctcagctccatggaaattcttaagggatggggctatagataagagagtgggaaatggagatcaaggtctcaaatgaaaggcagggtggtttgatttttaagctcccctgatactttttatttatatatttgctgcttctagaaaaaccaaaaaaggaaagtgattcatacatagaatgcctgta

SEQ ID NO: 759064 - DNA, 622 bp, Homo sapiens
aatactcaaaattttctcttaactttttgaaaatatacaataaattactaaacatatttactctgcattgctacagaacactagaactttattcctatctagctataattttgtattctttaaccaacctctctctatattcccctgtgccttattcttcccagcctccaataaccaaaattctactctccactattatgagctcatttttttagctccttgtatttacctttctgtgcctaagttatttctcttaacgtaatgtccgacagattcacccaggttgccccaaatgaaacaatttcattattttcttaatggctgaatagtcatmtacattaggtatttatcctaatgctatccctcctctagccccccgccccctgatatgccctggtgtgtgatgttcccctccctgtgttcatgactaacagccattttatttatcctttatcattttgtgcagtagctttaatattacccagaccactgtagccatcaatacattcttgaaaaagaatatgatgatttgtaatttttccaggaagataattgggaaattgtatatattgcttgattaaattttagtgtatttatattacataaaacctgtaactcaaag

SEQ ID NO: 759065 - DNA, 622 bp, Homo sapiens
aatactcaaaattttctcttaactttttgaaaatatacaataaattactaaacatatttactctgcattgctacagaacactagaactttattcctatctagctataattttgtattctttaaccaacctctctctatattcccctgtgccttattcttcccagcctccaataaccaaaattctactctccactattatgagctcatttttttagctccttgtatttacctttctgtgcctaagttatttctcttaacgtaatgtccgacagattcacccaggttgccccaaatgaaacaatttcattattttcttaatggctgaatagtcatctacattaggtatttmtcctaatgctatccctcctctagccccccgccccctgatatgccctggtgtgtgatgttcccctccctgtgttcatgactaacagccattttatttatcctttatcattttgtgcagtagctttaatattacccagaccactgtagccatcaatacattcttgaaaaagaatatgatgatttgtaatttttccaggaagataattgggaaattgtatatattgcttgattaaattttagtgtatttatattacataaaacctgtaactcaaag

SEQ ID NO: 759066 - DNA, 575 bp, Homo sapiens
aataggagaaaatatttgcaaaccatttatcctataaggatttaatattcaaaatatacaaggaagtcatgcaactcaatagtaaaacataaaaaataaaacacaaaataaccctgttaaaaaatggccaaaggccttggatagacatttttttcaaaggcaacatacagrtggccaacaggtatatgaaaagatgaacacaccagtaatcatcaagaaaatgcaaatcaaaccacaatgaatgagatatcacctcacgctagtaagaatggctattatcaaaaaaatcaaaagataaaatgttggcaaggatgtggagaaagggaaattttatatattgttggtaggaatgtaaattggtacacctattaaggaaaatagtacaaagattcctccaaaaattaaaaatggaattatttaatctcactgctggatacatatccaaaggaaatgaaatcaggatcttgaagagatatctacacccccatgttcactgcagcattattcacaatagccaagttatggaaacaacctatgtgcccatagacagatgaatggatgaagagtatgagtca

SEQ ID NO: 759067 - DNA, 619 bp, Homo sapiens
cacgcttcaggtggattgtttctattctgaatctggagtggcccatcagagcaatcatctatataaccagttcacaagaagtcctgtaacctaatcagatttaagaaatgcacagaaacttttgcttgggactcttsgaagagaattcactctgtcccttttctactggactcgaaacctgcaggaatactcgcctagagctttggagccttaaaaggaagccaacacagtagaaagcacagctgtgaggtggagagaaattgagtcctagggataacatctgagctcctagatcaagctctccctgaagtcagccaatgaagtccatttttagtttaagccagcatgggtaaagtattcattctgtcactgaaaattaaaagattctcaactaaaataaaaagtaaagtaaatttccaactaatcatggtaacagggaagttggtaacttaaaaaaatccaaaaaagcaggtaatacaaacacaatttatttttcttaaaattttttaaatcagagaaaaatgttaataattttgctgaagaatcaaatgactgaattagatttaataatggaaaattttacagaattagattttaacagtactttcagtaagcctgg

SEQ ID NO: 759068 - DNA, 618 bp, Homo sapiens
aagtctacttatttacctatcattcttcattccagcaccattactaccttcttcacttcatgtgttataattatcttggtaataataaatatcattaacccataaaatatataatgtacacacttgaaaagctataattaagaaatgtaaattacttcaatttctgtttgtccaaattgctaaaaatataataaaagttgtatccagttattgcgtgaaaatctacttatgttttttwaaattattattttattattattattatttttgagtctcgttctgtcatccaggttggagtacagtggcctgatcttgactaactgcaacctccacctcctgggctcacgtgattctgccatctcagcctcttgaggagatgggactgtgtgccaccacgcccctgctgatttttgtattgttttgtagagacggggttcagccatactgcccaggctggtcttgaactcctgggctcaagcgaactgccagtcttggcctcccaaagtgctgaaattagaggcatgaaccaccacgccaagccggtcatcatttttaaaaatgaattttggatttagtttaaagattgttaagacatgcctcttcacctaacagggcata

SEQ ID NO: 759069 - DNA, 618 bp, Homo sapiens
aagtctacttatttacctatcattcttcattccagcaccattactaccttcttcacttcatgtgttataattatcttggtaataataaatatcattaacccataaaatatataatgtacacacttgaaaagctataattaagaaatgtaaattacttcaatttctgtttgtccaaattgctaaaaatataataaaagttgtatccagttattgcgtgaaaatctacttatgttttttaaaattattattttattattattattatttttgagtctygttctgtcatccaggttggagtacagtggcctgatcttgactaactgcaacctccacctcctgggctcacgtgattctgccatctcagcctcttgaggagatgggactgtgtgccaccacgcccctgctgatttttgtattgttttgtagagacggggttcagccatactgcccaggctggtcttgaactcctgggctcaagcgaactgccagtcttggcctcccaaagtgctgaaattagaggcatgaaccaccacgccaagccggtcatcatttttaaaaatgaattttggatttagtttaaagattgttaagacatgcctcttcacctaacagggcata

SEQ ID NO: 759070 - DNA, 528 bp, Homo sapiens
ccctaagttgaattagccaatgaaacattctactttagcattggttctaatatgtgtatttccattacatatgtgcatatataatgtatatacaaatatacatattaatacacgcatataaaatggaaatagaggtattagaaatgggtgtgtgtatatatgtatacataaatatgtatatattttgttttcawtttattttcaaatagttcaagaatactgtgcttttatttttatgtgggcaacttgtaagccttgtgcaccagggctctttaaatctacctggtcacttgggaaggcatcatttttagactcaaaatggaaagggaattcaaaacttatttgatcaattatctttataaatgcaaaataattattttcttcctttatatgactcaaagataaaatatactctaaaatctcatttgagtctacagagggtaaggtacagattttaatgcaatgagccaaggcacgaaaatcagaatccacttattttagaatgcaagaaagatggctattgctttt

SEQ ID NO: 759071 - DNA, 580 bp, Homo sapiens
cctcgataaagaaaaaacaaaattcagaaacataaaatttgtaggagagcaataatgacaataattacagaaaaagataaaatattagaagtatccaataaagaacaggaaaatcactaacataaagattgaatttgaaggtgcacaagaatgaaaaaaaaatgtacaggaaatttatgaaaactgtagtaataagtgattaaaaaaataaagaccaaaaacaatacaaaaaattatccaactcaataagataaaaaaatacgcaaaacagcaagcaaataaaatgaattaaagaaaaattttaaaataacagatataaacagcaactgatctttgggagagaggtaaatatatatatacatatatatatatatayacacacacatacacacacacacatatatacacaaacacatatgagagagatacttttgtgtatatataaaatgatataataattcactagccaccctaatgaagacaaacatggagtgagctcaaaaacacaaattattttgaggaaataatcacaaggaacattcacaaatctaattttttgtatgcaaatagacttcttaaa

SEQ ID NO: 759072 - DNA, 452 bp, Homo sapiens
tgattccatttacgatgattccattcgattccatgtgatgattccattcaattctattcaatgctgtttccatttgattccattcgaccatgattggtttgattccattcaatgactccattcggttccttttgatgatgattccgttcgattccatttcattattccatttgattccattggatgagtccattcgattacattcgatgattattccattcgagtgcattagatgattccattcgagtccattcgatgattccattcgattccattcgatgttgattytgttcaaatccattcgatgattccactcgattccattcgatgactccagttgatcccattcgatgatttcctttgattccctttgatgatcattccatttgattcaattcggtgatttcatttgattccattcagtgatgtttccattcgactccattcgatga

SEQ ID NO: 759073 - DNA, 574 bp, Homo sapiens
cagatctccagactcttctctcactgcgtcttggggcctgagagcttagctctgcaaagaacaacccaggaagggtcaggatggacagggcactgcagtctctgcaccaagtggtgtgccctacatggccctgagacttcagaagactcgggtcttargctcactgcagactgtgtaacgtgaataacaaaaaaaaaatttctactgcacatgagtaagctgcagaagactttgtgccttgaagcttccttccagatgaaaaagcgggtctctcatgaaaagaacgcttgccttcaagaaaagctctttaaaatcttttgacatggcaaaagaatctgtaacttgccacttgtacatcacttccaaaaatgtttcttccttcttaatttattttaaaaattttgtttcaggacccaccgtgtgacaggcacattttccaccatttgggaaacatcattgaatagaatgagaattcctactgccatgacactaacactgcagtgacatccgtagcgccaaaactcttgatcttcttcatcatgtgctttcattcatcagacgtgtattcgttcag

SEQ ID NO: 759074 - DNA, 478 bp, Homo sapiens
cctcaataaatatttgttaactgaaaaaatacataccacatggaaaaatcaccctttaattttaatgtgtatattacatacttaaaaatatcattgccattaaatatgaaaattgtcttgaccagaaagaaaaacaaaaacaaaaaaagagttcagaacaaatagtggtcttggtcaggagaaaatgagttcgggtttggatacattatttttatcagtgtttctcatgtttttcctattctrtgtgaactcctgtcttcagatttaaatagttgattatatgaactgaaattgtagaatgggagaattttattgctaatcagattatcctaggctttgtggttagagacaggctgtgagtcctgagtctgcttttcttttcattatactcagcttcccaccttttttcttatcttcctgtctgggacatttcattgcttatgagctacagacctgatgtgtttcatgccaaagcata

SEQ ID NO: 759075 - DNA, 537 bp, Homo sapiens
tctttcacccttttctgtctctaaagccaacctctctgctcagctccttggaacacctattttgttttatatagaatgaggttttgcctgattctagaatcaaaaatgaaagcttattcaatctgtaaaataaatctgttgtaatttcatcttttgacatgatttcatagggctgaggtgagtcccgagagtctgcctttctaagaggtgacgttgatgctgctacacctatggttttcaaatcacactgtgaggcagagtcacttgggaagattttgcaactaccaatgcttggatcccaccaraaatggattatcagcttctctgatatcagcttctcctccaacatttggaggatcccaaatgtggtatttttgaagaagtttcccagatgatgctatggtacagttaaggctgagaactagaactagaagctttcagccaatttccctggtatgtggctagtattgcttccattgtacagagaaggtaaaaaggggtaacttgccaaaggtcatttggccagtaaatggtaag

SEQ ID NO: 759076 - DNA, 628 bp, Homo sapiens
ttcccagagatcaggcaacctctaggatcctgggatggaaacttggactttgcatctggggctgcactgctagagatgctgcttctggtgctcatgctggaaccactggagccaggtttctcccagaccctcagccccatgtgaatccaaaccctgtttcaaaaggaatgtccatgggaaaatggggtttgatttacaygttcagttttcaggctacatttgctagaatgcacctcttttgtatgtgcaagaatgccaataggtgctctgaaagctgaattctttagctattcgtcatatcctagtggttagcatcagaaggaagccagtacagttgggtctcggtatctgcaggggattggttccaggcccacctgcagataccagaatccaagcaaacttaagtcccacagtggactctgagggacctgtggatacgaaaagtcagccctccgcatccacaagtttcacaccccaagaatattgtattttcaatccgtgtctggttgcagatggaacctttggatatggaaggctgactgtattttgaaaaaaatctgcatataagtgggcccgcccagtttgaacctgtgttgcttaaggtcaactaatgctctttggcattttg

SEQ ID NO: 759077 - DNA, 626 bp, Homo sapiens
catcaacaccatcaaggaaaacataatctcaccaaactaactaaataaggcaccagagaccaatcctggagaaacagagatatgtgatcttccagaaagagaattcaaaatacttgtttttaaaaaactcaaagaaattcaggataacacagagaaggaattcagaatactatcggataaatttaataaagagattgaaataactaaaaattgagcagaaattctacagcagaaaaatgccattggcatactgcaaaaggcctcaagagtcttttaataaaatgataaagccaaagaaaaaaatagtgagcttgaagtcgggctatttgaaaatacacagaggaggcaaaataaaaaagaataagaaaaagaagcactcttacagtatctagaaagtagcctcaaaagggscaatataagaattattgaccttaaagaggaagaagaggaagagataggggtagaaagtttactcaaatgaataatgatagagaacttgccaattctacagacagatataaatatccaaatacacaaaggttttataactctaagcagatttagcccaaagaagaataattcagggcatttaatactcaaattcccaaagatcaaggataaagaaa

SEQ ID NO: 759078 - DNA, 562 bp, Homo sapiens
agggagcgcgcgagagagcgagcgagaagagaggtcctgtagaacaaaggctttcaatgggatacagggcattaccaaatcaagtttcctatggaacttcttatttttttttatttttatttttattttttttagacagagtctcgctctgttgcccaggccggagtgcagtggcrcgatctcggctcactgcaagctccgccttgcgggttcacgccattctcctgcctcagcctcccaagtagctgggactataggcacccgccaccacgcccagctaatatttgtattttctttttagtagagacagggtttcaccgtgttagccaggatggtctcgatctcctgacctcgtgatccccccgcctcggcctcccaaagtactgggattacaggcgtgagccaccgcgcccggcccgtatggaacttctaattggtgggtttaatgcaagcaggcatgagttccaaaaggtcacctcgtgactgagaagcattatctgctgcatagcccatgcagggtgtgggtggcagtggggtgaatcaagtaggttttatctagctg

SEQ ID NO: 759079 - DNA, 588 bp, Homo sapiens
gcgagagagcgagcgagaagagaggtcctgtagaacaaaggctttcaatgggatacagggcattaccaaatcaagtttcctatggaacttcttatttttttttatttttatttttattttttttagacagagtctcgctctgttgcccaggccggagtgcagtggcacgatctcggctcactgcaagctccgccttgcgggttcacgccattctcctgcctcagcctcccaagtagctgggactataggcacccgccaccacgcccagctaatatttgtattttctttttagtagagacagggtttcaccgtgttagccaggatggtctygatctcctgacctcgtgatccccccgcctcggcctcccaaagtactgggattacaggcgtgagccaccgcgcccggcccgtatggaacttctaattggtgggtttaatgcaagcaggcatgagttccaaaaggtcacctcgtgactgagaagcattatctgctgcatagcccatgcagggtgtgggtggcagtggggtgaatcaagtaggttttatctagctgtctgatacgagtgtggtcaatagaaggtggttgta

SEQ ID NO: 759080 - DNA, 413 bp, Homo sapiens
ataagccaattttctttttaccactgctggaaagaaataaccttgcctaaagttgttatctcattggtgtctagcacactgtggcataagattgataatcacaatgtgatgtttgattgattgaatggataattgattaaagaagaacacatggagatagaaatataatagtaaatatggagaagacatgcatacatatacacgtacacacagacaaatagagaaagcaaggtacatattgaggagaacggatgaaaagtggcatgaaatrtttttaaaaagcttgatattgacaaaggcaaaaggcaaagtgtagatgagtattttaacagatattacatgttgtttgaaagcaactgttttgggaaaatttgatgttctattaaatttttcctcttaaattatcacaattt

SEQ ID NO: 759081 - DNA, 503 bp, Homo sapiens
attaagaggacaggttctgaactcacacagtcggagttcaaatcttgacacttagggccgggcgtggtggctcacacctataatcccaacactttgggaggccgaggtgggcggaccacgagatcgagagcatcctggctaacacgtgaaaccctgtctctactaaaaataaaaataaaaaaaatttagtcgggtgtggtggtgggcgcctgtagtcccagctactcaggaggctgaggctggagaatggcatgaacccagggggcaragcttgcagtgagctgagatcacaccactgcactccagcctgggcaacagagcaagactccatctcaaaaaaaaaaaaaattcttgacacttaatacttccattatgttggaccttaatcaacctctctgagtcacaatatcctaattagttaaatagggttaaaacacatagtattgttaggagcattaattgagctaatataatgcaaacttataatagaacttgaattaaca

SEQ ID NO: 759082 - DNA, 481 bp, Homo sapiens
attttagaaacagttagattctataccataaactttagttcttttcttttctttctttcttttttttttttttttaagatagagtcttgctcttgttgcccaggctggagtgcaatcaatgatgagagctctgctsactccaacctccgcctcccgggttcaagcgattctcctaccccagcctcccaagtagctggggttacaggtgtccaccaccatgccaggctaattgtttgtatttttagtagaccaggggtttcactatgttggtcaggctggtcttgaacccctgacctcaggtgatcaacccacctcggcctttccatgtatttctttattataactgcctctttcaaataaataagattaaatattataggaattaagaattttttacaaaactcatattaatgtacacataaatcttgtagactaatataaaaatattgtttaatttgtgttttacttacagaattactga

SEQ ID NO: 759083 - DNA, 531 bp, Homo sapiens
atattaaagtacaccctgattttcatctaggggccacttttccactactcacctaatgtaaatgctggagactcccacatgcatgaaaaacagaaggagagcacttgctgcctgtggaagagcaagagagggagagaaaccaatagtgaacaagatttcagccaaatgtttgaggagttcgctcaatgtcrtgtttgagctagcgtaggaagaagctgcagacactgaggttcctactctctgggatcttctctgcagacctttttggatccagtgagaaagattgtgaaaaaagattgcttctcttagaagtaaaagcctggggagaggcttttcctgtcagaaggacaggaagtttttcccataaccttgttccccacagaataaaggcaaatggcctgctgtagcaaagaagaaagataaaaaatgtaccccactacccctgaagaggatcaaggcattctctaccttctagacttgagatagaaggcagagtctggctgcctgccaagcgtactcgctataaggaga

SEQ ID NO: 759084 - DNA, 570 bp, Homo sapiens
ttgctctatattttaagaaacagttctttattattgctataaaacatctgaaatacacgaatgttttgctttatttcatagctaatctttttgaaataatagaattcacttgctatctctaattctcacttctcatttcaccttaataatttggcttcttatcactctagcaagatgctatccagatgatttataatgaccttataattgataaattaatgtgcatcttctctgtcttcataactttttatttyttatagtatttgtcagcatagcctttgtcttctgtgatgtttttctccctacaaatctgtaatgttacacttttacactctttacattcaagaataagaaaaaatgaattcattattttcattcccgaacctctgtatcatttttcttttctcataatggaatcacaattcaggtcagacagactcaaggcactggaggcatagtctactgttaattccacatcatatgattgattttttaataagaagccctgtgtacgattttaaatatactaaaatctttcacttttctatttgatgctctccaattccactt

SEQ ID NO: 759085 - DNA, 644 bp, Homo sapiens
agttgctcctcttattactgaactctgagaattcctcatacccaaagcacccaggaaaaccgcctagcatgaggtctcagcaaaggccaatcacagcccgagcactacacaaaggccagtgcaaggtaaagaaacctacaagggctaaacaacgaacgagaggaaagcaaggaaagcagacatgtggatatcctgagtcacagcatggagacaaaaggtggtaaaggccttgtgtrcctctacttcccacaatccctgatcagtttggggtcactgtatagctctatttctagtacgagcatagccacaggggccagtctcttgcctttattgtcttcactttactgataggacaacaggtcaatgaagtgacttgtttacggtcagctgggcaactaggctgagaaaccaagcttcctgacccccaccccccgcaatccactctctctcatcaggtggttacacaccaacatcagttcccatctgtggatgatccactatgggccaggtccttaagggtaggggttttgcaggtaagacagatttgaagaggtaaagtcacatgcctatggtacagtatcccccacttatccatggtttcactttccaaggtttcagctacctgccatcaactttgctctaaa

SEQ ID NO: 759086 - DNA, 607 bp, Homo sapiens
gtaccagctcagctgcaatacaatagaataccaggtagacttctacaatttttgactctagtccctgactactggactgtacttctggactcacccaggacctggtggacctcgccatcctgaagggaatgacacaagccttgctgcctttaatatctactgatagtcgagtctcagggccttgagctaacataggtggtggcctgggagtggttacagcaggmcttgggcaagacttagtgctgtgttggcttcagatcagactcagcacagttatagtgatggtggccacaggggtgcttgtgtcactccatccccagctttaggtaactcagaacagtgagagagagagagagagagagattctgtgtgtttgggaggttgtaagggaagagaacaatagtctttgcctgataatccagagaattctcccagatcttgtccaagaccttctaaggtggtatggtacctctacaagtctgcaagaaccacagtattactgggctttgggtaccctctaaagcagatggagtttagatcacaacacccaagtcatttcaaatacccagagagacttcccaagaaggacagctacagataagcctgg

SEQ ID NO: 759087 - DNA, 647 bp, Homo sapiens
tataatcccaacaaaattataactaaaaacagttctacttcctggaaattaaagaatatacttgtaaacaattcaaggataaaagaataaatcagtataaaattataaaattattccactaaattttaagataaaaaattgtgagatgcagctagagcattgtttaaagaaaaaaatgatagccagtttgcatatatgagaaagaacaaagggtaaaaatcaacaatttaatttttcatctaaagaatcaaaactacgtaaaggaaaaataaataataaagawcagcaatgaatgaaataaataggccgggcatggtggctcatgcctgtaatcccagcactttgggaggctgaggcgggcagatcacctgaggtcaggagttcgagaccagcctggacaacacagtgaagcccccatctcgacaaaaaatacaaaagtaagctgggcgtggtgtcaggtgcctgtaatcccagctactcaggaggctgaggcaggagaatcgcttgaacccaggagacagaggttgcagtgagctgagatcatgccattgcattccagcccgggggacaagagtgagacttcatctcaaaaaaataaaagagagaaagaaagaaagaatgcagaatagagaatgtaaccaaagcaa

SEQ ID NO: 759088 - DNA, 601 bp, Homo sapiens
aatgtgaggcgtaaagccttctgcttaggtgcgttttcaaacttcctaatatatttttaagaaccagttcatttttgaatagcttcagtctttctcccaagtaaaaaaaaatgacaaatttttcataataactcagaatattggctgaagttccaaagctagggacaatcaatgacattctcaagagagtttctttaagcatcaatagcaggacttgctgaacagtggctaaaagcaggttctctgactctcatccaccaaccacttttagccagtatatacaaccaaaaatgaggtttgggacagagggtactatttctttgaaaacagtggtagctattgctgcacctctatcytttctgtaacttcaagtcgcacatgtttatagtgaaatttagaagtgcctaccaggtaggaagaagctggatactcactgacttgtacagtgacataagttcttcctttaccaaactttagtcaagctctgagtattcacctaagtttgctttcttctaaaattcacttttagcaagaatcctgctaagtcagtttagcaagatccctgcacacttaatatcaaatcacgctcgatatctagttg

SEQ ID NO: 759089 - DNA, 617 bp, Homo sapiens
ctgatgtttacataatgataacaactttattcataattgccaaaacttggaagcaaccaagatgttcttctgtagataaatggataagtaaatttccttacaaacgaacaataaaatactattcagcactaaaagaaatgtgctatcaagccatgaaaatatagaggagtaacttaggtacttatcgctaaacaaaataagtccgtttgaaaaggctacctaccatataattctaacaataagacattttggaaaaarcaaaactgtggagacaggagaaagatcaggaatttgtaaggttggagagaagggagggatgaataggtagatcacagaggatttttaagacagtgaaactactctccatgattaaaaagaaaaaagtggtggaaaaatgtcattataaattgttccaaacccacagaatgcacaattccaagaatgaaccctaatgtaaagtacagattttgagtgataatgatgtgtcaatataggttcattaattgtaacaattgtagcactctgttgagggatgttgttaagggcggagaccctgtgtgtgtggaaggcagggaatatatgggaaatctttaccttcctctccaacttgaatcaca

SEQ ID NO: 759090 - DNA, 609 bp, Homo sapiens
aaattaattaatgtataatttgggatatttagctactagatagaagtataatgttaataagcacggcattaaacaacatagaattagaaatattagagtctactaaaaagaaggagcacaaatgtgattcaaggttcatttaatgcttcatttcttaaaaaatttggcagaacacagccatttatttcatatatatatatatttaaaacattccatctttagtgtgcaagaaaacaaatagaaataaaacactatgaaaactgggatatcaactgcctgtgaagctaaaatcatgtaaaggtcaaatagaatttttaatttaaggaaattttaagataatggaaaaatggaggtgatctaaattattttataaagaagatattattataatgattttattccattaaatcaaatwtaatttttaaatgaatagtacatacttgtggtacgtgttcaaagcttcaaatgaattttaatataattgtattaataattttttaaaaaacaagaggacgctcagcatcctacattattatggaaaagagagagttgaaatagagtccacggttattatgaggcattattttcttccaatcagcaaatggagaa

SEQ ID NO: 759091 - DNA, 559 bp, Homo sapiens
acttagcatttcctcgtcccttcctacggtaggtaacaattgtgaaaaagcacatgcatagtcaatacataaacagaaaatcatcatttcactctatgtttatatacagagacatacatggtggggacatcatgtaatccggttctaacattgtcatttaaatcgcgtaacattaatcgcttctyggccttttggctaagaccgaacgtagtatctgttcttatccgtgaatccagtagcattcactgagacatttggctcagatctgacatcttatggtcaatcttctatttgctacagcaattttcctactcaaactatgaggtctcttcaaatcccactctttgcctatgtctccctaacttagggatcttttgatttcaggtaacagaataattattaaaaagagagttaaagaagagaggtttacttttacgtttaataataagttcaggaggccgagtgtggtggttcgcgtctgcattcccagcactttggggggccaaggggagtggatcccttgagtgcagaagttggagaccagcttagacaatgtggc

SEQ ID NO: 759092 - DNA, 592 bp, Homo sapiens
tgagccattagcatgacactgcactccagcctaggtgacagagccagatgctgtcaaaagaaaaaaaaaagtagtataggagcaactcgttctacaattaactcattaaaatgacaatgtcaaggctctgggtgacttcactgttctggtcgtctccttgtgtctacgagttggatgttatagtttcaaatattatctaatctcataatgataggacctgaagagcctctaccgtgaggacatgattaagacacaataagttatgtttaataagtatcccatagtcttttatctrttatacaccactacagatgtattattttacctatttctctaaaacatgaaattacttattaggaaaatgtaaaagtaaaaatcacacagaaagacctcataagtcctatgaaaatggccaaagttggaaatacagaccttgaaaaaaatgaacacagatatatgcaaaaagtgggggagagaacactcatacttaaaggcttatagaataaatgtttttcatagtagcccaaatgacataacccaaatatccatccatcaacaggacgagacaaaggataaattgagttatatacaa

SEQ ID NO: 759093 - DNA, 471 bp, Homo sapiens
cagtcagccctgcaggctacaccagggtcgtgctacggcctggatcctacacctgccaagtgtgagccaagtgcagagtggcaagccgctccaaacaggtcactgctgccatcaaaagtatagctctttctctgactagtagcaaaastgaaatgagagattaaaagcatgagaaagactcaacccacagacccaccattgctgacttgatggtaaagaggaccacgtggggaacgcataagggaacagaagctgcatgcacccacgtctggacaaggagaatgcagtggcgcctggaagcttggagacaccaggaaccacagagcctcaaaaagggtgtcacagccctggttcaggatgtccctaggtctgggttccccaaagggccatagctcttctcttcttctcgtcactgcagcttggtcgagtggagggggtcagtgaggggggtgggttcagacctgtttgtgt

SEQ ID NO: 759094 - DNA, 624 bp, Homo sapiens
tcaacaccatcaaggaaaacataatctcaccaaactaactaaataaggcaccagagaccaatcctggagaaacagagatatgtgatcttccagaaagagaattcaaaatacttgtttttaaaaaactcaaagaaattcaggataacacagagaaggaattcagaatactatcggataaatttaataaagagattgaaataactaaaaattgagcagaaattctacagcagaaaaatgccattggcatactgcaaaaggcctcaagagtcttttaataaaatgataaagccaaagaaaaaaatagtgagcttgaagtcgggctatttgaaaatacacagaggaggcaaaataaaaaagaataagaaaaagaagcactcttacagtatctagaaagtagcctcaaaagggscaatataagaattattgaccttaaagaggaagaagaggaagagataggggtagaaagtttactcaaatgaataatgatagagaacttgccaattctacagacagatataaatatccaaatacacaaaggttttataactctaagcagatttagcccaaagaagaataattcagggcatttaatactcaaattcccaaagatcaaggataaagaaa

SEQ ID NO: 759095 - DNA, 626 bp, Homo sapiens
atattcttataaatgtcacactgtgcagatgtattaaagctatatatagtatctactagtagtaaaatcactagggtatagaatatgttagttttcagttttcctaagcttttgttaaatagctttagagagtggttgaatctatttttatttcctgtaattaatgagatttccattgcccctcaaccttattaacaactattattaagaattgttttgccagcttcatgcctttaatcttagcactttgagaggctggggcagaagaattgcttgaggccaggagttcaagaccagcctgggcaacagagtgagaacccatctctaaaaaaaawaataataataataataaaagccaggggcagtggcgtgtacctttagtcccagctaattgggagactgaggcagaaggatcacatggagttctaagctaaagtgagctatggtcacacactttaactccagcctaggggacagaatgtgaccctgtcttgataagatgcaataaaattgttttaatttttcccagtctactggatagaaatgatatctgtatttccctgattactaatgagattgcaacatacttattagccattttatttttctttttgcaaattgctatt

SEQ ID NO: 759096 - DNA, 655 bp, Homo sapiens
ttatgatcagaaatttaaggaatattgcccagacagtgatgcaacaatctctgttcttataagtattttggaaagggttatgacaaaaaataacatacaaatgaggaaaaaaaaaccaaaaaacttttctttttcataatctaaaatgctttataaacaactgcatattagagaaaaagtgcacttctgttcaacatttgtcttttgaatgtctacatttaacattttactactttatagataaatggaacctgacatgtaattctagaaggcatatagacaagaggaagagacagatttctaaataaacaaccattgaagcatgagtgctgataggctgtgaggcaatctataatgtaggtagaaagtgttctgtagatttttaaatgtttgttytatttgtgaatatcattaatggcttcttaaagcagtagagttatttgagttagcttcaaagaacagaataaaaagaacaagagaacaggaggattctagatagaaaggcttttagaaagataaaaattgtgaaagaaatataagcatgattataagtcatttgtaggctgccatttgaactactagagacatgctctggtggtatcatgtccactttgctttctgttctaaatggaaatatttaaaagccatttagtga

SEQ ID NO: 759097 - DNA, 636 bp, Homo sapiens
tttcttgcccttctgtagtagaagctacttgcagcctcacaccaacctgctatgaattcccagctctgtactcactgcattttctccctctgaacattagcttttgtcttctgtacaatgaaatcatcataatgtctctactatcttctaaaaatgatgcaaagattcatttgagaaaaatctggaaagcttacaaatagtaagatttccatacatgaaagctgctaaacgaagttatttactgtactaaaactataaccaaaaaatgaacaaagcacatmttgatgattagctgaactctagctattgtagaaaacgtagatttactcaattcattgtatttaatggatttattcaatgacttgacactgtagaaattattacctagcaccttctcactaatgtaaaattggaagccacatgctgcctagtcaggacatggacctaacttcagatttgatttctttttctcattgaaggccaaattatttaattattaaagcaggagctttaaatggtctcatttttattagctgcactttaaagtaatggcaaccaacaaagttctactggatccttaatgatgctcagacgtcacacttttcactctttcatatgagatgtaactatttaatc

SEQ ID NO: 759098 - DNA, 636 bp, Homo sapiens
tttcttgcccttctgtagtagaagctacttgcagcctcacaccaacctgctatgaattcccagctctgtactcactgcattttctccctctgaacattagcttttgtcttctgtacaatgaaatcatcataatgtctctactatcttctaaaaatgatgcaaagattcatttgagaaaaatctggaaagcttacaaatagtaagatttccatacatgaaagctgctaaacgaagttatttactgtactaaaactataaccaaaaaatgaacaaagcacatcttgatgattagctgaactctagctattgtaraaaacgtagatttactcaattcattgtatttaatggatttattcaatgacttgacactgtagaaattattacctagcaccttctcactaatgtaaaattggaagccacatgctgcctagtcaggacatggacctaacttcagatttgatttctttttctcattgaaggccaaattatttaattattaaagcaggagctttaaatggtctcatttttattagctgcactttaaagtaatggcaaccaacaaagttctactggatccttaatgatgctcagacgtcacacttttcactctttcatatgagatgtaactatttaatc

SEQ ID NO: 759099 - DNA, 518 bp, Homo sapiens
cagtgagccgagatggcacccctgcattccagcctaggcaacagagcgagactccatttcatgaaaaaaaaaaaaaaaaaaaaaaagaaaaagaaaaggatgagtttatgtcctttgtagggacatggatgaagctgaaaaccatcattctcggctaattaacacagaaacagaaaaccaatcatctcatgttctcactcataagtgggagttgaacaaagagaacacatggagacagggaggggaacaccacacactggagttttttggrgtttggggggctaggggagggatagcattaagagaaatacctaatgtagatgacaggttgatgggtgcgggaaaccacgatggcatgtgtatacctatgtaacaaaccccgcacgttctgcacatgtatcccagaacttaaattataattttaaaaaatgaaaaaaaatgacaaaatgaaagaaatgttacatttcttggtaaagttatggtttgaaagccatttttaagtaggagtactactttta

SEQ ID NO: 759100 - DNA, 571 bp, Homo sapiens
ggggcacagctaaagcagtgataagagggaaagttatagtgctaaatgcccatatcaaaaagttagatctcaaattaacaacttaacaccacatctagaggaactggagaaataagagcaaaccaaccacaaagctagcagaagacaagaaataatcaaaatcagaactgaactgaaggaaattgagatgtaaaaaaacacacaaaagatcaaaaaacctatgtgtttcttttttaaaagaataaataagattgacagactgctaggtaggctaattgaaattaaaaaaaaaaagactcaaacacaatcagagataacaaaggggacattaccaccaaccccacagaaaaamaaaaaacctcagagactacttcaaacaccactatgcacacaaactagaaaacctagaagaaatgaataaattcctggatacacatatctcacaagattggaccaagaaaaaattgaatccttgaacagaccaataatgtgtttcaaagttgaatcagtaatagaaagcctaacaaccagaaatagcccagtactaaatagattcacagacaaattatat

SEQ ID NO: 759101 - DNA, 632 bp, Homo sapiens
ggaatcacctgctgagatcttttagtttttactctgtatctaacccagattaccccaaatctagctcagcagtctaccctattcttctaaataccacaggaaaaaagagcctatttcagatcaatttcttaccacacatttagactaatgacattttcaaatatttaacccttcttcttaactgctacactttctgtctgtagtctacatccttgaaattgtacataggatttaagtgtcccttgcactagaagactattttatatttagttagattattctcaatataaaagttyaccagtgaacctccaaacatctcccactgtgggcagcccttgttgctagagaaacaggtggcggggaaagctaaccaggttttcggtaagaacttagaagcataaatgatttcatagtttttcctatctttcttattatgttaattaattgagtatttaaggtattttctacataattcattcactaaaatcagtctctagggtgtgagtatcaaaagaatgttttcttctgtcattgatggtgtacatactctgttggtctccactttattttcccttactggaatatcctgcaggttccagagccttctatgtatgttcacatattaaatcatc

SEQ ID NO: 759102 - DNA, 632 bp, Homo sapiens
ggaatcacctgctgagatcttttagtttttactctgtatctaacccagattaccccaaatctagctcagcagtctaccctattcttctaaataccacaggaaaaaagagcctatttcagatcaatttcttaccacacatttagactaatgacattttcaaatatttaacccttcttcttaactgctacactttctgtctgtagtctacatccttgaaattgtacataggatttaagtgtcccttgcactagaagactattttatatttagttagattattctcaatataaaagtttaccagtgaacctccaaacatctcccactgtgggcagcccttgttgctagagaaacaggtggsggggaaagctaaccaggttttcggtaagaacttagaagcataaatgatttcatagtttttcctatctttcttattatgttaattaattgagtatttaaggtattttctacataattcattcactaaaatcagtctctagggtgtgagtatcaaaagaatgttttcttctgtcattgatggtgtacatactctgttggtctccactttattttcccttactggaatatcctgcaggttccagagccttctatgtatgttcacatattaaatcatc

SEQ ID NO: 759103 - DNA, 594 bp, Homo sapiens
gcaaatcaataaatggaatccatcatataaacagaaccaaagacaaaaaccacatgattatctcaatagatgcagaaaagggctttgacaaaattcagcaggtcttcatgctaaaaactctcaataaactaggtattgatgggacatatctcaaaataataagagctatttatgacaaacccacagccaatatcatactgaatgggcaaaaactggaagcattccctttgaaaactggcacaagacagggatgccctctctcatcactcctattcaacatagtgttggaagttctggccagggmaattaggcaggagaaagaaataaagagtattcaattaggaaaagaggaagtcaaattgtccccgtttgcagatgacatgattgtatatttagaaaactccatcatctcagcccacaatctccttaggctgataagcaacttcagtaaagtctcaggatacaaaatcgatgtccaaaaatcacaggcattcctatataccaataacagacaaacagagagccaaatcatgagtgaactcccattcacaattgcttcaaagagaataaaatatctcggaatccaacttacaa

SEQ ID NO: 759104 - DNA, 594 bp, Homo sapiens
gcaaatcaataaatggaatccatcatataaacagaaccaaagacaaaaaccacatgattatctcaatagatgcagaaaagggctttgacaaaattcagcaggtcttcatgctaaaaactctcaataaactaggtattgatgggacatatctcaaaataataagagctatttatgacaaacccacagccaatatcatactgaatgggcaaaaactggaagcattccctttgaaaactggcacaagacagggatgccctctctcatcactcctattcaacatagtgttggaagttctggccagggcaatyaggcaggagaaagaaataaagagtattcaattaggaaaagaggaagtcaaattgtccccgtttgcagatgacatgattgtatatttagaaaactccatcatctcagcccacaatctccttaggctgataagcaacttcagtaaagtctcaggatacaaaatcgatgtccaaaaatcacaggcattcctatataccaataacagacaaacagagagccaaatcatgagtgaactcccattcacaattgcttcaaagagaataaaatatctcggaatccaacttacaa

SEQ ID NO: 759105 - DNA, 619 bp, Homo sapiens
cctgagaacttgtcctcagcccggttgagaaatgctaacttaagaaaaagagagggctttagtctatgaaaatatctatcttaaattaccactgcagaaaagaaattgagttttgatcgttggtaaaaataattttagataatcattgaaatgcaaacctaaaatgaaaagcatgtgtaagactccctgcaggtacacccagcttgagaacccaggctgggtcagcaccgtgccagcagcaaggacttctgtgaaggcctgggttctcgctccatgtgatctcactttgtgtcctggccagaaacaggctgcaagcgcagttcgatgtcattcagttcaattgtgcccatgttctttgtgcctrtgacatgctgggctctgcccacaccagggatacagagacaagagctaccgccttgtcaccttggaacaaaggtctgggggcacatgagctgtcacacacagtttatgtaagggctcggaagtcaggccatcctgggtataagtctcagttttacaacatatttaacacctctaagcctcagtttcctgagttataaaatggaggcacacacagtgcctgccttatccggctattgagagaattaggtaggataat

SEQ ID NO: 759106 - DNA, 513 bp, Homo sapiens
catactgtaaatgataaagttacacaatcattgtaaaaaatctggaaaaaatcagaagtatattgggctcaccacccagagatagctagtgttaacatgttggcatgagtttttcaagtcttttctcttgctttgagtatgtgtatatatgtgcttgtatatataaagacaaagataaccaagctgtatcttgctttttctatttctcattacttcagatgaatttctccatgttattaaacattctttgtaatttaattgaaagtgttgtataagtgtgctccacgtagatggattatactttatttaccctgtctcagcattttggggcatttagrttgtatccaaatttttagctacttgaaataacacttacatgaacatcttggtgcataagtttgcatttctgattatttccttaggatagatttttagcagtgcaattagtgcacccaaaaatgaatagttttaaggctctcactatgtattgccaaactgcttttcagaaagatt

SEQ ID NO: 759107 - DNA, 592 bp, Homo sapiens
attatcttatttaattcccacaaaaactctagagggaaggaattattctctcataaaagaagaaacccaggctctgaggttcaataattgtctcagttttcacagctaataagtaggagaactgggatccaagcccacatcttctgtcctccacgtttgcctccccgccatgtctaccagtcccctcacctaattgtccatgttrcttggtgtacacagtcaggtgagatggctcccaaaaccactggcattttgagcagagtgtggctggggtttccctcctggaaagcctgtaaacctgggaaatcacagaggtggtgtcctctctgcaggggcagtggtgggtgagaggccaagagcatgtggttagttccagagagctgggaaaggtcatccagcaagtggaagacgtagactcgtgggcgggtatcagggttatttctattggggcaataagagaacagagtttgtgcccagggaaagtggtgctccatggcaaatgctaccacaataggagccagctgtctgcctaagaaaattgatctctaagaccctaaaacaattagtaagctgggaaacagcacaggcatat

SEQ ID NO: 759108 - DNA, 595 bp, Homo sapiens
gtgtggatcccatgcttgccaagggcaagccagccatggagcagcgagagctgtgtgagcaagcaagcatggggtctggccactgcacacagccaggcatgccagctgtggcagtgcaggcagctccaggtgccagcacgggcacagctgtggctggaccaggygtaccacaggcaacttccaccgctggcactggggaatgcggtggcacctggaagcttggagacaccaggaaccgcagagccccaaagagggtatcataaccctggattggggtgctcctaggtctgggctccccaaagggctgcagcttttctctccttctctcttttctccttctctcttctctccttctcgttgcccacaacgtggcaagcaaggggtgtgtttcagtcctgtttgtgttacagatcttttagtgccaccatttgcccagtgggtcccaagttcttgtcctgtgtccacaaagaatgaagtatgcagacaactggagggtgagcaaggcagaaaggagcctcactgagtggcagaactgttctcagtgggtatctcctttcctcaggcaggttgtcccgatgagtgtccagctctcagt

SEQ ID NO: 759109 - DNA, 512 bp, Homo sapiens
atgcttgccaagggcaagccagccatggagcagcgagagctgtgtgagcaagcaagcatggggtctggccactgcacacagccaggcatgccagctgtggcagtgcaggcagctccaggtgccagcacgggcacagctgtggctggaccaggcgtaccacaggcaacttccaccgctggcactggggaatgcggtggcacctggaagcttggagacaccaggaaccgcagagccccaaagagggtatcataaccctggattggggygctcctaggtctgggctccccaaagggctgcagcttttctctccttctctcttttctccttctctcttctctccttctcgttgcccacaacgtggcaagcaaggggtgtgtttcagtcctgtttgtgttacagatcttttagtgccaccatttgcccagtgggtcccaagttcttgtcctgtgtccacaaagaatgaagtatgcagacaactggagggtgagcaaggcagaaaggagcctcactga

SEQ ID NO: 759110 - DNA, 512 bp, Homo sapiens
atgcttgccaagggcaagccagccatggagcagcgagagctgtgtgagcaagcaagcatggggtctggccactgcacacagccaggcatgccagctgtggcagtgcaggcagctccaggtgccagcacgggcacagctgtggctggaccaggcgtaccacaggcaacttccaccgctggcactggggaatgcggtggcacctggaagcttggagacaccaggaaccgcagagccccaaagagggtatcataaccctggattggggtgctcctaggtctgggctccccaaagggctgcagcttttctctccttctctcttttctccttctctcttctctccttctcgttgcccacaacgtggcaagcaaggggtgtgtttcagtcctgtttgtgttacagatcttttagtgccrccatttgcccagtgggtcccaagttcttgtcctgtgtccacaaagaatgaagtatgcagacaactggagggtgagcaaggcagaaaggagcctcactga

SEQ ID NO: 759111 - DNA, 613 bp, Homo sapiens
tcatggaagtcagggaaaaagggagcagagttagcaccaggagggaggaggctgtctgaagccctagcaggtatggggccataggcacagtcaccactgcagggatgtggctccttaccttgggcaggagcagttcacccactctgaagccatggccagtggggggcctcccttgccagtgaaagaygcgatgttgggcagggtcacaggcaagtcctccaggggcacaggtgtggggccacagactgggcagtggacaatggggattggtgtgccccagtaccgctgccgtgaaatcagccagtctttcagtttatcacttgtcacgtctccacccactctcttcccccgggctttctgagtcagggctagaaaagcatcctgccgggtcatacctgtgaactgacagggaaagaaaagaaagctcactcctctccgcatagcaccagtcaccaccctgatgctgccaccagtcctgccatgtttatgtgtggctctcccaagggaccagttctgtgcagagctgtgtcataactttcatgagccctaggtgcttctgcctttgtaggctccttgctccttcagataatattaaaaattatattttacaact

SEQ ID NO: 759112 - DNA, 618 bp, Homo sapiens
atttttctaataaaacgtatccattttatcacttgctgaaagaatgcaatgattgagcatttgattttaaatctgatatttttgattattgaatatgatgaggacataaaataaagtcatgttcagaaagaaagccttcactgccaccatttgccatgatgtattcaaccttatatatttgagaggtgtcaggccatctcttgtcctgtccaaattggtcatgcagtaatctgattgatctgttaggatgagaagcagtacagcaattcattattgttattggctaaatatagatgaaaggttaaatgggaaggcacacaagtaacctgttgaagtctattggagaacagggttcaaataccctgsgtgtgctgttcctaacacttaatcaaaagatgacacttagacatagaccagacactggacatctgtgtcagtattgctagaccagagaatgcttttgctctgcatcttcaaaagcaccctccaccctcattccccgaactgacttgcagacatgtgtttatgtagccagctctggctttgtaaatgtgaaagaactcaacacagagactgtcaggacaaggcctgttctctcagggcatctgtcagctggtg

SEQ ID NO: 759113 - DNA, 648 bp, Homo sapiens
caatgatacttttaatataaaaatatttatagagatactagaagaaaataaactcaattttttactttttggggggcaaaagcagagaagatgtcttatttattaaattcctatgatttattagaaaataagaccagcctgggcaacatgacaaaaccccatctctacaaaaagtacaaaaattagccaggcatggtgtcacgcacctgtagtcccagctacctgggaggctgaggtgggagggtcacctgagccaggggaggctgaggctgcattgagccattttagcaccactgcactcaaacctgggtagcagagtgagaccctgtctcaaaaaataaatgaacgaatgaataaatggataaataaaaaatttcagcatttgtacaggttggttggtgtggactggcaatttagaagaaaaaaaatttgtgatgtgttattcagaacaaatgaagcaaatataatcatgtggacaactctcaattttgcatattggccatttrttattgtttgtgtttttctgcatttaacacatttcctaaaatatacgtacacatgttcatatctaatctcctacacaattctgtagaatttcaagtgagtagttgctttttttttttgaaatccaaatatttcatgaatgaa

SEQ ID NO: 759114 - DNA, 599 bp, Homo sapiens
gagtcacaattaggatgacaggaggactgatggaggaacctgtctttcaggtcaatatgtagaagaacctttaatgaaaggatagaactttcaagtcagtatgtagaaataccttcaatcagccactccatgtataatggactgaaaggggcttcctgagaagtcctgaggtcttggataaccaagagaagaataagaaaatgatttatttaargctgggcacggtggctcacacctgtaatcccagcactttgggaggccgaggtgggcggatcacaaggtcaggagttcgagaccaccctggctaacatggtgaaaccctgtatctactaaaaatagaaaaattagccaggcatggtggcaggcacctgtagtctcagctactcaggaggctgaggcagaagaatcgcttgaacccgggaagcggaggttgcagtgggccaaaattgcaccactgtactacagcctgggcaacagagcgagactccgtcccaaaacaaaacaagacaaaacaaaaacaaaaacaaacagaaaaaaaataaagtgacttaacaagtaggtgactattcctgctgaccaccaacccacacaaaaatgct

SEQ ID NO: 759115 - DNA, 432 bp, Homo sapiens
tcttcatctgttttgttttgttttcttttgtgatggagtcttcctctgtcacccaggctggagtgcagtggtgcaatctcggcttactgcagtctccgcctcctgggttccagcaattctgctgtctcagcctcccgagtagctgggactacaggcgcatgccaccacgcttggctaatttttgtatttttagtagaaacagggtttcatcatattggtcaggctggtctcgaactcctgaccttaggtgatccactcgcctcagcctcccaaagtgaygggattacaggcattagccactactcttggctgcctctttcttttttaaagttattcaactgttattttagattcgggagtgcatatgcaggttcattacatgggaatgcttcatgacgctgaggtttggggtacaaaggatcccatcaccca

SEQ ID NO: 759116 - DNA, 586 bp, Homo sapiens
cccatgaaggttttcaatgacctgaacagaacaagagtagctttggtagacaactctgttatcgactttgaagttaactttcagctgtgtttggtttaattgctctgagtaacttctctaacaactggattttgttaaaaaaaaaaaaacaaactaaatgttttaaaaagttttctataaagcagaacactgactaacagaatggaaatttaactgtttcagcacacagcagactggtacaactgatataggttttcaaagttgaatttggtgaacaacatttttttttaaagtttaaagatcagtatgccattggaacaactgtgatataaaagtggaactgtgtatcttcttagtatgttttcattggtgctaaacaattatttccagtttgctttttattcaaaattaraaagtacagaaaaccagagaggctagagctatagaaattatccaggggatgatttagagaaatggttctgtgagggaaaattaatgatgctgtctagcctgtgagagaaaatgagaaggagcaccccataatcttttagtcaggactataaggaggtacagagataatgctgac

SEQ ID NO: 759117 - DNA, 543 bp, Homo sapiens
ctatgtgattcagcaatcccacttctgggtatatatctaaagaagttgaaataggtatgtcaaagagatagctgcactcccatgttcactgtagcattgtttatgataacttgcatttctttttttttttttttttttttgagacggagtctcgctctgttgccagggctggagtgcagtggcgygatttcggctccctgcaagctccgcctcccgggttcgcgccattctcctgcctcagcctccagagtagctgggactacaggcgcctgccaccatgcacggctaattttttgtatttttagatgagacggggtttcaccatgttagccagggtggtctcaaactcctgacctcgtgatccacccggctcagcctcccaaagtgctgggattacaggcgtgagccacctcgcctggctgataacttgcatttctaacaagttcccaggtgaagctagaactgttggtctgagcacacactttaaagggacactgagaagcttaaggatgtcaagtgtgtgatatgatcaaatttacattt

SEQ ID NO: 759118 - DNA, 602 bp, Homo sapiens
cacatattctttttctgttctaggatcccatctggaataccacattaaattcagttgtcatgaatccttaggttcctcttgactgtgagattcttttaattgtgtttaaatttgtatttccctaatgattagtgatgttgaacatcttttcatgtgcttatttgccatctgtgtgtcttttgtagtaaagtggtttttcaaattttgagtcatttattactgaattttttaattattgagttttgagaggatgactatttcatatatatatgaaataatatgtctgataagaggcttgtatccacatatgtatacatatgtgtgtatatatatgcgtatatatatgtgtgtwtatatatgcgtatatatatatatatctgagacttctggatataagcgtcttatcagacattctttgaaaagcttttaaagcttttctctaagccagtagcttatcttttcattttcttttttaaaattcattaatttttttattgcactttaaattcttggatacatgtgcagaacatgcaggtttgtttcataggtatacatgtgccatggtggtttgctgcacctatcaacccgtcatataggtttta

SEQ ID NO: 759119 - DNA, 728 bp, Homo sapiens
  misc_feature 1, 2, 3, 4, 5, 6, 7, 8, 9, 10, 11: n = A,T,C or G
nnnnnnnnnnnaccaaaatcaggatcctttatgattaaaaccctccagcaaaatcagcatagaagggacattatgtaataaaagccatttataacaaaccccacagccaacatactactgaatggagaaaagttgaaaccattccctgggaactggaacaagacaaggataccccctcttatcactcctattcaacacaatacatacatacatacatacatatatatatatatatgtctatatatatgtctatatatatatgtctatatatatgtctatatatatgtctatatatatgtctatatatatgtctatatatatgtctatatatatgyctatatatatatacacacacacatatatagagagacatatatatatacatatagacataaatatatatacacacacacacacacaccatggactactattcagccataaaaaaagaatgaaataatggcatatcagcaaccgggatggaattggagaccattattctaagtgaagtaactcaggaaagaaaagccaaacattgtatattctcactcttaaatgagacacaagctatgaggatgcaaaggcatatgaatgatacaatggactttgaggatttagggggaacggtgcgagttggatgagggataaaagactatgaattgggtacagtgtatactgctctggggataggtgcacacaaatctcacatattactactaaagaaatta

SEQ ID NO: 759120 - DNA, 606 bp, Homo sapiens
aaattccattgttcataaatttatagaaatcctattggaatataaatcaaatataagacaaatatatttaactggatttttgcatataaaaacatgcaacaagaatatattttattactatgtgataaaatagttttcaaaaggtatttaaaataagtaaaaattaggccagggtggtgactcacgcctgtattcccaacaccttgggaggccgaggtgggcagatcagttgagttcaggagattgagaccagcctggccaatgtggtgaaaccctgtctctactaaaaatacaaaaattagctgggcgtggtggcaaacatctgtaaccacarctacttgggaggctgaggcaggagaatcgcttgatctggaaggcggaggttgcagtgaactgagatcacgccactgcattccagcctgggtgacagagtgagactttgtctcaaaaaataatagtaataataaaataaaataaaaaataagataaaacaactgaaaatcaaataaaaacctaaactatttgattggtattaaggtttttatccagaaacatttgtatattttctatcattgattgctttacgatattttagccataaaggga

SEQ ID NO: 759121 - DNA, 606 bp, Homo sapiens
aaattccattgttcataaatttatagaaatcctattggaatataaatcaaatataagacaaatatatttaactggatttttgcatataaaaacatgcaacaagaatatattttattactatgtgataaaatagttttcaaaaggtatttaaaataagtaaaaattaggccagggtggtgactcacgcctgtattcccaacaccttgggaggccgaggtgggcagatcagttgagttcaggagattgagaccagcctggccaatgtggtgaaaccctgtctctactaaaaatacaaaaattagctgggcgtggtggcaaacatctgtaaccacagctacttgggaggctgaggcaggagaatygcttgatctggaaggcggaggttgcagtgaactgagatcacgccactgcattccagcctgggtgacagagtgagactttgtctcaaaaaataatagtaataataaaataaaataaaaaataagataaaacaactgaaaatcaaataaaaacctaaactatttgattggtattaaggtttttatccagaaacatttgtatattttctatcattgattgctttacgatattttagccataaaggga

SEQ ID NO: 759122 - DNA, 683 bp, Homo sapiens
tttgaacagattcagatcttaccaaatgtaaatagccttattcctgggatcctttgccaaaaacaatcagaggaaaaataacacttcagctgcctagtggcctgctgtgatgggtaatagtaaggcgaaacaacaggttaatcataagctttacagggaaaakctaggggaatatgtcaggcctctgagcccaagctaagacatcatacccccgtgacctgcacgtgtacctccagatgacctaaagcaactgaagaaccacaaaagatgacattccaccattgtgatctgttactgccccaccctaactgatcaattgaccttatgacaatacaccttccccgcccttgtgataatgtactttgtgatattccctgccctgcccttaagaagatactttgtaatattctcccttgagaatgtactttttgagatccaccccctgcccacaaaatttgctcctaactccaccacctatcccaaaactataagaactaatgataatcccaccaccctttgctgactcctttctcggactcagcccacctgcacccaggtgaaataaacagccttgttgctcacacaaagcctgtttggtggactctcttcacacagacgcgtgtgacagaagagatgtccatagagggttttaaaatgctccaaaatattcctggcaatatgtg

SEQ ID NO: 759123 - DNA, 611 bp, Homo sapiens
taatgcagatatagataaaatcagcagtgagttatactagcttttctcttatggaaggagtttagctatgcaacactgcaatgaatgctttggaattaatattcatatatctattgaaagtttgcttctgttcttacagattaaagatgtcttgctatctgcagacttaaatcatgtcttttataaagtatgaaaataaacatggacatagagaaatgcagttatgcattgtgatggttaatactgagtgtcaacttgattggattgaaggatgcaaagtattgatsctgggtgtgtccgtgaggttgttgccaaagaagattagcatttgagtcagtaggttaggaaaggcagacccacctttaatctgggtgagcaccatctaatcagctgccagcatggctagaatataaagcaggcagagaaaaatgtgtaaagactagacgggtctatcttcccagcctacatctttctcctgtgctggaagcttcctgccctcgaacactgaactccaaattctttagttttgggactcggactggctctctttgctcctcagcttgcagagggcctattgtgggaccttatgattgtgtgagttaatacttaat

SEQ ID NO: 759124 - DNA, 489 bp, Homo sapiens
gctcattattatgtaaaatgctaataaggatttgggtcacatgaagtgtgggaatcaatacattttatatctggcttgagattattacagtgaccttcggcacattaaaggctttaagtagtcctgcaagaaagatagttgtatactctagcttttttcacacatacatgcactacatggaagcttttgggaaaaatttcacatgaatattaaacaagtttaattttgaraaaactctactgtatttaattttctttgtgcagtctcttgagaagattcagttatttatattccagaaataattcaaattagtgtatatatttgaatatgagtaaaagtaaaaagttgaccttttcattgttttccacttcttttctttgtgaatagataccgttctcatggcctaaattaaattgttggacctaagataattattctctcaggttttgttagttaataggcacatggttaaatacagatttcagaggg

SEQ ID NO: 759125 - DNA, 506 bp, Homo sapiens
atcatcagattctccaaggtcgaaatgaaggaaaaaatgttaagggcagccagaaaggacaggtcacctacaaagagaagtccatcagactaacagtgcacctctcagtggaaaccctataagccagaagcaattgggagtcaatattcaacattctgttttttttttttttttttttttgagatggattcttgctctgtcacccaggctggagtgcagtggcatagtctcggctcactgcaacctccrcctcctgggttcatgccattctcctgcctcagcctcccgagtagctaggactacaggcgcctgccaccatgcctggctaattttttgtatttttagtagagatggggtttcaccgtgttagccaggatggtctcgatcttctgacctcgtgatctgcccgcctcggcctcccaaagtgctgggattaccggcatgagccaccacgcccagctcaacattcttaaagaaaagaatttccaacccagaatttcctatct

SEQ ID NO: 759126 - DNA, 458 bp, Homo sapiens
tactaggacaatcagacctgaagttggaggaaaaatgtgaggatacccactgagccaggcagactggtatagtagaaagggcattggccacaaaagcaaaagcacagagtttttagccatgtttctgcctgagggggctttggctaartcacttcacctctctgagtctttgttttataataaagaaaaattgagatgatacaattcaataacaacaaaaacaacttgattttaaaaatgggcaagcaaattgaatagacatttatctaaagaagatacaaatggccagtaagcacgtgaaaagatgcccaacatcatgaatcattaaggaaatgcaaatcaaaaccacaatgagatgtcacctcaaacccattaaaatggccatcaattaaaaaacaaacaaacaaaaaacagaaaagaacaagtgttcatgggaatgtggtgaaattggaaccttt

SEQ ID NO: 759127 - DNA, 608 bp, Homo sapiens
ggaagggaaggctgcctatggggttagtaattttagagccttaacttcaaagattctgctggcttaaagatatataaaatgatggccaattcaagagatatttaaaactgatcggtgaagtggtgctgtaaggggaatttatgaattaagtcattatgtataagcacaaggacttgggatatgactttaaaaggaaatataaagtctactgctatctgacctagtcagaaataaaggattccattttagccttcccagatgtgtcagtaatgaccaaragagtactgacttctaatcactggggcaagcagttgggctggtataggacggaacagcccctgctaatgtgagaacccaactcatcaaaggctaaagcagaaggcaacagaggaaagtaccctgctagtgtccaaaaaaaaaaaaaaaaaaaggacatcattatgtccagagagtctagagctctatgttctgaaaccattaataaagtaaacacatgtggacatgaatgtgtatgaaaaccctactaaagtctttcctattgattaccctgtcaccttcacggcaaggcatgaccacaaatctcagcaatacaagctcatcacttctgg

SEQ ID NO: 759128 - DNA, 579 bp, Homo sapiens
tgaagacaatttaaaaatatgtattcgaattaaaagtgcttctatcccttggtctagtaattccactcattcacatattctatgaatattactttagcgtactatatctcaagccctgcctagtcacaggggataaaaataggagcaaagcaaacatggctggagagatcatggagtttagactgttaggaatttatcttaaagaatggcttcaaatatgtgaatccatagattgycaaggacaatcagtgcagcactatggcaaattgcaaatgataaataataaaaacgaaagaaaggaaaaaagaaataacatgaaataacaggaatgcctcttcaaagatggatggctatataactttgacatgttaatacaactgactatggtgtggccattgaaaagaatttgaattaatatgtactgacatggaaatgtcaaaaatatatgaagcgtgccaactccattcattttctaatagaagtattaaaaaattactttacatacagtgaaatggatatatttcttggtggacaacttgatttgttttaacaaatgcaagtataagcacacgtgtaagc

SEQ ID NO: 759129 - DNA, 612 bp, Homo sapiens
caggtggcatatcgaatgacatagttcatatctctaatgtcttctccctaaagaattaatgatatatttgacagtgacaatgagtggctattgtattaattctttcctgataatacctatattctcttcttctatcattagtcttcattattcatctttcttcctctgtttccaccaatctctctcagaataggcagttaattgttttagggcatttttagtagctggttatttgtaatctgcggttgttcaatgagaaactttaaatttataggtcttatctcctctttatacagcttcagctaatgttgtttctaattgcccactggtacagaatgtaacgcaaaatcttatattggttcactcttctccattttattctataaaaaattgctacaaatggcttttaccagaaatgcccctaaatattaagataaaaatgycgatatatacaaatgaatagttgttaccttaagagaacagcttgtatactaacttgaaattatctcttcctatgcaaaggcttttcctctgcatcatcctatgtaacattatcaactcgcacacctgtatgtagtcacctgtttcatgaccatttgaactatgtcactt

SEQ ID NO: 759130 - DNA, 489 bp, Homo sapiens
aggattctgggtgaatcctcaattaaggctaaatgcaattaacgcatcccaggtgactatttttgacaaattgcttgaagcaaatttatatgatttggtgaaaaactgtggccatgagagctagttcttggcatatacttataaatacttgcaggggagagccataagacattccatgaaagaactcaaagtgctttctctccattcttctattgtcaccaagttgtgcagagaaactaatggtgcatgaactgggaaaggatactcattagggataactgcaaggaagaaactgtacttgataccacagcgctaataatgaaacctggtgcraagagcacttgtcctataaagatagaatgtgaccggaggcttgtgctaggaattcttacctaactgggaggatgtcaaagcttcgaaaagtgctcctaaatatgcagaaggtaggtgtgggggctaaaaggcatcattttcctgcagtgaatactg

SEQ ID NO: 759131 - DNA, 586 bp, Homo sapiens
acgttatgactgttattttgaattctgtgtcagttaaatcacatatctccatactaggatcaatatctggagatttatcttgttcttgttgttgttgtagttgaaacatagtaccccgtttcttcaattcccttgacgttttatgttagtgtctggatattaaacaaagtagccaacactcctagtcttcaaacattagcctagtacaggataaaaccatcagcttgaccagagattctgggtgtctcccaagacttcatgctagtctatacacttcctttgttctcagtgcccccccaacccctgcccagcatytatagtttttcccaatcccatcagctcctcaagataggtgagacagaagccagggcctcaagcagccaccagagaaactataatattggacatatggtccagtcctttccttctatctccagggaggagctggaagctggaggtttcctcctgattatatgcagctctgttggggtagggcttatggtgagaaggcatcacaacaatttctactggtttcaatgggactggattctcacttgagatacaggactctctcaacttgttcctg

SEQ ID NO: 759132 - DNA, 638 bp, Homo sapiens
ccagatccaaaatgagttctgggaaaccaaaatgtttggggtgaaaatcaatcctttgttggataatttgctctcccctggcctgagacactaaatcctgtcagagacagacctagctttgagcgacttagagctgacacagtacggccatttttgttcttatctctggttcaaggattccttggaaaataacaaagttggcttaagtgttcctctgcctccaatctataatrcgcctgtttttctggtctaaaaaaagcaatcaagaaaggtcctcatgcactcttttagggatgaaattgaaacctgaggtcttgaccagctcagagcttctttcatgactgtgggggtgttagtcacagttgttctcttgctgcacagatatgtaattattcttctatagaaactctttccccctcagactatattctctgcttcctactggagtgccttcctctgagctattgaacagcattctactcttcaggatgctacaaaataacgggaggtgaagtgatgcctgtggaacttgccaggcctcactggttgttgcatcctgcagcacaacccacatttgcacagatggaatacgtgggctcagtttggatgtgttgcaggagaaaactgaccctgccagc

SEQ ID NO: 759133 - DNA, 552 bp, Homo sapiens
ggaagcatcacagtcacataaatcaagaagtgaagttatgcggggttttttaaccactttttttttttttaaagcaagggaggtgagccatggaacatttggaaaatggagaggcaggcttaagagtagtgccactgtgtttagtaagacatgattccatttacttttctaattttccttccttccttctttccttccttctgatgaaagaaaaacttcagctgagttcgcccaggtgcaacggctcactcctgtaatcccagcagtttctggggccaaggcgggtggatcacccgaagccaggagttccagactagcctggccgacatggtgaaaccccatctctactaaaaatacaaaaattarctgggtgtggtggcatgtgcctgtaatcccagctactcaggaggctgaggcaggagaattgcttgaacctgggaggtggaggttgcggtgagccaagatcacgctactgcactccagcctgggcaacagagcaagactccatctcaaaacaaaacaagacaaaacaaacttcagccaaatgaaatt

SEQ ID NO: 759134 - DNA, 582 bp, Homo sapiens
gcctagggcacggcactagggtttccctagaccctccccaccttgtggttttcctataccctccctactgtggtaaaatgtgcctgtatttaactgtcctccaattatcctaattcatgtgtgtctcctgggatctgttgctacaccatgatgaggtgtgtaattttgttagtagtattcttaagtcatttggtaataatctttcatcctgtgaagctacaacatggatttttttaaactcttgtttccaagkgcctaatacagtgttataggaaatgcttagtgactgcatacaccatgcacaacagagccaagtgtacttgagagacaactggtccgttgagaacaaaatgcatttggaggccatgaagttcaagttgagagcagcattcccatgcacacctctctctggggaatgcagccagtccctgcaaaccccattcccctctccaggttaaaaagttcctcttcaccctgatgttagtttgaaaagtttcggccataaccatatttagttatatttagggagaggggagtggtgggtcaaaggcttaaaaaaaaacccaagaatgtatatatact

SEQ ID NO: 759135 - DNA, 616 bp, Homo sapiens
gccttctgggtttcttgagtaaaaatataaaaaccagttaagccctgcggtggacttcatggtgccaggcagacttggagcaccagcttccctccccaagcctctccctgcagtaggctgacctggaatttccatttccacttaagtgctttctgggaagggtgtatccctgctttctggagatatctcaggggagacaggacaaagggagtggcctgcatttataagaagagtcttgagtacctagtaaaattcaggttctttttacttatcactataacccagctatccacaatcttaaacttctttctacttttttttttcttcagagacagtgtctagctctgttgcccaggctggaatgcagtggcaccatcatagctcaccgcagcctcagaactcctgagctgaagcaatcctctggcctcagcctcctcggaaggtgggactagagttgtgcatcaccacgtytggctaatttttttgaaatttgttttagagaagggggtcttactattttggccagtctggtcttgaactcctggactcaagtgatcctcccactttgtcctcccaaagcactgggattacaggcatgaaccactatgctcagtcc

SEQ ID NO: 759136 - DNA, 622 bp, Homo sapiens
atctaggtcctatattgctaacagatggtgaacattttcatgggcttgggactagtttagatcagagtgagaatcctccaccccctccccccacgaggctctaattagtacataggacattagagcaagttaaaaatctgggctgacatcttatttgttagttttagattgaactcatgccttagggtgactgaatttgctcactgaaacacacacatgtgctcacacacactaaaagagtaactttttcttttctatggggatcaaaataaagattttcaaagtcctcgagaaaagggctccaaagatttgttggatatcaaatagctccttcaaracaacattttgatgagttaagtgtaaatgaatcagaaacatatggattaagtttcccttgaaatacacaggggcttaaaaatcaaagaggaaacagtgcctggcccagggtcttgcaggttgtgccaaacccaacacatttgagcagcagttcaagatatttgagggatccaaggacgaggctggcctgacccacgcctagttcctaccgtattgaaatagagaacataagtaatgccatttatattgcattattactaaaaattcctccttccttgtggtttga

SEQ ID NO: 759137 - DNA, 629 bp, Homo sapiens
agatcctcaatcttcccacctaatggttttgtcaccagggtacctgtcttcatctcttttccaattatgacatttgccaggttagtcttccaacagggctactccagtcatgtttcatagttcatccctgtaaaagcagccaactgaattaaaactaaaaccattgacctggctttcagagccctcttttgtgtgaccctaacctaaatttccagccttttaaaactttcctacttgtatccacagtggacttgaccttgcctgcctatatgcctttgcttatacggttggaataacaagaacttctgtcctcatttctactggttgaaatcttagccatcacttttgatccctccttcaaaagacacctcatctgtaaggccttaattagttcctctgatttaatattctcaaccttctgtaaagcctctgctttgtgtacctctcttaaaagattttcacatttatcgttttaaaakttatttgtataattgtctcatcacctgtaacaactgaatcagcatgtttgctgcataagttttcctgaataaatcatttttaaaagctctgtttcaagaaacttctcaaatgtgggataaatttatcttcctccaataacgtgaagaggt

SEQ ID NO: 759138 - DNA, 509 bp, Homo sapiens
caaatgaaacaggcatttccaaatgttactacgatgttcaaacacatccttgtgtgtcagaagtgtcctgcagatgttcaaaaaaaaaaaaaaaaaaaaatcctccagggctggaaatgaggaggatgaaaaaatacaagaagcttgtcctacagtcattgttccagacagacagggagaccctcctcagccactgcttytgcggcatcagcctcatcataaagctagctcaattatcttcaaataaccacatgttgcaagcagctgtctaccaggaaaaaggactgcagtaactacatttgtggacaagatgatacctaaagatcaggacaaaacaaacaaacaacttcttgcaagtccctctgcttctatggacttgcctcatcaaggcaggcagtgagtgtttcaatactaagggaaggaagcagtagtcagtagtccccgtggtgggttttgagtgggtctttaagcatttggatgtcaatgggtggtatgggtaacaggaagaa

SEQ ID NO: 759139 - DNA, 618 bp, Homo sapiens; identical to SEQ ID NO: 737515

SEQ ID NO: 759140 - DNA, 652 bp, Homo sapiens
tgtggctttgtttaaaaataaatctttgttaaatatccattctaaagcattagttaaataatatgatacttaggttgtgctttaaaatacttcagcaaatctccccagggaaatagatgaaatgtgaagagtatagtagtgacgatccttgaagttgagtggtggtacatgactgttaattatgctatcatattgaccttgtgtacgtttgaaagtttccgtaataaaaagtcactgaaggccaggcgcggtggctcatgcctgtaatcccagcactttgggaggccgaggtggggggatcaaggttggtcaggagtttcagaccaggctggccaacacggtgaaaccctgtctctactaaagatacaaaaacaaacaaacaaacaaacaaaaaaamaaacaaattagctgggtgtggtggcacgtgcctgtaattccagctattagagaggctgaggcaggagaatcacttgaatccgggaggcagaggttgcagtgagccgagatggcaccattgcactcagactgggtgaaagggcaagactttgtctcaaaaaaaaaaaaagttactgaaagaaaaggtactattgtgcaaggaacaggtctgaggattatttgtcctggttgacagaaaaaaaatgtatgttggctt

SEQ ID NO: 759141 - DNA, 588 bp, Homo sapiens
acacatcacactttttaattctctgtttttggcttgacctgtatctcaacctacttgatgactaattaattgtttttaatccaaaacaatcatagttcattccttctggatacagaaagagaaagaggaaagaaatacctaaaggtacccaagagaccaacactaagtagaaacaattgccttctgcagtacataaaatgttatataagaagaataatcaccttgtaaacaaataatatctgctcagtataaaaaggtattctcattccctgctgcaaaggacattgtaaaaactataaaacttctagaagataacataggagaaaatctaggtggcttgggtttggtgataactttttagatttaatattaaaagccaatccatgaacaaattracaagtaggattttattaaaattaaagactaccgccctgagaggatactgttatgaaaatgaaaagacaaacaataaattggaagaaaataccttcagaagatatttgataaaggactattatccaaaatatgccagggattcttaaaactcaatagtaaagcaaataatctaattacaaaatggataaaaga

SEQ ID NO: 759142 - DNA, 531 bp, Homo sapiens
tgagtgggtaatttctataagaaagaggtttaattgactcacagttacacagggctgtggaggcctcaggaaacctacaatcatggcagaaggagtagcaaacatcctaatttacatgatgggaggaaggagaagagtgacctagcaaaagggaaaacgctttttaaaaccatcagatcacatgagaacttactcactatcatgagaacaccatgggggaaagcaccccccatgattcaattacctcscatgacacctggagattatgggaactacaattcagaatgagatttgggtggggacatatccaaaccatatcattccactcctggcccctcccaaacctcttgtctttacatttcaaaacacaaccatgccttcccagcagttccccaaagtcttagctcattgcagcattaacccaaagtccaaagtctcatctgaaacaaggcaagtcccttcagcctatgagcctttaaagccaaaagcaagttagttacttcctagatacaatggaggtacaggtgtttg

SEQ ID NO: 759143 - DNA, 580 bp, Homo sapiens
tggggaaaaagaccgtaagacattttcagaatcttctagactgcccttcaatcacaagtccagaggcctaaaaggactgaatggtttcaggggccaggtccagggcaccactctgctgtgccaccttggtaagcttgtctgccccatccccactcctccagctccagccttggctcaaagggcccctgatacagctcagacygccactttggagaatgcaagatgctgtaagccttgttagcttccatggcatgttaagtctgcaggatcagacaatacaagagtaaaggaggcttggcagcttccacctagatttcagaggatgtatgagaaagcctaggtgctcagacagaagcctggcacagggccaaagcccctgcagaatgactcagctagggcagtgccaaggggagatatggggttggaacccccacagagagtccatactggagcactgcttagagcagctgtaggaacagagccactgccctccagactctaggatggtagagctgctggcagcttctgacatcagtctggaaaagccacaggagcagagctggccaaacccttgggagct

SEQ ID NO: 759144 - DNA, 623 bp, Homo sapiens
catggagtgaaggattattttggagctttagggtttaaagcctgccctgctggatttcaaatttgtgtgggacctattgcccctttcttttgattgatttctccctttagaatggaaatgtctacccaatgcctgtaccaccattgtatcttaggagaaaataacttggttttgatcttagaggcttataggtrgaaggcacatgccttgagtttcagatgagattctggacttttgagttgatgctgaaacaagttgacccttttgaggactactgggaagagattattgtattttgccatagaaggatgtgtgatttggggaacgaggggtggaaagatatggtttggatgtgtgtcccttccgaatcttatgttgaaatgtgatcctcaatgttgaaggtggggcctggcctggtgaaaaatgttggattagggggacggatccctcaccaatggcttagtgccatccccttggtgatgagtgagttctgcttctattagttcattcaagagctggttgtttaaaggagcttggcatatttcttgctccctctcttgccatatgacacacctgctccctttccaccttccaccttgagaaaaagctccctgacacctcac

SEQ ID NO: 759145 - DNA, 633 bp, Homo sapiens
tacctttatctcacactgtcctgttctctaaatttctgttgtaattgtagtctgtaacaatactttggtgttgacagaattattatgaattcgttactttttatatatgcaagtattatttccacaggaagtcattaactactttcaggataaagattgttgttttcttttttcaacccttaraaaacgtaaaaagcattctagtgtgcgggtagaacaaaaagccatgggattaggcatggtctgtgggtggtttgcaaacccctgctttagatagacaaagcaatattatcatatctggtcacttttctatgtaaagtttctcaatctgggattgggcaatcctggctatatattaaaaacattgtgtggcttcttaaaaaaacaaataccatggtgtaccgtaggcttggtgaataaaaatctgctgtggtagctctgtggcatgcatagttaaaaacagggtggtggtggtccatggataattgtggtgggcagccattattgatagtacgtactggccagtggtcactcgtaaacacgtgaaaatgaagtaatacgagttagggtggattttctttttccaatttttttgttattaaatcactgcagtagtagggtggattttctaat

SEQ ID NO: 759146 - DNA, 633 bp, Homo sapiens
tacctttatctcacactgtcctgttctctaaatttctgttgtaattgtagtctgtaacaatactttggtgttgacagaattattatgaattcgttactttttatatatgcaagtattatttccacaggaagtcattaactactttcaggataaagattgttgttttcttttttcaacccttaaaaaacgtaaaaagcattctagtgtgcgggtagaacaaaaagccatgggattaggcatggtctgtgggtggtttgcaracccctgctttagatagacaaagcaatattatcatatctggtcacttttctatgtaaagtttctcaatctgggattgggcaatcctggctatatattaaaaacattgtgtggcttcttaaaaaaacaaataccatggtgtaccgtaggcttggtgaataaaaatctgctgtggtagctctgtggcatgcatagttaaaaacagggtggtggtggtccatggataattgtggtgggcagccattattgatagtacgtactggccagtggtcactcgtaaacacgtgaaaatgaagtaatacgagttagggtggattttctttttccaatttttttgttattaaatcactgcagtagtagggtggattttctaat

SEQ ID NO: 759147 - DNA, 633 bp, Homo sapiens
tacctttatctcacactgtcctgttctctaaatttctgttgtaattgtagtctgtaacaatactttggtgttgacagaattattatgaattcgttactttttatatatgcaagtattatttccacaggaagtcattaactactttcaggataaagattgttgttttcttttttcaacccttaaaaaacgtaaaaagcattctagtgtgcgggtagaacaaaaagccatgggattaggcatggtctgtgggtggtttgcaaacccctgctttagatagacaaagcaatattatcatatctggtcacttttctatgtaaagtttctcaatctgggattgggcaatcctggctatatattaraaacattgtgtggcttcttaaaaaaacaaataccatggtgtaccgtaggcttggtgaataaaaatctgctgtggtagctctgtggcatgcatagttaaaaacagggtggtggtggtccatggataattgtggtgggcagccattattgatagtacgtactggccagtggtcactcgtaaacacgtgaaaatgaagtaatacgagttagggtggattttctttttccaatttttttgttattaaatcactgcagtagtagggtggattttctaat

SEQ ID NO: 759148 - DNA, 633 bp, Homo sapiens
tacctttatctcacactgtcctgttctctaaatttctgttgtaattgtagtctgtaacaatactttggtgttgacagaattattatgaattcgttactttttatatatgcaagtattatttccacaggaagtcattaactactttcaggataaagattgttgttttcttttttcaacccttaaaaaacgtaaaaagcattctagtgtgcgggtagaacaaaaagccatgggattaggcatggtctgtgggtggtttgcaaacccctgctttagatagacaaagcaatattatcatatctggtcacttttctatgtaaagtttctcaatctgggattgggcaatcctggctatatattaaaaacattgtgtggcttcttaaaaaaacaaataccatggtgtaccgtaggcttggtgaataaraatctgctgtggtagctctgtggcatgcatagttaaaaacagggtggtggtggtccatggataattgtggtgggcagccattattgatagtacgtactggccagtggtcactcgtaaacacgtgaaaatgaagtaatacgagttagggtggattttctttttccaatttttttgttattaaatcactgcagtagtagggtggattttctaat

SEQ ID NO: 759149 - DNA, 622 bp, Homo sapiens
ggggcgagccctcctggtgattctgatgcagctaacgtttgacagccactgcagtaaatagatggagactcctgattttggatgggaaatggtcaggtgtcctcatatagcccttaatttttagtaacaaaaatattaggatgcacagggcacagtgcttcacgcctgtaatctcaacaccctgggaggccaaggcgggcagattgcttgagctcaggagttcaagaccagcctrggcaacatggtaaaaccctgttgtattagtttgttttcatactgttataaagaactgcccaagactgggtaatttaaaagggaacgaggtttacttgactcagttcagcacggctggggaggcctcaggaaacttacgattatggcagaaggtgaaggagaagcaaggcaccatcttcaccagacagcaggaagcagaagtgcagagagaaggtggagaagagtcccctataaaaccatcagctctcgtgacaactcactatcatgagaacagcatgtgggaaactgcccccaagattcaattacctccacctggtctctcccttgtcacatagggattatgggaattacaattcaagctgagatttgggtggggacacaaagccta

SEQ ID NO: 759150 - DNA, 622 bp, Homo sapiens
ggggcgagccctcctggtgattctgatgcagctaacgtttgacagccactgcagtaaatagatggagactcctgattttggatgggaaatggtcaggtgtcctcatatagcccttaatttttagtaacaaaaatattaggatgcacagggcacagtgcttcacgcctgtaatctcaacaccctgggaggccaaggcgggcagattgcttgagctcaggagttcaagaccagcctgggcaacatggtaaaaccctgttgtattagtttgttttcatactgttataaagaactgcccaagactgggtaatttaaaarggaacgaggtttacttgactcagttcagcacggctggggaggcctcaggaaacttacgattatggcagaaggtgaaggagaagcaaggcaccatcttcaccagacagcaggaagcagaagtgcagagagaaggtggagaagagtcccctataaaaccatcagctctcgtgacaactcactatcatgagaacagcatgtgggaaactgcccccaagattcaattacctccacctggtctctcccttgtcacatagggattatgggaattacaattcaagctgagatttgggtggggacacaaagccta

SEQ ID NO: 759151 - DNA, 622 bp, Homo sapiens
ggggcgagccctcctggtgattctgatgcagctaacgtttgacagccactgcagtaaatagatggagactcctgattttggatgggaaatggtcaggtgtcctcatatagcccttaatttttagtaacaaaaatattaggatgcacagggcacagtgcttcacgcctgtaatctcaacaccctgggaggccaaggcgggcagattgcttgagctcaggagttcaagaccagcctgggcaacatggtaaaaccctgttgtattagtttgttttcatactgttataaagaactgcccaagactgggtaatttaaaagggaacgaggtttacttgactcagttcagcacggctggggaggcctcaggaaacttacgattatggcagaaggtgaaggagaagcaaggcaccatcttcaccagacagcaggaagcagaagtgcagagagaaggtggagaagagtcccctrtaaaaccatcagctctcgtgacaactcactatcatgagaacagcatgtgggaaactgcccccaagattcaattacctccacctggtctctcccttgtcacatagggattatgggaattacaattcaagctgagatttgggtggggacacaaagccta

SEQ ID NO: 759152 - DNA, 632 bp, Homo sapiens
aaaagcagttctaatttaagaagacagaaattatttcaagtatcttttccaataacaatggcacaaaactagaaatcataacaaggaatttcagaaaattcacaaatatgtggaaactaaactgaacaaccagtgggtcaaagaagaaatcaaaagggaattcaaaaaatatctgagacaaacaaaagtgaaaacacaacataccaaaacttatgggatacaacaaaagcagttctaagaggaaagtttataaacacctacattaagaaaatagaaagaattcaaatcaacaacctaactttataccttaaagaactagaaaagaagaacaggccaggcgcagtggctcacacctgtaatcccagcactttaggaggccaaggcgggcagatcaygaggtcaggagatcgagaccatcctggctaacacggtgaaactccgtctctactaaaaatacaaaaaattcgggcatggtggcaggcgcctgtagtcccagctgctcgggaggcttaggcaggagaatggcatgaacccgggaggcggagcatgcagtgagcggagatcgcgccactgcactccagcctgggcgacagagcgagactccgtctcaaaaaaaaaaaaaaaaaaagatt

SEQ ID NO: 759153 - DNA, 569 bp, Homo sapiens
aaaaaaaaaaaggttcatttttacattaaaatgtaggctttagcaaacataggaaacactggtataatccataaaatatagaatattgaatctaggagtgttgaatatttttttttttgagagagcgtctcactctgttgcccaggctgaagtgcagtggcgtgatctcggctctctacaacctctgcctcccaggttcaagtgattctcctgcctcagcctcccaagtagctgggactayaggcacgcgccaccacacccagctgaatttttttatttttagtagagatggggtttcgccatgttggccaggctggtctcgaactcctgacctcaggtgatccacccaccttggcctcccaaagtgctgggattataggcgtgagccaccacgcacggctgagtgttgaatattctatattgagtgctaagggtgagtcttctcaactccacagacactccataggagtgctaagagtgggtcttctcagctccatagatacttcaaccttagttagatacataactaacataatacattcttagttatccttgcaatagatatgaac

SEQ ID NO: 759154 - DNA, 638 bp, Homo sapiens
cctttgggcgtatactcaataatgggattcctgggtcaaatgttaattctgttttaagttctttgggaaataaccaaactgcttttcacaatggataaactaatttacatttccaccagtagttcataagcattcccttttgtccacaaccttaccagcatctgttattttttcacgtttaataatagccattcgactgaagtgagatgatatctcattatgattttgattttgatttctctaataattagtgaagtaaaaataataagagccatctatgaaaaacccatggccaacatcatactgaatggacaaaaactggaggcaatcccattgaacaccagaacaagacaaggatgccaactctcaccactcctattcagcacagtgctggaaatcctagccagagcaataaggcaagagaaaaatataaaagcatctaaataggaagagaagaagtcaamctatatctgtttacagtatttttgaaaatgtctttgggttactcgtggaaatacaaactgtgtgacttttgacaagaaaattcacatctttgaatcagtttcttcatctttaaaggaagattaagatctccctcatgtacttgtgagaaataaatataataatatataaggaac

SEQ ID NO: 759155 - DNA, 585 bp, Homo sapiens
ggatgtttacagtgtgcctttcatggaatagttcttcatctttgtgaacggcctaatgctaaagtgactgacctgtgaccaaatgcccctctcaaaggaaacttgttcataatggcagatacccctgtggctcttaactgacctgtgtccagtttattcctaccaagatgtcaggagagttgtccaggagagccctggctaggaggagagttaggttcaggtgtgtcagtcaagtgagacacagaggaggcaacacaataaaacacatgaaataacagaagcagtgtgtcactgatagatcctagcgagaaggggccggcatacctccaagggccartaggaagctgggagctgtcttagaaatacacgtgcaactagctagtggagagcaagagagagagagtgagggactcataggccagagcctttactggtgtccaggctcttacccacgcaggttttcctcatggagttctaattggtcagtgtagatagagcaagggggcactagctcagtggagtcatgctgtactgagaggtggtccctgtggcatatctggggaggtgttgggggtcagtgggcaa

SEQ ID NO: 759156 - DNA, 598 bp, Homo sapiens
gttaactacttctcaataaatctgttaaaaaattaaacacattaaaccacccctcaagagaatccctaaaataaaaatttaaagagggggaaaaaaggaagggaagctactgaaagttgtaagaagagacaaaaagttaccaataatgaagccagtgtttcaaggagtgtgcagttaaaataacatgacacacagatatcaaaactggcaactgagagaagtccaaggtccttggcaaagagaaagccactgaccatccgtggaagtgtagtagggtgacagccagaatgtcagaggctgaagggaagctatgtgaaacagagaggatggcagtgagcttagaccacttgtttaagmagctcagaaatgaaaatgagagaagtaagacagtagctagaggggacagacaagtaaactaaagctttttggtgaagtttgaaagcataaaaaaagtaaaagaggaatgaaaaagaaactgaagattccagagatgaaggtaaaacatgtaggaacaagattcttgaggaattggaagtgatgggatctaaggcacaggtgccagagtgagccttggaaaggagaaatctgtaattgttaa

SEQ ID NO: 759157 - DNA, 583 bp, Homo sapiens
agattaattcatactatatttttaaacatttgagaggtgaaaagttttttgtgaaaactaaccaaatgagaaggtcttatttaaatctttttaaaccctttgccaatttttttttcttaaaaagcaacagaaatgagatagtaagtggtaagctaggaggatcgttgactcttaacaaaaaagattcaagttcatatgaaaattggtttaatggtaatgatggctttcactataatgcaaagtagtgtagtgtacagtaaaatatkaataactaatattctcagagttttaaaatatacttttttggaagaaatataaatcacaataaatttatttaaaagttttatttctaaatagtttaacaattacgtgcttaaaacattaaagatacaaggtaggtcaaagtcttttttaatacgaacctttcataatacacatgaagaaatagtcaagtgatttgtccattatcccttatgtaggtaaaggcattgctgaagctagaaccagggttttctgatgcccatactggttttgttcagacacactattgcttggtatgtcagtataccaagaatttattata

SEQ ID NO: 759158 - DNA, 447 bp, Homo sapiens
ctcctttattatcaggagttctaaagaaatggacaagattcttagctgctttctcattgttctgaataatctacactgtcctcattccaaagcttgctaccacagttttgtaccctgcatggatttagtgtggacagtcttaactttggccatttcacattttcccttccacaccatgagtctgcaggcctggcatgtttggaactccacaacagaagtggagaggctgcacrcaaactttattactcacctagtatccagaagggcatgacacactgggacttgtgtgtgtgtgtgtgtggtgtgttttgtttggatgtttttttctaacctaacctttaccatttctttcaatttttcctacttgatctgtgtatgtgagtcaaagaaacctgttcatccacagcctatactatcttgccaaatactgtaagaaaactctcaaat

SEQ ID NO: 759159 - DNA, 648 bp, Homo sapiens
attcttcagcccacgctcaagggttaatttaaactttcaagtcttattacttaagacatacattttataaggctagaggtgccatagacagtgatttctatgatggatgtgggcaaagtaaactgaaaaccttctggaaaggattcagaattctagatgtcattgagaacatttgtgattcatctgagaaggtcaagatattaacaggagttgggaaaaagttgatttcaacctcatggatgactttcaggaggttcaggacttcagtggataaaggaactgcagatgtgatagaaacagcaacataactagagttagaagtggagcctgaagatgtgactgaattactgcagtctcgttataaaatgtgaatggatgaagagttgcttcttacaatgggcaaagaaagtggtttcttgagatcgaatcttctagtgtagawcctgtgaatattgttgaaatgacaacagaggatttggaatattacataaacttagttgacaaagcagtagcagagtttgagagagttgaatccaattttgaaagaaattctactctgggtaaaatcgtatcaaatagcatcacatgctacagagaagtcctttgtgaaaggaagtgttgactgatgtggcaaacttcattgttgcc

SEQ ID NO: 759160 - DNA, 605 bp, Homo sapiens
ttcccgctgatgatgactgacgttctgggacggaggagcaggtgtgtggtgtctgcccttggcgtgttgaagcatgacttgaaagaggaaatttgaatttttcttattcttagaagagaggagaaccagagggatgacagattcccataggaaatgcacacacctgtttttttttttgtttttttttttttggatttggkgctctaggcagtttcagaaaacaaaccccagagtgaaaccatcaacatgagaatgcctttgtgcccttcaaaattattctcaaaagctaaatagcactttctgaccaggtgcaggagaattttttcctccatttttctaactcagaactaatttttattgcctttctgggcaataaatcattttttaaaaccatgtttggataaaattatctaggagataacatcaacaatttttaaacactgatattttggtttataacctttaaaaacaaaatctaaagtattttggacaactatatattcaaataagatttagatatgaatatataaattgtgtttgtggatgataaatatgtagcctacccagaaattagccttattaattaagagaactattatctgata

SEQ ID NO: 759161 - DNA, 605 bp, Homo sapiens
ttcccgctgatgatgactgacgttctgggacggaggagcaggtgtgtggtgtctgcccttggcgtgttgaagcatgacttgaaagaggaaatttgaatttttcttattcttagaagagaggagaaccagagggatgacagattcccataggaaatgcacacacctgtttttttttttgtttttttttttttggatttggtgctctaggcagtttcagaaaacaaaccccagagtgaaaccatcaacatgagaatgcctttgtgcccttcaaaattattctcaaaagctaaatagcactttctgaccaggtgcaggagaattttttccyccatttttctaactcagaactaatttttattgcctttctgggcaataaatcattttttaaaaccatgtttggataaaattatctaggagataacatcaacaatttttaaacactgatattttggtttataacctttaaaaacaaaatctaaagtattttggacaactatatattcaaataagatttagatatgaatatataaattgtgtttgtggatgataaatatgtagcctacccagaaattagccttattaattaagagaactattatctgata

SEQ ID NO: 759162 - DNA, 580 bp, Homo sapiens
taaaattgggctggtttcagtctccccttttacttatcaatttctccatcatggcgaataaggtcatcaacttttttgcctggttcatgctagggatgggtatcatgggataattgacttagctagagtccttgtctgagttctaaatattaatttaaggccattcaaggattcacaagaccatggctatcccctggaggagtcccagaggagcaggttttacccaagcagtgaatccatggcttaacactgcctaacttgacagatgagtgggtggtcagcagcaccgagaaggggctgaccctgttgttgcagacgaccttcagcctggtggatttccaggtcttcagcaggacttgttccccgggtttcagagtgaagaggcacatccatagkgaactggagtcttttggaagcaaactcagagagactaattaatgtgtttcatagttttttttatatataatctagcttgtttcagaggaagaaaaatccttaagtgacaggtattccacgagacagagaaatgatctctcatacaacatttcaaaggggttaagagccaacccacttctgggtg

SEQ ID NO: 759163 - DNA, 555 bp, Homo sapiens
gctattcttgaggagtatctttgtggtgttctctgtatatcctgagtttgaatgttggcctgctttgctagattggggaagttctcccagatagtatcctgcagagtgttttccaacttggttccaatctccccgtcactttcaggtacaccaatcagacgtagatttggtcttttcacatagtcccatatttcttggaggctttgttcatttctttttattcttttttctctaaacttctcttctcccttcatttcattcatttcatcttccatcactgataccctttcttccagttgatcgcatcggctactgaggcttctgcattcgtcacgtagctctygtgccttggttttcagctccatcatgtcctttaaggacttctcttcattggttattctagttatccatttgtctaattttttttcaaagctttgaacttctttgccattggtttgaatttctcctgtagcttggagtagtttgattgtctgaagccttcttctctcaactcctctaagtcattctccatccagctgtgttccgttgctggtg

SEQ ID NO: 759164 - DNA, 555 bp, Homo sapiens
gctattcttgaggagtatctttgtggtgttctctgtatatcctgagtttgaatgttggcctgctttgctagattggggaagttctcccagatagtatcctgcagagtgttttccaacttggttccaatctccccgtcactttcaggtacaccaatcagacgtagatttggtcttttcacatagtcccatatttcttggaggctttgttcatttctttttattcttttttctctaaacttctcttctcccttcatttcattcatttcatcttccatcactgataccctttcttccagttgatcgcatcggctactgaggcttctgcattcgtcacgtagctctcgtgccttggttttcagctccatcatgtcctttaaggacttctctkcattggttattctagttatccatttgtctaattttttttcaaagctttgaacttctttgccattggtttgaatttctcctgtagcttggagtagtttgattgtctgaagccttcttctctcaactcctctaagtcattctccatccagctgtgttccgttgctggtg

SEQ ID NO: 759165 - DNA, 572 bp, Homo sapiens
tggctttaaaaaatcaagttaacatgaattctacagccacacacacaacaatctcccataaccttagagagatggaaatggatccttctccagtccagcctccagatgagaaaacagcccagccaacatcttgacagcaccttatgagatcctaagagaggacccagctaagttgtcctcattactgactcagaaactgtcagatattaactgtttttgcaggatgtgacggctcacacctgtagctccagtgatacggtttggctctgtgtccccacccaaatctcacctcaaattgtaatccccataatccctatgtgtcragggagggaccaggtaggaggtgattgaatcatgggggtggtttctcccatgctgttctcgtgatagtgagtgagttctcacaagatctgatggttttataaggcagttttccccactcttgctcagtctctcttgcctgctgccatgtaagatgtgcctgcttctcttctaccataattgtaagtttcctgagtcctccccaaccatgtggaactgtgagtcaattaaacctactttgtttttaaatt

SEQ ID NO: 759166 - DNA, 609 bp, Homo sapiens
ttttgcatcctgaggaactgccccttccataatctcagtaggatggtgtttgtcatttccacagcaccacatgtggtcaggtgatccaagcctgatcaattacagcatcacatccctggagccatagtgattagtttagaggtgaacaaaggagctcagtcaaggctgattgtagccaatgagtcaatgtattcaatgccagggctctaacttgaaagagagatgctctgtttccatgtgtactgcttttaattcatggatatccattttccctcacttttagtttttgttttgttttgctttaatcatttctactccctctcttcaggttgttgttkttttttttttttttctaactctggccaactttttccatgtcttattcttttggaactgcagtatcccaggaaccacccagagaacagaaaaacattttttgcttcagaaggattaggatctaggcaccatgtggaattcagttgaagagtttcttacatgttctttacaaaaacaacaaaacagaaaataataaatgaaacaactaccatcaaaaggcagctgacccagcacttcttttccttttttcttgaagtttggctgggcagcctg

SEQ ID NO: 759167 - DNA, 622 bp, Homo sapiens
agaaaagaaacctgaatcacacaaggggaataatgcccaattggttaaaaccctggctgcaaatcacaaaaacctaactcaaagtttaagcaaatcaactaacttactgactcacaggactctgaggcccagtgaggtatttctagttttagtagtggctgagycttggtaatcaagtcatatttgtctagaatatgtctttctcttcttttgtatctcttcttctagtttggctttattcttaggcagatgctcccaagagtgttgagatggccattgctataatttggatgttttgtctgctccaaatctcacattgaaatgtgatctccaaagttggaggtgaggcctggggaggtgttttggtcatgggggctgataccttatgaatgtctgggtgtcatcctcatggcaatgagtgtgttctcactccatgagttcatgcaagatctgattgtctaaaaaaaaacctcgaacttcctcctcgtcctccctctcctcctcttcctcctccttcttcctccctctagcccccaatcatgtgacacacctgctcccccttcatcttctgccatgactataagcttcctaaggcctcaccagaggctgagcagatgctggt

SEQ ID NO: 759168 - DNA, 513 bp, Homo sapiens
aattaggctgccatctctaacatggttttagtttcaggttttccacataagtattttataaaaatcacgtgataaacattttagctgttcaagtactataaacgagaggataaaaacaggaattctattttgctatatgsttaggttacctccctttgtttattggacagacagaagccttgaaaaaacacatgacagccgagtcttgaggttagaggtccacttcaggccacaaaactggagatactgccaccgtcatgcagtggtgggggtggaatttccgtcctgggggtggaatttcccccaggaaccagctggggaggattttgctccttaactttcaggtcagcaaccacatctctctcctttctcataagaaatttgaacacagcacaaatgactcagggtgcttataaaccaaactgggcctcaaaaataatctttttgtcagcttctggggaaatcactcatcagcgctcatgttttcttggtaggcccaggtgagctttctcc

SEQ ID NO: 759169 - DNA, 536 bp, Homo sapiens
acttatgaagcttagattggctggatatgaaattctgggttgaaaattcttttctttaagaatgttgaatattggcccccactctcttctggcttgtagagtttctgccgagagatcagctgttagtctgatgggcttccctttgtgggtaacgcggcctttctctttggctgcccttaacattttttccttcatttcaactttsgtgaatctgacaattatgtgttttggagttgttcttcttgaggagtatctttgtggcattgtctgtatttcctgaatttgaaagttggcctgccttgctagtttggggaagttctcctggataatatcctgcagagtgttttccaacttggttccattctccccatcactttcaggtacaccaatcagacgtagatttggtcttttcacatagtcccatatttcttggaggctttgttcatttctttttattcttttttctctaaacttctcttctcgcttcatttcattcatttgatcttccatcactgataacctttcttccagttgat

SEQ ID NO: 759170 - DNA, 536 bp, Homo sapiens
acttatgaagcttagattggctggatatgaaattctgggttgaaaattcttttctttaagaatgttgaatattggcccccactctcttctggcttgtagagtttctgccgagagatcagctgttagtctgatgggcttccctttgtgggtaacgcggcctttctctttggctgcccttaacattttttccttcatttcaactttcgtgaatctgacaattatgtgttttggagttgytcttcttgaggagtatctttgtggcattgtctgtatttcctgaatttgaaagttggcctgccttgctagtttggggaagttctcctggataatatcctgcagagtgttttccaacttggttccattctccccatcactttcaggtacaccaatcagacgtagatttggtcttttcacatagtcccatatttcttggaggctttgttcatttctttttattcttttttctctaaacttctcttctcgcttcatttcattcatttgatcttccatcactgataacctttcttccagttgat

SEQ ID NO: 759171 - DNA, 536 bp, Homo sapiens
acttatgaagcttagattggctggatatgaaattctgggttgaaaattcttttctttaagaatgttgaatattggcccccactctcttctggcttgtagagtttctgccgagagatcagctgttagtctgatgggcttccctttgtgggtaacgcggcctttctctttggctgcccttaacattttttccttcatttcaactttcgtgaatctgacaattatgtgttttggagttgttsttcttgaggagtatctttgtggcattgtctgtatttcctgaatttgaaagttggcctgccttgctagtttggggaagttctcctggataatatcctgcagagtgttttccaacttggttccattctccccatcactttcaggtacaccaatcagacgtagatttggtcttttcacatagtcccatatttcttggaggctttgttcatttctttttattcttttttctctaaacttctcttctcgcttcatttcattcatttgatcttccatcactgataacctttcttccagttgat

SEQ ID NO: 759172 - DNA, 536 bp, Homo sapiens
acttatgaagcttagattggctggatatgaaattctgggttgaaaattcttttctttaagaatgttgaatattggcccccactctcttctggcttgtagagtttctgccgagagatcagctgttagtctgatgggcttccctttgtgggtaacgcggcctttctctttggctgcccttaacattttttccttcatttcaactttcgtgaatctgacaattatgtgttttggagttgttcttcttgaggagtatctttgtggcattgtctgtatttcctgaatktgaaagttggcctgccttgctagtttggggaagttctcctggataatatcctgcagagtgttttccaacttggttccattctccccatcactttcaggtacaccaatcagacgtagatttggtcttttcacatagtcccatatttcttggaggctttgttcatttctttttattcttttttctctaaacttctcttctcgcttcatttcattcatttgatcttccatcactgataacctttcttccagttgat

SEQ ID NO: 759173 - DNA, 639 bp, Homo sapiens
ttggaataaaaaaacaaacaaatgagttgtgacatgttaatgatactcatcatttttagaagaggacggtgaacaaatacattgtcttgaataatagaaatgtaagtaaaaagtctaaaatacaggatgactaaagactttctgatgtggaccaaaaattattgaatatagagctaaatgcattttgaccrgatcttacaaaaatacagaatatcaacagtaacatatctgtaatatacagttgaaagcctggcaccatggggatgctctgaatgagattctttcagctaaaagtcttggctgtcttcagtaccatcttgcaaagtgtaatgtcttttcacattttcaattgaaatgagctaataatttggcctaacagcctggtgctgcctaagaagtcctctcccacaagtcttgagttttgcatgtgaacagttagtcattagtcttcattctgtaccacttacagctggtcctcatattgttcaaagcaagtgacatcatgagttttcccaaagattgttaatgtcagtggtaatacaccagcttctaatgattctaaatgccctctgaagtcctctattctccccccaaaaatgtattaacctgaaatcaaaattattaatggtttgagtattg

SEQ ID NO: 759174 - DNA, 639 bp, Homo sapiens
ttggaataaaaaaacaaacaaatgagttgtgacatgttaatgatactcatcatttttagaagaggacggtgaacaaatacattgtcttgaataatagaaatgtaagtaaaaagtctaaaatacaggatgactaaagactttctgatgtggaccaaaaattattgaatatagagctaaatgcattttgaccagatcttacaaaaatacagaatatcaacagtaacatatctgtaatatacagttgaaagcctggcaccatggggatgctctgaatgagattctttcagckaaaagtcttggctgtcttcagtaccatcttgcaaagtgtaatgtcttttcacattttcaattgaaatgagctaataatttggcctaacagcctggtgctgcctaagaagtcctctcccacaagtcttgagttttgcatgtgaacagttagtcattagtcttcattctgtaccacttacagctggtcctcatattgttcaaagcaagtgacatcatgagttttcccaaagattgttaatgtcagtggtaatacaccagcttctaatgattctaaatgccctctgaagtcctctattctccccccaaaaatgtattaacctgaaatcaaaattattaatggtttgagtattg

SEQ ID NO: 759175 - DNA, 639 bp, Homo sapiens
ttggaataaaaaaacaaacaaatgagttgtgacatgttaatgatactcatcatttttagaagaggacggtgaacaaatacattgtcttgaataatagaaatgtaagtaaaaagtctaaaatacaggatgactaaagactttctgatgtggaccaaaaattattgaatatagagctaaatgcattttgaccagatcttacaaaaatacagaatatcaacagtaacatatctgtaatatacagttgaaagcctggcaccatggggatgctctgaatgagattctttcagctaaaagtcttggctgtcttcagtaccatcttgcaaagtgtaatgtcttttcacattttcaattraaatgagctaataatttggcctaacagcctggtgctgcctaagaagtcctctcccacaagtcttgagttttgcatgtgaacagttagtcattagtcttcattctgtaccacttacagctggtcctcatattgttcaaagcaagtgacatcatgagttttcccaaagattgttaatgtcagtggtaatacaccagcttctaatgattctaaatgccctctgaagtcctctattctccccccaaaaatgtattaacctgaaatcaaaattattaatggtttgagtattg

SEQ ID NO: 759176 - DNA, 653 bp, Homo sapiens
gtaaactaaagtacatattactgagcccatgtgcctccgtctctgtggtttttcctcactggacaagggcggggtggttaggaaaatgttggattgatgtccacagagtaagtcatctggttcacctgcttttctaggtcttctactgctgaggaaacttttttcttgaccattgacctaatactgaccaaatatactgggccacataaagtcacattttttaaccctttttgcagcctaatcacatgttacctaatattcaacaaatacattggggtactatatattcacacttttaaaagaaaatttgcagcctaaccrcatattttcccgataaattttagataatcgtctttcaaattccctcattatccagccatgcaattaaccagtgtccatgaataagtatagatataaattttcaggtacaatggacaaacatctacccatgaggtaactttctcttaaatatcatccttaaagccaccatggtataaggttagagctgtcttctttggtgctgtcactatatcatgcaaagccatttataagatgggttcaaataatcttcttccgtcatttgattgtagtcagttccctttgaagctgtaggttcaggtagagaagaaaaagccaggtataacagcaagaag

SEQ ID NO: 759177 - DNA, 496 bp, Homo sapiens
atataaaataaaaatagatataaatttttgacacatgtctatatcacctcttttaaataaaatgtaaaataaaaaagaaattggtgtcattattcccgagggcgttttagacatggatcaggaaaagaaaatgtttgttatattgcccctttcaytcagagtgcaaagttctcagcatgtgtaatgtagttctgttaaatctctctggccatgggtctcactgtaaatcaattttcttggcaaattgaaataatttacttagcagctctcaaaatcttgcccttgatttgaatcaatgtatgcagaaaactcataaacatattttttccgtgatgtccatgaaagtacataggtgtaacagccactggtggggcacactctacatactgataaaagagaggggaagccaggatgtttcataaatttttactttataaatctacttgcaaaagttccatgcatatgattttaggtctgtgttgataagaacagtatt

SEQ ID NO: 759178 - DNA, 624 bp, Homo sapiens
tattgtaaaattgaaactttatctccctaagtttatagtattttaaatctttggctttcaatcttatgaaaggtttataaactgagtcaaggcaaagtattttgtaaataattgctggtctccacagcatgcaaacatacctcttgcttatcattaaaatgggaagatttttgtgtgtatacctgtagctatttcataatttccctttttctctagctttccttttttggagctcattgcccattttttgcttagctagttctctgggcattatgcccagcttgggttaatatttgtttattttcatttacattatccaggatgatgttttttagctgggtgccttagaaatgattgtaattcagtagcaaggaatatatttattaaatacataagtacattagatcatcagagatgtttttcyaacatcagttaaatgacagatgagtatatatattttgtgatttttttagcttggtaacctttttgtctttaagccagtttagattgtttcatgtctagatgggttcatgtcccttcctgttattccaagggcaatcatgtgttaatatcccttgctatttcacactttaaaaagacaagggaaaatgtgtgttttaagca

SEQ ID NO: 759179 - DNA, 628 bp, Homo sapiens
gcacaattactcaattacgatgaatcacatatatggagcacatgataaaataaaaagaaaaacagttgactggccctgagaagaatcagccattagaaccaagagagaagaagtttctgtgattattataagcaaatamattaactaacacaacacatatttttagtgcctaaaatcttagtagtaaagaagaaaatctcaacaaagaatagaaacaataaaaataatcaaaaattctaaaatcgaaaattacaagtttgaaaaaaattcatcagataaatttcatgaaatggatatggcaaaggaaagcataaaataattatgtatcaatagtcataatccaaagaaagaatatagagaaaaaatattgaaaaatttgaacagactatattaagggatcaggtatatttatacttgcagtaacaaacatgtaaagattaagaatggacaaaacattcaggaaagagttgacatattttcccaaatttgttgaaagaaattttctggcacaagatgaacaccaggcaggataagtacaaataagctcattctgagacacatcatatttaaactgcttaaagtcaaaattatatagcaaaggttgaaagatgtgagaaaaaaataacat

SEQ ID NO: 759180 - DNA, 480 bp, Homo sapiens
atgtgaaaactctcccaccgacttagtttctacactggaaaaaataagactgatgtggtcagccaactgcattaccatcttggtttcactggtagaaaaccagtctttgctttaagtcatgggtagcattgtgattgtctgaagggagaaatattcctaaggacaggcagagacaaatmgaggaggtgggattatcatcctcagctccagaaactctgctccataaaaatttataatgacaaaggagacaccaaatcagagtagctgtttaccagtaccacactgtaggagatacattccctgcatcccctgagcacaaacccctagccagccttcacacactgctgggataattccttcatgacctcttccacttggaacaagcactgctccacttgctagagatgaggcaaacctgggcttaaggtgccacttagagctgagaaggagacagaaacctagcaaagaagattcactaag

SEQ ID NO: 759181 - DNA, 611 bp, Homo sapiens
tatgtttgcggtatgcagtctactcatgactctaatatgaagcccaaaagacaaatctatcaaaacaacaatagctacagtaacctgttagaagtaatatgaaaatatgtaaattgggaaaactgcaaatcaaaatgttggacaatagaattaaagtgtagaaatgttttcyctctgtttttattcttttatttctgatttaagataagctgtcatctcgtcaaaacaacttgttatatctataaatgtttgttgtaaaacttgtaactacagcaaaaaaaatcctataacagatttactaaaaatagacagccacaaattaaaacatactatcagagataatgacttgaccacaaagtaaaacagtaagaaaggaataaagagagaagaagtctcaaaccatcagaaaacacgcaagaaaatggcagtagggagtccttatttataaataataatactgaatataaatggtctcaattcttcaaccacatgaagtggttgaatggataaagaaataagacccaacaatatgttgccttcaagaaatcctcttcacctataaaaatatacatagattgaaagtgaagagtagaaaaagatatttcatacaa

SEQ ID NO: 759182 - DNA, 611 bp, Homo sapiens
tatgtttgcggtatgcagtctactcatgactctaatatgaagcccaaaagacaaatctatcaaaacaacaatagctacagtaacctgttagaagtaatatgaaaatatgtaaattgggaaaactgcaaatcaaaatgttggacaatagaattaaagtgtagaaatgttttctctctgtttttattcttttatttctgatttaagataagctgtcatctcgtcaaaacaacttgttatatctataaatgtttgttgtaaaacttgtaactacagcaaaaaaaatcctataacagmtttactaaaaatagacagccacaaattaaaacatactatcagagataatgacttgaccacaaagtaaaacagtaagaaaggaataaagagagaagaagtctcaaaccatcagaaaacacgcaagaaaatggcagtagggagtccttatttataaataataatactgaatataaatggtctcaattcttcaaccacatgaagtggttgaatggataaagaaataagacccaacaatatgttgccttcaagaaatcctcttcacctataaaaatatacatagattgaaagtgaagagtagaaaaagatatttcatacaa

SEQ ID NO: 759183 - DNA, 560 bp, Homo sapiens
cttcgctgccttcagcctgacttgagatcaaagccaaaggcagctgggcctggggctggggctggggctggggctggcggccaggcgagaggaggccaggtggacagaagtgtgactccccacactgccaccaggccgcagtgcagctgaggacagctctgccccctacctgggctccaagctgccctcccagggccagagagggaggcagggtatggccacgcacgggcacactagatgccatcctcagggctggaggcagcaggcgcagccctagtcccgctcactctcgttgctggcgccctcgggccgccgcagcttctccacctgctcgttgatctgcccatccccgccccggcggtcctccctctgcacccccaggcagtcctcctcrtccacatggctcacatcatcatcctcctcatcctcctcgtcctccttgtcctccctcttctcctcctcgccttgcacctccatccgcacctggcccttgacgtccaccaccccctcgccttcctcctgggggcccagcaagtggtaggtgaccgtggagccctcgg

SEQ ID NO: 759184 - DNA, 483 bp, Homo sapiens
ggctaaagcatggaggtgactgtgtcccaaggcactggcagctctgcccagcctgttcctttcccaccctctggccctcagcgactttggctgcatgtgcctctggcagggcagaaccagaagtgggggcctagtggccttccaatttggggttcttggagaaggagcctggcgtgccctccttggggagcaggtggacagactggatgttttatggagtctgggrgagtcctgcggcagctatatctgttaaatgccaagaagccaagttggtttaatatgattgtagctgctgctttgataaatcaaaataattaaaaataataaatttgattcctcaaccaacaggctgtgtgtgggcgcagggcctgggctgccgagtcagggccgaggaggtgggagtgggcacggggacacaggaaggcctgtcttgtgggatcctaaatggggagtggacggcaacagggcggaaggggagactgc

SEQ ID NO: 759185 - DNA, 570 bp, Homo sapiens
gcagggaggtcagtgcagaagagggacccacgtgggcaccatcaacagggttacacccacatgggacccctgatctggcatggcgccagagggcggcatttagggagccctcggcttcccctggcttgggaggcctctcctgccccgccccctccctaccctggcacagcaggggtcctgggcttcccctcctcatccctgtctgcagaagggccacacaggcctctcccccggggggtggcagcccaaccagctctgggggacgtggtggctgcttcctggccagtttgggtgggaagtgaggacacgtcctggcgctaaytgaagctgaagggggaatctaggtcggcagagtgcaattagccaagttggactcgggccaagacgccagctatagctgcctctaatgagggacaggccggctcctttcccgccggctacccggcttccctggctgcgcctgtctgcacagggggagctgcctactcacagtaggggtgccaagtgccccagggctgtgcggggctgcaactccctgccctaaggagcaccttgtccttggtaccagaa

SEQ ID NO: 759186 - DNA, 617 bp, Homo sapiens
tggcattttccctaggactaagggcaaaacaaaaataaagcataaaattgtgcctacaccagatctacaggtgatttaactgtctactagaaaaaactgaattctgcagaagaaaacagaatccagagcctctacaaactatcaccttcaacatccagtataaaattaaaaaactactagatgtgagaagaaacaggaccctgtgacccttactgaaatgaaaactcagttaatagaaacaaattcacaggtgaacagtaactttaactatgaacaaatatgttaaaagaatttacatgaaaaaaatgggwgaaagggtaaagaggtgaggagttgcagtggagataaggaagttgtgaaaaagaaccaaatgtaaatcttagaactgaaaaacacaaaacctgacactgaaatttccctgggtgagagacacagcagattgggcataacagaaggaagcatcagtgaacctgaagacaggtaaacagaaatcatccaaactgaagtatggagaggaaaaatagctggaataaaaataggaccagagccttaatgacctgcaggacaaaaatcaagctgtctaacatagggtgacagcagtactcccaaaaagcaga

SEQ ID NO: 759187 - DNA, 623 bp, Homo sapiens
acatgaacatacaaattcctaagcacatgagaaaaattatgaaagtcagtcaagacactcaaaaatcaggagataaactcattcaagatgaaaaacaagactatgaaagtttcacaataatgggctctcagtaaatgacccactgaaggatctatttcaccagaaagaatactgtagcaacaaggaaggtgcaggatgttaagaaacaatggcctaaaaaaaatgtgaaatatagaaacagtgaatgtagtcagagctcaataaaagttggctgaacacatagattttatgagctagacctttcaaatattaaaagtgtaaatctctaatgatctgcttgtagttcctaaaagtaattcagaaagtctctgtcttaaaagaactgttttatatttatacaayagcactaatgtaaactaaaattcaatcttcagattggcattccattgttcatcaatgagtctctatcttttgtttgtgcagccatcattttccatgagtttgaagtgtcaagagcgagcaatgctgctgcctcttcagggaccatctctcccgttctgtcatctctggggcaactattctaccctgctctccgcaaagcaaagcagtcatgtaattctcca

SEQ ID NO: 759188 - DNA, 601 bp, Homo sapiens
ttcctatcggggtgatctaattctccttcactattatgtttagaatgtagccttttcagatcccagttcaaagtggggattttatctgactgtcttccttggtgggttctctactaattacatgttttgtcccctagcctcccatggccaacagaagccctgcttagtgtctcaccctctcagcagaggccccagagaaactggttgcaagtgcttagctttctggactccattatttcccattgccttggttttttttttgtttgtttgttttgttttttttttttagacagggtcttgctatgttgcccaggctggtcttgaactcctgggctcaagtgatcctccaggctcagtctccaaaatagctgggattacaggtgtaagccaccatgtccagcttagttggctttttgtyattcacaaatttttaaaaatacaggtcacatattctttatccaaaatgctgggaccaatagtgtttcacattttggattttttcacattttggaatatttgcatttatataatgagatctcttgggaatgggacccaaggctaaacatgaaatttatgtttcaaatgcactttgtacacatag

SEQ ID NO: 759189 - DNA, 585 bp, Homo sapiens
cctggatgaacacaaattagaggaacacatgtaacttacttatattattctattctaattcttataatttgagtattcagtagcttgatacagaaaaatccttttttttgaaagcagaatgattgtcaccaatcaattctaagtcaacaaaatacaccaaaaaaagtattatattttcttttttttttttttgagacrgagtctcgctctgtcgcccaggctggagtgcagtggtgctatctcggctcactgcaagctccgcctctcgggttcacgccattctcctgcctcagcctcccaaggagctgggactacaggcgcccgccaccacacctggctaatttttttgtatttttaatagagacggggtttcaccgtgttagccaggatgatttcgatctcctgacctcgtgttctgcctgcctcggcctcccaaagtgctgagattacaggcatgagccaccgcgcctggccaagtattatattttctaactctacaagaaaacaatcatgtaaaaagaaattaactataaaaagttgcatctcataagtagagattattttctacaaataatcacatgtgaa

SEQ ID NO: 759190 - DNA, 539 bp, Homo sapiens
atcaaagtcacaatagaaagtctaccggcaaagaaaaaccccaggatccaatggcttcactgcagaattttaccaaatatttaaaaggaagtaataccaatcttactcaagctatcccaaaaactggagaaggaggaaatactttcaaactaattttgtgaatctagaattaccatgatataaaacgaaagacccattwaaaaaaaaaaaaactataggtcaatatcactgaagaacattaatgcaaatatcctcaacaaaaacccagtaaaccaatttcaacaatacattaaaaatatcattcattatgactacatgggtcttgtcacagggatgcaagtatagtttaacatatgcagatcaatcaatgtgatgcatcatatcaacagaatgaaggaagaaattatatagtcatttcaactgatgtgcaaaagcatttgataaaattcaaaatccttttataataaaaaccctcaaaacacatggacagaagaaacaaacctcaacatagcaaaagccacacacaacaaacccacaac

SEQ ID NO: 759191 - DNA, 548 bp, Homo sapiens
cggagccttgctcattgctagcacagcagtctgagatctaactgcaaggtggcagcgaggctgggagaggggcgcccgccattgctgaggcttgagtaggtaaacaaagcggccaggaagctcgaactgggtggagcccacctcagctcagactccacctgtgggggcagggcatagctcaagaaaaggcagcagaaacttctgcagacttaaatgtccctgtgtgacagctttgaagagagtagtggttctcccagtacagagtttgagatctgagaaaggacagactgcctcctcaagtgggtccctaacacccaagtagcataactggaaggctcctcccagaagagrctgactgaaacctcacggccaggtgcccctctgagacgaagcttccagaagaaaaatcaggcagcaacaattgttgttctgcaatattcactgttctgcagcctccgctggtgatacccaggaaaacagggtctggagtggacctccagcaaactccaacagacctgcagctgaggatcctgactgttagaaggaaa

SEQ ID NO: 759192 - DNA, 594 bp, Homo sapiens
caccctgtattcaagtgttctcattgttcaattcccaccgaagaataagaatatgcggtgtttggtttttctgtccttgcgatagtttgctcagaatgatggtttccagcttcatccatgtcgctacaaaggacatgaactcatccttttttatggccgcatagtattccatggtgtatatgtgccayattttcttaatccagtctgtcattgatggacatttgggttggttccaagtctttgctattgtgaatagtgccacaataaacatacgtgtgcatgtgtctttatagtagcatgatttgtaatcctttgggtatatacccagtaatgagatggctgcgtcaaatggtatatctagttctagatccttgaggaatcgccacactgtcttccacaatggttgaactagtttatactcccaccaacagtataaaagcattcctatttctccacatcctctccagcacctgttgtttcctgactttttaatgatcgccattctaactggtgtgagatgatacctcattgtggttttgacttgcatttctctgatgaccagtgatgatgagcattttttcatgtgtctgttgg

SEQ ID NO: 759193 - DNA, 594 bp, Homo sapiens
caccctgtattcaagtgttctcattgttcaattcccaccgaagaataagaatatgcggtgtttggtttttctgtccttgcgatagtttgctcagaatgatggtttccagcttcatccatgtcgctacaaaggacatgaactcatccttttttatggccgcatagtattccatggtgtatatgtgccacrttttcttaatccagtctgtcattgatggacatttgggttggttccaagtctttgctattgtgaatagtgccacaataaacatacgtgtgcatgtgtctttatagtagcatgatttgtaatcctttgggtatatacccagtaatgagatggctgcgtcaaatggtatatctagttctagatccttgaggaatcgccacactgtcttccacaatggttgaactagtttatactcccaccaacagtataaaagcattcctatttctccacatcctctccagcacctgttgtttcctgactttttaatgatcgccattctaactggtgtgagatgatacctcattgtggttttgacttgcatttctctgatgaccagtgatgatgagcattttttcatgtgtctgttgg

SEQ ID NO: 759194 - DNA, 553 bp, Homo sapiens
tttgctgttgttgttgttttagttgtttgtttttaaatcccagtgattagcaacagcttctatccagtttttcaaacctaaaacctaaaaattatgttataccttcctcatctctattaccaaatccagttacttttaactcctagatatatcaaatttgtctacttttctcagtccccacatcactacatatggcgtccacgctactgctgtctcttgactcagctattctaattgccttctaactggcctcctcatrtctgctattgaccttctctaatctgttcttgatattttagcttgtgcggatattctaaatgaagaattgatcacatcactttctaccctatttaaaattaaaaccctttaatgtcttgtgttcctcttaggaaaaagaaacaataaaaaagcttactacgtttacaaggccctaaaatgtccagcttgggcctaccttttcactttcccttggcatcacttccccctggctcctgcactccagctacagcagcctcctttcacagagttcctgtactctgcttcctaagcctgg

SEQ ID NO: 759195 - DNA, 634 bp, Homo sapiens
tctgaataaaattttaggcacagtgttttaaaaatcataaatataatatataccattcagagtagaagcgagaaatatgggattataaaaaaatttaaaagaacaaaagaaagtgagcaaagaaacatagaaatggtgagtcaaatacaaagcaccaaactaatgtgggaaaaataaatccaaatacatcggcgattaaatagctataaattgaatggtttttccagttaaaagattacaatgttcagattgaatttttgtaatatccagcaatatatttttagaaatgtcctgtctaaaacataaggattcagaaaggttgaaaataaaaggatcaagaaagatgtgcccaagggaaatactaacttaaagygctgttgctatattaatatgagaaaaataagactttaagggaaaaaattgcctgcgtagtggctcatgcctgtaataccagcattttgggaggccaaggcaggcagattgcttgagctcagcggttcgagaccagcctgggcaacatggtgaaaccccgtttctaccaaaaatacaaaaaattagccaggcatagtggcgcatgcctgtaataccagctactcaggaggctgaggtgggaggatcatttgaacctgggaga

SEQ ID NO: 759196 - DNA, 634 bp, Homo sapiens
tctgaataaaattttaggcacagtgttttaaaaatcataaatataatatataccattcagagtagaagcgagaaatatgggattataaaaaaatttaaaagaacaaaagaaagtgagcaaagaaacatagaaatggtgagtcaaatacaaagcaccaaactaatgtgggaaaaataaatccaaatacatcggcgattaaatagctataaattgaatggtttttccagttaaaagattacaatgttcagattgaatttttgtaatatccagcaatatatttttagaaatgtcctgtctaaaacataaggattcagaaaggttgaaaataaaaggatcaagaaagatgtgcccaagggaaatactaacttaaagtgctgttgctatattaatatgagaaaaataagactttaagggaaaaaattgcctgcgyagtggctcatgcctgtaataccagcattttgggaggccaaggcaggcagattgcttgagctcagcggttcgagaccagcctgggcaacatggtgaaaccccgtttctaccaaaaatacaaaaaattagccaggcatagtggcgcatgcctgtaataccagctactcaggaggctgaggtgggaggatcatttgaacctgggaga

SEQ ID NO: 759197 - DNA, 597 bp, Homo sapiens
gatcacctgaggtcgggaattcgagaccagcctgaccagcatggagaaaccccgtctctactaaaaatacaaaattagctgggcgtggtggcgcatgcccataatcccagctactcaggaggctgaggctggagaatcgcttgaacccgggaggcggaggttgccgtgagccgagatcatgccattgcactctagcctgggcagcaagagygaaactccgtcctcaaaaaacccacaaaaaacagtgttttttacacattcttctgcacttgatggaggaaatacataggtctatcattttgtaaaacgtgtgatttgactctgaacacaagtataattaggctttagtaccttactctatatttcccacatttcatacaaaataacataattcacattgtttttgacaatatcttaaataactttgaatttttagatataatttatatcccattaaaagaggcttgaaacacaatattctaggaaatgcaatgagttaaaggtctgattttagtggagatttgacttggatgtaattttaaatctaagctgatttttacatgataaatacttggctgtcaaacaagattgaccttt

SEQ ID NO: 759198 - DNA, 620 bp, Homo sapiens
agatcctaagtatttgagagaaagaaaagataaaaatctaaaataatctttattcaataaacatctaaggaatgacggaatcccatgtttcctaatagagcctccgtaataatggattgtttgacttaaggccagggctctgcagatatgagctggaattgctttgccctggatttccgggctaccccaggtaattcccagggtctctttctttgggtattgccagagtctgggggaggtgtcctgtttcaagtgtccagcaaaaccattttttgttgttgctttatataagtgactttattgtacaaatttaaaataggacacaagatctgacaagaaaaaagtgtagatatgcggaattttaagatgtgggaatatgtgttctgatcatcttaagaagagcacatttgttgtctcatgatactttaagtgcttgaaacactayggaattacaactgggctacttcagaatggatcatggcaaatttcattatacaaccatgatagttctcatcattatgacattgttatatcattatttccttccacaatcttatcctttataaacaaggtgatcctatattctcccaatgcatatcttatcaaatggaatttataat

SEQ ID NO: 759199 - DNA, 623 bp, Homo sapiens
ctagcctttattgtatactttcagacaaccacagagccacagaaatccttgaaacatggtttcaagggaaataatgtctggcatctcaatgcatttctaaaagccaacatctttctcttaagactagctattcctttttcacttctctattggtttaaacagtgttaccatttccctccatcacctggtaataatcatatggtctcaaatttaagcacaataattttcaagctatcagctatctcaattaactattactgatcactggtgccatggatagagcatgctggatttaactataagatagacctgagttcaaattccagcatagatatttactagttatgtgacctttggcagttaacatcttgaaacccagttttctcaactgtawaaacaaggatgagtctacctgcctcactgaattgtaatgaatgtaaagtacttagcacagtactaaatgcatttgaaacatcacaaatacaacccaaatttcattttaaacaattactttcatatatcttccccatcagcttttaactacatcttctaaacagaaggaaggataacttatttaagataaagatgctttatctcatcttattcctcttggctatatatct

SEQ ID NO: 759200 - DNA, 673 bp, Homo sapiens
aaaaacacatgcatgtgtatgttctttgcaacactgctcacaatagcaatagcaatagcaaagacatgaagtcaacctaaatgcccatcaatggtacactgtataaagaaaatgtggtacatatataccatggaatactacgcagccatagaaaagaatgagatcatatcttttgcagcaacatgaatggaactagaggccattatcctaagtgaacgaatgcaggaaaagaaaataaatactgcatattctcacctgtaagtaggagttaaccattgaaaacacatggacacaaagaagaggacaacaggggactacttgagggtggagggtgacaggtgggaggggattgaaaaatctstctgtcaggtactatgcttattacctgggtgatgaaataatctgtataccaaacccgcgtgacatgcaatttacctgtataacaagcctgaacatttatccctgaacctaaaataaaaattttaaaaaaagaaagttgaaggatggcaaagatattccacataaatggtaaccaaagacagtaggggtatccatatttatatcagaaaaaataaatgttaactgaagagctctaataagagacaaagaaggacattacataatgatgaaagagtcaattcaacaggaatatatagttatgaatatatatgca

SEQ ID NO: 759201 - DNA, 631 bp, Homo sapiens
caggataaaaaattaatatgcaaattcaattgtatttctataaaaaatgaacaatttgaaaatgaatttaagaaaacaattccatttacagtaacatcaaaattataaaatacttaggaataaacttaactaaggaggtaaaagtcttatacactgaaaattacaaaacctttatccaaaaaattaaagacacaaatacatggaaagatatttgtattcgttgattggaaaacttcrgagtattaaaatgcaatccctatcaataaaaaaatcccaatagcaatttttacagaaatagaaaaaacaaatctaaaatttgcatggacccaaaaacggctcaaatagccaaagcaatcttgaaaagaaggacaaaactggaggcctcacactgcctggttttaaaacatatcactaagctacagtaatcaaaacattatggtactaacttaaagacagacatatagacaatggaacagagagcccagaaataaacccaagcatatatatataatatacacacacacatatatatgatgcggaagcaatgtaaatgtccatcagtgtatgaatgaatagagaaaatttggtatacacataaaattatggagccttcaaaataaaggaaatcctg

SEQ ID NO: 759202 - DNA, 651 bp, Homo sapiens
caacatttttctgaatgctgtattccagtgatttatcatctgtaacatagctgtagttgaaaagtaataatggaaactaaacagagaattataaatctcctgtaaagatggacacaccttaaatcacaagacattcctgaatacaacagatatttaaaacaggtaaattatcmagtaataatttaatattcactggtaaacaaaagctttttacaattactttaacacatagaatttgtcatatttattagaacactctggggaaatattgagtaaagccattttctcttctattcaaaagtcaggaaaattaaagaaatgaacacttgatctttagacatgctttatctttagccttcatcttcaacattaataacatatttttactatacataaaaaagagaggtggtatatattaataacttgattttttttcaacaagctttatatcattggatatttattttgttagcttgtgaagcaagaatgtttattagttggttcacattattttaaatattcttgcttcctgaatacagtggtatataactgggaccctaataaaccttttgtgttgaaaactgtgtagtgtaaaactaagaccaatactgtgaagtctccaggcttccggtattcccaagaacttgagag

SEQ ID NO: 759203 - DNA, 608 bp, Homo sapiens
agatgtcatgctatagttagatcaaaccctggcctttaatgaaaagaatgcagctttagctgcagccctagagtttggagatacctggtatcttagtcaagtaaatgatagaatgacagctaaagaatgggacaaattccctaccagtcagcaagccatccccagtatggatccccactgggaccttgactcagatcatgggactggagtcataaacatctgctgacctgtgttctagaaggactaaggagaattaggaaaaagcccatgaattattcaatgatgtccactataactcaaggaaaggaagaaaatacttctgccttcctcgagtggctatgggaggccttaagaaaatatactccccygtcacctgactctctcaagggtcaattgatcctaaaagataagtttattacccaataagccgcagatatcaggagaaagctccaaaagtgagccctgggccctgaacaaaatctggaggcgttatcaaacctggcaacctcggtgttttataatagggaccaaaaggaacaggccgaaaaggaaaagcaagatcagagaaaggccacagccttagtcatggccctcaggcaaacaaacct

SEQ ID NO: 759204 - DNA, 626 bp, Homo sapiens
tatatacatacatatatatatattacattatatatatatattttttttttgagacggagtttagctctgtcaccaggctggagttcagtggcacgatcttggctgactgcaacctccacctcccaggttcaagcaattcttctgcctcagcctcccgagtagctgggattacaggcacgcgccgccacacccacctaatttttgtatttttagtagagacaggatttcaccttgttgaccaggatggtttcaatcctgtgatctgcccacctcggcctcccaaagtgctgggattacaggtgtgaaccactgcaccaggcctagattttttaatccactatgacaatatctgtctttcaactgaatgtaaatgcatctaatgtaattattaaaatgtttgagtttaaatctcttatcttcctggttggtttccatttgtcccatctctctctctctttttttttttttttttttttttttttggkctcttgaagagaacaatttgaaataatttaatagtttttttattattcaattttggctccactatttatttggcttatatcatattttgggaattgctctaaaatttactctctacatctttaacttatcacagcgtacaa

SEQ ID NO: 759205 - DNA, 569 bp, Homo sapiens
tccatccatgttgctgtaaaggacttgatgcaattctattttatggctgcctagcgttctgtggtgtatatgtaccacattttctttatccagtcttactgttgctgagtatttaggttgattttatgtctttgctatggtgagtagtgctgcaatgaacatatgcatgcatgtgtctttttgatagaacgatttatttttctctgggtatatacccagggatgggattactgggtcaaatggtagttctgttttaaattatttgagaaatctccaaactgctttccacagtggcagaactaatgtacatccccatgaacaatttataagtgttctcttttctccacagcctcatcagcatctgttgcttttttttctttytaataatagccattctgactggtgtgagatagatggtatctcattgtgttttccatttgcatttctctggttattagtgatattgagcattttttcatatgtttgttggctgcttgtacatcttcttttgagaagtgtctgttcgtattctttgcctatttttaaatggggttgttttttgcttgtag

SEQ ID NO: 759206 - DNA, 588 bp, Homo sapiens
aaacttggaaatgggctgggcgaggtggctcatgtctgtaatcccagcactttgggaggctgaggcgggcgggtcacctgagatcgggagtttgagaccagcctgaccaacgtggagaaaccccatctctactaaaaataaaaaattagctgggcatggtggyacatgcctgtaatcccagctagtcgggaggctgaggcaggagactcacttgaacgcaggagaatcgcttgaacccaggaggtggaggttgcggtgagctgagatcatgccattgcactccagcctgggaaacaagagcaaaactccatctcaaaaaacacaaaacaaaacttggaaacgtatcgtgaaattcttgtagtgagtttttcagctctattagatcagtttgattctttctttaaatagctgtttcatctttcagctgtcctttggatgggattttttgctttgattttcttttatgccctgatggttttactgtggtatagttgagttcacttaactggattcacttatgaaaatttttaaggagccaagagtcagctccaaaatcctgggctgtgtgctctaaccctgagggctggt

SEQ ID NO: 759207 - DNA, 565 bp, Homo sapiens
cctccactcagactttataccccaagatgagctgtcaacaggctttggtaggttgtcttgtaggattccagactttgccacattcaggagctcactctttaatcagtcagctccttttggtctcctcatgtctcttttctggtggtcaatttcatcctcaaataatttgcaaaaaaaaaaaaaaaaagagagaggtaaaaagctcctttttgttattgcttctttctttataaatcctgatgctgtaatgctatttaaaaatamatttagtaggaaactcaaaaccttcttcttgcacctcccctttcttgctccataaaattcctattgcagtctgagccatgactaacatgtacagtatgcttgcaatgaaaatggttttttcccctacatgccctaactccagattttcaatcttatgactctacgctttgattaagacttaggttgaaagtaagactctgttgtcatcccagtctcaggtcctttgccactgaagtccttgattggaagatctaaccttactgcatattacagttcatttcagtgtggagaaccacaaata

SEQ ID NO: 759208 - DNA, 659 bp, Homo sapiens
gtaaatacacagtaatgtcaacataaatgttgaaaaatccttcagaatgtaccagttactgaaatttaattacatttgctatggtttgaatatttgtcccctccaaaattcattttgaaatttaatccccagtatggcaccaggaaccaaaaggtgattggttcatgaatgctctgycctcatgattggattaattcattgatggattaattgattaatggattataatgggagtagaactggcggctttataagaagagaaagaggaacctgaactaccacactcagcccctttgatgtgtgatgttctctgctgccacggtgccctgcagaaagtccacagcagcaagaataccctcaacagatgcggctccatgactttggacttctcagacttcagaagtataagaaacaaactttgtttcttataaattgcccagtttcaggtagtctcttacaagcaacagaaaatgaactaaggcaacactaattacccatttttaaaaattggtcttctctcacctttaaatataaaggggtttctttaaataggaaaggttcccattggtttagcgcctatcttcagaaaaggggcttttgggccaggttaatggaaaccctttaatcaagtcagattgaatgtatcgcccaaaggaaaa

SEQ ID NO: 759209 - DNA, 625 bp, Homo sapiens
cctttcctcttccagtctccttggctcatgactcctttgtccatcttcaaagacaacaacattgtatctttaaatctttctgtttccattttcaaaatgccttctgccttctgtgcttctacgtatgtctaatctccttgtgtctctcttataagggcacttgtsatggcattaagggcctacctggacaatgacaataatctcctcatttcaagatccttaacttgatcacatttgcaaaaactttacaaatacagtaacattcacaggttccaggattagaacctgatgtctttgggtgctcattattcagcataatatagctttatttcctaatataggtacactccaggaatctggtccttagtctgtgaaataaatatactaaactaaaatattttaataataatgtagttcaatacactcatattatagattaagtctctgaggccaagataaagtaaatgacctgcttaagatccacagtaaatgttttgacacagacaagaccactccctttactcccactctttacagcactttattcttcctctctaaaataattactaagaattgctcattttttaataaccaccaaattatccaagaatccataaacacaact

SEQ ID NO: 759210 - DNA, 427 bp, Homo sapiens
atagctgtgttttcagtgattaactttagtcttttccttaaattaattagctatcttagtaaatgttaatgaaaaaatgaaaataacttgattagacagctatagagatctatgtaacatactatgcgtcctgacttttgagagtagagacaaaagcagcacaaattgggttaatttaaactcaaacaaaaggtcagtttgcagaaagtaaagacctgtgtgacctcttgttcaaatcctggaagctataaatcctactaaattacttagggctttgttaarcaggcccaacaaaagataaccaacattgtaattattgttcagtgatggactgaataataagcctggtttctatttgtcaaagcaacagaccttaagtcatttgtagagctattctaatgaatagtggaaggctgtgggttacata

SEQ ID NO: 759211 - DNA, 586 bp, Homo sapiens
ttggtctgaccctgagctaaaccctttgtaagtattagctcatttatctctcacaaaatacctatgaagtaggtataagttactatcttacgttctcagggtcaagaagctagtaaggggtaaagtcagagtttgaacccaggattggccctttccaaggcctgtgctcttcatctcaatgaaattagtgtgtcaaagaatgtttgaactattttaaggtttaatactgagtggctgtgccaaaaagctrtgccaatttgaacatcttgtaagaatcagtagtgttaattggtttgacagaaaaataaaaatgtaaatgtttataacatacatgaaaatattttaacttctatatctttctcattaaggcagctgaatattgctgtttatatatttatttccatttccatttctgtaaaatctttttcggcttttgctttttagaaaaactcacagtccttttctttattgatttaaaaaaacttcattttttccattttggcatttgtctttaattttgcatatatttttgatttacagaagaattcatttttatgaaaaaaagaaatattgatgtcctgtgcgc

SEQ ID NO: 759212 - DNA, 645 bp, Homo sapiens
tcactctgggatagcttaattcccaagtaagaacatggactaataatctcagaggagtcctttatgtccttgttattcttctgaggtgttagaattttctaaaaagaataaacaataatgactactgaatgttcatgagtagaatatactataatgttgaaagactgctttgaatttatttccttagaagaagtgatggttggtgacaatgggacaagaaatagaggccatattattgcctttgtacttcttatgaaataaggagtaaagagtaagaatgaatagctaattctgagtatggagtatggaaagatcttctagtagtgttcctacggggttaattggggtgagataagctaaatatattaaaaacatgagtagcaaggggaaagaatttgttcatgacaaactagcctaacagagtaaaggaaaaaaataccagaggactacaaaaasttataattgatcaacacaatagcagctaatttcaacacagacaagggccaggagaaaataatcacagaaataaaatcttattttaaaaagtttatatatgccgatagttttttaatgttctgcaacctttcagcacaaatatttatacctttttgtggtcaattcaataaaagcacttagtctattagg

SEQ ID NO: 759213 - DNA, 652 bp, Homo sapiens
tttttcatataattgtttcttttcctctgggtagatatccagtagtggtgagaggtgaatccagctgagtttctggatcgggtggggacttggagaacttttatgtctagctaaaggattgtaaatgcaccaatcagcattctgtgtctagctaaaggattgtaaaagcaccaatcagagctctgtaaaatggaccaatcagcaggatgtggctggggccaaataagggaataaaagctggccaccctagccagcagcggcaaccagctcaggttcccttccatgctgttgaagctttgttctttggttgtttacaataaatctggctgctgctcactttgggtccatactacctttatgagctgtaacactcactgtgagggtctgyggcttcattcctgaagtcagcgagaccacgaacccaccggaaggaagaaactccagacacatctgaatatctgaaggaacaaactccagacccaccatctttaagagctgtaacacttgctgcgaacatctgcagcttcactcctgaagtctgagaaggaagaaactccggacacatctgaatatctgaaggaaaaactccagacacaccatctttaagaactgtaacactcaccacaaggatccacagcttcattcttgaagt

SEQ ID NO: 759214 - DNA, 641 bp, Homo sapiens
aaaaattagccgggcatagtggctggcgcctgtagtcccagctactcgagaggctgaggcaggagaatggcgtgaacccgggaggcggagcttgtagtgagccgagatagagccactgcactccagcctgggtgacagagtgagactccgtctcaaaaaaaataaaataaaataaaaaatcacctgcgtcttaagaccaaatagattcaatcctgctagmggtatctatgataaataatgatgacatctgaagtcaggaacgttgcagcatagacccctgggtcttgaaaggaggtgatatctatctcagaagaactactttctcttctctaaaaagttattggtatctatgtagagggtgatcccctgataacacactaattgactagacaactgtgggtagccatatgtcatctaatttcaaaaggcttaaggataagcagacatagcaacagtctcttgcgtgttggtagtggtacagtcaaacactagcctgatctgctgcagaagacatatgtaaatagttgcctcataatcacgagtaattgtcccatactttcatatttccaacctctttagcaacaatgccacatatatagcttcatgggaaaatcccaaaaattaactgatagaagaagaaa

SEQ ID NO: 759215 - DNA, 553 bp, Homo sapiens
acaagataggaactataataatttgctgaactttggatgaattaatatgaatagttattcttatcctaaagaggaatatttacaaccatttattaaatattcaactttataaacaaaaacttagttgttcacattaactgatttatttaaagaaaaatctattgcatgctatcaagttactcattaatttgccaaagtcttagaaaataaggccaataatactatataatgtccataaagagaactctctctctttatcttttttttttttttaacacaacttgtgattgtataaatagtatttcccattatggaacttaagttatatgtgatttatttggatcaatgctatgtcagtcagctwtattgacagtgttataccacttgattaggggattaaaaatttaatccttgtgaatgagaacatgatgtaagttttctttaatatccccatttaattgtcttctgtttcttctatttatatagtagtttttgtctatcaatttttttaactttagtaggaacacaaaatccacattgattccacttgtgt

SEQ ID NO: 759216 - DNA, 635 bp, Homo sapiens
attattatggaggcattgttttttccactttgaatactttgctgaacattgggttttataatttccttgggtaccagtgatagtttagaaacagtgttagagcaacaggtaattgttgagaggcaagaaaatttctgatagtttaaagcaatggtcctgtctcctcgtccatatttccaatcataattgtttgcttaaaaaactattaatttagtattttctttcttacctgggctgtgtctatcctcatggttattcagcatagaatatgctagcagcacctaaagccacaaaataacatattaattctactgattaagttctataataaaggtataaaatggaataaaagataaaatatgatgactttaattwatttatgacatttcaaataggttttactctgtgggactccactttacaatgggtcttcctttccctgcccaaactccagaggtaaggataccatccagtagcctagaagtctcataaaattacatgtgcccagcattgtacttttccagtgtttaagggaaactaaagaatcctcatttttaaatgaaatattctaatatttcaatgttgacaagttatttcaaagtgcaatacatgctaaaggttaaacaacctgcgtg

SEQ ID NO: 759217 - DNA, 637 bp, Homo sapiens
aggaattgaactcagctctccaccaagcggacctaatagacatctacagaactctccaccccaaatcaacagaatatacattcttcccagcaccgcaccatacctattccaaaattgaccacatagttggaagtaaagcactcctctgcaaatgtaaaagaacagaaattataacaaactgtctctcagaccacagtgcaatcaaactagaactcaggattaagaaactcactcaaaactgctcaactacatggaaactgaacaacctgctcctgaatgactactgggtaaatartgaaatgaaggcagaaataaagatgttctttgaaacccacgagaacaaagacccaaattccactttttaaatgagaataatagtaatacctatctcaaaatcgtgagagttaaataaattttctaattaatatttcattgtgttcttgcattaatatcttatttcatacagcaagaataagcaggaagaacacatagcagggatagattctcttaaaattttatgtaatatataaatagctattatttaatgagtgtgtactgtgtatcacagcatatcctcagttttcacctgtgctaacatttagttctcaaaagattgcaaacagatattgataacttc

SEQ ID NO: 759218 - DNA, 419 bp, Homo sapiens
atcatcgaatggagtcgaatggaaacatcactgaatggaatcaaatgaaatcaccgaattgaatcaaatggaatgatcatcaaagggaatcaaaggaaatcatcgaatgggatcaactggagtcatcgaatggaatcgagtggaatcatcgaatggatttgaacaraatcaacatcgaatggaatcgaatggaatcatcgaatggactcgaatggaatcatctaatgcactcgaatggaataatcatcgaatgtaatcgaatggactcatccaatggaatcaaatggaataatgaaatggaatcgaacggaatcatcatcaaaaggaaccgaatggagtcattgaatggaatcaaaggcaatcatggtcgaatggaaagaaatggaaacagcattgaatagaattgaatggaatcatca

SEQ ID NO: 759219 - DNA, 584 bp, Homo sapiens
gtatcatcatgaaatggaatcatgtggaaccatctaagggacacaaatagaatcatcattgaatggaatcgaatggaatcatctaatgtactcgaatggaatcaccattgaatagaatagaatggaatcatcgaatggaatcgaatggaatcatcatcatatggaattgagtggaatcatcrtatggactcgaatgtaatcatcatcgaatggaatcaaatggaatcatcaaatggactcgaatgaaatcatcatcaaacggaatcgaatggagtcattgaatggaatggaatggaatcatcatggaatggaaacgagtggaatcactgaatggactggaatgggatcatcatcaaatggaatcgaatggaatcatctaatgaacttgaaaggaatcatcatcaaatgaagtcaaatggaatcaccaaatcgacatgaatggaatcatcattgaatagaatcgaatggaatgattgaatgggctagaatggaatcatctttgaatggaatcaaatggaatcatcatcgaatggaatcgaatggaaatgtcaaccaattgaatcaaatagaatcatcatggaatt

SEQ ID NO: 759220 - DNA, 579 bp, Homo sapiens
aatggaatcatgtggaaccatctaagggacacaaatagaatcatcattgaatggaatcgaatggaatcatctaatgtactcgaatggaatcaccattgaatagaatagaatggaatcatcgaatggaatcgaatggaatcatcatcatatggaattgagtggaatcatcgtatggactcgaatgtaatcatcatcgaatggaatcaaatggaatcatcaaatggactcgaatgaaatcatcatcaaacggaatcgaatggartcattgaatggaatggaatggaatcatcatggaatggaaacgagtggaatcactgaatggactggaatgggatcatcatcaaatggaatcgaatggaatcatctaatgaacttgaaaggaatcatcatcaaatgaagtcaaatggaatcaccaaatcgacatgaatggaatcatcattgaatagaatcgaatggaatgattgaatgggctagaatggaatcatctttgaatggaatcaaatggaatcatcatcgaatggaatcgaatggaaatgtcaaccaattgaatcaaatagaatcatcatggaattgaatcga

SEQ ID NO: 759221 - DNA, 467 bp, Homo sapiens
tgattccattcatttccattcaatgattccattcgagtccatttgatcattctggtagggtccgttcgatgttgattccattggagtgcattcgatgattccattcgagtccattttatgatttgattcgagtcctttcgatgattccattcgattccactcgatgatgatttcattcgagtccattcgacacttccaatcgattccatttgatgtttccattcgagtccaattgatgattccattcaattccattcgatgatgattccgtacgattccattctgtgatgattccatgtgattgcattcmatgatgattcctttcgattgcattcgattatgattcatttcgtgttcattctatggttccacaggtttccattcgatgacgtttccgttcgtgtccattccattattccattctatttcatttgatgatgattccattcgattccattcattggtga

SEQ ID NO: 759222 - DNA, 557 bp, Homo sapiens
ttccattcgatgattccttccgattccattagatgatgatggcattcgattcctttcaatcattccctttgattccattcaaaggtgatttcattcaagtccattcgataattgcattcgattccattctatgatgattccattcgagtccatttgatgattccattcaattcaagtcaatgatgattccattcaattccaytcgatgattccattggattccattcgatgatgattccattcaaatccattcgataattcaattcaagtccattcgatgatgattccaatcgaatccattcaaagattccattcaattccattcgatgatgattcccttagattccattcgatgattccacttgattccatttacgatgattccattcgattccatgtgatgaatccattcaattctattcaatgatgtttccatttgattccattggaccatgattgcctttgattccattcaatgattccattcggttccatttgatgatgattccgttcgattccatttcattattccatttgattccattggatgagtccat

SEQ ID NO: 759223 - DNA, 557 bp, Homo sapiens
ttccattcgatgattccttccgattccattagatgatgatggcattcgattcctttcaatcattccctttgattccattcaaaggtgatttcattcaagtccattcgataattgcattcgattccattctatgatgattccattcgagtccatttgatgattccattcaattcaagtcaatgatgattccattcaattccactcgatgattccattggattccattcgatgatgattccattcaaatccattcgataattcaattcaagtccattcgatgatgattccaatcgaatccattcaaagattccattcaattccattcgatgatgattcccttagattccattcgatgattccacttgattccatttacgatgattccattcgattccatgtgatgawtccattcaattctattcaatgatgtttccatttgattccattggaccatgattgcctttgattccattcaatgattccattcggttccatttgatgatgattccgttcgattccatttcattattccatttgattccattggatgagtccat

SEQ ID NO: 759224 - DNA, 591 bp, Homo sapiens
attcgattatgatttcattcaattccattcaataatgattcccttcgagtccattcgatgattccattcgattccattcaacgatgatttgattcgtttccattcgatgattccatttgattccacttgatgatgattccattcgagtccatttgatgattccattcgagtctatttatgtattatattcgtgtccacttcatgattccattcaattccatttaatgttgattccatttgattccatttgatgattcagttcgattccttgcaatgattccctacgattcctttctmtgatgattccattcgattccattcattgatgatttcattcgactccattcgatgatgattcctttcgattccatttgacgatgtttccattcgagtccattcgatgatgattctattcaattgtgttctattatgattccattcgatttcattcaatgcttctatttgattccattcgatgatgattccatctctttcccttcgatgattccatttgattccattcagtgatgattccatttgattccatctgatgatgatttcacttgattcctttcaatgatgattcaattc

SEQ ID NO: 759225 - DNA, 591 bp, Homo sapiens
tattatattcgtgtccacttcatgattccattcaattccatttaatgttgattccatttgattccatttgatgattcagttcgattccttgcaatgattccctacgattcctttctctgatgattccattcgattccattcattgatgatttcattcgactccattcgatgatgattcctttcgattccatttgacgatgtttccattcgwgtccattcgatgatgattctattcaattgtgttctattatgattccattcgatttcattcaatgcttctatttgattccattcgatgatgattccatctctttcccttcgatgattccatttgattccattcagtgatgattccatttgattccatctgatgatgatttcacttgattcctttcaatgatgattcaattcaagtccattcgatgattccattggagtccaaacgatcattccgttcgattccattcaatggtgattccattcatgtccattcgatgaatccattcaattccattcgatgatgactccattcgagtacattcgatgattccatttgattccatttgaagatgattccattcaattccattc

SEQ ID NO: 759226 - DNA, 591 bp, Homo sapiens
attcgattatgatttcattcaattccattcaataatgattcccttcgagtccattcgatgattccattcgattccattcaacgatgatttgattcgtttccattcgatgattccatttgattccacttgatgatgattccattcgagtccatttgatgattccattcgagtctatttatgtattatattcgtgtccacttcatgattccattcaattccatttaatgttgattccatttgattccatttgatgattcagttcgattccttgcaatgattccctacgattcctttctctgatgattccattcgattccattcattgatgatttcattcgactccattcgatgatgattcctttcgattccatttgacgatgtttccattcgagtccattcgatgatgattctattcaattstgttctattatgattccattcgatttcattcaatgcttctatttgattccattcgatgatgattccatctctttcccttcgatgattccatttgattccattcagtgatgattccatttgattccatctgatgatgatttcacttgattcctttcaatgatgattcaattc

SEQ ID NO: 759227 - DNA, 419 bp, Homo sapiens
atcatcgaatggagtcgaatggaaacatcactgaatggaatcaaatgaaatcaccgaattgaatcaaatggaatgatcatcaaagggaatcaaaggaaatcatcgaatgggatcaactggagtcatcgaatggaatcgagtggaatcatcgaatggatttgaacaraatcaacatcgaatggaatcgaatggaatcatcgaatggactcgaatggaatcatctaatgcactcgaatggaataatcatcgaatgtaatcgaatggactcatccaatggaatcaaatggaataatgaaatggaatcgaacggaatcatcatcaaaaggaaccgaatggagtcattgaatggaatcaaaggcaatcatggtcgaatggaatcaaatggaaacagcattgaatagaattgaatggaatcatca

SEQ ID NO: 759228 - DNA, 543 bp, Homo sapiens
atcgaatgcactccaatggaatcaacatctaatggaccctaccggaatgatcaaatggactcgaatggaatcattgaatggaaatgaatggaatcattggttggactcaaatggaattatcgaacaggctcaaatggaatcactgaatggacacggatgtaatcattatcgaatggaatcgaatggaatcatcgaatggaattgatcgaaatcattaacgaatggaatcaaatgawatcatcaaatggaatcgaatccaatcatcatcgaatggaatcgaatggaatcatcatcgaatagaatagaatggaatcatcacatggaatcgaatggaatcatcgtcgcatggaatcgaatggaatcatcaaatggaatctaatggaatcatcatcaaatggattcaaatggaatcactttcgaatagaatcgaatggaatcattgaatggaatcatcatcaaatggagtccagaggaatcactgaactgaatggaattatcattgaatggaatcgaatagaatcatcgcatggaatcaaatggaat

SEQ ID NO: 759229 - DNA, 646 bp, Homo sapiens
cccattcaatcattccattcgattctattcaatgatgattccattcatgtcgatttggtgattccatttgacttcatttgatgatgattcctttcaagttcattagatgattccattcgattccatttgatgatgatcccattcgagtccattcagtgattccactcgtttccattccatgatgattccattccwttccattcaatgattccattcgattccgtttgatgatgatttcattcgagtccatttgatgattccatttgattccattcgatgatgattacattcgagtccatacgatgattccactcaattccatatgatgatgattccattcgattccattcgatgattccattctattctattcaatggtgattccattcgagtacattagatgattccattcgattccattcaatgatgattctatttgtgtcccttagatgattccacatgattccattagatgatgatactatttgagcccatccaatgattcccttcgattccattcgatgaggattccattcgattcaattcattggtgattctattcaattcaattctttgattccattccattccattcgacaatgattccattcgatttctttcgatgattccactcgattccacttga

SEQ ID NO: 759230 - DNA, 646 bp, Homo sapiens
cccattcaatcattccattcgattctattcaatgatgattccattcatgtcgatttggtgattccatttgacttcatttgatgatgattcctttcaagttcattagatgattccattcgattccatttgatgatgatcccattcgagtccattcagtgattccactcgtttccattccatgatgattccattcctttccattcaatgattccattcgattccgtttgatgatgatttcattcgagtccatttgatgattccatttgattccattcgatgatgattacattcgagtccatacgatgattccactcaattccatatgatgatgattccattcgattccattcgatgattccattctattctattcaatggtgattccattcgagtacattagatgattccattcgattccattcaatgatgattctatttgtgtcccttagatgrttccacatgattccattagatgatgatactatttgagcccatccaatgattcccttcgattccattcgatgaggattccattcgattcaattcattggtgattctattcaattcaattctttgattccattccattccattcgacaatgattccattcgatttctttcgatgattccactcgattccacttga

SEQ ID NO: 759231 - DNA, 611 bp, Homo sapiens
agggactcgaatgaaatcatcgaatggactctaatagaatcaccatcaaatgaaattgaatgggatcatcatcaaatgtaattgaatggtatcattatcaaaagaaatccagtggaatcaccaaatggactcgactgtaatgattaaatrgactcgaatggaatcaagaaatggaatcatcgaatggcctcgaatggaattgttgaatggattcgaatggagtcattgaatggactctagtagaatcataatcaaatggaattaaatggaatcataaaatggactcgaatggaatcattggatgtactcgaatgaaatcatcgaatgcactccaatggaatcatcatcgaatggaatcaaatggaatcctcgaatagaatcagatggaatcatcaaatggaatcgaatgtaatcatcatcaaatggaatagaatggagtgatcgaatggaatcgatggcaatcatcatccactggaatcaaacggaatcattgaatggaatcgaatggaatcaatgtcaagtggaatcgagtggaatcatcgaaagaaatcgaatggaatcattgtcgaatggaatggaatggaatcaaagaattgaattgaatagaatca

SEQ ID NO: 759232 - DNA, 611 bp, Homo sapiens
agggactcgaatgaaatcatcgaatggactctaatagaatcaccatcaaatgaaattgaatgggatcatcatcaaatgtaattgaatggtatcattatcaaaagaaatccagtggaatcaccaaatggactcgactgtaatgattaaatagactcgaatggaatcaagaaatggaatcatcgaatggcctcgaatggaattgttgaatggattcgaatggagtcattgaatggactctagtagaatcataatcaaatggaattaaatggaatcatmaaatggactcgaatggaatcattggatgtactcgaatgaaatcatcgaatgcactccaatggaatcatcatcgaatggaatcaaatggaatcctcgaatagaatcagatggaatcatcaaatggaatcgaatgtaatcatcatcaaatggaatagaatggagtgatcgaatggaatcgatggcaatcatcatccactggaatcaaacggaatcattgaatggaatcgaatggaatcaatgtcaagtggaatcgagtggaatcatcgaaagaaatcgaatggaatcattgtcgaatggaatggaatggaatcaaagaattgaattgaatagaatca

SEQ ID NO: 759233 - DNA, 611 bp, Homo sapiens
agggactcgaatgaaatcatcgaatggactctaatagaatcaccatcaaatgaaattgaatgggatcatcatcaaatgtaattgaatggtatcattatcaaaagaaatccagtggaatcaccaaatggactcgactgtaatgattaaatagactcgaatggaatcaagaaatggaatcatcgaatggcctcgaatggaattgttgaatggattcgaatggagtcattgaatggactctagtagaatcataatcaaatggaattaaatggaatcataaaatggactcgaatggaatcattggatgtactcgaatgaaatcatcgaatgcactcsaatggaatcatcatcgaatggaatcaaatggaatcctcgaatagaatcagatggaatcatcaaatggaatcgaatgtaatcatcatcaaatggaatagaatggagtgatcgaatggaatcgatggcaatcatcatccactggaatcaaacggaatcattgaatggaatcgaatggaatcaatgtcaagtggaatcgagtggaatcatcgaaagaaatcgaatggaatcattgtcgaatggaatggaatggaatcaaagaattgaattgaatagaatca

SEQ ID NO: 759234 - DNA, 516 bp, Homo sapiens
tcaattccatgatgattctatttgattcaattagatgatgtttccattcgaatccattccatgattattccattggaatccattcggcgatgattccatatgagtcaattcaatgatgattccatatgggtccgttcgatgataattccatttgatttcattcgatgcttctattcaawtccagttgatgatgattccgttggagtccatacgatgattccatttgatttcatttgatgatgattccattcgattccattcgatgatgattacattggattccattctatgattccattcaattccattcgttgatgattcgattcccttgaatgatgattccacttgagttcattcaatgattctattcgattccgttcgatggtgattcaattctcttatattggatgattccactcgattccatttgatgattattccattggagtccacttagtgaatcctttagattctactcgaagatgattccattcgagtccattctttgataccatt

SEQ ID NO: 759235 - DNA, 516 bp, Homo sapiens
tcaattccatgatgattctatttgattcaattagatgatgtttccattcgaatccattccatgattattccattggaatccattcggcgatgattccatatgagtcaattcaatgatgattccatatgggtccgttcgatgataattccatttgatttcattcgatgcttctattcaaatccagttgatgatgattccgttggagtccatacgatgattccatttgatttcatttsatgatgattccattcgattccattcgatgatgattacattggattccattctatgattccattcaattccattcgttgatgattcgattcccttgaatgatgattccacttgagttcattcaatgattctattcgattccgttcgatggtgattcaattctcttatattggatgattccactcgattccatttgatgattattccattggagtccacttagtgaatcctttagattctactcgaagatgattccattcgagtccattctttgataccatt

SEQ ID NO: 759236 - DNA, 449 bp, Homo sapiens
attcgatgattccatttgattccatgcgtcggtgagcaattcgattcaattccatgatgattctatttgattcaattagatgatgtttccattcgaatccattccatgattattccattggaatccattcggcgatgattccatatgagtcaattcaatgatgattccatatgggtccgttcgatgataattccattwgatttcattcggtgcttctattcaattccagtcgatgatgattccgttggagtccatacgatgattccatttgatttcatttcatgatgattccattcgatgacgattacattggattccattctatgattccattcaattccattcgttgatgattcgattccattcaatgatgattccatttgagttcattcgatgattctattcgattccgttcgatggtgattcaattctattatattggatgattc

SEQ ID NO: 759237 - DNA, 516 bp, Homo sapiens
attccatgcgatgattctcttcgattccattcaatgataattccattcaattcagtgattcctctggactccatttgatgatgattccattcaatgattccattcgattctattcgaaaatgattccatttgaatccatttgatgatgattccattagattccatttgatgattccattcgattccattcgacgatgattccattcgattccgtttgatgattccattctattctattcgatgatgattccattcgattccattcgatgatgattggattcgattccattkgatgatttcatttgattccattcgttaatgatttcgatcaattccatttgatgattccattcgattccattcgataatgattacatccgagtccattcgatgattccctttgagcctgttcgataattccatttgagtccaaccaatgattccattcatttccattcaatgattccattcgagtccatttgatcattccggtagggtccattcgatgttgattcc

SEQ ID NO: 759238 - DNA, 516 bp, Homo sapiens
attccatgcgatgattctcttcgattccattcaatgataattccattcaattcagtgattcctctggactccatttgatgatgattccattcaatgattccattcgattctattcgaaaatgattccatttgaatccatttgatgatgattccattagattccatttgatgattccattcgattccattcgacgatgattccattcgattccgtttgatgattccattctattctattcgatgatgattccattcgattccattcgatgatgattggattcgattccattggatgatttcatttgattccwttcgttaatgatttcgatcaattccatttgatgattccattcgattccattcgataatgattacatccgagtccattcgatgattccctttgagcctgttcgataattccatttgagtccaaccaatgattccattcatttccattcaatgattccattcgagtccatttgatcattccggtagggtccattcgatgttgattcc

SEQ ID NO: 759239 - DNA, 620 bp, Homo sapiens
cattcaatccttctattcgattccatttgatgatgattccatctgaatccattctccgattccattcgatttcattcgatgcttctatttgatttcattcgaagatgattcctttcaattccattcattaattccatttgattccattcgatgatgattccatccaattccattggatgatgattccattcgagtccattcgatgattccgttctaatccrttctatgattccattcgagtccattcgatgattccattcgattccattcagtgatgattccatttgattccatctgatgatgatttcatttgattccattcgatgatgattccattggagtccattgaatgattcaattcaattccattccatgtggattccattcgaattcattcgattattccattcaaatcccttcgttgattccatctgattccacttgacgatgattccattcaagtccaatcgatgattccattcggttccattcaatgattccattcgagtccatttatgtattatattcgtgtccacttgatgactcactccattcaattccatttaatgatgattccatttgattccatttgatgattcagttcgattccttacaatgat

SEQ ID NO: 759240 - DNA, 643 bp, Homo sapiens
tgatgatgattccattcgagtccattcgatgataccattcaattccattcgatgatcattccattcgaatccatttgatgattccactcaattccatttgatgactcctttcattcccattcgatgattcccttcagttccaattggatgatctttccatttgattcaatatggtgactccattctattatattcaatgatgattccattcgactccattagatgatgactccattccattccattcgattgtgatttcattcgattccattcgaagatgattccattcgagtccatttgatgattccattcgattccattcaatgatgattccactcaaatccattggatgattccattcgtttccaattggtgatttcattagattccattcgaggatgattctattcgagtccattcaatgattccattggattccgtttgataatgattccattagagttcattcgatgattcccttcgagtccattcgattattycttttgattccatttgatgatgattccattcgattccattcaatgattccattccattccattcgatgatgattccattcgataatgattacattcgagcccatgtgatgattccattagattctattcaatgatgattccat

SEQ ID NO: 759241 - DNA, 486 bp, Homo sapiens
attctattcgagtccattcaatgattccattggattccgtttgataatgattccattagagttcattcgatgattcccttcgagtccattcgattatttcttttgattccatttgatgatgattccattcgattccattcaatgattccattccattccattcgatgatgattccattcgataatgattacattcgagcccatktgatgattccattagattctattcaatgatgattccattcgaccacattcgatgatggcattcgagtccattcgatgatttcactcgattccacttgatgatgattccttttgagtccatttgatgattacattcgagtccatgagatgactccattcgattccatttcatgatgatgcaattcgaggctattcgatcatcccattttagtgcattcggtgattctcttttattacattcgatgagggctccattcgagtccattcaatgattccattagat

SEQ ID NO: 759242 - DNA, 552 bp, Homo sapiens
tcgagcccatgtgatgattccattagattctattcaatgatgattccattcgaccacattcgatgatggcattcgagtccattcgatgatttcactcgattccacttgatgatgattccttttgagtccatttgatgattacattcgagtccatgagatgactccattcgattccatttcatgatgatgcaattcgaggctattcgatcatcccattttagtgcattcggtgattctcttttatwacattcgatgagggctccattcgagtccattcaatgattccattagattccactcgatgatgattccatttgagtccattcaaagattcctttcgagtccattcgataattctattggattccactaggtgatgattcctttcgagtcaattcgatgattcctttcaagtgccttcaatgattccattcgattccattcgatgacgattcatttcaagtccattcaatggttccattctgttgaatttgatggttccatttgattccattcgatgatgattccattcgtgtccattggatgattcca

SEQ ID NO: 759243 - DNA, 615 bp, Homo sapiens
catttgatgaatccattcaatgcttccattcgagtccattcgatgattccattcgattccattccatgaagattccattcgagtacatttgatgattccatttaattccataggatgatgattctattagggtccgttgactattccattcaattccattcgaagaytccattcgagtccactcgatgattctatttgattccatttgataattccattcgattccatttgatgttgattccattcgagtccattcgatcattattacatttgattctattcgatgattccattcgattccatttgatgaggattccattcgagaccatttgatgattccattcaattccattggatgattccaatattttccattagatgatgattccattcgattccattcaatgatgattccatcagaatccattcgatgatgactccttttgcttccattcaatgatcattacattcggttccattcgatgatgattcctttggattccattcgatgatgcttccattcgattccatttgatgatgattcttttcgattccatttgatgatgattccatttgattccattcgatggtgattccatttgatgattccattcg

SEQ ID NO: 759244 - DNA, 624 bp, Homo sapiens
attccattcgaattcattcgattattcccttcaaatcccttcgttgattccatctgattccacttgacgatgattccattcaagtccaatcgatgattccattcggttccattcaatgattccattcgagtccatttatgtattatattcgtgtccacttgatgactccattcaattccatttaatgatgattccatttgattccatttgatgattcagttcgattccttacaatgattccctacgattcctttctatgatgattccattcgattccattcattgatgattccattcgactccattcratgatgattcctttcgattccatttgacgatgtttccatttgagtccattcgatgatgattccattggtatccattcgacgatgattccatatgagtcaattcgatgatgattccatacgagtccgttggatgataattccatttgatttcattcaatccttctattcgattccatttgatgatgattccatctgaatccattctccgattccattcgatttcattcgatgcttctatttgatttcattcgaagatgattcctttcaattccattcattaattccatttgattccattcgatgatgattccatccg

SEQ ID NO: 759245 - DNA, 523 bp, Homo sapiens
atttcattccattcgatgatgattccattcgattccattcgatgattccatttgattccattcgacggtgagcaattcgattcaattccatgatgattctatttgattcagttagatgatgtttccattcgaatccattccatgattattccattggaatccattcggcgatgattccatatgagtcaattcaatgatgattccatatgggtcagttcgatgataattccatttgatttcattcgatgcttctattcaattccagtcgatgatgattccgttggagtccatacgatgactccatttgatttcatttgatgatgattccattcgattycattcgatgactccattctgttccattcgatgatgattccattcgagtccattcgatgattccattcgagtccatttcatgattccattgggttcaattcgatgatgattacactggattccattctatgattccattcaattccattcgttgatgattcgattccattcaatgatgattccattt

SEQ ID NO: 759246 - DNA, 540 bp, Homo sapiens
aagtccattcgataattgcattcgattccattctatgatgattccattcgagtccatttgatgattccattcaattcaagtcaatgatgattccattcgattccattcgatgattccattggattccattcgatgatgattccattcaaatccattcgataattcaattcaagtccattcgatgatgattaaaatcgaatccattcaaagattccattcagttccattcgatgattcccttagattccattcgatgattccacttgattgcatttacgrtgattccattcgattccatgtgatgattccattcaattctattcaatgctgtttccatttgattccattcgaccatgattgcctttgattccattcaatgactccattcggttccttttgatgatgattccgttcgattccatttcattattccatttgattccattggatgagtccattcgattacattcgatgattattccattcgagtgcattagatgattccattcgagtccattcgatgattccattcgattccat

SEQ ID NO: 759247 - DNA, 453 bp, Homo sapiens
ttgattgcatttacgatgattccattcgattccatgtgatgattccattcaattctattcaatgctgtttccatttgattccattcgaccatgattgcctttgattccattcaatgactccattcggttccttttgatgatgattccgttcgattccatttcattattccatttgattccattggatgagtccattcgattacattcgatgattattccattcgagtgcattagatgattccattcgagtccattcgatgattccattcgattccattcgatgttgattytgttcaaatccattcgatgattccactcgattccattcgatgactccagttgatcccattcgatgatttcctttgattccctttgatgatcattccatttgattcaattcggtgatttcatttgattccattcagtgatgtttccattcgactccattcgatg

SEQ ID NO: 759248 - DNA, 643 bp, Homo sapiens
attcaaatcccttcgttgattccatctgattccacttgacgatgattccattcaagtccaatcgatgattccattcggttccattcaatgattccattcgagtccatttatgtattatattcgtgtccacttgatgactccattcaattccatttaatgatgattccatttgattccatttgatgrttcagttggattccttacaatgattccctacgattcctttctatgatgattccattcgattccattcattgatgattccattcgactccattcaatgatgattcctttcgattccatttgacgatgtttccatttgagtccattcgatgatgattccattggtatccattcgacgatgattccatatgagtcaattcgatgatgattccatacgagtccgttggatgataattccatttgatttcattcaatccttctattcgattccatttgatgatgattccatctgaatccattctccgattccattcgatttcattcgatgcttctatttgatttcattcgaagatgattcctttcaattccattcattaattccatttgattccattcgatgatgattccatccgattccattggatgatgattccattcgagtccattcgatgattccgtt

SEQ ID NO: 759249 - DNA, 406 bp, Homo sapiens
ttcaatgattccattcgagtccattggttaatgcctttcgagtccttttgatcactacattcgagtccattcaatgattctattcgattccattccatgatgattccattcgagttcattcgatgattgcattcgagtccatttgatgattccatawgattccattcgacaatgattccattcgtgtccatttgatgattccattcatttcctatcgatgaagattccattcgagtgtattcgatgattccattcaaatccattcgatgatgattccattccagtccattcgatcattccacttgattccatttgatgactattccattcaaatccatttgatgattccattcgattccattcgatgttaccattccagtatatacgatgattccactcgattcca

SEQ ID NO: 759250 - DNA, 608 bp, Homo sapiens
acatgaatggaatcaccattgaatggaatcgaacggaatgatcgtttggactccaatggaatcatcgaatggacttgaattgaatcatcattgaaaggaatcaagtgaaatcatcatcagatggaatcaaagggaatcatcactgaatggaatcaaatggaatcatcgaagggaaagagatggaatcatcatcgaatggaatcaaatagaagcattgaatgaaatcgaatggaatcataatagaacagaattgaatagaatcatcatcraatggactcgaatggaaacatcgtcaaatggaatcgaaaggaatcatcatcgaatggaatcgaatgaaatcatcaatgaatggaatcgaatggaatcatcatagaaaggaatcgtagggaatcattgcaaggaatcgaactgaatcatcaaatggaatcaaatggaatcaacattaaatggaattgaatggaatcatgaagtggacacgaatataatacataaatagactcgaatggaatcatcatcaagtggaatcaaatggaatcatcgaatggaaacgaatcaaatcatcgttgaatggaatcgaatggaatcatcgaatggactcgaagggaatc

SEQ ID NO: 759251 - DNA, 608 bp, Homo sapiens
acatgaatggaatcaccattgaatggaatcgaacggaatgatcgtttggactccaatggaatcatcgaatggacttgaattgaatcatcattgaaaggaatcaagtgaaatcatcatcagatggaatcaaagggaatcatcactgaatggaatcaaatggaatcatcgaagggaaagagatggaatcatcatcgaatggaatcaaatagaagcattgaatgaaatcgaatggaatcataatagaacagaattgaatagaatcatcatcgaatggactcgaatggaaacatcgtcaaatggaatcgaaaggaatcatcatcgaatggartcgaatgaaatcatcaatgaatggaatcgaatggaatcatcatagaaaggaatcgtagggaatcattgcaaggaatcgaactgaatcatcaaatggaatcaaatggaatcaacattaaatggaattgaatggaatcatgaagtggacacgaatataatacataaatagactcgaatggaatcatcatcaagtggaatcaaatggaatcatcgaatggaaacgaatcaaatcatcgttgaatggaatcgaatggaatcatcgaatggactcgaagggaatc

SEQ ID NO: 759252 - DNA, 476 bp, Homo sapiens
atcgaatggaatctaagggaatcatcatcgaatggaattgaatggaatctttgaatggattcgattggaatcatcatcgaatggccttgaattgaattatcgaatggatttgaatggaatcatcatcgaatggaatccaatggaatcatcgagtggaattgaatggaatcatcattgacttgaattgaatggaatcatcaaatggactcgaatggaatcatcatagaatggaatcgaatgcaattatcgaatggacttgaatgaaatcacctttgaatggaatcaaagggaatgattgaaaggaatcgaatgccatcatcatcgaatggaatcgraaggaatcatcgaatggaattgaatggaatcaccattgaatggactcgaatggaatcatcatggtatggaatcgaatgggatcatcatcatatggaatcaaatggaatcatcgaatggacacgaatggaatcatcgccaaa

SEQ ID NO: 759253 - DNA, 480 bp, Homo sapiens
ttcgagtccattcaatgattccattggattccgtttgataatgattccattagagttcattcgatgattcccttcgagtccattcgattatttcttttgattccatttgatgatgattccattcgattccattcaatgattccattccattccattcgatgatgattccattcgataatgattacattcgagcccatktgatgattccattagattctattcaatgatgactccattcgaccacattcgatgatggcattcgagtccattcgatgatttcactcgattccacttgatgatgattccttttgagtccatttgatgattacattcgagtccatgagatgactccattcgattccatttcatgatgatgcaattcgaggctattcgatcatcccattttagtgcattcggtgattctcttttattacattcgatgagggctccattcgagtccattcaatgattccattagat

SEQ ID NO: 759254 - DNA, 600 bp, Homo sapiens
attccattcgctgatgtttccgttcaattccattcgatgatgattccattcgattccattcattgaggattccattggattccattcaatgatgattccattctattccattcaatgattgcattcaattccattcaatgattatgccattagagtaaattcaacgattccattcaataccattcgatgatgattccttttgagtccattcaatgatttcattcaagtccatttgatgattcctttcaattccattccatgatgattccattcgagtccattcgatgattccattcgattgcattcgatgattccattatattccattcaacgatgattccattcgagtccattcgatgattccattagagtacatttaatgattgctttgttttcaattcgaagatgattacattggattccattctaygattccattcgattgcattcattgatgattccacccaattccattcgatgatgattccattcgatttcaatgattctactcgattccattcaatgatgattcaattctattccgtttgatgattccattagattccattctatgatgattccattcgagtccattcgaag

SEQ ID NO: 759255 - DNA, 556 bp, Homo sapiens
attccattcgatgacgattcatttcaagtccattcaatggttccattctgttgaatttgatggttccatttgattccattcgatgatgattccattcgtgtccattggatgattccattcgattcctttcgaggaagattccattcgactccattcgatgattccgttcgattccattccatgatgattccatttgattccattccatgattccattcgataccattcgatgatgattccattcgactccatttgatgaatccattcaatgcttccattcgagtccattcgatgattccattcgattccattccatgmagattccattcgagtacatttgatgattccatttaattccataggatgatgattctattagggtccgttgactattccattcaattccattcgaagattccattcgagtccactcgatgattctatttgattccatttgataattccattcgattccatttgatgttgattccattcgagtccattcgatcattattacatttgattctattcgatgattccattcgattccatttga

SEQ ID NO: 759256 - DNA, 556 bp, Homo sapiens
attccattcgatgacgattcatttcaagtccattcaatggttccattctgttgaatttgatggttccatttgattccattcgatgatgattccattcgtgtccattggatgattccattcgattcctttcgaggaagattccattcgactccattcgatgattccgttcgattccattccatgatgattccatttgattccattccatgattccattcgataccattcgatgatgattccattcgactccatttgatgaatccattcaatgcttccattcgagtccattcgatgattccattcgattccattccatgaagattccattcgagtacatttgatgattccatttaattccataggatgatgaytctattagggtccgttgactattccattcaattccattcgaagattccattcgagtccactcgatgattctatttgattccatttgataattccattcgattccatttgatgttgattccattcgagtccattcgatcattattacatttgattctattcgatgattccattcgattccatttga

SEQ ID NO: 759257 - DNA, 510 bp, Homo sapiens
ggatgattccattcgattcctttcgaggaagattccattcgactccattcgatgattccgttcgattccattccatgatgattccatttgattccattccatgattccattcgataccattcgatgatgattccattcgactccatttgatgaatccattcaatgcttccattcgagtccattcgatgattccattcgattccattccatgaagattccattcgagtacatttgatgattccatttaattccataggatgatgattctattagggtccgttgactattccattcaattccattcgaagawtccattcgagtccactcgatgattctatttgattccatttgataattccattcgattccatttgatgttgattccattcgagtccattcgatcattattacatttgattctattcgatgattccattcgattccatttgatgaggattccattcgagaccatttgatgattccattcaattccattggatgattccaata

SEQ ID NO: 759258 - DNA, 609 bp, Homo sapiens
atgaatccattcaatgcttccattcgagtccattcgatgattccattcgattccattccatgaagattccattcgagtacatttgatgattccatttaattccataggatgatgattctattagggtccgttgactattccattcaattccattcgaagattccattcgagtccactcgatgattctatttgattccatttgataattccattcgattccatttgatgttgattccattcgagtccattcgatcattattacatttgattctattcgatgattccattcgattccatttgatgaggattccattcgagaccatttgatgattccattcaattccattggatgattccaatattttccattagatgatgattccattcgattccattcaatgatgattccatcagaatccattcgatgatgactccttttgcttccattcaatgatcattacattcggttccattcgatgatgattcctttggattccattcgatgatgcttccattcgattccatttgatgatgattcttttcgattccatttgatgatgattccatttgattccattcgatggtgattscatttgatgattccattcg

SEQ ID NO: 759259 - DNA, 595 bp, Homo sapiens
atcatcatcgaatggactcgaatggaaacatcgtcaaatggaatcgtaaggaatcatcatcgaatggagtcgaatgaaatcatcaatgaatggaatcgaatggaatcatcatagaaaggaatcgtagggaatcattgcaaggaatcgaactgaatcatcaaatggaatcaaatggaatcaacattaaatggaattgaatggaatcatgaagtggacacgaatayaatacataaatagactcgaatggaatcatcaaatggactcgaatggaatcatcatcaagtggaatcaaatggaatcatcgaatggaaacgaatcaaatcatcgttgaatggaatcgaatggaatcatcgaatggactcgaagggaatcattattgaatggaattgaatgaaatcataatcgaatggattcgaatggaatcatcatcgaatacagtcgaatggaaacatcactgaatggaatgaaatgaaatcaccgaattgaatcaaatagaatgatcatcaaagggaatcacaggaaatcatcgaatgggatcaaatggagtcatcgaatggaatcgagtggaatcatcaaatggatttgaacagaatca

SEQ ID NO: 759260 - DNA, 637 bp, Homo sapiens
cgtaaggaatcatcatcgaatggagtcgaatgaaatcatcaatgaatggaatcgaatggaatcatcatagaaaggaatcgtagggaatcattgcaaggaatcgaactgaatcatcaaatggaatcaaatggaatcaacattaaatggaattgaatggaatcatgaagtggacacgaatataatacataaatagactcgaatggaatcatcaaatggactcgaatggaatcawcatcaagtggaatcaaatggaatcatcgaatggaaacgaatcaaatcatcgttgaatggaatcgaatggaatcatcgaatggactcgaagggaatcattattgaatggaattgaatgaaatcataatcgaatggattcgaatggaatcatcatcgaatacagtcgaatggaaacatcactgaatggaatgaaatgaaatcaccgaattgaatcaaatagaatgatcatcaaagggaatcacaggaaatcatcgaatgggatcaaatggagtcatcgaatggaatcgagtggaatcatcaaatggatttgaacagaatcaacatcgaatggaatcgaatggaatcatcgaatggactcgaatgcaatcatctaatgcactcgaatggaataatcatcgaatgtaat

SEQ ID NO: 759261 - DNA, 615 bp, Homo sapiens
aagtggaatcaaatggaatcatcgaatggaaacgaatcaaatcatcgttgaatggaatcgaatggaatcatcgaatggactcgaagggaatcattattgaatggaattgaatgaaatcataatcgaatggaktcgaatggaatcatcatcgaatacagtcgaatggaaacatcactgaatggaatgaaatgaaatcaccgaattgaatcaaatagaatgatcatcaaagggaatcacaggaaatcatcgaatgggatcaaatggagtcatcgaatggaatcgagtggaatcatcaaatggatttgaacagaatcaacatcgaatggaatcgaatggaatcatcgaatggactcgaatgcaatcatctaatgcactcgaatggaataatcatcgaatgtaatcgaatggactcatccaatggaatcaaatggaataatgaaatggaatcgaacggaatcatcatcaaatggaaccgaatggaatcattgaatggaatcaaaggcaatcatggtccaatggaatcaaatggaaacatcattgaatagaattgaatggattcatcacatggaatcgaatggaatcatcgtaaatggaatcaagtggaatcatcgaatg

SEQ ID NO: 759262 - DNA, 595 bp, Homo sapiens
atcatcatcgaatggactcgaatggaaacatcgtcaaatggaatcgtaaggaatcatcatcgaatggagtcgaatgaaatcatcaatgaatggaatcgaatggaatcatcatagaaaggaatcgtagggaatcattgcaaggaatcgaactgaatcatcaaatggaatcaaatggaatcaacattaaatggaattgaatggaatcatgaagtggacacgaatataatacataaatagactcgaatggaatcatcaaatggactcgaatggaatcatcatcaagtggaatcaaatggaatcatcgaatggaaacgaatcaaatcatcgttgaatggaatcgaatggaatcatcgaatggactcgaagggaatcattattgaatggaattgaatgaaatcataatcgaatggattcgaatggaatcatcatsgaatacagtcgaatggaaacatcactgaatggaatgaaatgaaatcaccgaattgaatcaaatagaatgatcatcaaagggaatcacaggaaatcatcgaatgggatcaaatggagtcatcgaatggaatcgagtggaatcatcaaatggatttgaacagaatca

SEQ ID NO: 759263 - DNA, 656 bp, Homo sapiens
aatcgagtggaatcatcatcgaatacaatcgaatggaatcatcaaatggaatcaccatcgaatggaatcaaatggaatcatcatcaaatggaatcgaaaagaatcatcatcaaatggaatcgaatggaagcatcatcgaatggaatccaaaggaatcatcatcgaatggaaccgaatgtaatgatcattgaatggaagcaaaaggagtcatcatcgaatggattctgatggaatcatcattgaatggaatcgaatggaatcatcatctaatggaaaatattggaatcatccaatggaattgaatggaatcatcaaatggtctcgaatggaatcctcatcaaatggaatcgaatggaatcatcgaatagaatcaaatgtaataatgatcgaatggactcgaatggaatcaacatcaaatggaatcgaatggaattatcaaatggaatcaaatagaatcatcgagtggactcgaatggartcttcgaatggaattgaatggaatagtcaacggaccctaatagaatcatcatcctatggaattaaatggaatcatcaaatgtactcgaatggaatcttcatggaatggaatcgaatggaatcatcgaatggactcgaatggaagcattgaatggattcatcaaatggagtcgaatgga

SEQ ID NO: 759264 - DNA, 637 bp, Homo sapiens
aatcattgaaggcacttgaaaggaatcatcgaattgactcgaaaggaatcatcacctagtggaatccaatagaattatcgaatggactcgaaaggaatctttgaatggactcaaatggaatcatcatcgagtggaatctaatggratcattgaatggactcgaatggagccctcatcgaatgtaataaaagagaatcaccgaatgcactaaaatgggatgatcgaatagcctcgaattgcatcatcatgaaatggaatcgaatggagtcatctcatggactcgaatgtaatcatcaaatggactcaaaaggaatcatcatcaagtggaatcgagtgaaatcatcgaatggactcgaatgccatcatcgaatgtggtcgaatggaatcatcattgaatagaatctaatggaatcatcacatgggctcgaatgtaatcattatcgaatggaatcatcatcgaatggaatggaatggaatcattgaatggaatcgaatggaatcatcatcaaatggaatcaaaagaaataatcgaatggactcgaagggaatcatcgaatgaactctaatggaatcattatcaaacggaatccaatggaatcattgaatggactcgaatagaatcatcctcgaatggaat

SEQ ID NO: 759265 - DNA, 491 bp, Homo sapiens
aatctaatggaatcattgaatggactcgaatggagccctcatcgaatgtaataaaagagaatcaccgaatgcactaaaatgggatgatcgaatagcctcgaattgcatcatcatgaaatggaatcgaatggagtcatctcatggactcgaatgtaatcatcaaatggactcaaaaggaatcatcatcaagtggaatcgagtgaaatcatcgaatggactcgaatgccatcatcgaatgtggtcgaatggaatcatcattgaatagaatctaatggaatcatcamatgggctcgaatgtaatcattatcgaatggaatcatcatcgaatggaatggaatggaatcattgaatggaatcgaatggaatcatcatcaaatggaatcaaaagaaataatcgaatggactcgaagggaatcatcgaatgaactctaatggaatcattatcaaacggaatccaatggaatcattgaatggactcgaatagaatcatc

SEQ ID NO: 759266 - DNA, 568 bp, Homo sapiens
aatcaaatggaatcatcgaatggacaagaatggaatcaccgtcaaatggaatcaagtggatcatcgattagaaactaatggaatcattgttgaaagaaatggaatggaatcattgaatggaattgagtggaatcaccaatgaatggaatcgaatggaatcatcatcaaatggaatagaatggaataatggaatggacacgatgtgaaacctgtggaaccatagaatgaacacgaaatgaatcataatcgaatgcaatcgaaaggaatcatcattgaatgcaatcacatggaatcatcacagaatggaatcgtacggaatcatcatcgaatgaaattgaatggaatcatcaattggactcgaatggaawcatcaaatggaatcgattggaagtgtcgaatggactcgaatgaaatcatcatcgcatcgagtggaatcgaatggaatcatcgaaaggactcgaatcaaatcctaaaatggactcgaatggaatcatcgaatgcactccaatggaatcaacatcgaacggaccctaccggaatgatcaaatggactcgaatggaatcattg

SEQ ID NO: 759267 - DNA, 542 bp, Homo sapiens
caaatggaatcaagtggaatgatcgaatggactggaatggaatcatcatcgaatggatttgaatggaatcatcgaatacactcgaatggaatcttcatcgataggaaatgaatggaatcatcaaatggacacgaatggaatcattgtcgaatggaatcatatggaatcatcaaatggactcgaatgcaatcatcgaatgaactcgaatggaatcatcatggaatggaatcgaatagaatcattgaatggactcgaatgtagtgatcaaaaggactcgaaaggcattaacgaatggactcgaatggaatcattgaatggaccctaatggaatcatcatcaaatggaaaagaatggaatcatcaaatggactcgaatggaatcmtcaaatggactcaaatggaatcactgaatggagtcgaatggaatcatcattgaatggaatcaattggaatcattgaataaaatcgaatggaatctcctaatggaatctaacggaataatcatcgaatggaatcaaatggaatcaacgagtggaatcgata

SEQ ID NO: 759268 - DNA, 520 bp, Homo sapiens
gaatcgtcaatgaatggaatcgaatggaataatcagagaatggattcatacggaatcatcatcgaatggaattgaatggaatcatcttcgaatggaattgaatggaatcatcttcaaatggaatcaaatggaatcatcgaatgtactcgaatggagtcatcatmgaatggaattgaacggattcatcgaatggacatgaatggaatcaccattgaatggaatcgaacggaatgatcgtttggactccaatggaatcatcgaatggacttgaattgaatcatcattgaaaggaatcaagtgaaatcatcatcagatggaatcaaatggaatcatcactgaatggaatcaaatggaatcatcgaagggaaagagatggaatcatcatcgaatggaatcaaatagaagcattgaatgaaatcgaatggaatcataatagaacagaattgaatagaatcatcatcgaatggactcgaatggaaacatcgtcaaatggaatcgaaaggaatcatcatcgaatgga

SEQ ID NO: 759269 - DNA, 520 bp, Homo sapiens
gaatcgtcaatgaatggaatcgaatggaataatcagagaatggattcatacggaatcatcatcgaatggaattgaatggaatcatcttcgaatggaattgaatggaatcatcttcaaatggaatcaaatggaatcatcgaatgtactcgaatggagtcatcatagaatggaattgaayggattcatcgaatggacatgaatggaatcaccattgaatggaatcgaacggaatgatcgtttggactccaatggaatcatcgaatggacttgaattgaatcatcattgaaaggaatcaagtgaaatcatcatcagatggaatcaaatggaatcatcactgaatggaatcaaatggaatcatcgaagggaaagagatggaatcatcatcgaatggaatcaaatagaagcattgaatgaaatcgaatggaatcataatagaacagaattgaatagaatcatcatcgaatggactcgaatggaaacatcgtcaaatggaatcgaaaggaatcatcatcgaatgga

SEQ ID NO: 759270 - DNA, 591 bp, Homo sapiens
agtggaatcaaatggaatcatcgaatggaaacgaatcaaatcatcgttgaatggaatcgaatggaatcatcgaatggactcgaagggaatcattattgaatggaattgaatgaaatcataatcgaatggagtcgaatggaatcatcatcgaatacagtcgaatggaaacatcactgaatggaatgaaatgaaatcaccgaattgaatcaaatagaatgatcatcaaagggaatcacaggaaatcatcgaatgggatcaaatggagtcatcgaatggaatcgagtggaatcatcgaatggatttgaacagaatcaacatcgaatggaatcgaatggaatcatcgaatggactcgaatgcaatcatctaatgcactcgaatggaataatcatcgaatgtattcgaayggactcatccaatggaatcaaatggaataatgaaatggaatcgaacggaatcatcatcaaatggaaccgaatggaatcattgaatggaatcaaaggcaatcatggtccaatggaatcaaatggaaacatcattgaatagaattgaatggattcatcacatggaatcgaatggaatcatcgtaaatg

SEQ ID NO: 759271 - DNA, 617 bp, Homo sapiens
cgatgattctattccattccattcgatgatgattcaattctcttccattggatgattccattttattccattcgacgatgactccatttgattccattcaatgatgattccattcgattccattcggtgattccatttgattccattcgacggtgagcaatttgattcaattccataatgattctatttgattcaattagatgatgtttccattcgaatccattcggtgatgattccattggtatccattcgacgatgattccatatgagtcaattcgatgatgattccatacgagtccgttggatgataattccatttgatttcattcaatccttctattcgattccatttgatgatgattccatctgaatccattctccgattccattcgayttcattcgatgcttctatttgatttcattcgaagatgattcctttcaattccgttcattaattccatttgattccattcgatgatgattccatccgattccattggatgatgattccattcgagtccattcgatgattccgttctaatccattctatgattccattcgagtccattcgatgattccattcgattccattcagtgatgattccatttgattcca

SEQ ID NO: 759272 - DNA, 637 bp, Homo sapiens
atcccttcgttgattccatctgattccacttgacgatgattccattcaagtccaatcgatgattccattcggttccattcaatgattccattcgagtccatttatgtattatattcgtgtccacttgatgactccattcaattccatttaatgatgattccatttgattccatttgatgattcagttcgattccttacaatgattccctacgattcctttctatgatgattccattcgattccattcattgatgattccattcgactccattcaatgatgattcctttcgattccatttgacgatgtttccatttgagtccattcgatgatgattccattggtatccattcgacgatgattccatakgagtcaattcgatgatgattccatacgagtccgttggatgataattccatttgatttcattcaatccttctattcgattccatttgatgatgattccatctgaatccattctccgattccattcgatttcattcgatgcttctatttgatttcattcgaagatgattcctttcaattccattcattaattccatttgattccattcgatgatgattccatccgattccattggatgatgattccattcgagtccattcgatgattccgtt

SEQ ID NO: 759273 - DNA, 528 bp, Homo sapiens
atggaatcatcttcgaatggaattgaatggaatcatcttcaaatggaatcaaatggaatcatcgaatgtactcgaatggagtcatcatcgaatggaattgaatggattcatcgaatggacatgaatggaatcaccattgaatggaatcgaacggaatgatcgtttggactccaatggaatcatcgaatggacttgaattgaatcatcattgaaaggaatcaagtgaaatcatcatcagatggaatcaaatggaatcatcactgaatggaatcaaatggaatcatcgaagggaaagagatggaatcatcatcgaatggaatcaaatagaagcattgaatgaaatcgaatggaatcataatagaacagaattgaatagaatcatsatcgaatggactcgaatggaaacatcgtcaaatggaatcgaaaggaatcatcatcgaatggagtcgaatgaaatcataaatgaatggaatcgaatggaatcatcatagaaaggaatcgtagggaatcattgcaaggaatcgaact

SEQ ID NO: 759274 - DNA, 624 bp, Homo sapiens
cattcgattattccattcaaatcccttcgttgattccatctgattccacttgacgatgattccattcaagtccaatcgatgattccattcggttccattcaatgattccattcgagtccatttatgtattatattcgtgtccacttgatgactcactccattcaattccatttaatgatgattccatttgattccatttgatgattcagttcgattccttacaatgattccctacgattcctttctatgatgattccattcgattccattcattgatgattccattcgactccattcratgatgattcctttcgattccatttgacgatgtttccatttgagtccattcgatgatgattcaattcagttctgttctattatgaatccattcgatttcattcaatgcttctatttgattccattcgacgatgattccatctctttcccttcgatgtttccatttgattccattcagtgatgattccatttgattccatctgatgatgatttcacttgattcatttcaatgatgattccattcaagtccattcgatgattccattggagtccaaacgatcattccattcgattccattcaatgatgattccattcatgtccattca

SEQ ID NO: 759275 - DNA, 602 bp, Homo sapiens
tgatatttctgccactggaaaaagcttttgagatataattcatatactatctgcccagcattagccaaaccacaaagtttgagggcacagtccccaagaccgcccttacttctgacgccaactgcaagttcagaaggtttctgagaccgccctctggtttgataatgcrctagaagggctcacagaacttactgaaaatgagttctacactcacagttacagttgtattacagggaaagaatacagactaaaatccgccaagggaacaaacacatggagcagagtccacgatggctccagacacaaagcttctactgtcttctcgtggagccagatgtgctaccctcctagcactggtgagtggcggcatgcaagcacactgcagccaggcagctcgccccagccctggcggccacagtttccagggggctccactgcacaggtatggcaggctggctgaccgcctacatggctgaactcagtctcctgattctgcatgacccaaagcccccatcccgaagcacctggttggtctttctggaaggtcagcctccatcctgtgactgtcaggtgtgaccagtcccctccctgaacaaagacac

SEQ ID NO: 759276 - DNA, 643 bp, Homo sapiens
gattatcatgctataaaatagaaaataatcgttctataaataaagaatttaggctgtttattacatggaaaaatgctgaaaatttaaaatgtaagcatgcttacatttaacattttccaagctccactctattttaataaaaataattgtcaaaacataaaaatgttcattattccctagaaaacaactcctttataattcataaaattataaatatagattgagaaataaaattataaactttttatacttttcttttgatagcctagataagtttttagattgaatttattgacatgtagacaacagtagttttccaaaggatgaaattagcatttatagtcagatatttgttttttaaagaaaattatacattttaataaatggattaattttgttagcatttatataaatcaaatatttaaaacattgaattmttataagcaagtacatttcagaataacaagactgatttaagtaatggcttggaaattgatgcaaggatttgcaaatcaactctgtaaccctaaagaagaagaatgaaaatggtaataaatgatatttattgattgctttcaacaagcttcacattaccctaaacatttacatgtattacttcaaatgaaagcactataaattctct

SEQ ID NO: 759277 - DNA, 608 bp, Homo sapiens
ggttactcagtttctatcaaaatttctgtgtttgttgctatgtccacagctgctattatctggattattatttggtgctatgcccatagctgccattatttgggagagtttgtgacttcatagggttggggtagggtaaagtgatgcagcctgtggtcatttcagtaaagaaatggactgtgaatcatttagtttgatacattttactaaaaatatttgttagatagtttgcacccacacctcattttgtttagatagattttcattttataaaattgaaagtagaattcttttcagaattagattacactttttccttctctctataatattttaaacsctttctctgtataacacttttctaaggcactggaggaatttaagtttggcagtatcacaaacatgcttgtacaaaactcttgttatcacattgcaagaccatgaaaatatatgttcaaaaacagatcagtcatttaacaagaactggatagctctgactgagtcaaaagtaacttcttcccagttctttagatatgttgttcaattgtgtttaaatatgtaagcccagggctggctctgggcaaaaacgtcaactttaaatcttcagc

SEQ ID NO: 759278 - DNA, 608 bp, Homo sapiens
ggttactcagtttctatcaaaatttctgtgtttgttgctatgtccacagctgctattatctggattattatttggtgctatgcccatagctgccattatttgggagagtttgtgacttcatagggttggggtagggtaaagtgatgcagcctgtggtcatttcagtaaagaaatggactgtgaatcatttagtttgatacattttactaaaaatatttgttagatagtttgcacccacacctcattttgtttagatagattttcattttataaaattgaaagtagaattcttttcagaattagattacactttttccttctctctataatattttaaaccctttctctgtataacacttttctaaggcactggaggaatttaagtttggcagtatcacaaacatgcttgtacaaaactcttgttatcacattgcaagaccatgaaaatatatgttcaaaaacagatcartcatttaacaagaactggatagctctgactgagtcaaaagtaacttcttcccagttctttagatatgttgttcaattgtgtttaaatatgtaagcccagggctggctctgggcaaaaacgtcaactttaaatcttcagc

SEQ ID NO: 759279 - DNA, 655 bp, Homo sapiens
catgtttactggaccatgaagaatattgcttaatgagtatatgagggagtgggatatggagagcaaagaattctacacagacacaagctgaaggtcaacccaatgaacagtgtattcattgtgaatattttcatagacactaggagatatcattatactctaagyactgattgcattgtaattatgtctgacttgttcgatgtgcttatgagtgctttatcctcaaatgtacagcttaaaagttttattgggaagcatattgtgaatacaaggtgtcattctagttttatgggtcagaaaatagaggtccagactgtgtgagatttatccaaggccataaaggaaaacagaactaatttttcacaatgctctttatgttctaccatgcgatcattctctataacattactcttctgtaatcaaaaatatgtatgtagttggaaactataatatatttagaattattctcatcactgtggcatacagtgtaatttagaaacaaattatctgactctacagaatacctagataaaacaaagctaggagttaactttcatttgttgctttcaatttagttggtccatgaaacctcagctggcctaaaaatcattacaggtcattttagaaacccaaactagagaggcactcataaatt

SEQ ID NO: 759280 - DNA, 655 bp, Homo sapiens
catgtttactggaccatgaagaatattgcttaatgagtatatgagggagtgggatatggagagcaaagaattctacacagacacaagctgaaggtcaacccaatgaacagtgtattcattgtgaatattttcatagacactaggagatatcattatactctaagtactgattgcattgtaattatgtctgacttgttcratgtgcttatgagtgctttatcctcaaatgtacagcttaaaagttttattgggaagcatattgtgaatacaaggtgtcattctagttttatgggtcagaaaatagaggtccagactgtgtgagatttatccaaggccataaaggaaaacagaactaatttttcacaatgctctttatgttctaccatgcgatcattctctataacattactcttctgtaatcaaaaatatgtatgtagttggaaactataatatatttagaattattctcatcactgtggcatacagtgtaatttagaaacaaattatctgactctacagaatacctagataaaacaaagctaggagttaactttcatttgttgctttcaatttagttggtccatgaaacctcagctggcctaaaaatcattacaggtcattttagaaacccaaactagagaggcactcataaatt

SEQ ID NO: 759281 - DNA, 535 bp, Homo sapiens
atgccaatcatttccagatgcaggatccggggaacaatttccaatccgcctgctcacctgatagctttgcaatatttggcattgctagctactgtccttttgaatttcacaactcctctttttgcttttaagacactaaggtcccatggttttcctttttcctctctgatactccttaatttcctttattggctacagtttctcataccaccactaaatattgggagtcacaaatactccccttaaatgtcttttcatgctacactctctctgtacaccatttcgtctgctttataccttgtaaacaacaaagtctcctgtttatatcttcasgcctgattactcttcctacattaagaccatgccattgacttcttactctatattttcacctagacaaacaaagttatcttaattatggtatattcaaacagaatgcctccactattcctttctttgccacccacacagttgtctgatccaaatacagaggaactatcctaggttccaactctttctgatacctgagagcaac

SEQ ID NO: 759282 - DNA, 566 bp, Homo sapiens
gggaacaatttccaatccgcctgctcacctgatagctttgcaatatttggcattgctagctactgtccttttgaatttcacaactcctctttttgcttttaagacactaaggtcccatggttttcctttttcctctctgatactccttaatttcctttattggctacagtttctcataccaccactaaatattgggagtcacaaatactccccttaaatgtcttttcatgctacactctctctgtacaccatttcgtctgctttataccttgtaaacaacaaagtctcctgtttatatcttcaggcctgattactcttcctacattaagaccatgccattgacttcttactctatattttcacctagacaaacaaagttatcttaattatggtatattcaaacaraatgcctccactattcctttctttgccacccacacagttgtctgatccaaatacagaggaactatcctaggttccaactctttctgatacctgagagcaacttcattgacaaatcttatgatttcctgagctcccttgaatatatcttctcagcttctcca

SEQ ID NO: 759283 - DNA, 600 bp, Homo sapiens
tggattccatagaacacttgtgtaccaagaaagaaagtaaaatatttgagtgtcaaaataaatttgtgactggacatggtggctcatgcctgtaatgccagtgctttcggaggccaaggcaggcaaatcacttgaggccaggaatttgagaccagcctggccaacatctcaaaaccccaactctactaaaaatataaaaattagcaggacatggtggtgagtgcctgtagtcccagctgctgagggggctgaggtggaagaatcgcttgaacccaggaggcggaggttgcagcgccactacactccaacctaggcgacagagtgagacttcgtctcaaaataaataaataaataaataaatwaattaattaattaattaattaacttgtaaaatgaagtaagtattctcccatgaggttcataattggtaatagaaatgcttaaggtgatgaaaactcctatagggtaaagaattgtttagctcatttttctgacaaaattgaaccttttattttaacaatttgtgggacactgatgtattatggaataccatgatgtgggaaatgctaacctgtgacatgccacagaaaagccttcata

SEQ ID NO: 759284 - DNA, 654 bp, Homo sapiens
tttacctctaagcagtgcattccctgcatcccacatattccaacaaattatattttcattttcatctagttcaaaatattttaaaatatctcttgatagtctccattgacttctgtgttacttagaagtatgttattaaatttccaagtattttgggatatttcagctctctttgtgttattgatatttagattaattctattttggtttgagagcaaacattgtatggtttctatttttttgaactgattatgattgttttatggctcagaatgtggtctgtctttgtgactattccatgtgrgcttaaaagaatggattttctgctgttgttgaatgaaatggtctataaatgtcaattatattcagttgatggtgctagaaagttgagctatgttctttatgatcttctggccttgaaatatccccatttctgatacagggaggtttaagtctttaactatgattgtggattaatgtttcttcctaacgttctgtgtcctgtactttgatgctctgttagtaggcaaatacacattaagaactggtatgtcttcttggagtattgacccctttatcattatataaagcccttctttttccctaactaatttctttgccatgaaacctactcagtctgaaattacataaagt

SEQ ID NO: 759285 - DNA, 654 bp, Homo sapiens
tttacctctaagcagtgcattccctgcatcccacatattccaacaaattatattttcattttcatctagttcaaaatattttaaaatatctcttgatagtctccattgacttctgtgttacttagaagtatgttattaaatttccaagtattttgggatatttcagctctctttgtgttattgatatttagattaattctattttggtttgagagcaaacattgtatggtttctatttttttgaactgattatgattgttttatggctcagaatgtggtctgtctttgtgactattccatgtgagcttaaaagaatggattttctgctgttgttgaatgaaatggtctataaatgtcaattatattcagttgatggtgctagaaagttgagctatgttctttatgatcttctggccttgaaatmtccccatttctgatacagggaggtttaagtctttaactatgattgtggattaatgtttcttcctaacgttctgtgtcctgtactttgatgctctgttagtaggcaaatacacattaagaactggtatgtcttcttggagtattgacccctttatcattatataaagcccttctttttccctaactaatttctttgccatgaaacctactcagtctgaaattacataaagt

SEQ ID NO: 759286 - DNA, 654 bp, Homo sapiens
tttacctctaagcagtgcattccctgcatcccacatattccaacaaattatattttcattttcatctagttcaaaatattttaaaatatctcttgatagtctccattgacttctgtgttacttagaagtatgttattaaatttccaagtattttgggatatttcagctctctttgtgttattgatatttagattaattctattttggtttgagagcaaacattgtatggtttctatttttttgaactgattatgattgttttatggctcagaatgtggtctgtctttgtgactattccatgtgagcttaaaagaatggattttctgctgttgttgaatgaaatggtctataaatgtcaattatattcagttgatggtgctagaaagttgagctatgttctttatgatcttctggccttgaaatatccccatttctgatacagggaggtttaagtctttaactatgattgtggattaatrtttcttcctaacgttctgtgtcctgtactttgatgctctgttagtaggcaaatacacattaagaactggtatgtcttcttggagtattgacccctttatcattatataaagcccttctttttccctaactaatttctttgccatgaaacctactcagtctgaaattacataaagt

SEQ ID NO: 759287 - DNA, 608 bp, Homo sapiens
tatgtcattcaaaaatcattctagatagaaatatgacatctttattcaacttgcttattacttttaaagtatgttcttattgcttcttcatatgaataactttcaaaaattggatagtaatacaaaaaaattaaccccaattgtaaagctattgaattgaatagcatttttatattgaattttagagtgggtaatgmtgcaacacacaatgtctagaaattcaaagaaaatgaatgcttgaaaataaaacacatgcttaatctttatgtaaccttttcaatatgaaacagccaaggaagattttctccatggaaaatcagattagccacaaaattggttgctgcagtacatagactaccatagagtcaactgaggctcagcagaatacagcttgtgtgtggtgcttcccttatccatgacgcagcacgtgtgtgctgtggcctaacagatatatgagtgtgtttctaacattaatgtatgttaccccaacctccttatcacacataagcctgctctgcacatacattgcttgctactgttccatcaaattcattcattcattcctactttctcactacaactttcaggacccctttcatattacaaat

SEQ ID NO: 759288 - DNA, 650 bp, Homo sapiens
atggctttccaaccatcccccaaagtcttaactcattccagcattagctcaaaaatccaagtcccaagtatcatctgagacaaagcaagtttcttccacctatcagcatgtaaaatcaaaaacaatttagttacttcaatgatatgatgagggtaaaggcactgggtaaatgcacccagacaaataggagaaattggccaaaacacagggctacaggccccctgaaagtccaaaacccagcagggaattcattaaatcttaaagctctgaaataatctcctttgactctatgtctcacatccaggtcagactgatgcaagggatgggcccccaaggtcttgagcagctctggtataatagctccgcagcgtagagcctcctcagctgctgtctagggctggcattgagtgcctgtggcttttccaggtgcatggtacaaactgttagtggatctaccattctggggtctggaggacagtggccctcttatcaccaccctatgagggcagtgcmacagtaaggactttttgtgagtgctccaaccccacattttccctccacactaccctagtagaggttcttcatgagggctctgcccctgcaacagacttctgcctggaggtccaggcattttcataccttctctgaaa

SEQ ID NO: 759289 - DNA, 535 bp, Homo sapiens
gcctctgatagcataaaggcaaacctagctgcctaaaaaaaagaaaaaaaaaacccaacaaaacaaaaaacaaataaactctttctggaggaacagtactatccagagtttgtaattatttgcatgatttttcatatataatatctgacacttaattttaaaaaagcatttgaacaagctggaaaaaataacagaataccaaaaaaagaagacaataaagatccaaaggatrtacagttataaataatcagacatagactttataataactatcattatcatttttaagaaattacaagattaaatattcataagagaatgggaaactttaaaaagtctaatataaattatagaactaaataatacatgatttaaataaaaagcccaaagatttaatacatgatttaataaaaagcccaaaatattagatacagttgaaaagaacttttgttagctgaaaaataggtaaaaaatatatcaatacacagtgagaaagaaattttattattccattctcacactgctatgaagaaat

SEQ ID NO: 759290 - DNA, 538 bp, Homo sapiens
gccttctttttatcttttttttttttttcccaacttttaagttcagggatacgtgtggaggatgtgcaggtttgttacataagtaaatgtgtgccataatggtttcctgtacagagccttccattacctaggtattaagcccagcatcaattagctattcctcttaatactctcccttctcccaaccccccttcaacaggccccagtgtgttttgttccccctgatatgttcatgtgttctcattactcagctcccacttayaagtgagaacatgtggtatttgcttttccattcctgcattagtatgctgaggataatgtcttccaactccatccatgtccctgaaaaggacaggatctcattcctttttttggctgaatagtactccatggtgtgaacatacgttttctttattcagtctgtcattgatgggcatttaggttgattccatgtctttgctattgtctctgcaatgaacatacacatgcatgtatctttgtaatagaatgatttatattcctttgggtattgtattag

SEQ ID NO: 759291 - DNA, 421 bp, Homo sapiens
caggtgcagatgtggatgggaaaatccatgtgtgaccaacagatctttccacctagcaaataaagaaaagagcactggccttttgcatgggttttcagcagaggaggttttctttttttaagtagacacagggtcttgctctgtcacccaggctggagtgcagtggtatgattatagctcactgtatcatcgaactcctgggctcaagcaatcctgtcacctcaggctcccaagtggctaagactrtaggtatgtgtaccacactcggcccatttttaatatttttgtagagacagagccttgctatattacccaggctagtcttgaactcctgaactcctgcctcaagcaatcctcctaccttggcctcccaaagtgctaggattacacagatgtgagccactgcacatggccatcagca

SEQ ID NO: 759292 - DNA, 570 bp, Homo sapiens
gtttttccaagccatcacagctgatatctcctggtgctatccccaaactgccactcttaactcttgaagtaaataaataatctttgctggcaggactatgctgaatctccttaggcactctctagtcagctatcctgagtcgtcccaattcttagaccttttatacctgtttttctccttctgttattccatttagtttttcaattcatacaaaactgtatccaggccatcaccaatcattctatacgacaaatgtktcttctaacatccccgcaatatcaccccttaccacaagacctcccttcagcttaatctctcccactctaggttcccacgccgccccaatcccgcttgaagcagccctgagaaacatcgcccactctctctccataccaccccccaaaaaattttcaccgccccagcacttcaacactattttatttttcttattaatataagaaggcaggaatgtcaagcctctgagcccaagccaagccatcgcatcccctgtgacttgcacgtatatgcccagatggcctgaagtaactgaagaatcacaaaagaagtgaa

SEQ ID NO: 759293 - DNA, 578 bp, Homo sapiens
aggtccatgcaggttacatagtggtgccccaaacagtgacacaattgggttctcaacaagtggtgactcagaacagggacgccaaggatgccaacaagtggcgtctgaacacgggacttcgacgatgtgaacaaaaaagatctgctggagcagagaagctgaaattgacaaggcaaacggggaccccaggatgagtctgccggcagcatatataaggtcagtgctmtaaagaggtactgggagcagtgctttatagaagtgctgggaatgggaagctttctgaatcagggtagcagggggaataacttgtctgttgaagaaaaacattatgtgcagttgcttaaagttctgttgagacagtctggagctcaggttaattctcagacactaacctcctgcagaagccacacaaagttattatgcataactcatggtttccacaggcaggcactcttgatgtggaaaactgggatagagcaggagaaggattaaaacaggctcatcaaaaaggtcttgaagttgattcttctgttttctccacttggagtttagtttgtactgtacttctgctattatct

SEQ ID NO: 759294 - DNA, 624 bp, Homo sapiens
ctcctttttactattctcagcatccctacttcagtcaaggacctagtcgtttttcctttctattttattgacctatttacttcactgccttcattcttgttcacaacacatttgtgtaagtgatatcttggtaaataaaaagcagatgattcaaaagagattcatttcagtctttcagtactctctcaagccttcacaatgaaacctaacttgttagcaaagcatacaatatcatttatgttccagcatacgactctttgtctgtcaggatgtctccattcaccactcacactgactcaaacttcttgaactatttagagtcttcttgatgtactctaatttctctggcctttgctccactttttctcctgcatagacagctaccacctcccaccgtcattatcctgggtgacttctacacatctttcaagactaatttccctccaaagccttctctgactsccaggggtgaatcaggtaaccttcatttgtattatagacatcagcttttgccttcacttatactgggttatgatttttgttgttatttgtttttttactgttcattctcctcaatgaatacattgtcttccataactgcatcctatccctgtattacaaata

SEQ ID NO: 759295 - DNA, 545 bp, Homo sapiens
gaaaatgatctagtaactctacaaactggatcaagcctaaggtggagatcatgtcaaaatacaatacattttaaaatattcccattactcggtatttttcttaagacaataggtaaaaagaagtatattctgtgctccaaggtaagcaaatccctatgatttgcaataatgaaaatactaaaccaaagtgctccctcttgatcattgtttcgttgcattcttgcctatgttttcattaaggggcttattgccttattcacatgttttgccattgtgttgtggcaaaggcaaagcttctgtgtttggaggtaatcataacaaagcagawttaataataaataatatgaaaagacagataagtttctgtagtccaatgtaataatttcagggcatactaaagattcagtgaaaattagaaaaaaaaagcatattcatcagaatcacaaaatataagtgaggaaataatttatgttaaagcatacagcatttgacacagtcaatgtcttttcttgccattaacttcagctaaacagcaatcgctttag

SEQ ID NO: 759296 - DNA, 545 bp, Homo sapiens
gaaaatgatctagtaactctacaaactggatcaagcctaaggtggagatcatgtcaaaatacaatacattttaaaatattcccattactcggtatttttcttaagacaataggtaaaaagaagtatattctgtgctccaaggtaagcaaatccctatgatttgcaataatgaaaatactaaaccaaagtgctccctcttgatcattgtttcgttgcattcttgcctatgttttcattaaggggcttattgccttattcacatgttttgccattgtgttgtggcaaaggcaaagcttctgtgtttggaggtaatcataacaaagcagaattaataataaataatatgaaaagacagataartttctgtagtccaatgtaataatttcagggcatactaaagattcagtgaaaattagaaaaaaaaagcatattcatcagaatcacaaaatataagtgaggaaataatttatgttaaagcatacagcatttgacacagtcaatgtcttttcttgccattaacttcagctaaacagcaatcgctttag

SEQ ID NO: 759297 - DNA, 632 bp, Homo sapiens
tttctatatttatacaagcacttcactatataagtgatacagtcaatgataaatataattagaatattaaggacaaatgtctccgaaatcattggtttagttatttatggattatactgatttaattcaggaaaaccaatgtgttcttgccatcaattttctcatggcctctttcacctccttattcctgagactgtagatgagggggttcagcatgggaatcaccaccgtgtagatcacaaatgccaccttgacctgatccgctgaatagcttgacttgggcatcacataaacaaacaaaatggtcccatagaacaaagtgactgcagtgaggtgggaagcgcaggtggagaaagccttcttccttccctcagtagagcacaccttcaggatggagtgaaggatgtagatgtaggacacgattatggtaaacagcgtgctgataaggacagatgcasaggagatggcaggggatatttcagcaatgtaaacatggccacaagaaagcttcaagagtgggaagaggtcacagaaaaagtggttgattttatttggaccgcagaaggacaggttcatcaaacagcctgtaaaagacgaagcgttcaggcatccacccaggtaggaggctccca

SEQ ID NO: 759298 - DNA, 669 bp, Homo sapiens
aatatccccatgtaaaagaataaggttggacccttatcttaacccacatacaaaagttaattcaagtggatcaaagacctaaatgtaagatttaatactacaaaactcttagaagaaagcataggggaaattcttcatgatcttggattaagcaatagattcttagttatgacatcaaaagcatgagcaaaaaaaaagaaaaaagaaagataaattccaccatattagagttaaaaacttttttgcttcaaaggaaactataaagaaagggaagaaacaacctacagaatggaaggaaatatttgcacatagtatatctgatcaaggatgttatccagaatcatttaaacaatctaaattcaatacaaatcccccaattaaaaatgggaagagaatttgaatatgtatttctctaaattagacatacaaatgattaataaatatataaaagatccttgatgtcatctgtcattagaaaaatataattcaaacccagaataatatattrcttcacactccctataaccatgtgaacaacgtagcctcaaaattccttcaccagcatacatcatctaatcttccacaattcacttcagaacttccctaccagggccatgatctgtcagcagtaatagcactttccaccactgtgaggttcataaattagaa

SEQ ID NO: 759299 - DNA, 516 bp, Homo sapiens
ttaagagcctttaaaacattcaaaaaataatgttccacaataaacatacgtgggaatgtgtctttatagtagcatgatttataatcctttgagtacatacccagtaatgggattgctgggtcaaatggtatttctggttctagatccttgaggaaatcatcacactgtcttccacaatggttgaactaatttacactcccaccaacagtgtaaaagcattcctatttctccacagtcttgccagcatctgttgtttcctgagtttttaaygattgccttctaactggcgtgagatggtatctcattgtggttttgatttgctttctctaatgaccagtgaagaatgagttcatgtcctttgcagagacatggatgaagctggaaaccatcatcctcagcaaactaacacaggaacagaaaaccaaacactgcatgttctcacccataaatgggagttgaacaatgagaacacatggacacagggaggggaacatcacacaccagggcctactgggg

SEQ ID NO: 759300 - DNA, 693 bp, Homo sapiens
aaggttcacttctgtaatgacatcattacaatcagccctatcctacagaggatagccaccactgagcttctcagtgacattggtgtccttctcaccagcatattccttttgtttagtaaacagaatgtcctctgggaccttatatggagcctagttatctggtggacttttcattttcacgtatttattctagcaagtgctcttctctaagcttttctatccctccttctactgtcttccacagcagttctgacatttctacttagtgtgcgtcaccaatttctgcaagtttmtaaaagccatcgtagcagcttctttgcatcatatgctgtgatctttaccaagatattaaatcctatagtaagggagagggctccaacactgataaattatctcttatccaatttgatgtctgaccctttgattcagcatgtactcttttcagctcctgattctacatgttgactaggtcctacagctcccatagcagactcagccttttccctgttaggttatgttatgatttacccttagttataatcaagtggttaagaaaaggtagggacagagtttaaggagaacatatgttgttttgcaagatagcatcctctgttttatctttatctacgggtggaacacaaacatttaacagggaagaatccagagggtttagaagaatctagtgattcaaga

SEQ ID NO: 759301 - DNA, 615 bp, Homo sapiens
aaatgtcaattttcccttaaattgacaaatcaatttaatgcaatagcgttccaagtacaaacaggatttttttggaacttgataaaataatgttagaatgcatctggaaaatgtacatgtgagaatggccagaaaaattgctactagatagtaaaatgaattatataactatttaatttaaatgtgtggtcctggttctagaaaagactacaaaaaaatcataaattgacccaagtacttcaggatgttttagtattagcataggataagtctggagttttaaataaacaaaaccagcaggaaaacaatttcacaaataagttgcattagatcatctggctagccatttgaagaaataagtaaaaatacagtcatgcagtgcataatgacatttcaatcaacaacagacagcttacaatggtggtcccataatattataatactgtattttastgtaccttctctttgtttagatatgattagatacacaaataccattgtgttacaattgcctacaatattcagtacagtaatatgctgtacaggtttgtagcccaggagcaataagctatgccatatagcctagatgcatagtaggctataccatttcggttt

SEQ ID NO: 759302 - DNA, 590 bp, Homo sapiens
cattcttttctgtatacattttaccttagtgagatactatttgtaaagacaataaactaagttagcctctgataaaaatgtatctctaaaaggaacaattttacaggattttaatacagcttatgcaatacatttcatgtatgaaataatatcctatatcgttagtgtgcctaacaacacaatttgggaaactcttatttaaatggtgttcagcatttaaagaagacatcaaattatagcccatttgttaaaatgaatgtttccttataaaatggtcagattttgaaaaactgccttgggtrgcatagctcgctgataagtgattccaaaaaaatgacacattactacagaaagttgaagaagtggagattttgaatttcactgttagaaacataaaactgattctcaaaagttaatgtcagtgagtggaactaattaaaagatattataaaatttgtttattttcttcatttatattcttaacaggcacacataataaactgataatttttttaagatccagttgcttattttcttaatgatgctaagaaaattgttttttaaatttatttttctctcttaaaatatat

SEQ ID NO: 759303 - DNA, 680 bp, Homo sapiens
aggctggagtgcagtggtgcagtcacggttcactgcaggctcgacctcctgggctcaagcgatcctttctggccttagtctctggagtagctggtactatgggtactatagatacactgttattgttattattgtggatacagtgtcttgctatgttgtccaggctagctttgtagattttttgacaatgtttgtttgcttatgagatgaaataacattaataataagcatttaaaaatgtacattgtcactattttgaacagcttcatgctagaagatagctayggaattatgagtctggaaacataggatagtatattataatttatatataattatggtaagatccattttttttttagtgttttcataatcaactttgtcttttccttccaggtcaataacgactggagtgtgatggagaggaagagacagtacacggttgaaatttttcctgatgaaaggtaaggaaagaaaaaccagggtcatatcagacttagataaatcagggagaagaggtaacaattaacttaatctagatgacaaagcttattaacttgaaaaatcactcccttagctctttttatttcttgctttcattaatattcctttggacttcctatcttacacaggatccgtgtggcctccagaataccctttaagtaggcattgaatggtag

SEQ ID NO: 759304 - DNA, 591 bp, Homo sapiens
tacaacataaaccacttgtgttttaagttttgccaaggactgagacctcatgcacattgttatgtgttgtttatcaaaaattcagttaggggtcgtgtgtggtggctcactcctataatgccagcactttgagaggctgaggtgggagaatcacttgagcccaggagcttgagaccagcctgaacaacatagtaaagcctcatctctaccaaaaagataaaataaaatattagcaaggcatggtggcctgtgtctttggtcccagctactcaggaggttgagatgggaggattgcytgagcctgagaggtcgaggctgcagtaagccgtgatcacgccactgcactccagcctggatgacagagtgagaacatccctcaaattttaaaaaaagacaaaacagcaatagcaacaacaataactcagagttagttctgaaggtgcacaacgtatttagttttcaaaataattgagtcttaatcagggatgttcatctatatttccccagaagcacaaatctgtattttctgttgtgtgtgtggatttgcatatttagatgcttgctggagtccgactattctaaaacataatt

SEQ ID NO: 759305 - DNA, 591 bp, Homo sapiens
tacaacataaaccacttgtgttttaagttttgccaaggactgagacctcatgcacattgttatgtgttgtttatcaaaaattcagttaggggtcgtgtgtggtggctcactcctataatgccagcactttgagaggctgaggtgggagaatcacttgagcccaggagcttgagaccagcctgaacaacatagtaaagcctcatctctaccaaaaagataaaataaaatattagcaaggcatggtggcctgtgtctttggtcccagctactcaggaggttgagatgggaggattgcctgagcctgagaggtcgaggctgcagtaagccgtgatcacgccactgcactccagcytggatgacagagtgagaacatccctcaaattttaaaaaaagacaaaacagcaatagcaacaacaataactcagagttagttctgaaggtgcacaacgtatttagttttcaaaataattgagtcttaatcagggatgttcatctatatttccccagaagcacaaatctgtattttctgttgtgtgtgtggatttgcatatttagatgcttgctggagtccgactattctaaaacataatt

SEQ ID NO: 759306 - DNA, 564 bp, Homo sapiens
tagagaaagagaagaaagagcaagggtaggcacgaatcattccagcttcaccattggctttcctgacacagagcctactcagtggaaaacgccttgctgtcatgcgttccaagaaggtgatggtgccatacaacatgtarcagcaggagcaaaaccaagcatctctcccgggctttgtggtttcctccgctggtatcacaaagctggagggagactgcagggaaaggcacactctccaaggtaactctgagaactgctttgaggagcaggagaaaatcatctgagtatcaaaatactaggtcttctggaaacagaatgtaacacagagcttgttatacaggtgatacactgaggaggtgctctcaggagaaactcagatggggttatcaggcaaaacaagggaaaagaagataccaaggagtctcagcctgatcccacagggagctcaagaatgtgaatagtgacaaggagttcgttttgcttgtggcaaggggtctaacttcttattaaattacatcaggtagtccttgaacatgtccctctcccaaagggaagacataatct

SEQ ID NO: 759307 - DNA, 564 bp, Homo sapiens
tagagaaagagaagaaagagcaagggtaggcacgaatcattccagcttcaccattggctttcctgacacagagcctactcagtggaaaacgccttgctgtcatgcgttccaagaaggtgatggtgccatacaacatgtagcagcaggagcaaaaccaagcatctctcccgggctttgtggtttcctccgctggtatcacaaagctggagggagactgcagggaaaggcacactctccaaggtaactctgagaactgctttgaggagcaggagaaaatcatctgagtaycaaaatactaggtcttctggaaacagaatgtaacacagagcttgttatacaggtgatacactgaggaggtgctctcaggagaaactcagatggggttatcaggcaaaacaagggaaaagaagataccaaggagtctcagcctgatcccacagggagctcaagaatgtgaatagtgacaaggagttcgttttgcttgtggcaaggggtctaacttcttattaaattacatcaggtagtccttgaacatgtccctctcccaaagggaagacataatct

SEQ ID NO: 759308 - DNA, 624 bp, Homo sapiens
gcagctttaaagacaaatccagtacattctcttctccagtaatggttacacatattacattctttctttaaatggaacttctttaatatcatacataactttaaggcatccctctttttcacatgtggaagcacctgaattatctttattaattgcctgataaagccttgctttatcaattgacttaaaatgattgtatagtatgtatcaacttaatgtctaaatgtcatgaggacactatttgaaataaattcacttaatcagatatatacatatatagagtgtgacttttaaatgtcagcacaacagaaatatgaatataaactcttatgagcaagtaatagatacaattcacttattgccatatatatttattatataaaatatgatgtgttctyaattcaaaaaatggcaaatgcacataaaacaatcttggaaactaaattttgcaactggttcaaatcgatttaggttactgttacaaaattccatgcaagagagattaagggatttttcttgtaaagtataaaaggagaaatgaaagtctgaacgatttcagggaaaaagaattaaaccttcatacaaagaaatgattctgaacagaacataaatggaatacaccag

SEQ ID NO: 759309 - DNA, 614 bp, Homo sapiens
tttttttttacaacaacttatactgactttatgaggagtatgaaatgactaaaatatctgttagtagacataaatatctcttgtaaaaatttcattcaccgaagtaaaagcacctcataccacatcctatttcccttaatttattattaaattgataaaaattgtcttatgtacatgatgcctggaaatatgtatacattgtggaatggctaaattgagctaattaacatatgcattacctcacatagttaccatttttatggtgagaacactttacatccactctcccagcatttttcaagaacacaatatattgctttgttttgttttgagactggrgggggggtctcactaggctgaccaggctggtcttgaactcttggcctcaagtgatcctcccacctctgcctcccaaagtgctgggattacagccatgagccactgggcctggccaagaatacaatatattgttaactatggtcaccaggtggtgcaatacatctcttgaacttatttctcctaactgaaattttgcatcctttgaccaacatctccccaatcttcccactccccagcttctggtaaccaacgttcttctctttgcttctgtgaat

SEQ ID NO: 759310 - DNA, 633 bp, Homo sapiens
taaccataaacttgaactccatcactttgtttttagttttttcttttaagagatggggtctcactctgtccttcaggctggagtgcagtgctgccatctcagctcactgcaacttcaacttcctgggctcaagcaatcttcctaccccagcctcctgagtagctgggattataggcagaagccaccataccccggttttaatgccacagttttgaaaaactcttacgattcagaaggaagtaatgaaatactaattaaaatgtgtcagatttttagggtcttttgagctgtttcaccaaaaacataggtttagaattttaaactatggaagaagtccatggttttaaaaccacactaaaaatgattatgattgtttataaaagaaggatgaggcaggttttggcagcasgtgagtttcataactatgaagtcaggcacctcagcctcctgagtagctgggactacaggcgcatgctatcacattcagctaatttttaaattttttgtaaggacaaggtctcactatgttgcccaggctggttttgaactcctgagctcaagtgatctgcctgtctcggcctcccaaggggctgaaattacaggtgtgagccactgggcccaccctgtagtgct

SEQ ID NO: 759311 - DNA, 620 bp, Homo sapiens
ccagctacttctttatggttcaaggcaaaactaaggagtcttagcctttcagggcatttttttttcaagccagaccctgtgctaggcactgagaattctgagacaaatgaaacaagatgagttcatgatttacttttgagaagactgataaaaaaaagaaagggcatgtttagggctgtaacagagtttctaccaagtgctcctaggagatgagaagaagctgctaagaagactcctgcatgatgttcttcyaggactgaccaccaagcccattagagaatatccttaggacacactctgcacttctcccagcactcagtcctgagctccatgaagacggaaccacactccatttctgtgtcctcaatccccaccccaggttggcatgagagagatttcagggtcgatttatggaataaataattcataaggccttaacatagtgagttaatctctctggccttctacgtgtccatgtgtaaaatgagaaatatgaactaaataaaatactgttaaaacttttcagggacataatctcttcaaggatctgatggcagccacattttctatctctagaaaaatagtacctgtggtattgcacaaaattgcaggggcttcct

SEQ ID NO: 759312 - DNA, 620 bp, Homo sapiens
ccagctacttctttatggttcaaggcaaaactaaggagtcttagcctttcagggcatttttttttcaagccagaccctgtgctaggcactgagaattctgagacaaatgaaacaagatgagttcatgatttacttttgagaagactgataaaaaaaagaaagggcatgtttagggctgtaacagagtttctaccaagtgctcctaggagatgagaagaagctgctaagaagactcctgcatgatgttcttccaggactgaccaccaagcccattagagaatatccttaggacacactctgcacttctcccagcactcagtcctgagctccatgaagacggaaccacactccatttctgtgtcctcaatccccaccccaggttggcatgagagagatttcagggtcgatttatggaataaataattcataaggccttaacatagtgagttaatctctctggccttcyacgtgtccatgtgtaaaatgagaaatatgaactaaataaaatactgttaaaacttttcagggacataatctcttcaaggatctgatggcagccacattttctatctctagaaaaatagtacctgtggtattgcacaaaattgcaggggcttcct

SEQ ID NO: 759313 - DNA, 426 bp, Homo sapiens
gatagaatgttctgtctcctaaagtagatgcattccatttgtaaaagcatatggagcatggagtattatatttatttgcacttttatagacataagtacaattattccttatacttcaaaaaaaaagtaaaacaacacaacacacamaaaaaaacaaaagccctgagttaacttagaatagatgcttaatttctctggctctcagttttctaatctataccatgaggttggtcttgatgatgtttaagtctattctaacagattatagctagagttgtataaagtcttgagaggctataaaactcattggatgattctgaagagctcaggagtcatcgtgtcccagcacagttcttactggaggataaaattattcagttacacgtctttccatgtacaaatagtgtgacttgaggaagttaccta

SEQ ID NO: 759314 - DNA, 321 bp, Homo sapiens
cactaaacaacatatccatgtaataaaaggtacaggtggttacctgtacccctaaaactatcaaaattaaaataaagaaaaacaaaacaaaatgatgaaatagaagcaatttgaatttactgcttaccttcccccagaaaagaaaaaacaaatatgcagtgtagggattatgaycaaatgcaacccagaactcaaatatgaagatgaaatagttcccggggccagagaaaagcgaaaaagcttcaaatggaggggaagaaaattgaacttacactctgcaatattcatccccacattctgctcaacaccaagcacatgaaa

SEQ ID NO: 759315 - DNA, 625 bp, Homo sapiens
ttttgtgtttctatatatgttgtagggtagttttttttctatttctgttaagaatgtcattggtattttgatagggattgcattgaatctgtagattgctttggttatcatggacattttaacagtattgattcttccaattcatgaacatgcaatattttcaattttttgatatctgcttcaatttctttatcagtgttttataatttttttattataaagatctcatttctatggttaagtcaattcctgggtacttaattttatgtgcggctattataaatgggattatatttttatttctttttcacatcgttccatgttggcatatagaaatgctactgatttttgtatgttgattttgtattctgmagctttactgaatttgtttatcagttctaattgctttcttgtggcgcctttaggtttttccaatttaagatcatatcatcagcaaagaagaatcattttgactattcctttccaaattggatgccctttatatccttctcttgtctgatttctatagctcgggcttccagttctacgttgaataacagtggtgacagtgggcattcttgccatgttccagatctcagaggaaaggctttcacaatttctccat

SEQ ID NO: 759316 - DNA, 625 bp, Homo sapiens
cctatatgcaatcaccactttataaagtaattagtttccaaaggcattgtttactttagtaattgaaatgtagaattacttttcctatataaaaataatatagtttccaaggtcagataacaaaaatccatataatctatataactcagcaatgaattaaagcaattgagaccgccactagatggaatgggttatggattattttaaaaataaaaaaaaactttaaatgttttatgtccaaagaggttcatcaaggtgttgtttataaaagatacaagcaagaatgctaaagcaaattaaatacatctgtatgcagccctcaaatggttcatacaaagttcctgataaactggggaaatgtttgttataataactttaaagtaaataattgcagaacacaaaagcacgtagtagtggtggtggtggtactggtgatggtatwattagtagtaccagtggtaatagcagctaagtattcattgagttcttactcaaagccaggcatggatcatttcatttaatcttcacgattatatggagaagtagatgatatttttctaaccttacggatgagaagaataaagcacagagagcttaaatgacttgtcaaaaagtcacacagcta

SEQ ID NO: 759317 - DNA, 520 bp, Homo sapiens
cacctttgaggcctaggtttacagaaataaggctccccctcccccaccccgagtcccctgaagggtactgtaattgtttccatttctccaattttcactttaatatatgtgaattttcacatgcttcattcagttcagtggttctcataatgtggtcccggaaccagcaccaacagcagcagcaactgggagacttgttagaagcgcagtcttaggcccaccctacactctagggatgggcataggagtgagtgtgtgtgtgtgtgtgtgtgtgtgtgtgwgagagagagagagagagattgtgtgtgtgtgtcaagctcggtattaaataggtcaaagagcaacatctggcttctaaacccaccctcaggcctctccaccgagtacctgtctcaaacccaatctgatccaacaataaccagccttaattcaataatctgtgctacctgagatgatgggaataatcgtggtactataaatgttgcagaacaaaaacgactgcagtagattttctggggct

SEQ ID NO: 759318 - DNA, 611 bp, Homo sapiens
atctcaagtccaatgggacacatgcagggaggaaaaccactcagaggaagcaacattcatcctcccattgcattaaaaataaatacaagaccaccattcattcaaataactgggcccattgtgtattcaaataaccactgactgaccttctcttccacttcatcgagtggtggagaattagcagaagcgacctggccaactggtcattttgttcacatgtacataggcccaacctcaaggacattggggtggtatctgttttgagttattttgaaagcaaagcctgaaacacacgtgtgaatgcaggtagcttccatggaaagtaatcgcaggaagcagtgggaaacagaagaccaaaagggaagraagtcaacatggactatgttatcgggctggctactgcagtgggcaacgcggctcagctctgctggagggtttctgaggaactggaaagaatacgcctcatagttctctctcccaagggcagaaagctaggtagttcccactgacttccggctccccttggttgagggtccccattccagggctgtgtgtgcccggacaaagctactatctgaggcttaggagaaagtcctggggctgaagagaga

SEQ ID NO: 759319 - DNA, 506 bp, Homo sapiens
tgctgttaaacatttgatcaggaattttccatttttttttattctagctgagaatccactgataacaattggggctttgaagtccaattacttctcccagttcccaaaatacacccaatcagataaagtttgagctgtcaagagcaaggcaatgtcatcctctgaatagtttctatcagagactcaagcaaatgaaaacagttcctactcttgagcaaacactgtttgcattgagagtgggctaacaagagcatagatagattagcatataccaacaagggaagcatcataataatgttaactgtccaagatcaacccmcaatacagatacatgcaacaaaataaaataaaatagcatcatgaaccacatgcagcaacaaagactgagaaatttcaacctcatgaaaaatataagtgcagaaaaaatatatgcatatatgcatacacatgtgtagatagataagacagacagaaagatgtatggatggaaaatctaaaacataaag

SEQ ID NO: 759320 - DNA, 506 bp, Homo sapiens
tgctgttaaacatttgatcaggaattttccatttttttttattctagctgagaatccactgataacaattggggctttgaagtccaattacttctcccagttcccaaaatacacccaatcagataaagtttgagctgtcaagagcaaggcaatgtcatcctctgaatagtttctatcagagactcaagcaaatgaaaacagttcctactcttgagcaaacactgtttgcattgagagtgggctaacaagagcatagatagattagcatataccaacaagggaagcatcataataatgttaactgtccaagatcaacccacaatacagatayatgcaacaaaataaaataaaatagcatcatgaaccacatgcagcaacaaagactgagaaatttcaacctcatgaaaaatataagtgcagaaaaaatatatgcatatatgcatacacatgtgtagatagataagacagacagaaagatgtatggatggaaaatctaaaacataaag

SEQ ID NO: 759321 - DNA, 638 bp, Homo sapiens
acttaaatgagaatctctttataaaattatttcagaaagcagttacactgtatcaaggggcaaaagattacctttaccagctgggcgcggtggctcacgcctgtaatcccagcactttgggaggccgaggcaggtggatcatgaggtcaggagttcgagaccagtctggccaacatagtgaaaccccgtctccactaaaaatacaaaaaattagcctgatgtggtggtgtgcgcctgtaatctcagctacttgggaggctgaagcaggagaattgcatgaacccaggaggtggaggttgcagtgagccgagatcgtgccatagcactccagcctgggcaacagtgtgagactctctctaaaaaaaaaattacctttagcaaagttagaaaatgcgtctgccctttctgaaatgaaataacttcaactccaattttagtaagaatgcatgaattaagtatgtatagactttaataacaaatacaaatgtatatagtartatataatgatatacacagtggatagtcatttgacgtttacaaaacattttccaaccatgatcagttttgatagtcataataacagaacatgaagcatgactgatattatttcagttttgctgttgaaaataataaggcct

SEQ ID NO: 759322 - DNA, 435 bp, Homo sapiens
cagaaacttgttttttcattctttctgtaagaaccaaacaaactccagtttctagttaagtcaaaattggttattttcaaaggtggtttttaaacactctctgtagggagcaaagatctttaaaattatcagagaaatgcggctcccygctatggcaaagaacataaactcctggaagtaaagaaatgtttgggtctttattttacagaaaggaatgtgaagttggaacttctaaatggccgattttaaatttaatgtctctctaagagatataaattagcagcagcaaaatattatggccctttagatgcttcggtccatgaattgtaaattaaagttggtttagccatttggtggggcttaaccatactagaaagagccattaaatattttatggtatgtaaatgtacttgcaaccatgagcagcgttcctgc

SEQ ID NO: 759323 - DNA, 566 bp, Homo sapiens
gtaaagttgctctatttttccccattcaatactgtacgctttggaaggaagtccctatgcacagcccatgcttaaggagagaagagctgcgccctctctctccttgagggcagtgtctacatgaactatttggaattcctttkcatagatttgcctcttccctctcaattatttacttattcaatcatttatctatatcacttggactcatgaatacttattttacactttgggttctaacccagtactatttcatttattttgttgctcaaattgttccagctttgggcactggagttctttcagttggtttctgaatccttttgacatattcctatcattgggggttttatttctgcacacttctctactttctggcactatagttgccccaggatcatcttgtgtatttcctaccttagtcctagaatcagccatttctccaaggtgccctgtttccttttgttagagatagaatcagccatttctccaaggtgccctgtttccttttgttggagaacggtgttagacaccaagatctgggtgctaggggtgctccttgctcc

SEQ ID NO: 759324 - DNA, 566 bp, Homo sapiens
gtaaagttgctctatttttccccattcaatactgtacgctttggaaggaagtccctatgcacagcccatgcttaaggagagaagagctgcgccctctctctccttgagggcagtgtctacatgaactatttggaattccttttcatagatttgcctcttccctctcaattatttacttattcaatcatttatctatatcacttggactcatgaatacttattttacactttgggytctaacccagtactatttcatttattttgttgctcaaattgttccagctttgggcactggagttctttcagttggtttctgaatccttttgacatattcctatcattgggggttttatttctgcacacttctctactttctggcactatagttgccccaggatcatcttgtgtatttcctaccttagtcctagaatcagccatttctccaaggtgccctgtttccttttgttagagatagaatcagccatttctccaaggtgccctgtttccttttgttggagaacggtgttagacaccaagatctgggtgctaggggtgctccttgctcc

SEQ ID NO: 759325 - DNA, 321 bp, Homo sapiens
gcccctgctcagaactaccatttcctgaatgttgactcttgcaaggtgtttacatatgtcatctgacttagtcctcgcaaggatcctgtgctcatttcacaagaaaaagtctccctctacccaggcagtgttcccccayatctgggccaaggagccttacccgagggtaaaacaaagctgaggggcaagcaaccacacaccccatgtttggtctcaagcactggctgtttccttacaagtttaatgttttttaggaagatgctacttgaggccaggaacagtagctcatgcctgtaattccagcactttgggaggccaagg

SEQ ID NO: 759326 - DNA, 598 bp, Homo sapiens
tggtaaatattgtcatagaaaagtgtatcccagattcatctattatgttcttaagaaaattctatatgtaaaattcagaatatacaaagatgatataatttatatttaatattctaaaaatgcaacacaatagtattggcttcacaacgtggtattaaacagggttaatattttcaagcagaaaagtcaaattctttctcaaaataccattgataccaccttagcaatgataccataattgtctgtcatgatttgggggaccattaaaggtgtcctttgcaagagatggtctacattattttcctaaaacrtgaaaataaaaaagtttaataatctatagtcatgatagcatttgtgaattttgaacacataccaaattgatttcctgtgctccataagccgcaacgcaatggttaaacattttcagctgtagtgcgttacctcttttaggatactaggttgatctattagtgcaatagtgtaagagtcataagaatttaaaaagataaaacttgagaaagctagctccatagtcaaataaattagcaataattgatcttaaatatgacaaaaactttcagactaacagaacattaaa

SEQ ID NO: 759327 - DNA, 649 bp, Homo sapiens
tgttgatgattctgttataggtatgtagatgaatgccactgttcagtgaaaatatactctaaagttttcagaaagtgatggggtatcgtgtcagcaacttacattgaaatggttaagcatgaaaggtttttgtatgcatactttcaacttttctttaagtttgaaatgatgtcaaaataaaaaggcaaatgtcaaagctcgttaatgttattgcaagggaaagtacaccctgtaatagtcaatatcagaaaatttttttttaaaggccgggygcagtggttcatacatgtaatcccagcactttgggaggctgaggtgggcagatcacaaggtcaagagatcgagaccatcctggccaacatggtgaaaccccatctctactaaaaatacaaaaaattagctgggcatggtggcatatgcctgggtcccagctaatcggtggctgaggcaggagaatcacttaaaacccaggaggcggaggttgcagtgagccaagatggcaccactgcactccagcctggccacagaaagagactccatctcaagacaaaacaaaacaaacaaaacaggatagtaaaaaagatggatgatggaaatgacaacagaaaaaaataaagaagattatgagaacctgtacactcccagccag

SEQ ID NO: 759328 - DNA, 567 bp, Homo sapiens
tcactatacagctcgcttgactcacccccactcacccatacaccccacatagactgtgcagaaatgctgtggtgaccacctcttagtcacagcgtgactccatagaactcatgcctcctggttgtaaacccaccaactagaactccccatagggaatccgcctgggtagcaacctggagcccatcaaagactttggccacacaagtcccttactatctcttgatccccacctgagtgtgtatgtccaggatggcttccccctttcccttggccctgtgaggcatgctgctctgttctctctgggacttgtaagtaatacactgctcctggtatttcgtgtattttattgagctgcctcctctgtgtctcaactgactaatacgcmccaatctaacttctttcccagttagggctctcctggagtgtggctgtgttggtaggaataaactgaacacagctcagacaagagcacaaggacatctgccaatctaaccaagtttcttgtgagagggacacctgatcacaggtcaaacacttggaccaggataaagaagtaccccatgaaag

SEQ ID NO: 759329 - DNA, 567 bp, Homo sapiens
tcactatacagctcgcttgactcacccccactcacccatacaccccacatagactgtgcagaaatgctgtggtgaccacctcttagtcacagcgtgactccatagaactcatgcctcctggttgtaaacccaccaactagaactccccatagggaatccgcctgggtagcaacctggagcccatcaaagactttggccacacaagtcccttactatctcttgatccccacctgagtgtgtatgtccaggatggcttccccctttcccttggccctgtgaggcatgctgctctgttctctctgggacttgtaagtaatacactgctcctggtatttcgtgtattttattgagctgcctcctctgtgtctcaactgactaatacgccccaatctaacttctttcccagttagggctctcctggagtgtggctrtgttggtaggaataaactgaacacagctcagacaagagcacaaggacatctgccaatctaaccaagtttcttgtgagagggacacctgatcacaggtcaaacacttggaccaggataaagaagtaccccatgaaag

SEQ ID NO: 759330 - DNA, 588 bp, Homo sapiens
gtaaaatgaggtatccatttcctcagcattttttgatacaaaaagtccattcatactcttttagttattttacaatgtaagattaaattattatagactatagtcaccctgttgcgctattaaatactaggtcttattcattctttctatttttttggtatccattaacaatccycactttctccccactctcctactatcctttccaccttctggtaaccattattctactctctatgtccctgagttcagttgttttgatttttgggacccagaaataagagaaaacatgcaatgtttgtctttctgtgcctggcttatttcacttaacataatgacctccagtttcttccatgttgttgcatttgacagaatcttatccttttttatggctgactaggactccattgcgtataagtaccgcattttctttaaccattcatgtgttgtgtacacttagattgtttccaaaccttatgtattgtaaatagtgctgcaacaaatatagaagtgcagatatatctttgatatactgatttcctttcttttggatatatacccagcagtaggattgctggatcagtagct

SEQ ID NO: 759331 - DNA, 581 bp, Homo sapiens
aggatggattattaatgacaataataatgataattaagattcactgggccgggyacagtggttcacgcctataatcccagcactttgggaagctgaggtgggcggatcacttgaggccaggaggtcgagaccagcctggccaacatggtgaaaccatgtctctactaaaaatacaaaaattagccgagcatggtggtgtgtgcgtgtaatcccagctactcgggaggccgaggtgggagaattgcttgaacctgggaggcagaggttgcagtgagccaagattatgccactacactccagcctgggtgacagagtgagactccatctcaaaaaaaaaagaaagaaaaaagattaactggacctgtggtatgagccaggtcctctgctaagtgctttacacaccacatctcaattaatgtcataataaccttgtaaggagatactcatattattcccaattaactgatgaggtaactcagttaagtcagatgacccagttaactattattcctatttaactgatgaggaaattcaaactaagctgggatttgaacccaagttagatacttctatactccata

SEQ ID NO: 759332 - DNA, 555 bp, Homo sapiens
tgctttatctataaaatggcagtaataatacctgcctatcaggttgaccaagtatttacacaagatcatgacttaaagctttcagcacaatacctgacatttagtaaatggcctcttgacagtgtttggtgtatgtcttggtctgttcaggttgctataacaaaatatcataaattgggtagcttataagtaatggaaatttattgctcacagttctggaggctggaacgtccaagatcaagtcagcagcagatctggtgtctggtgagggcccccttcctggttcacagtcagtgccttctctctgtgtcctcctcacatggtgggagaggagaaggagctctccaggccctctcttataaaagtgctaatcccattcacaaagactctgccttcattacctaatsacctcccaaaggccccacctgctaacaccatcactttgggggttaggatttcaacatattaattttgatgggggtgcataaacactcagcccactgcagtgtccctgttactattgtaatgatgatatgtggatccttttgctgagag

SEQ ID NO: 759333 - DNA, 537 bp, Homo sapiens
actcccaggcccaaaaatatgtcttgaatctatacactgccatcgactcctccaggcaccagcatcttctggctggacaacctcagtcacctcccaggtagcctccatcatctctactcactgctcttcctgcctttccaccagtgcctcctccagacagctgtcccagagaccatgtcacttctcaaagcataattcagatcatgtcatttctctgcataaaaatrtacagtggctttccattgtagttagaattaaatccaaacatctcactgtgacctgcagggccttgcttgatccaatcctcacttcccttaactctctccccattcccactctgcaccccattctgtcttccctgggctacagatacctgccccccaaccaaccctgacaactcccagacactcacacccatctcaagccctttacacatgcatagcactgagatctcactcggaagctctttttatcacgggttccttctcattctttgagtctcagcttgaaggtctcctcttatttgttcatagatta

SEQ ID NO: 759334 - DNA, 537 bp, Homo sapiens
actcccaggcccaaaaatatgtcttgaatctatacactgccatcgactcctccaggcaccagcatcttctggctggacaacctcagtcacctcccaggtagcctccatcatctctactcactgctcttcctgcctttccaccagtgcctcctccagacagctgtcccagagaccatgtcacttctcaaagcataattcagatcatgtcatttctctgcataaaaatgtacagtggctttccattgtagttagaattaaatccaaacatctcactgtgacctgcarggccttgcttgatccaatcctcacttcccttaactctctccccattcccactctgcaccccattctgtcttccctgggctacagatacctgccccccaaccaaccctgacaactcccagacactcacacccatctcaagccctttacacatgcatagcactgagatctcactcggaagctctttttatcacgggttccttctcattctttgagtctcagcttgaaggtctcctcttatttgttcatagatta

SEQ ID NO: 759335 - DNA, 615 bp, Homo sapiens
ttgagcccaggagttcgagaccagcttgggcaacacagtgagatttcatctctgtaggaaaaaaaaaaaaagagtgtaagcgtcagctccactggtggttctgtgagttccatatttggaaggattgggaggctttgtctgggctcagcagaaaggagctggaattgattagcaatgtctactacagatgcagtagagaagtaacatgtgtatcatcccaggactgaggggcccctgctcttatattctctgagatgtttcacaggacgagatcattccttggtgaaccctgcctatggcctgggtaagagaaagaagaatgtggccktcatgtttttccccacttttccttagttgaagtctttttcgacctattctcctggcccaagatctcatggaaggaggtcattccactcaagatagcacaaagaggggaggaggagtggtggaaggcactggagtcaggaatctctgaatggcaagagtgatcagagaggtctgaaggataggaggatgctgggctgtggctggtccttgagactttggggagtggagaaggtctgggcctggcagttgcaccagtctggagcagccagggttcctgggaccctctct

SEQ ID NO: 759336 - DNA, 619 bp, Homo sapiens
accactttccccatttagacgtgaagaaactgcggttcagagaagttacttctctgcagaagtggcaggactgagattcaaaggcagacatgtctggagcaaagccttgtcccaggatatgccccttgtcttcttgatccgatagtccatgagatgcctgagggctggggcgtgtctcactcgtcttgcacatccctgtctccacctagcgtgcagtaaatgcatgaatgaaggawtgcacgaatgaatggggccagctcctctgagcctcagtttctctgtctgtcaaataggctaacaagtccctgtctgcttctctttgatggggcttatgggaatcagagaagacagtggctctgagtgcctaaagtgatagctgatgtgaggcagggagttccctccaccttcagccttcctttctcctgtctccaccgctcttcagaacaacactgggcagagatatgagctccctcagggtagttggtttgaacatctcagggttgatccctgatgtctcacaataaaacagcactggatttcccccaaagctctgggagtctgtagctttgtagctctggctcaatctcttttcttctaaaagtgcatgacattaggaatc

SEQ ID NO: 759337 - DNA, 559 bp, Homo sapiens
ctgggctgaaagaggccactgggagacaggaggagctggacctggagagacggactcgaggaacttttgcacctggagaggccgccgagaggccggagctgggcctggggaggctgacttgaggacgacttgggcctgcagagtctgccgggaggcaggagctgtccctggacaggcctacttgacgacagtctggtcctgcagaggctgctgggaggaagagctgggcctggagagaacgactggaggaagtgcaggatttggagcccatgcaaaggagcaaacgccaggccgggagaggccgccctgacgcatgagcttggcctccggagggccgtgaggcaggagctgggcctgcgggggccgccccaaggcgggagcstggcccgaggaggccaaggcgaggcaagaggtgggcgtggagggcccactgttgaggtagaggccgccaacaggcaggggctgggcctggagaagccaacagaggcatgaactgggcctcaacaggccagcgtgagggaggacttctctcagcgtgagagaggccagtgtgaggcag

SEQ ID NO: 759338 - DNA, 649 bp, Homo sapiens
aactcagagttgaggatgaaaagtgaggataataacacctgcctgtaccctggtacagatcataagatgtttatttatttgtggagacagggtctcactctgttgcccaggctggagtgcagtggcacaatcatggctcactgcagccttgaactcccggcctcaagcaatcctcccgccttgatctacagggatttacaggcatgagttactgtgcctggccagatctcatgaagtttaaatatgacgtagcatctggcaggtagacttgctcagtggaggcctcttttttgcctggtgggtcagcaggtcctgtctgtacaaatgatgtttactggtccactcctccaggtttataaaaatgagcattttctctgtactgacaataatgaaataaggaaactgaggcttggagaggcaatatagccccgcccraaatcacatgggtaataagtcagagaactagaattcaaactccaagtctacctcctggacccaagctcttaacttctgtgctatgaactaataccacatggagaattttgattattttcttagcatttaccaccatataacttaatatgtattatacttatttatcttgggatgtcacttctgggattaggtttcaaaaaggactgtgaaacta

SEQ ID NO: 759339 - DNA, 610 bp, Homo sapiens
tggaggcctcttttttgcctggtgggtcagcaggtcctgtctgtacaaatgatgtttactggtccactcctccaggtttataaaaatgagcattttctctgtactgacaataatgaaataaggaaactgaggcttggagaggcaatatagccccgcccaaaatcacatgggtaataagtcagagaactagaattcaaactccaagtctacctcctggacccaagctcttaacttctgtgctatgaactaataccacatggagaattttgattattttcttagcatttaccaccatataacttaatatgtattatacttatttatcttgggatgtcacttctgggattaggtttcaaaaaggactgtgaaactrtctctcattttctttttctgtctcttcctctttcccctccctagccctggagtaagccagctgcttcttatgaagaggtgcaagtggacaagaactgatgtctccagcccacagccagagaggacctgaggcctgccagcagccgtcgaagtgagtttcaaagaggattctgaagccttgagagagctgcagccctggctgacaccctgattgtatcctcgtgagaggcctgaggcc

SEQ ID NO: 759340 - DNA, 610 bp, Homo sapiens
tggaggcctcttttttgcctggtgggtcagcaggtcctgtctgtacaaatgatgtttactggtccactcctccaggtttataaaaatgagcattttctctgtactgacaataatgaaataaggaaactgaggcttggagaggcaatatagccccgcccaaaatcacatgggtaataagtcagagaactagaattcaaactccaagtctacctcctggacccaagctcttaacttctgtgctatgaactaataccacatggagaattttgattattttcttagcatttaccaccatataacttaatatgtattatacttatttatcttgggatgtcacttctgggattaggtttcaaaaaggactgtgaaactatctctcattttctttttctgtctcttcctctttcccctccctagccctggrgtaagccagctgcttcttatgaagaggtgcaagtggacaagaactgatgtctccagcccacagccagagaggacctgaggcctgccagcagccgtcgaagtgagtttcaaagaggattctgaagccttgagagagctgcagccctggctgacaccctgattgtatcctcgtgagaggcctgaggcc

SEQ ID NO: 759341 - DNA, 523 bp, Homo sapiens
aaagtggttacatgattttatgttcccaccagtaatgtatgtggggttccaattcctccacatcttcactcacattttttttttctacacaggggcttgctctgtctctcaggctgcagcacagtaatgccatcasagttcactatagccttgacctcccaggcacaagtgattccctcatgtcagcctcctgagtagctgggaattataggtgcatgccaccatgcctggctaatttttatatttttttgtagtaatggggtttgactatgttgattaggctggtctcgtactcctggcctcaagtgatctgcccacctcagcctcccaaagttctggaattacaggctgagccactgtgcccggccttcaccaacatttgttattatctttttttttctttataccttaaagcagtgtaagaacaagtatcttcaattattctaaacaaaaattataatcccagggcattgggagggtgagataggaagatctcttgatgccggggttttgtttttgtttt

SEQ ID NO: 759342 - DNA, 594 bp, Homo sapiens
cctctgttgaggactggcttggagcttataaaggccgtacgcttgcactaactttgaatctggcttcatgggagaacagagggaacagagaaattgaacccaagaaagaagagcccagaacccagaaaggttgatgatggagttgactggagaggaagaggcaagcccagacatcacttttattgtctgttattttgcaaacggcaattttgtcagaggcattcgaaccagagtgacttcatcttgagtgagggytagaaaaaaatgcgactgggacttgctggactgcattcccagaaagttaggtattcctggccaggcatgtgggtcatgcctgtaatcccagcactttgggaggccgaggtgggcagattacaaggtcaggagttggagaccagcctggccaacatggagaaactctgtctctactaaaaatacaaaaattagccgggcgttgtggcaggttcctgtagtcccagctgctcgggaggctgaggaaggagaactgcttgaacccaggaggcggaggttgcagtgagccaagactgcaccactacactccagcctgggtgacagagcgagactccgtctctg

SEQ ID NO: 759343 - DNA, 631 bp, Homo sapiens
aacacaatgtacgtatataggtaatataaaatgagcctgtgacccagttacagctttcatacatttttctaaataatcgtagctggtagattaattggaagatggcagctcccgtagcaagtaggggggtaatttccctctggtgcatttgtgctgaaaacatgggtttactattctgaacgtaagggacattaacaatcagcctagccattccaacaccaatagatctttcattcttctttaactgttcttttctattcctctacatttctctgtttcctcccctgactcctcttcaatgccttctggtgaaaagaaagaagtgtcttttcttttttgagaatgctargctgcaattagtgtgcctcctttgacacaaaaactttccccagagaggtagatttacaacctacagtccactaagcacatgggcgttggagcttgactggctaaattctaatcccagttttataacgtgatgctatctcagttacgccttatttccctcatctgtaagatgagaatatcttagtgccttcttcataaagtttttgagtgaagtaaattgacttaaatatgtcaagttcttagggcaatgccttacatcgtaattctgatagacatttacctt

SEQ ID NO: 759344 - DNA, 611 bp, Homo sapiens
tccttacactagtaagaaccatcattttagaaagtaagacaaccttgaatccagctacaattacaaagaaaggaattttttagcatctgagctcattcccaaaatgaaattctaccaccatgatgtgtggaaagaacatttttttctccagagtcagagaaacaagtattgaaccctagctctaccatggactcagtcaatggccttaggcaaattacttaatctgtatttcagtttccttgcstgtaaaataggcttaaaactactaaccccttaggatcatgtaaagattctatgagatagaatatacaaagctcttggcaccaagtaggtgtatgaaaaatgatagcactcctcccaccccaccccttcaccaaactatgcaagagttgggttttgtgggggggtttcttgcggttgtttaaagagaataactcttaaagtctgaaactgtatttaggagacaataattaacactgcattaccattgtttaattcacaaccacattttcgcactgaattcccacatctctaaatcatacttctgcatatactcattgccatctacctcacgtttgacagtgcagtggtctatggccagaaccaccctg

SEQ ID NO: 759345 - DNA, 654 bp, Homo sapiens
attggaatctcaagtcttccaattacagaaagccctcatttaacatggtcaataagttcttggaaattgtgactttaagcaaaaagacctataaccatttttttcctcatcaatgttataatgaaatgacactgagctaaatgwtgttatttcggcacctgctgtacagcgtttagcttcctgtcacaatttctttttctttttcttttcttttctttttttaagatggagtcttgctctgttgcccaggctggagtgcagtggcacaatcttggctcactgcaacctccgcctccagggtcaagtgattctcctgcctcagcctcctgagtagcacccgccaccatgcccagctaatttttgtatttttagtagagatggggtttcaccatgttgggcaggctggtctcaaactcctgacctcaggtgattcacccgccttggcctcctaaagtgctgggattacaggcatgagccactgtgcctggcccctgtcccaatttctaagaacctattggtgacattaggtgaggacatactgaacaaatgatgtgaatttgggcaaaacttagtctccctgcattctgatccataaactgtggaaaaggaccctacttcataggattgttttgagatttaaatgaaataatgttt

SEQ ID NO: 759346 - DNA, 634 bp, Homo sapiens; identical to SEQ ID NO: 737224

SEQ ID NO: 759347 - DNA, 614 bp, Homo sapiens
ttttgcttccagggaagggaattggaccactgaaggtaggagcggggatggattactcatcggacattttaaataccttaaaagtgtgtgaatatattaccattctaaaagcaaaaacaaagaaaacaacaaacaaaaagtaggtaagaatatccaataaaattgaaaaaaaaaacaatattgagggagatttccyctatcgaatagtacaacatataaaactgtaataattaaaatagcgagattctgcttcaaaactagatagattactagagcagcaaagagcccagaaacttgcctgagactagcatggcagatggaagtaaacagataggctggcttacgagcaaagggagagttttatccagaaggcatcgtagtctcggaagatagaacaccaggaccagagggcagggaaagcagaagcactgcaaagcctatgagtgtccctgaaggattaatttccttctgatgtggtttacctgctcaggcaattctgtctcttccaacttccaaatgaaaaagaggtatgtattagtctgttctcatgttgctaataaagacatatctgagactggataatttataaaggaaagatgtttgatggacccatc

SEQ ID NO: 759348 - DNA, 477 bp, Homo sapiens
tacattattttgcttccagggaagggaattggaccactgaaggtaggagcggggatggattactcatcggacattttaaataccttaaaagtgtgtgaatatattaccattctaaaagcaaaaacaaagaaaacaacaaacaaaaagtaggtaagaatatccaataaaattgaaaaaaaaaacaatattgagggagatttcccctatcgaatagtacaacatataaaactgtaataattaaaatagygagattctgcttcaaaactagatagattactagagcagcaaagagcccagaaacttgcctgagactagcatggcagatggaagtaaacagataggctggcttacgagcaaagggagagttttatccagaaggcatcgtagtctcggaagatagaacaccaggaccagagggcagggaaagcagaagcactgcaaagcctatgagtgtccctgaaggattaatttccttct

SEQ ID NO: 759349 - DNA, 477 bp, Homo sapiens
tacattattttgcttccagggaagggaattggaccactgaaggtaggagcggggatggattactcatcggacattttaaataccttaaaagtgtgtgaatatattaccattctaaaagcaaaaacaaagaaaacaacaaacaaaaagtaggtaagaatatccaataaaattgaaaaaaaaaacaatattgagggagatttcccctatcgaatagtacaacatataaaactgtaataattaaaatagcgagattctgcttcaaaactagatagattactagagcagcaaagagyccagaaacttgcctgagactagcatggcagatggaagtaaacagataggctggcttacgagcaaagggagagttttatccagaaggcatcgtagtctcggaagatagaacaccaggaccagagggcagggaaagcagaagcactgcaaagcctatgagtgtccctgaaggattaatttccttct

SEQ ID NO: 759350 - DNA, 614 bp, Homo sapiens
ccatgtggtggttaggacttgtttgacatggactcaaggcacccctaggacctcccaaaaggattgcaggaagagtttgagaggagagggtcttgaggattttcagtaaggcttaaccaggcttgctctaatgttgggaaatgctgaactgaaatctctaccggtgaggactagtattatgacacagttgttaaattgagccctgattgtgggctgagtcatctgcttggcgttgtccctttaagagcctgctttgtctcccctgttctttatcttccagtccctcccaccaccttccccagttctcgttgttctccacattccttagcctcaagcttctactcaaccaatcctaccccacagatgttaattggatcttcacagtattcccaccstgttggggttatttagggagattgtttttagaagcaccaagtgtgtccagaaatatcccaagagaaattctgatgccattaagatagaaaagaatgtttccctaatggccatatcacctctatcttagaggattgttaggaagatccaaaatggcccaaattcatgaaaccaactctaagtggggatataaacgttgaagatgattggagtaaagcttc

SEQ ID NO: 759351 - DNA, 641 bp, Homo sapiens
tttaaaatcctaatcagcaaaatcactcacaatacccacttctaaaagtgaaacagttagctgcaatgtggtatcaatggacttagcattgtacctttaatatgtgtacactgtacatctcaaagggagtcaacttcacatatttgttcattaaacaatagtaatgatcttaataaggtactatgcatatttgatgagttttaatgtaaagcatatttcctaatatacaaaatatagcaaaagtaayctttcaattcgagtaattttcttccctagaatttattaagagcagaaacttccaaatgaatagaaatgaattatatataaatgattttttttctggaaaatcccacgcaaccaaaagagttaatattgcataaaaaatagataggcaaattaactgtggtacaagcattaaaagtatataaatgctggccaaaaaagctaaacagcccatggaaaaggacaactgtaattcaacaaatttaaattctaggcctaagggtaacaaaaatatagaccctaataagatggttccaactcaagttttcagaggaataactatttctgtggaatgactacaaatagtttctaatgctattatcaacaaaataataaaagcctggaggcaagataaaacg

SEQ ID NO: 759352 - DNA, 702 bp, Homo sapiens
agagaagaaaagacaggggaggggatcccatggcatcaaatataaggaaggaaaggggcaaactgcattgctcaaggaaagaccctggagttctcaagcctctggagagctcacctaacagtagagacactgaaaaaaaatgtttaggcagccacttgtcaccactgtggaaagctgtccatcgggttctagggtctgtgttccccagtaaacatacttgagcaaggcatctctttggggttagtggaagaaggtaagctctataatttatgcagagctttttytctctgtctcacacagttaggacattctcattgccattggcctttttgcttatagtaagcacactaattctggcccaggggttggcaagtttggagctcttgtctgggcattccagacaccaatcttgtgacactttctcaggatgggcagccctgagagtgcagaggggcttaaagcatttgctaataattgtactttttggctctttttttttaaaacacctctgttgccctgtctctgttgtcataaactttaaaggccatgtttaagagttagctcataggagttagaggtcccattgctcatttttgtagcttcctcctaatgtcaggggcagattgagtaataaaatgtatactgagaagaacttgcccttctgaagagtaggggtctgcattagcagattttctgagggcc

SEQ ID NO: 759353 - DNA, 604 bp, Homo sapiens
ccatcattcacagtgatttacatgaagtacgaatctggccagattcagatgttcaattttgtagcatattcaacgatttcagtattttctaacctgctttagacttacctagttttcttcgaaactagtgtccagtgaaaagctggccgggcgcggtggckcacgcctgtaaacccagcactctgggaggctgaggcgggcggatcgcctgaggtcaggagttcgagaccaacctgaccaacatggagaaaccccgactctactaaaaatacaaaattagccgggggtggtggtgcatgcctgtaatcccagctactcgggaggctgaggcaggagaatcgcttgaacccgggaggtggaggttgctgtgagccgagatcgtgccattgcattgcactgcagcctgggcgacaacagcgaaactccgtctcaaggaaaaaaaaaaaaaaagtatataaatatctgatgggaataatattctgaggatgccaaatattttgtcctcctcaatatcctggttcctagttgtccctcagttcctaggttaacagtctcacctgtctcacctgcaggcttaatgggggtctttcgtaatgtagaaagg

SEQ ID NO: 759354 - DNA, 619 bp, Homo sapiens; identical to SEQ ID NO: 752953

SEQ ID NO: 759355 - DNA, 583 bp, Homo sapiens
cggcctcccaaagtgctgggagtacaggcatgagccaccaggcccggcctgaatccctgttttcaattcttttgatcacacaccccaaaatggagtttctgggtcaaatagtaattatattttttgaggaaccactgtactgtttccatagtggttgcaccatttgacattcccaccaacagtgcacaggggttcctaygtctccatattctcatcaacatctgttattttctgcttttttgatagcaactatcctaatgggtatgaagtggtgttttattatggttttgatttgtagttcttcaatgattagtcatattgagcatgtcttcatgtgctttttggccatttgtatatcttctttggggaaacatctgttcgaatcccttgcccatttttgaattgcttgtgtgtgttgttgctattgagttgtaggagttctttatatattctagatattaaccccttgtcagatatatgatttgcaaatattttcttccattctgctggtttccttctcactctgttgattgtgttcttcgatgcacagaacttttaaaacttaatgtagtccagtttatca

SEQ ID NO: 759356 - DNA, 622 bp, Homo sapiens
gctagacagaagaattcccagtaacttccttgtgttgtgtgcattcaactcacagagttgaacgttcccttagacagagcagatttgaaacactctatttgtgcaatttgcaagtgtagatttcaagcgctttaaggtcaayggcagaaaaggaaatatcttcgtttcaaaactagacagaatcattcccacaaactgcgttgtgatgtgtttgttcaactcacagagtttaacctttctgttcatagagcagttaggaaacgctctgtttgtaaagtctgtaagtggatattctgacatcttgtggccttcgttggaaacgggatttcttcctattctgctagacagatgaattctcagtaacttccttgtgttgtgtgtattcaactcacagagttgaacgatcctttacacagagcagacttgaaacactctttttgtggaatttgcaagtggagatttcagccgctttgaggtcaatggtagaaaaggaaatatcttcgtatagaaacaagacagaatgattctcagaaactcctttgtgatgtgtgcgttcaactcacagagtttaacctttcttttcatagagcagttaggaaacactctgtttgtaaagtctgca

SEQ ID NO: 759357 - DNA, 358 bp, Homo sapiens
aactcacagagttgaacgatcctttacacagagcagacttgaaacactctttttgtggaatttgcaagtggagatttcagccgctttgaggtcaatggtagaaaaggaaatatcttcgtatagaaacaagacagaatgattctcagaaactcctttgtgatgtgtgcgttcaactcacagagtttaacctttcttttcatagagcagtkaggaaacactctgtttgtaaagtctgcaagtggatattcagacctccttgaggccttcgttggaaacgggatttcttcatattctgctagacagaagaattctcagtcacttccttgtgttgtgtgtattcaactcacagtgttgaacg

SEQ ID NO: 759358 - DNA, 445 bp, Homo sapiens
ttgtgctagacagaagaattctcagtcacttccttgtgttgtgtgtattcaactgacagagttgaactttcatttagagagagcagatttgaaacactgtttttgtggaatttgcaagtggagatttcaagcgctttggggccaaaggcagaaaaggatatatcttcgtataaaaactggacagaatcattctcagaaactgctgcgtgatgtgtgcgttcaactctcagagtttaacttttcttttcattcagcggtttggaaacactctgtttgtaaagtctgcacgtggawattttgaccacttagaggccttcgttggaaacgggtttttttcatgtaaggctagacagaagaattcccagtaacttccttgtgttgtgtgcattcaactcacagagttgaacgttcccttagacagagcagatttgaaacactctatttg

SEQ ID NO: 759359 - DNA, 396 bp, Homo sapiens
tgcgtgatgtgtgcgttcaactctcagagtttaacttttcttttcattcagcggtttggaaacactctgtttgtaaagtctgcacgtggatattttgaccacttagaggccttcgttggaaacgggtttttttcatgtaaggctagacagaagaattcccagtaacttccttgtgttgtgtgcattcaactcacagagttgaacgttcccttagacasagcagatttgaaacactctatttgtgcaatttgcaagtgtagatttcaagcgctttaaggtcaatggcagaaaaggaaatatcttcgtttcaaaactacacagaatcattcccacaaactgcgttgtgatgtgttcgttcaactcacagagtttaacctttctgttcatagagcagtt

SEQ ID NO: 759360 - DNA, 407 bp, Homo sapiens
taaagtctgcacgtggatattttgaccacttagaggccttcgttggaaacgggtttttttcatgtaaggctagacagaagaattcccagtaacttccttgtgttgtgtgcattcaactcacagagttgaacgttcccttagacagagcagatttgaaacactctatttgtgcaatttgcaagtgtagatttcaagcgctttaaggtcaatggcagaaaaggaaatatyttcgtttcaaaactacacagaatcattcccacaaactgcgttgtgatgtgttcgttcaactcacagagtttaacctttctgttcatagagcagttaggaaacactgtgtttgtaaagtctgtaagtggatattctgacatcttgtggccttcgttggaaacgggatttcttcattttct

SEQ ID NO: 759361 - DNA, 601 bp, Homo sapiens
cacagagcagacttgaaacactctttttgtggaatttgcaagtggagatttcagccgctttgaggtcaatggtagaaaaggaaatatgttcgtaaagaaacaagacagaatgattctcagaaactcctttgtgatgtgtgcgttcaactcacagagtttaacctttcttttcatagagcagttaggaaacactctgtttrtacagtctgcaagtggatattctgacctccttgaggccttcgttggaaaagggatttcttcatattctgctagacagaagaattctcagaaacttccttgtgttgtgtgtattcaactcacagagttgaacgatcctttacgtagagcagacttgaaacactctttttgtggaatttgcaagtggagatttcagccgctttgaggtcaacggtagaataggaaatatcttcctatagaaactagacagaatgattctcagaaactcctttgtgatgtgtgcgttcaactcacagagtttaacctttcttttcatagagcagttaggaaacacactgtttgtaaagtctgcaagtggatattcagacctctttgaggctttcgttggaaacgggatttcttc

SEQ ID NO: 759362 - DNA, 499 bp, Homo sapiens
aagaattctcagaaacttccttctgttgtgtgtattcaactcacagagttgaacgatcctttacacagagcagacttgaaacactctttttgtggaatttgcaagtggagatttcagccgctttgtggtcaatggtagaaaaggaaatatcttcgaataaagactagacagaatgattctcagaaactcctttgtgatgtgtgcgttcaactcacagagtttgacctttctkttcacagagcagttaggaaacactctgtttgtaaagtctgcaagtggatattcagacctctttgaggccatcgttggaaacgggatttcttcatattctgctagacagaagaattctcagaaacttccttgtgttgtgtgtattcaactcacagagttgaacgatcctttacacagagcagacttgaaacactctctttgtggaatttgcaagtggagatttcagccgctttgtggtcaatggtagaaaaggaaatatcttcgtata

SEQ ID NO: 759363 - DNA, 616 bp, Homo sapiens
agtcacttccttgtgttgtgtgtattcaactgacagagttgaactttcatttagagagagcagatttgaaacactgtttttgtggaatttgcaagtggagatttcaagcgctttggggccaaaggcagaaaaggatatatcttcgtataacaactggacagaatcattctcagaaactgctgcgtgatgtgtgcgtycaactctcagagtttaacttttcttttcattcagcggtttggaaacactctgtttgtaaagtctgcacgtggatattttgaccacttagaggccttcgttggaaacgggtttttttcatgtaaggctagacagaagaattcccagtaacttccttgtgttgtgtgcattcaactcacagagttgaacgttcccttagacagagcagatttgaaacactctatttgtgcaatttgcaagtgtagatttcaagcgctttaaggtcaatggcagaaaaggaaatatcttcgtttcaaaactacacagaatcattcccacaaactgcgttgtgatgtgttcgttcaactcacagagtttaacctttctgttcatagagcagttaggaaacactgtgtttgtaaagtctgtaagtggatattct

SEQ ID NO: 759364 - DNA, 547 bp, Homo sapiens
tagagagagcagatttgaaacactgtttttgtggaatttgcaagtggagatttcaagcgctttggggccaaaggcagaaaaggatatatcttcgtataacaactggacagaatcattctcagaaactgctgcgtgatgtgtgcgttcaactctyagagtttaacttttcttttcattcagcggtttggaaacactctgtttgtaaagtctgcacgtggatattttgaccacttagaggccttcgttggaaacgggtttttttcatgtaaggctagacagaagaattcccagtaacttccttgtgttgtgtgcattcaactcacagagttgaacgttcccttagacagagcagatttgaaacactctatttgtgcaatttgcaagtgtagatttcaagcgctttaaggtcaatggcagaaaaggaaatatcttcgtttcaaaactacacagaatcattcccacaaactgcgttgtgatgtgttcgttcaactcacagagtttaacctttctgttcatagagcagttaggaaacactgtgtttgtaaag

SEQ ID NO: 759365 - DNA, 570 bp, Homo sapiens
aactgacagagttgaactttcatttagagagagcagatttgaaacactgtttttgtggaatttgcaagtggagatttcaagcgctttggggccaaaggcagaaaaggatatatcttcgtataacaactggacagaatcattctcagaaactgctgcgtgatgtgtgcgttcaactctcagagtttaacttttcttttcattcagyggtttggaaacactctgtttgtaaagtctgcacgtggatattttgaccacttagaggccttcgttggaaacgggtttttttcatgtaaggctagacagaagaattcccagtaacttccttgtgttgtgtgcattcaactcacagagttgaacgttcccttagacagagcagatttgaaacactctatttgtgcaatttgcaagtgtagatttcaagcgctttaaggtcaatggcagaaaaggaaatatcttcgtttcaaaactacacagaatcattcccacaaactgcgttgtgatgtgttcgttcaactcacagagtttaacctttctgttcatagagcagttaggaaacactgtgtttgtaaa

SEQ ID NO: 759366 - DNA, 616 bp, Homo sapiens
agtcacttccttgtgttgtgtgtattcaactgacagagttgaactttcatttagagagagcagatttgaaacactgtttttgtggaatttgcaagtggagatttcaagcgctttggggccaaaggcagaaaaggatatatcttcgtataacaactggacagaatcattctcagaaactgctgcgtgatgtgtgcgttcaactctcagagtttaacttttcttttcattcagcggtttggaaacactctgtttgtaaagtctgcacgtggatattttgaccacttasaggccttcgttggaaacgggtttttttcatgtaaggctagacagaagaattcccagtaacttccttgtgttgtgtgcattcaactcacagagttgaacgttcccttagacagagcagatttgaaacactctatttgtgcaatttgcaagtgtagatttcaagcgctttaaggtcaatggcagaaaaggaaatatcttcgtttcaaaactacacagaatcattcccacaaactgcgttgtgatgtgttcgttcaactcacagagtttaacctttctgttcatagagcagttaggaaacactgtgtttgtaaagtctgtaagtggatattct

SEQ ID NO: 759367 - DNA, 526 bp, Homo sapiens
ggggccaaaggcagaaaaggatatatcttcgtataacaactggacagaatcattctcagaaactgctgcgtgatgtgtgcgttcaactctcagagtttaacttttcttttcattcagcggtttggaaacactctgtttgtaaagtctgcacgtggatattttgaccacttagaggycttcgttggaaacgggtttttttcatgtaaggctagacagaagaattcccagtaacttccttgtgttgtgtgcattcaactcacagagttgaacgttcccttagacagagcagatttgaaacactctatttgtgcaatttgcaagtgtagatttcaagcgctttaaggtcaatggcagaaaaggaaatatcttcgtttcaaaactacacagaatcattcccacaaactgcgttgtgatgtgttcgttcaactcacagagtttaacctttctgttcatagagcagttaggaaacactgtgtttgtaaagtctgtaagtggatattctgacatcttgtggccttcgttggaa

SEQ ID NO: 759368 - DNA, 570 bp, Homo sapiens
aactgacagagttgaactttcatttagagagagcagatttgaaacactgtttttgtggaatttgcaagtggagatttcaagcgctttggggccaaaggcagaaaaggatatatcttcgtataacaactggacagaatcattctcagaaactgctgcgtgatgtgtgcgttcaactctcagagtttaacttttcttttcattcagcggtttggaaacactctgtttgtaaagtctgcacgtggatattttgaccacttagaggccttcgttggawacgggtttttttcatgtaaggctagacagaagaattcccagtaacttccttgtgttgtgtgcattcaactcacagagttgaacgttcccttagacagagcagatttgaaacactctatttgtgcaatttgcaagtgtagatttcaagcgctttaaggtcaatggcagaaaaggaaatatcttcgtttcaaaactacacagaatcattcccacaaactgcgttgtgatgtgttcgttcaactcacagagtttaacctttctgttcatagagcagttaggaaacactgtgtttgtaaa

SEQ ID NO: 759369 - DNA, 559 bp, Homo sapiens
ttcgtataacaactggacagaatcattctcagaaactgctgcgtgatgtgtgcgttcaactctcagagtttaacttttcttttcattcagcggtttggaaacactctgtttgtaaagtctgcacgtggatattttgaccacttagaggccttcgttggaaacgggtttttttcatgtaaggctagacagaagaattyccagtaacttccttgtgttgtgtgcattcaactcacagagttgaacgttcccttagacagagcagatttgaaacactctatttgtgcaatttgcaagtgtagatttcaagcgctttaaggtcaatggcagaaaaggaaatatcttcgtttcaaaactacacagaatcattcccacaaactgcgttgtgatgtgttcgttcaactcacagagtttaacctttctgttcatagagcagttaggaaacactgtgtttgtaaagtctgtaagtggatattctgacatcttgtggccttcgttggaaacgggatttcttcattttctgctagacagaagaattctcagtaacttccttgtgttgtgt

SEQ ID NO: 759370 - DNA, 570 bp, Homo sapiens
aactgacagagttgaactttcatttagagagagcagatttgaaacactgtttttgtggaatttgcaagtggagatttcaagcgctttggggccaaaggcagaaaaggatatatcttcgtataacaactggacagaatcattctcagaaactgctgcgtgatgtgtgcgttcaactctcagagtttaacttttcttttcattcagcggtttggaaacactctgtttgtaaagtctgcacgtggatattttgaccacttagaggccttcgttggaaacgggtttttttcatgtaaggctagacagaagaattcccagtaacttccttgtgttgtgtgcattcaactcayagagttgaacgttcccttagacagagcagatttgaaacactctatttgtgcaatttgcaagtgtagatttcaagcgctttaaggtcaatggcagaaaaggaaatatcttcgtttcaaaactacacagaatcattcccacaaactgcgttgtgatgtgttcgttcaactcacagagtttaacctttctgttcatagagcagttaggaaacactgtgtttgtaaa

SEQ ID NO: 759371 - DNA, 479 bp, Homo sapiens
ggatattttgaccacttagaggccttcgttggaaacgggtttttttcatgtaaggctagacagaagaattcccagtaacttccttgtgttgtgtgcattcaactcacagagttgaacgttcccttagacagagcagatttgaaacactctatttgtgcaatttgcaagtgtagatttcaagcgctttaaggtcaatggcagaaaaggaaatatcttcgtttcaaaactacacagaatcattcccasaaactgcgttgtgatgtgttcgttcaactcacagagtttaacctttctgttcatagagcagttaggaaacactgtgtttgtaaagtctgtaagtggatattctgacatcttgtggccttcgttggaaacgggatttcttcattttctgctagacagaagaattctcagtaacttccttgtgttgtgtgtattcaactcacagagttgaacgatgctttacacagagcagactt

SEQ ID NO: 759372 - DNA, 470 bp, Homo sapiens
tggatattttgaccacttagaggccttcgttggaaacgggtttttttcatgtaaggctagacagaagaattcccagtaacttccttgtgttgtgtgcattcaactcacagagttgaacgttcccttagacagagcagatttgaaacactctatttgtgcaatttgcaagtgtagatttcaagcgctttaaggtcaatggcagaaaaggaaatatcttcgtttcaaaactacacagaatcattcccacaaactgcgttgtgatgtgttcgttcaactcacagagtttaacctttcygttcatagagcagttaggaaacactgtgtttgtaaagtctgtaagtggatattctgacatcttgtggccttcgttggaaacgggatttcttcattttctgctagacagaagaattctcagtaacttccttgtgttgtgtgtattcaactcacagagttgaacgatgctttacaca

SEQ ID NO: 759373 - DNA, 538 bp, Homo sapiens
ctgcgttgtgatgtgttcgttcaactcacagagtttaacctttctgttcatagagcagttaggaaacactgtgtttgtaaagtctgtaagtggatattctgacatcttgtggccttcgttggaaacgggatttcttcattttctgctagacagaagaattctcagtaacttccttgtgttgtgtgtattcaactcacagagttgaacgatgctttacacagagcagacttgaaacactctttttgtggaatttgcaagtggagatttcagccgctttgaggtcaatggtagaaaaggaaatatgttcgtaaagaaacaagacagaatgattctcagaaactcctttgtgatgtgtgcgttcaactcacagagtttaacctttcttytcatagagcagttaggaaacactctgtttgtacagtctgcaagtggatattctgacctccttgaggccttcgttggaaaagggatttcttcatattctgctagacagaagaattctcagaaacttccttgtgttgtgtgtattgaactcaca

SEQ ID NO: 759374 - DNA, 609 bp, Homo sapiens
aacattcttttcgtagagcctccatgtggacatttggagccctttcaggcctgtggtggataaggaaatatcttcacataaaaactagagagaagcattgtcagaaacttcttggtgatgattgcattcaactcacggagctgaggattccttttgatrcagcagtttggaaacactctttcggtggaatctgcaagcggatatgtggacctctttgaacattgcgatggaaaagggataatcttcccataaaagctaaactgaagcatgctcaggaacttctttgtgatgtttgcattcaactcgcagagttgtactttccttttgatagagcagctttgaaaccctctctttctagcatctgcaaggggacatttggagggcttcgaggcctggggtggaaaaggaaatatcttctcatcaaagctacatggaagcattctcagaagctgctttgtgatgattgctttcaagtcaccgagctgaacattccctttgatagagccgttgggaaacacacttttggtagaatctgaaaggggagatttggaccgctttgaggcctatggcagtagaggatataactgcacataaaaacgagacagtagc

SEQ ID NO: 759375 - DNA, 609 bp, Homo sapiens
aacattcttttcgtagagcctccatgtggacatttggagccctttcaggcctgtggtggataaggaaatatcttcacataaaaactagagagaagcattgtcagaaacttcttggtgatgattgcattcaactcacggagctgaggattccttttgatgcagcagtttggaaacactctttcggtggaatctgcaagcggatatgtggacctctttgaacattgcgatggaaaagggataatcttcccataaaagctaaackgaagcatgctcaggaacttctttgtgatgtttgcattcaactcgcagagttgtactttccttttgatagagcagctttgaaaccctctctttctagcatctgcaaggggacatttggagggcttcgaggcctggggtggaaaaggaaatatcttctcatcaaagctacatggaagcattctcagaagctgctttgtgatgattgctttcaagtcaccgagctgaacattccctttgatagagccgttgggaaacacacttttggtagaatctgaaaggggagatttggaccgctttgaggcctatggcagtagaggatataactgcacataaaaacgagacagtagc

SEQ ID NO: 759376 - DNA, 626 bp, Homo sapiens
tatcctttgtgttaacaatccaattacaatcttttagttatttttaaatatacaattaagttattattgactaagatcaccctattttgctatcaaatagtaggtcttattcattctttctaagtataacttttgtacccattaattatcatcacctcccccctcgacccctactacccttcccagcctctggtaatcctccttctaccctctgtgtccatgagttgaattattttgatttttagataccacaaatgagtgagaacatgtgatgtttgtctttctgtgtctgacttatttcacttaacwtaaagagctgcagttccatccatgttgatgcaaatgactggatcttattctttttatggctgaatactactccattgtgtatatgtgccacattttctttactcattcatctgttgatggacatttaggttgcttccaaatcttagctgttgtaaacagtgtgcagcaaacattggagtgcagatatctctttaatatactgatttccttttggggggttatatatgcagcaatgggattgctgcatcatatggtaactcaatttttagttttttgaggaacctccgaattgttcctcatagtagttgtagtaattt

SEQ ID NO: 759377 - DNA, 690 bp, Homo sapiens
gagtgtttggcatgaaaatgcctgctgtggagcatggcctgggtgcccatccccgaagactcaccatgcttctctaggtggctttagcatttgttggatgcaagacatagacagagaagagctatcttgcctgtgggagggggccagtctgacctgagcacacaccctgttcagctggtctataccagggtccccacaggaccaaacttgtgtagcctctgctaccaagccaaggtgctttctagtggccactaccatagctcttttgctgaaataccctgcctaagagaaagtttctgcatttgagcccctgctgatgagcagctgcattcagccctcctccattggcatgtagtcacmcacaactgtaaactactgcttcatcagtatgagcatggacccatggccacctaccaccactggtgcatccacacatgtaaacctctgccaccgaccacacacccgctaaagcatttttgccagtattcctcattagagtgttcttgcccatggactggtaacacatctacccctccagcataatagattattttaaacatttattttattttattttattttatttattttatttttatttccataggtgttgggggaacaagtggtgtttgtttacataagctctttagtggtgatttctaacatttggtgcacccatcacctgagcag

SEQ ID NO: 759378 - DNA, 481 bp, Homo sapiens
aatggaatataatcaacccgaatagaatggaattgaaaggaatcaacccgagtggaatgccatggaatggaatggaatggaatggaatggaaaggaatgatacggaatagaatggaatggaacgaaatggaatggaatggattgaacccaattggaatgaartggaatggaatgcaatggattggaatggaatgcaatggaatgaaatggaattgaatggaatcattccgagtggaatagaaggtaatgtattcaagcagaagggaaaggaatggaatcaacctcagtgcaatggaatgtaatagaatggaatggaatggaatggaatggaatggaatggaatggaatgaaatctaccagaatgtaatggaatggaatggaatggaatggaatggaatggaatggaacatacccgagtggaatggaatgtaatggaattgtatggcatggaatggaatgaaacagaatagaatggaattta

SEQ ID NO: 759379 - DNA, 672 bp, Homo sapiens
tggaatggaatggaatggaattgtgtggaacggattggaatggagtggactgtaaaggaattgaatagaatcaactcgaacggaatggaatgcaacggaatgcaatgaagtggaatgcaatggaatggaatggaaaggtacggaatagaatggaatggaaagaaatggaatggaatggattcaacccaattggaatggaatggaatggaattgtgtggaatggaatggaatcgaatgcagtgtaaagaactgaatagaatcaacccgaatggaatggaatggaatggaaggaatggaatgcaatggaatggaatggaatggactcaactcgagtggaatggaatggtatggaatggattggaatggaatgcaatggaatggaatggaatcattccgagtggaatggaagggaatgtaatcgagtggaatggaaaggaatggaatcaacccgagtggaatggaagggaatggaatggaagggaaaggaatagaatggaatcaacccgagtggaatggaatggaatggaatrgagtggaatggaatggaatggaatataatcaacccgtaaggaatggagtggaatggaatcaacccgagtggaatggcatggaatggaatggaatggaatgaaatggaatggaatggaacggtatggtaaggaatagaatgga

SEQ ID NO: 759380 - DNA, 675 bp, Homo sapiens
ccttccaatccatttcgttccattccattctattccttaccataccgttccattccattccatttcattccattccattccattccatgccattccactcgggttgattccattccactccattccttacgggttgattatattccattccattccattccactccattccattccattccattccactcgggttgattccattctattcctttcccttccattccattcccttccattccactcgggttgattccattcctttccattccactcgattacattcccttccattccamtcggaatgattccattccattccattgcattccattccaatccattccataccattccattccactcgagttgagtccattccattccattccattgcattccattccttccattccattccattccattcgggttgattctattcagttctttacactgcattcgattccattccattccacacaattccattccattccattccagttgggttgaatccattccattccatttctttccattccattctattccgtacctttccattccattgcattccacttcattgcattccgttgcattccattccattcgagttgattctattcaattcctttacactccattccattccaatccgttccacacaattcca

SEQ ID NO: 759381 - DNA, 431 bp, Homo sapiens
cttgaccatgaaaccttgcagattcagtatgcaaagaatctgcggtgggaaaagaaaccatgtggagtttatggcaggctgcatcaggagaataacaagggagattcttgaagttctggagcaaggtcacgctctctgctgcaaagcacacaccgtttgcaraaagctcccagtctatacttactatctatacttacctaatctatacttatgcattctcttgcatttataatattatttatttgcaccttctttttctttcccttttttaactttccagagttttatctatcttagtttttttgtttctttgtttttccaaaagaatcagcctttctgagccctggagggtcgagtacccaaccatgggtaatcaggaactgtgcaactaacctgcctatcagagtctgggttccaacagaaccagaggg

SEQ ID NO: 759382 - DNA, 620 bp, Homo sapiens
ttgtggcactattcacaatagcaaagacttgcaaccaacccaaatgtccatcaatgatagactggattaagaaaatgtggcacatatacaccatggaaaactatgcagccataaaaaaggatgagttcatgtcctttgcagggcgcggatggagctggaaaccatcattctcagcaaactatcccaaggacagaaaaccaaacaccgcatgatctcactcataggtgggagttgaacaaagagaacacatggacacaggcagggaacatcacacaccgggacctcctggggggtggggggctgagggaaggatagcattaggagaaatacctaatgtaaatgtcgagtcgatgggtgcagcaaaccaacgtggcacatgtatacctatgtaacaaaactgcactttgtgcacatgtaccccagaacttaaaatatwttaaaatattgttatatatattatatattttatatttatacatatttatatatatatatatatatatatatatatatatatataattgaatactactcagccataaaaaggaatgaaataatggcatttgcagcgacctggatggaattggagccaattattctaagtgaagtaactcaggaat

SEQ ID NO: 759383 - DNA, 565 bp, Homo sapiens
aaagctttgactttttttttttcccatatgggctctgtagttgaatttatttttaaggttttttttttttttaagtgcattatactttgttgctaacataattgagtgtgatatgttctcggcagtgctttctaatggaactttstgggatgatataaatattctccctttgccttgaccaatgtggccaacactagcctattgaatgtttgaaatggggttagtgtaattgaagagctgcatgtgtacattttaataaatgtcaatgaaagccacatatggctacaatatgggacaacatagttctatgtgattattgctgctttattagatgaccaaggcagtatagcaaaatggttaagagcatgggctctggagttacatggtttgagttatatcttagctccaccattactagcttagtgtacatacactgggaaataaccctaagtattggtctggaggccggggggcaggtggagagaccctcagataagcattgttttatagtggacttgtgtcatttaaggtttgtttcatcatagtcttcaagcaagaagctggg

SEQ ID NO: 759384 - DNA, 565 bp, Homo sapiens
aaagctttgactttttttttttcccatatgggctctgtagttgaatttatttttaaggttttttttttttttaagtgcattatactttgttgctaacataattgagtgtgatatgttctcggcagtgctttctaatggaactttctgggatgatataaatattctccctttgccttgaccaatgtggccaacactagcctattgaatgtttgaaatggggttagtgtaattgaagagctgcatgtgtacattttaataaatgtcaatgaaagccacatatggctacaatatgggacaacatagttctatgtgattattgctgctttattagatgaccaaggcagtatagcaaaatggttaagagcatgggctctggagttacatggtttgagttatatcttagctccaccattactagcttagtgkacatacactgggaaataaccctaagtattggtctggaggccggggggcaggtggagagaccctcagataagcattgttttatagtggacttgtgtcatttaaggtttgtttcatcatagtcttcaagcaagaagctggg

SEQ ID NO: 759385 - DNA, 615 bp, Homo sapiens
caccactgtttcaatagtatatgatcctgtgcacatgcccacgcattacaccattgatcccatcccaatgaatccccacaggcctcttatatgcccttggtacatttctgcccttctcgagcactggaatgatagttttgcataccgtgaggctttgatgtccttaaagcaggtattggtgcggagactgattcatagcatgtacaggggatatattttagaataaacaagacaagcgggctccaagtctstttgtgagtaacttcaaaagcatcccccacttttattcatgggcattagtgtaattaacccaaatgtttaaaatacaagctgatcctctaacaatgtagaagacagggagaaaatatcttctttattaagggcatcacctacagtgtgcatagaagcattattgcattgcttctcccttaaaatctatacaccaattactacagaaagcaagagttctccctagtgtttccaagaagcaagtctgtaagaatgatatgtgtcgataccctgaagcctcagaggagcaaataactgttttaactctcccaggacccacttccttgtctgtgctgccatggaaaccattctcttgtccaaggcgag

SEQ ID NO: 759386 - DNA, 615 bp, Homo sapiens
caccactgtttcaatagtatatgatcctgtgcacatgcccacgcattacaccattgatcccatcccaatgaatccccacaggcctcttatatgcccttggtacatttctgcccttctcgagcactggaatgatagttttgcataccgtgaggctttgatgtccttaaagcaggtattggtgcggagactgattcatagcatgtacaggggatatattttagaataaacaagacaagcgggctccaagtctctttgtgagtaacttcaaaagcatcccccacttttattcatgggcattagtgtaattaacccaaatgtttaaaatacaagctgatcctctaacaatgtagaagacagggagaaaatatcttctttattaagggcatcacctacagtgtgcatagaagcattattgcattgctkctcccttaaaatctatacaccaattactacagaaagcaagagttctccctagtgtttccaagaagcaagtctgtaagaatgatatgtgtcgataccctgaagcctcagaggagcaaataactgttttaactctcccaggacccacttccttgtctgtgctgccatggaaaccattctcttgtccaaggcgag

SEQ ID NO: 759387 - DNA, 543 bp, Homo sapiens
taaagcaaatgttgataaaatattttcaaaattacaagtttatggcagtaactgatatcactagcccttcccaaagaaaaatttagtcgaaaaacatgtattaatcctgtcattagtcttttggagaactagagggtgtggcaagagttatacattcttgtccttccctgcagggaggccatacatatatttatttgagacatttcggcaccagaacttttttcctttgcaaataataatgtaactttatatttttartctttgataattttcaaaatgtctttatttcttaaaattgtgatttaaaaagtgtttctattttaaaagtttattttgagcttcaaagccttcctatgaaataggcaagagggagtttactggtatcaaagacttgagaaaacttgtgcttaaagagcctgagcaacgtgtataaggtcatgaagcatggaaacaacaaattccgagtaccactgtatttagggtttctaaatgctatcatcatgctcctgcaaagaatgtataaccagtacaaacatctagtgg

SEQ ID NO: 759388 - DNA, 528 bp, Homo sapiens
catcttcttgtagttcagtaatcatttttggtttgattatattttaatagttaataaattataagaattaataatttagcacacagtaaggaagaataagtttttacatactttttggtagtgattgcttactatttgtatttggagttttagttttgattaaaacaaatattataacaaatattcatactttctatgtaagcttatttatttttgttacttaactaaaattcattagattttggctttctcacatagtgcaaatagaatattgaaatttttggatatacagtatatttctgtaatttatgtgtgrtggttctttccctttatttgccaaaataaatgctgttgttattaaaatagtcacttaagtacgatttggcctaaatgaggataactgggttgcaaatgctgcacatcttaatatctgaatgtcttctagatgcttaataatataattgatcagaaagatcttattagaagaaaggtgggaaaagtaaagaaaaaattacgaaaaaaggggaa

SEQ ID NO: 759389 - DNA, 597 bp, Homo sapiens
cagtttttcacagcagctgtcctaacttacaattgctctaacagtgtgtaagcattctcctttctacacatcctcatcaaaaatattttttgtctttttattatagccattctaactggaatgaggggatatctcactgtgattttgatttgtctgactgggttatttcaaaagatctgtcttcaagttcagaaatcatttcttttgtttgatctagtctattgttggagtgctcaatggtattgttttatttcatttattaaattcttcagtactaaattttctacttggttctttttacgatatctgtccctactgaatgtctcattgagatcacaatttttgtctcatttatttgtattgcttacttatgttctcttgtatgtcactgagtttctttgacattattgttttaaaatcatttccaggcacttcatagatttccttttcttgggctctaytatgggagaattattgtgttcatttggaagtgtcattttccttgctttttcctattttgctttctcatatttagtatattgtgttcttacattaatatctgcacatttagtgtaactcacatttcttaatttatgg

SEQ ID NO: 759390 - DNA, 644 bp, Homo sapiens
aacgctataaaccaactgcagttccctaaatgcatgctgattttcgacacttgtatgtctttcctcctaatgttttcactacttgaagtattcttttcttggctgtcttgttcccactttccaagatttagttctgcaatactcatcttcgcaagtttttttcagatttcctgcaagcccytcttccaggttctagagaactctgtgcttaattcaagaaaagtacttgttacaccttattttaattggcttgtgcctgtttttttcacctttgcttaggggggctaattaaaagcaggtgttgcctttgtaatacgctcagaatctcacacagattctgacaacacatgacttcaaaatgaacaaatacatcgatgaatgaatgaacaaaaatcaatatagtttatcttttccaaagtaaactgaaatataaattttactttttcacttatttaaggagttgtgtcacttcatttggacttccattcagcaaatgttgataatttattgtgtcctagacattgtgacagaccctggaaggctcacaggagtgaggtattattctgtacttcaaagcattcaccaagtgaaatgcaaaccaaatatttaagcaaatcctgcatcacacaacatataatacaatc

SEQ ID NO: 759391 - DNA, 644 bp, Homo sapiens
aacgctataaaccaactgcagttccctaaatgcatgctgattttcgacacttgtatgtctttcctcctaatgttttcactacttgaagtattcttttcttggctgtcttgttcccactttccaagatttagttctgcaatactcatcttcgcaagtttttttcagatttcctgcaagcccttcttccaggttctagagaactctgtgcttaattcaagaaaagtacttgttacaccttattttaattggcttgtgcctgtttttttcacctttgcttaggggggctaattaaaagcaggtgttgcctttgtaatacgctcagaatctcacacagattctgacaacacatgacttcaaaatgaacaaatacatcgatgaatgaatgaacaaaaatcaatatagtttatcttttccaaagtaaactgaaatataaattttactttttcacttatttaaggagttgygtcacttcatttggacttccattcagcaaatgttgataatttattgtgtcctagacattgtgacagaccctggaaggctcacaggagtgaggtattattctgtacttcaaagcattcaccaagtgaaatgcaaaccaaatatttaagcaaatcctgcatcacacaacatataatacaatc

SEQ ID NO: 759392 - DNA, 644 bp, Homo sapiens
aaaagaaatgacataggcgatacagcaggtcttctaaggacaactcataacaaattatatcatatataacctacaattttgtatagatctttccaaaagcaaggacaaacatcactagctagagctacagtcctctgatgaatatggtacactgaaaatttgatcttaagcaatggcatttgcaaattatagacagttagtaaaaatgccatgacattattaaaaaatctaccatttayggatatatgatatggaattgcctactgaagagagatcaaatttaactccagaaccatgctgtctgtatgttatctgaagtttgtatatattttcttacctttattagctgttggtatttctaattctattgtgtgttttctcatattctccattaactcttgtgacttttatgaagtattttattaaaccatccctacagatgatccataattgtgatcaattcttttgcccaaaagggacacctcagattagtaacattacatttataatgatgcctttaatgagactcttttctttgcagggatcctttacattacatacacatttacacctttaccacttcctaaacagggatgagatcaggtttctacgagaaatcacatcgtcttttcaccatttaacac

SEQ ID NO: 759393 - DNA, 644 bp, Homo sapiens
aaaagaaatgacataggcgatacagcaggtcttctaaggacaactcataacaaattatatcatatataacctacaattttgtatagatctttccaaaagcaaggacaaacatcactagctagagctacagtcctctgatgaatatggtacactgaaaatttgatcttaagcaatggcatttgcaaattatagacagttagtaaaaatgccatgacattattaaaaaatctaccatttacggatatatgatatggaattgcctactgaagagagatcaaatttaactccagaaccatgctgtctgtatgttatctgaagtttgtrtatattttcttacctttattagctgttggtatttctaattctattgtgtgttttctcatattctccattaactcttgtgacttttatgaagtattttattaaaccatccctacagatgatccataattgtgatcaattcttttgcccaaaagggacacctcagattagtaacattacatttataatgatgcctttaatgagactcttttctttgcagggatcctttacattacatacacatttacacctttaccacttcctaaacagggatgagatcaggtttctacgagaaatcacatcgtcttttcaccatttaacac

SEQ ID NO: 759394 - DNA, 633 bp, Homo sapiens
aatacaacagttctcttagaaatgtaaatgagaatattttctcaaatcaacaaagaggatgaaaaacaatgttgaaggcatcatccaaaaagtaaaccaaaagtttataatagaaagtaatcaactgaggaaagttatcaccccaagaaaactgtttctcatttctgtatctgtcaaatcgggataataatattaacaccaacgacaataatgtcctattaaacatggtacagtgaatacccagctcatgtagttktcattaggattaacttagtgaagagagttagtaaagggacttagaaccatgactggaataaagaaaacactcagtaagtatcagaatttggtatcaacaacaatattattatggtgaaaaatacatattccaacaacaggagaaaaagtaaaagggatagagagcagattaaaaagaaattacgtataaagtatgtctccaaactaagagtgtgtatctcaagatctgaactatccacccagcattcaacacaattattgaaaatagatgcaggccaaaagcaatttcacaacactaggagtaatgggaagatcttaaagttttcggagaggagaaggaggaaaggagtgaagagataaatatatacaatgattagt

SEQ ID NO: 759395 - DNA, 608 bp, Homo sapiens
gtgcactggggcttgacctcttgtgccactggaaacccagagctcgccaggaaggagccaaggctagactccaaggatgaaagatcaaaagatcatgtaagggaatggggccacaaccatctcagccatccagctgaagtcccaaatatgtgaatgaggccatcctagattctctcatcccagccaagctagccagagcacaagaaccacaacagctgactccacagaattgaactaacagttgttttaagtcattaagtgttggagtggactgctacacagcaaaagtggactgctataccctcatcttttctcaggaagcctctggagaatgtacacctccaggcagaaaaaagaagatatagttggttccaggaagcagttgatccaatgctaggaagtggcaaagagaatgccttgacatactttgaagttagacacgagacagtagytaagcagcaaaaatgagcaacaagtcagactggagcagaaaagagactataggaaggcactgtcgaagaaaaaacacaagtagaaatgaagtcattttagacttgtgaaaaaaaaaacaggcaaagaaacacaaagaggcaattactaactccagg

SEQ ID NO: 759396 - DNA, 598 bp, Homo sapiens
gccatctaggttcaataataaattgtattatatgtgctttattacatacccacccatctattcatcgtttaatccaaatatcactccattttatttcagtgtaagttgcagacatcagtactcttcacccttaaaacacttcagcaggcatatcattcactagagttcaatattcatgatctcttaatgcaaacttcatatataaagaaacgtacaggctgggcacgatagctcacacctgtaattccagcactttgggaggctgargtgggtggattacctgaggttgggagttcgagaccagcctgaccaacatggagaaaccccgtctccactaaaactacaaagtagctgggtgtggtggtgcttgcctgtaatcccagctacttgggaggctgaggctggagaatcgcttgaacccgggaggcagaggttgcagtgagccgagaacgcaccatcgcactccagcctgggcaataagagcgaaactccttctcaaaaaaaaagaaaagaaagaaaaagaaacgtacaaatcttaggtgtaccattccatgagctttgacaatcaaatgtgattattattcactggcatttgact

SEQ ID NO: 759397 - DNA, 598 bp, Homo sapiens
gccatctaggttcaataataaattgtattatatgtgctttattacatacccacccatctattcatcgtttaatccaaatatcactccattttatttcagtgtaagttgcagacatcagtactcttcacccttaaaacacttcagcaggcatatcattcactagagttcaatattcatgatctcttaatgcaaacttcatatataaagaaacgtacaggctgggcacgatagctcacacctgtaattccagcactttgggaggctgaggtgggtggattacctgargttgggagttcgagaccagcctgaccaacatggagaaaccccgtctccactaaaactacaaagtagctgggtgtggtggtgcttgcctgtaatcccagctacttgggaggctgaggctggagaatcgcttgaacccgggaggcagaggttgcagtgagccgagaacgcaccatcgcactccagcctgggcaataagagcgaaactccttctcaaaaaaaaagaaaagaaagaaaaagaaacgtacaaatcttaggtgtaccattccatgagctttgacaatcaaatgtgattattattcactggcatttgact

SEQ ID NO: 759398 - DNA, 543 bp, Homo sapiens
cacctaagccaccctagtccctgccttcctcacccatgagcgaccgcacagacccacacagggcctgccaaggggctgtgtgtacagaaaaacaggtgtgtgtagcccctactcaggggctttcctaagcctggggaaagggaagaatcggggagggagccactgcctcccaaggccacgcgcatgcgcacgcactgtcttggcaacatcctccatggggtgaggcctcaacctgccccattccagagcaaggggcgggggtggtggcgcgcccacagccaggcaggcctgactcaggggagaggaatgargggggagggcacagctgtccaggtggccttgctcaggaggccgaaccctctgaagccaacccagcccccaactccctactcctgtctgaactgtccctggccagcccatgagccagaatgctgggtgttcagaggcccttagcctcaacccctcactgcacaggtggacaaacgaaggcccccgctccccaaccattacacattctagaagcagaagcagaaaccagaatgt

SEQ ID NO: 759399 - DNA, 630 bp, Homo sapiens
ccatgccagctagcaggtaaaccagagactgacttgctgacatcttccttaccttattcctcaggtatacatcctaggcagggaaaatttacagaatgcatcccagcctgattctggaagaatgagaaagttatctgagggctcccaagggcctcctgtgcataccatctttatcttccaacttagaactaaccaaattcagtctttttgtgtaatgaaaaaaggataagctgggcacagtggctcacacctgtaatcccrgcactttgggagaccgaggcgggaggactgcttgagcccaggaacaagaccagcctgggcaacatagcgagaccctgtctctatacaaaaataaagaagaaaaaaggatgcaggaaattagcaataggatagccaacaccctcactaaagcatcaatttccatatgatgttaagtaccaggtagaaatctctctgactttaaggagctttggacacaaaaacttttccttaaacaagccatttattttctaaacatggacttccactagttgtgtaactctcctagaattctagccaatatttaataattgttgccacacttttgtatttcaacttaagtattttatattattaaaaactaccaattat

SEQ ID NO: 759400 - DNA, 630 bp, Homo sapiens
ccatgccagctagcaggtaaaccagagactgacttgctgacatcttccttaccttattcctcaggtatacatcctaggcagggaaaatttacagaatgcatcccagcctgattctggaagaatgagaaagttatctgagggctcccaagggcctcctgtgcataccatctttatcttccaacttagaactaaccaaattcagtctttttgtgtaatgaaaaaaggataagctgggcacagtggctcacacctgtaatcccagcactttgggagaccgaggcgggaggactgcttgagcccaggaacaagaccagcctgggcaacatagcgagaccytgtctctatacaaaaataaagaagaaaaaaggatgcaggaaattagcaataggatagccaacaccctcactaaagcatcaatttccatatgatgttaagtaccaggtagaaatctctctgactttaaggagctttggacacaaaaacttttccttaaacaagccatttattttctaaacatggacttccactagttgtgtaactctcctagaattctagccaatatttaataattgttgccacacttttgtatttcaacttaagtattttatattattaaaaactaccaattat

SEQ ID NO: 759401 - DNA, 520 bp, Homo sapiens
aaagttggtgattaaaatatatttttaaaaccgagatccctggttacactaaggttagggaagtaaattaatgtgctttagatttcctaggaaactgaggcctaggcccaggtttacagctgtcccctcttcctttcctcttcagagagtacacactagatgtgtacagactctcctccgtggtcacacagcacgattccaagaaggctggagctgaggtggtaaagcaggtggagcaccctttgctgagtggcctcttataccccggactgcakgtacttaagggggatggagtggcccgatgaccttttctgctctggtttgatgacaggcatatcttattgcactttgctttactgcactacgcagatattgtgttttttacaaattgaaggtgtgtggcaaccctgtgtacagcaagtccaccagcaccatttttccaacagcatgtgctcacttcgtgtctctgtgctacattttggtaattctcacagtatttcaagctttttcattattatca

SEQ ID NO: 759402 - DNA, 579 bp, Homo sapiens
gtgctcacaaatatccctttgcagattctacaagaaaagagtttcccatctactcaatgaaaagaaacatttacctctgtgagatgaatgcacacattacaaagcagtttctcagaaaccttctgtagagtttttatgtgaaaatatttcctttttccccgtaggactcaaagcgctcacaatatccctttgctgattctacaaaaagactgtttccaaactgctcaatcaaaagaatggttcaactgtttgagaggaatgcacacataaaacagaagttctcagaaagcttctgtctagtattcatgtgaagatatttcctttctcactattggcctcsaagtgtacaaaaatatccctttggagattctacaaaaagactgtttccaatatgctaaatcaatataaaagttgaagtctgtgagatgaattcaaacatcacagagcactttctcagacaccatctttctagttttgctgtgaagatatttactttttcacctcaggcttcaaagtgctcacaaatatccttttgtagattctacaacaagacttttagtttctcagaaatcttctgtc

SEQ ID NO: 759403 - DNA, 629 bp, Homo sapiens
aagtaaatatcttcatctaaaacctagacagaagcattttgagaaaactctttgtgatgtttgcattcatctcactgagttgaacctttctattcattaagcagtgtggaatcttactttttgtgcaatctgcaaaggaatatttgtttgcagtttgagacctatggtgaaaaagtaatatcttcacataaaaactagacagtagcattctgagaaactaatttttttatgtgtgcattgatctcacagagttgaacctttcttttgatgaggcagttcagaaacagttttttgtagaatctgaaaagggatattttttatctctttgaggcctaaggtgaaatagaaaatatcttcacataaaaactagacagaaactttctgagaaacttctttgtgatgtrggctttcatctcatagatgtgaacctttattttgattgagcagtttggaaagagtcttttgtagtgtctgaagtgggctattagtgagtggactgaggcctatggtgaaaaaggaaatggcttctcaaaaaaagtatacagaagcattctgagagacttctttgtaatgtgcacattcatcttaaagtgttaaacctttcttttgattgagctttttggaaacac

SEQ ID NO: 759404 - DNA, 611 bp, Homo sapiens
caccccatagacctcaatcagctgacaagtatccttctgcagattgtaaaaaactactgtttccaaaccgctcaatcacaggaaaggtttaactctgtgaaatgaatgcatccatcacagagaagtttctcagaatgcttccgtctcgtttttatgtgaagaagattccttttccaccatattcctcatgcgctccaaataaacacttgcagattccgctaaaagagtgtttcaaaactgctcaatgaaaagaaaggttctagtcggtgagatgtatgcacacatcacaaagaagtttctatgaatgcttctgtctgatttatattgaagatatttcctttttcaccgtaggcctcagagtgcttaaaatatccatttgcagatactagaaaagactgtttccaaackgctcaatcaaagtaaagttcaactcagtgagatgaatgcacacatcaccaagacgtttctgagaaagattctgtctcgtttttatgtgaagatatttcctgtttccccagaggcatcaatgggctcacaaatattcctttgcacattctacaaaatgactgtttagaaggtgctcaatcaaaaaaaaatttcaacagtgtgag

SEQ ID NO: 759405 - DNA, 613 bp, Homo sapiens
gtccattatggtagtcacacccaccttgtcttaggtggttgagttcccctcttggctcctcccaccctgagatcagttgctgtcattgcatttaattttccaattgagtgactgtggttcccactgtaaggtctgsccagagagaaaagcaatgaaacagctcttgaaggatgctggggctcccctcacaaacccatttcttacaatattggtgaaaggtgtgtctggactagtgtgggtaagtatgtctaaaatggcaaatctactctaattccaatctcttcaattcccttcctctacattaaaacaagggatatctggcacctccaacttgctcattgtaggccgccttttaatctgtttcccctaaccaactaaactattaggtcttttttacacgcccagggctgcagcattcagtgcagaatctctgcttagtgggcccacatcaatacatttggcctgatccgactttatggtctttccaccattatcctgcatgtttaatggatccttaagatccatttccacacatttactggatttctgcctgtatgaattagaaaactcaagtagttcttttggattgtggcacacctcctcctgggtcctg

SEQ ID NO: 759406 - DNA, 610 bp, Homo sapiens
tttcgcatagtttgataggtcatccttgcattgttctcagttcttaaaatttcaaaatttccattttgaaatgtttcctccttatctttggatttttagcatctttaaaaatctctacacaggttttttgactgatgttttattgttgagttcatacttatcctactgccaytggaggatctggcctgtatgactccaattcttaggaatatgttaagctttcttttgtctctttccctgagcccactgcccctggccagctctctgccagggcagctggacactatggggtgcttggatccccccacaccagcctagaagctcctctggacagaggtggatccaagcgcttgcctccccagcatctgagcccacgtcggcctggacaagacttcaggcctgccttctcagtctgccagtgaaaagagccatccttgggacacacagctctaagtgtctggaccccaaatctttctcctcctctgcaaagggaccttctttgagattctggggactgaacttgaccagaacatttggggtcactcacaagcatgcttggctgctgagctctgttcccccaaggtttactgcccccatccccatggcctca

SEQ ID NO: 759407 - DNA, 601 bp, Homo sapiens
cagacacttctctggggccctgggttctgtccgctgaagcacagctcctcaatatttctgtcttggggagtgatgtgttcaggccgccattctggccgacgtcatcgcccctcatccagcatttcctccagtgaccttgaagttttcatagccacagtggctgggacatctgtcttacagaaagactgttcttgtctttgcagcwatcaaaagtagtatcttccagtccataaagcaagggctgccaatccgtaacatagacggtggcttagttgtctctccacccgcaatggagctcaaaggtgtgcagcagtccccgcggccccactcctcaaattcctccgggccacgtggggacagacggtgctgaaaagtgaagggtggatttgtagaggaaacacagccctcaggttcaccaaacatcattcaatctctccttctttcccccagaccaagctgtctctgcaaagaaaatccaccccccaggctgatggatgccctgtctggtccccagaaatcccttcgggcttccgtttctccacattcccagtgccctcctcctcttgcctctctccttggggtgcatttcgctaataaccca

SEQ ID NO: 759408 - DNA, 526 bp, Homo sapiens
tcacaaatcaccactgagaaacgtactcatgtaatcaaataccaccagttccctcaaaacctatggaaatatatatatatattttaaaggatgaaggaacatgtgacctttgagcttattcttaaaggaagagagggaattcacaagagagaggagaagagaaaacattctgggcaaagagggcatgatcgtacaggtatggggatcactaaaagaagagcacacacgtatagattagaaaattttctagggctgggacttgctgtacaaatgtgggcatggaaggtgacccagataggtagatrgtgaccaagatcacaaagattagttaatattactccaggtgtataaatagattcttcgaaacttacaaaataattaaagaagcaaaagtgtaatgtgattggatttgcattccagaaagatatttttgatgtacccagtacccagtacccagaatgaagaacaaaaaggcagtctgataaaaggatattttatacattattatattctcatttgcattatt

SEQ ID NO: 759409 - DNA, 526 bp, Homo sapiens
tcacaaatcaccactgagaaacgtactcatgtaatcaaataccaccagttccctcaaaacctatggaaatatatatatatattttaaaggatgaaggaacatgtgacctttgagcttattcttaaaggaagagagggaattcacaagagagaggagaagagaaaacattctgggcaaagagggcatgatcgtacaggtatggggatcactaaaagaagagcacacacgtatagattagaaaattttctagggctgggacttgctgtacaaatgtgggcatggaaggtgacccagataggtagatggtgaccaagatcacaaagattagttaatattactccaggtgtataaatagattcttygaaacttacaaaataattaaagaagcaaaagtgtaatgtgattggatttgcattccagaaagatatttttgatgtacccagtacccagtacccagaatgaagaacaaaaaggcagtctgataaaaggatattttatacattattatattctcatttgcattatt

SEQ ID NO: 759410 - DNA, 477 bp, Homo sapiens
gaccggcagaactatgcagagtttggctggggcagcccaaggagagcccaggccactgagtggcccgactgcaagggaaaccttcccattccatccccttctgactttccccatctgctggaagctacctctactcaataaaaccttgcactcattctccaaacccagatgtgatctgattcttccgatacaccaaggcaagaacccaggatacagacagccctctgtccttgtgmcaaagtagagggtctaactgagttggttaacacaagctgcctatagacagctaaactaaaagagcaccttgtaacacacgcccactgaagcttcagctgtaaacattcacccctagacactgccgtggggctccctgcccatctgtatgcttccctagaggtttgagcagcggggcactgaagaagcgagccacacccccatcgcacaccctgccagggtaacaagggaacttttaccgtc

SEQ ID NO: 759411 - DNA, 615 bp, Homo sapiens
ccatgggctggggaaacaaaaaaaaaaaaaaagaggtttgaattattggaagcttggaggaggggctccacagagctgagattcagacttaggaggaaggcccgctgcctgattgctttcaaagacttgagcgagaggccccacaaagttgggtctcagatctctcaaaaakatgtcttgccctgctgctgttgggctttctgagggcgcatgggaagtctagttctgagagctgaaggaagctgaagactggaaacaaccgtttctcctcggaaagggccaatgctagggttccagtggcaggataggagatagcaaggagcaagtccgttcttttgtcacctttacgttctagtcttcctctagtgtgttcccggctggtggagatgaatgggaagccgcctgacaggagaaatgaagtgtgcagaatctgagccccacatcataaggcccggtagagaagagtgaacttggacttgagacacagcagcttaatagatggtactattattggcaggagtacagcctccctgaaattcactttggcagtatggatcaaaaatcttagaaatgtgcataccttttggcccagtaattccagttcaaggaatatgt

SEQ ID NO: 759412 - DNA, 635 bp, Homo sapiens
cggcagtgagacatggcaggcagacacagctcacactgctgggagctcgcgtgcgcagtgctgcggaaggaggggtctgggcggaccgccctcacgtgcccgggtgctggtggagggactgccctcacgtgcccaggtgctggtgtggatgccctcacgtgcccgggtgctggtggagggaccgccctcacatgcctgggtgctggtgtgtggatgccctcacttgcctgggtgctggtggagggaccgccctcacttgtctgggtgctggtggagggaccaccctcgcttgcccaggtgctggtggagggaccaccctcacgtgcccgggtgctggtgtggatgccctcacgtgccygggtgctggtggagggaccaccctcacgtgcccgggtgctggtggagggaccaccctcacgtgcccgggtgctggtggagggacagccctcacgtgcccgggtgctggtggagggacagccctcacgtgcccgggtgctgctgggtggatgccctcacgtgcccaggtggtggtggagggaccgccctcacgtgcctgggtgctggtgtggatgccctcacgtgcccgggtgctggtggagggaccaccctcacgtgcccgggtgctggtggaggga

SEQ ID NO: 759413 - DNA, 606 bp, Homo sapiens
tggtttccttttatctgcaaactgtattttgccttcattcttgaagggtatttgtacattttttttttcggtcagcccctaaaaataccactgtcttctggcctcaattatttctcttttgatattatcctgcaagtacctgaggttctgtttttgctaaaactttttttctctatttttggataaattctaatgacctatcttcaagttaactgatgatttcctctgtaatctccactttgctaagttcatacatttttaaatttcagattttgtatttttagtttcagaagttctgttttcaagaatagtttctatttctctgtgagatttcttgtctttttagtcattattagcatattttcttttatgtatttgagcatagttacaatagttgctttacaaatcctcatctgctaattccagtatctgggttatcttggggtcaggtctccattgrtcaccttttctcttaaaaataggtcacgtcatgcacatgtcagatagttttggattgcgtcctggatattgtgagtattatgtttcagagactctagatgctattatagtcttccaaagagtattgattttttttttgtttgctgg

SEQ ID NO: 759414 - DNA, 553 bp, Homo sapiens
gtccttcttggctaagaatgggtttgacactattaactgctattctctttcaaataatctgccttgcactctttgctgacagctatgggtgacaggattaggcatgaacaggatcgtgggacatggggagctttttcttccctaaaaggggaaacttgagagctgatgggactgctgaaaaatatcccttcacagctgacaagcggccacctgaacttttgattcagtgttgctggaatgggtgggtctttctctcaactccctgagatcttcaccttccccatcctgccacaggcaaggcttttctctctctcctttccctttcttattttttctattactcagggtaaccatcyttcccagagatcacaagtcaaaactctctggtcagaggttggattaatgatgatggggcccaacagggggcaagtttgagccttgccagtttgatattgggtgctaagcagagtggcaggtcataaactgcttctttgacttttacaaattgttcaatttattttattctattttatttatttatttttgagatgga

SEQ ID NO: 759415 - DNA, 553 bp, Homo sapiens
gtccttcttggctaagaatgggtttgacactattaactgctattctctttcaaataatctgccttgcactctttgctgacagctatgggtgacaggattaggcatgaacaggatcgtgggacatggggagctttttcttccctaaaaggggaaacttgagagctgatgggactgctgaaaaatatcccttcacagctgacaagcggccacctgaacttttgattcagtgttgctggaatgggtgggtctttctctcaactccctgagatcttcaccttccccatcctgccacaggcaaggcttttctctctctcctttccctttcttattttttctattactcagggtaaccatctttcccagagatcacaagtcaaaactctctggtcagaggttggattaaygatgatggggcccaacagggggcaagtttgagccttgccagtttgatattgggtgctaagcagagtggcaggtcataaactgcttctttgacttttacaaattgttcaatttattttattctattttatttatttatttttgagatgga

SEQ ID NO: 759416 - DNA, 649 bp, Homo sapiens
taccttatttaatttttgagatagttacatgaattagtacatatacctcactaggagcagttcctggaacatagctggacacacttggctcagataagggattttctagcacctagccacgcaggtcagcaagtaaaaacaaacccaaggagagggacttttgttgccggaaattctgatagggaccccactcctatacagcctaaggagggcttagtgtccgttaggatttaatgtctgggaagcatttgggataaagtagctgatctctctgccatgtatccttgtctgtacttgtgctgattttatcctctctctgctaggtaagtaaaggttgtctgatttttccaaaagtgtttgatctttgcacagtcttaaagtacaagtgatattcatcaatagagtagtcttaaatggtcaccagtaagaaacttgcaaagggagaatgcaatctcatggacctgaaagtttgtttactcragagccaagctttacactgtcttctctctaagagatttacaacctagtgtgccagaaagccttgtcaactggtcaggcttgggaaagattcccctcatagattagattgctccatactatgctccctttcataaattacgggatcctctccctatgtttcccagcattc

SEQ ID NO: 759417 - DNA, 574 bp, Homo sapiens
tatctaggaatgtaaatacatttgcttcaggggaagtccttgtctttatctctccagggctgcctgcttgcactaggcattcctagaaagataatcctggcacacaggagcgaaacatgtaggagtgctgaagattcacagacagtcgtctcaatgtctctgaagttttttttcccttaaacttctccttttggacattccccttcattttccttttaaaaatctcatcctttccaacactttcagttgtaagaatttccawatcaagcactcaatatcaaaacaatgtgtgtgacaaacttaaagtgttgaatctgactatgtcagcagaaagcataattatcgatgatgtatgggacagcaatcttgaattaaagaagaaggtgggaaagccccaaatctctcataaattatgatgatgatgatgatgatgatgatgatgatttagcacacctctgctggcaggaaacaatttattttaaagatgacctgttacattaggtatttgtattgaatgttaccttatgtgttgaaaagggagtgaagagagaatatatatgtaatttcttgtgta

SEQ ID NO: 759418 - DNA, 574 bp, Homo sapiens
tatctaggaatgtaaatacatttgcttcaggggaagtccttgtctttatctctccagggctgcctgcttgcactaggcattcctagaaagataatcctggcacacaggagcgaaacatgtaggagtgctgaagattcacagacagtcgtctcaatgtctctgaagttttttttcccttaaacttctccttttggacattccccttcattttccttttaaaaatctcatcctttccaacactttcagttgtaagaatttccaaatcaagcactcaatatcaaaacaatgtgtgtgacaaacttaaagtgttgaatctgactatgtcagcagaaagcataattatcgatgatgtatgggacagcaatcttgaattaaagaagaaggtgggaaagccccaaatctctcataaattatgatgatgatgatgatgatgatgatgatkatttagcacacctctgctggcaggaaacaatttattttaaagatgacctgttacattaggtatttgtattgaatgttaccttatgtgttgaaaagggagtgaagagagaatatatatgtaatttcttgtgta

SEQ ID NO: 759419 - DNA, 351 bp, Homo sapiens
ctagcactttgggaggccaaggcaggcagatcacgaggtcaggagatcgagaccatcctggccaacatggtgaaatcccatctctactaaaaatacaaaaattaactgggcatggtggtgcgtgcctgaagtcccagctactygggaggctgagacaggaaaatcacttgaacccaggaggcggaggttacagtgagctgacattgggccactgcactccagcctggtgacagagcgagaccccatctcaaaaaaaagcaaacaagcaacagccagatttggcctatggctattagtttgctaactcctgaattatactcatgtaatagtcaaaaaaaccttatgaggatt

SEQ ID NO: 759420 - DNA, 585 bp, Homo sapiens
ttaatatttatttttattttaacagtaggtttatatcttttgccaattttctttttaaaaaaacttttttcccaaattcaaacgagtgtcagtagaatgccaattttcctattaagttgttggacttattacttgtaagaaatatatgtgccaatcttaagtgttgcaaatatttttccccagaatgctctttgctttttaacattttagtcacatgttttactatgctgtttttaatttttatgtagccaaacataaatctttttcttcttctatatcctctggattaaagattttgtcttttgcttaaaaaggccttttcctcaagattatacaaatattggaatggaggaatatttttaaattttcttctgtgttttctctgctctagacaaagactarccctttgggtctctttattctcccaggttaaaagctgtttggtttgagaatattctcttgtacatcctgcattctgtcctcattaatctccaaaggaatttcttaattaacgagagaaaccctttttctctcatctgagatatacaatgtagttagcttggaaactctgacaagcctcctttt

SEQ ID NO: 759421 - DNA, 598 bp, Homo sapiens
cttgtcaactcttgtacgctatcaactagtctaagtttctattccaggatgtggattgtaatgaagaaggccttgaattaaaagggacttggagacaatattgaaatatgactagaggctcagttctccaatatatgcaaaagttttcttctctgcagtagagatggtgcctacaatgatttcacaattctagccggtactatgaggttcataaaaacatggtccacaaattcaggaaccatgtgtgtttgtgtttaactgytgtattcctggcattttgcatggtacatggtatggcaatgatcctcaaaaaatatttactgatttgaagattctttaagtcagaatgatttgtatcttctccagcatatctggatcctaaggggtgatgccaacaagagtcctggagaaaagtgtttctgttataacgtggcatggttagggcctgaagtatacatttgcttatatttgctgtatacctttgtgctttgctctcttaatgatcccccaaaagctcctttcccgccttccccaggccacaatgttgcagaaaaaaagttcaagaattgctaacttgactgtgacttgaaatgattaa

SEQ ID NO: 759422 - DNA, 598 bp, Homo sapiens
cttgtcaactcttgtacgctatcaactagtctaagtttctattccaggatgtggattgtaatgaagaaggccttgaattaaaagggacttggagacaatattgaaatatgactagaggctcagttctccaatatatgcaaaagttttcttctctgcagtagagatggtgcctacaatgatttcacaattctagccggtactatgaggttcataaaaacatggtccacaaattcaggaaccatgtgtgtttgtgtttaactgctgtattcctggcattttgcatggtacatggtatggcaatgatcctcaaaaaatatttactgatttgaagattctttaagtcagaatgatttgtatcttctccagcatatctggatcctaaggggtgatgccaacaagagtcctggagaaaagtgtttctgttataacgtggcatggttaggkcctgaagtatacatttgcttatatttgctgtatacctttgtgctttgctctcttaatgatcccccaaaagctcctttcccgccttccccaggccacaatgttgcagaaaaaaagttcaagaattgctaacttgactgtgacttgaaatgattaa

SEQ ID NO: 759423 - DNA, 598 bp, Homo sapiens
cttgtcaactcttgtacgctatcaactagtctaagtttctattccaggatgtggattgtaatgaagaaggccttgaattaaaagggacttggagacaatattgaaatatgactagaggctcagttctccaatatatgcaaaagttttcttctctgcagtagagatggtgcctacaatgatttcacaattctagccggtactatgaggttcataaaaacatggtccacaaattcaggaaccatgtgtgtttgtgtttaactgctgtattcctggcattttgcatggtacatggtatggcaatgatcctcaaaaaatatttactgatttgaagattctttaagtcagaatgatttgtatcttctccagcatatctggatcctaaggggtgatgccaacaagagtcctggagaaaagtgtttctgttataacgtggcatggttagggcctgaagtatacatttgcttatatttgctgtatacctttgtgctktgctctcttaatgatcccccaaaagctcctttcccgccttccccaggccacaatgttgcagaaaaaaagttcaagaattgctaacttgactgtgacttgaaatgattaa

SEQ ID NO: 759424 - DNA, 612 bp, Homo sapiens
tttgaagattctttaagtcagaatgatttgtatcttctccagcatatctggatcctaaggggtgatgccaacaagagtcctggagaaaagtgtttctgttataacgtggcatggttagggcctgaagtatacatttgcttatatttgctgtatacctttgtgctttgctctcttaatgatcccccaaaagctcctttcccgccttccccaggccacaatgttgcagaaaaaaagttcaagaattgctaacttgactgtgacttgaaatgattaaaatgcatgcttasaaaccagtttcttaaaccagtttcttaattcacaaagactagataaaatcacagctgggaataggaaggagatagaagaacaagcagcttgattgcaggggaaagtgaaaggaaatagagacttaaaggaagaagaaaggagaaaaagatcttccatcatgaaggctgaatgataggggaaatttttcacacacccctataaacaaacacagaatctgaggacaatccacatcccacctttgtagacatttaaagtcaccctaccttgatgaggaggaactcagatgccttgagttgaaaatggcccaactgtctgatagaactg

SEQ ID NO: 759425 - DNA, 564 bp, Homo sapiens
aaaccagtttcttaaaccagtttcttaattcacaaagactagataaaatcacagctgggaataggaaggagatagaagaacaagcagcttgattgcaggggaaagtgaaaggaaatagagacttaaaggaagaagaaaggagaaaaagatcttccatcatgaaggctgaatgataggggaaatttttcacacacccctataaacaaacacagaatctgaggacaatccacatcccacctttgtagacatttaaagtcaccctaccttgatgaggaggaactcagatgccttgagttgaaaatggcccaactgtctgatagaactggtatttgtggtttcttttgaataaaagaaagaaactgaaagaaaactgaccctcccagtcttaaaacttgagaaagttacatttgtcttaatctgagttccttcctcatgaagccaaccatcaggcctcccagatattatcaaggaactgaaacttaccagatcactgcatctggacaatgaggagccagacccctcacccatcrtgattgcctaagcaaccacctgcttcttgttgac

SEQ ID NO: 759426 - DNA, 631 bp, Homo sapiens
aattcttgttttcccaaaaatggttacatttcttttctgttatacaaacccttaattttaatcagtcagggagatggatttgggactgatctagaactcatctcccatctcctcagctgcagcacccaactaaagccttcttccctggcaatacccattgtctcagtgatcaagcagcagtacctagacagaacccctggcatttcggtaacagggygaataaatggatgtgcaaggaaaacctcttcatcttaaataaagggcagatgaacactaagccttaggatggtgccaatgaacacatgttgggttgtttccactttttgactattatgaataatgctgttatgaacattgtatacaagtagaggaaggagtctaaaggcccagggaaacaagaatgatgcatgaatctgttatgaacagcctgccctgccactctgaaagacagtcatccctggaagagcctggaggacgtcccctatacccaggcattacagatgcaacagtaaggagacttgagcattcttataaaactgtgttgcagctgttctttgccagcaggagatggtggcaaaggatgttgccatggaattgaatttcctgatctcagctggaataaaggatccag

SEQ ID NO: 759427 - DNA, 631 bp, Homo sapiens
aattcttgttttcccaaaaatggttacatttcttttctgttatacaaacccttaattttaatcagtcagggagatggatttgggactgatctagaactcatctcccatctcctcagctgcagcacccaactaaagccttcttccctggcaatacccattgtctcagtgatcaagcagcagtacctagacagaacccctggcatttcggtaacagggcgaataaatggatgtgcaaggaaaacctcttcatcttaaataaagggcagatgaacactaagccttaggatggtgccaatgaacacatgttgggttgtttccactttttgactattatgaataatgctgttatgaacattgtatacaagtagaggaaggagtctaaaggcccagggaaacaagaatgatgcatgaatctgttaygaacagcctgccctgccactctgaaagacagtcatccctggaagagcctggaggacgtcccctatacccaggcattacagatgcaacagtaaggagacttgagcattcttataaaactgtgttgcagctgttctttgccagcaggagatggtggcaaaggatgttgccatggaattgaatttcctgatctcagctggaataaaggatccag

SEQ ID NO: 759428 - DNA, 602 bp, Homo sapiens
cccctatacccaggcattacagatgcaacagtaaggagacttgagcattcttataaaactgtgttgcagctgttctttgccagcaggagatggtggcaaaggatgttgccatggaattgaatttcctgatctcagctggaataaaggatccaggagtggtagaggccagttgcaatccttagcttgcagtgacaaggtgtcttagtcagtttgggtttagtcagtcagaataccatagatgggtacttaaacaacgaacatttattgctcaagttctggagactggaagtcctgagattagggtgccagcatggctggtttgcrgtaaaggcttgcctcctggttcacagatggctgtcttctcacatggcaaagagagtgagagctcttctctttctcttctctaaggacactaatcctatagcaggagctccaccctcatgagctcatctatacctaattatttcccaaagaccccacttcctaataccatcccattggcggttagggtttcaacttacggattttgggggaacacaaattgcataacacaaggtgagtacaattaccagagtaacccacagggatgaagtgtgtacgat

SEQ ID NO: 759429 - DNA, 599 bp, Homo sapiens
accatctcaaaaacaaaacaaaacaaaacaaaaaaacaaaaaaaacaaatcacctctaaaattagtagcctataatggcatctgtttattgttcatatttctgtgggttgaaatttggactggaatcagctgagtggtgcttctgctgatctcccctggaaccacttgacttgtcatctctctaagatggtcttttgtttacatacgtagcacttggtgctatcaacttgtatacttcaggccgtggcctcatctttaatacgctatactgagcttctttatacaatagtctcagggcagaattctaagagcaagagcagaagccagragaccttttcaaaatgaaattcagaagtcatcacttctccattttattggtcaaagtcacaagaccagcccaagattcaagaggtgggtaaatagacttcacctcttttcaggaggggatacaaataatctgtagctttatttatttacttatgcgacagagtcttactctgttgcccaggctggagtgcagtggcgtgatctcagctcactgcaacctccacctcctgggttcaagcgattctcccacctcagcctcccaagctgggatt

SEQ ID NO: 759430 - DNA, 440 bp, Homo sapiens
aactgggaacaaagagggagagttaattgggaagccaacatcatttattcactgactcatttatttatttaacaaatatttatttagtatctattgcacctcattctagtagatgccaaggatataatggtaaacaagatggattcaatctctgacttcatggagcttaaaatttattggaagactcaagacaattaggcaagtagatagaagaaaatgtagtaagtactattttacctccatataaaacacatttctaatattagggctgtcagaatgatggtaaatggtaratgagttggccttggaagtattcaagaagaggttgttggggatattgtagaagttgttccaggattttggcattaaaagtcaaacaggattccaattaccattaaaatcctgtttgacttttaatgccagtgatcatatatgtcttg

SEQ ID NO: 759431 - DNA, 559 bp, Homo sapiens
agaaagcacccagttcatgatagggagttcaggtcacatggtgacttgatgacccatagttaaatgttcagtttccaccaaagcccagtaccagaccaagagctgtctctccaaaggagagtagttatctgcagaagatggcagggccttgctccaaaatcctagaggcctccactgtgattcacctatggaggcctgccaaaggctccaaacagcatccctatctgtcmctgacaccccaggcatcattggatctgttgggtcacatggcccaagtggcagagcagcttgcacagcaggctggacctgttgcagagctttctgctgttctggaccccctcaaaactggcagcttttcgggtcactcaataaatgagttggagtaacacacccaaatgacgaatgtgttgcctccaaaatccaaataggcccactagatgttgtgcctctttctgggttgtaggaggggccaaatgcagcaatttacccttcacattagaaggagtatcttgacaggccccacaccactggacctctagaaattttactgaggtagaag

SEQ ID NO: 759432 - DNA, 528 bp, Homo sapiens
ctctgaataagattatggaacaaagtggagagttgatatacccctgtagtaggacagtgaaggtatattgctggccttgccagccgaaggcaaattgcttctggtgggccttatggacaggaatggagaaaaaggcatttgccaagtcaatggctgcatgctaggtaccaggagatgtgttaatttgctgaagaagtgaaaccacatctggtacagcagctgcaattggagtcacaacttcgttaagcttatgrtaatccactgtcattctctaagatccatctgtcttctgcacaggccagataggggagttgaacggggatgtgatgtgaatcatcacccctgtgtctttcaagtcctcgatggtggcactaatctccgcaatccctccagggttgcaatattgtttttgatttactatttttctaggtagaagtagcttcagtggcttccatttggcctttcccaccacagtagtcctcactctaccagtcagggagccaatgtgggggttctgccagctgctaa

SEQ ID NO: 759433 - DNA, 550 bp, Homo sapiens
tgttaactgctattctgtttggaataatctgccttgtactctttgctgaccgctatgggtgacagaattaggcatgtacaggatcgtgggacatggggagcttttttcaccctaaaaggggaaacttgagagctgatgggactgctggaaaagatcccttcattaccgacaagcggtcacctgaacttttcagtgtcactgcagtgtgtggatctttccctggcctctctaagtractcgccttccccaccctgcttcaggcaatgctttcctctctctcgctcattctgtgcaaactggttgaatgaatggtaaaaatcactgtttatcttctgtaaagttttgattcatgggaaaaaggatttgtgaggctagtcttaagctgtaacaaatccggtctgctttgcatgtctttctgtattgttctgtcatcaagagaggtacattaggacaaaacacaggctttggacacctataagcctgctgttcaagacgacccagcaaactggccagttacaaactttgctgcaggtccctgaaaaaaatggat

SEQ ID NO: 759434 - DNA, 611 bp, Homo sapiens
gacatcgtgccactgtactccagcctgacgacagagtgagactccatctcaaaaaaaaaaaaaaaaaaaaaagaaagattcaaggaaagggctgccaaagtatcacgccagagaaggagtgaatgccacgccagtgtgggaacctgtggagtgaagtggataagagaatgggttttcaagttagagtatctgtattcaaatcctgccttgaccatttataaggtacttgtcttctctatgatttttcttttctcatctgagatatgaagatggtaataacaatatccttctcacagtttccttgcaagaattragggaatgtatacaatatattcaatggactttcaacagtgcctgtctcataagtcaatacaaagtttttatgacgattgtcttgggttggataccctaaaaacaccctgatctagaggcttgtttgcagaaggtatatcgaagagtgcacttggatatgtacctgtaaggaagtgaggaaggtaggactgtgcaggcagagctcatctgcaatgcagttatgactgagacctcagctcatcctgtagggagttttggagctgggatgctctttggaattgtcacaaattaaggcaaag

SEQ ID NO: 759435 - DNA, 593 bp, Homo sapiens
aggtttgctaacaattgttgggaacctccaagtagaacctacatcagtaggggcagaattttatagtgtcttcaacatgacctcctggccagctgataaactgtcagattcttaattcaatttgaataattgagtcaagtcctgatttttggagggatttcctgagggcactcagcccaaactgtcctatttattcatgccaccaattgggtggcwtttgtccaacccatgtgtggttgagtagtggctatgggaatgagaatagggaagacatctggagatactgataggttttgcctgagaggttcaggagttggggtcatcctctggtgtttttggcagatttcttggaaggattaagggaaatagctatcataaaatagagtcagtggggttgagggttgtaattagacagaccccatgaatccattaaattctagacacttacaatggtttaggagagaaacatcatgtttttagtaacgagggtggctacaagaggttttgatgaaagatcattaatacctcacttactccatagatgtaaaatattttttttctcatatgcctgggttgtttgtttccttcactat

SEQ ID NO: 759436 - DNA, 633 bp, Homo sapiens
gcattgttttgcagttctcattgtagagaactttcaccttcctgggtagctgtattcctagtttttttttttctttttgtaacaattgtgaatggtattgcctttctgatttggccttcggcttggctattgttgttgtataggaatgctagtaatttttgcacattgcttatgtattctcaaactttgctgaagttaacttgtacagtatacaaaacctgtttgcaagtgataatattacttgaaacttttacaartttgacattactgtaattgttctggttatttttgtactggtttattgcttgggacattaagataaatgaactatgttcttttcttaattaaaattgccaaaattttagactttaaaagctttgtatcataaattattcagttttagaagtatatgatggaaactaatataatcaggataacataatcatatttattatacctcgaagactttcccctaggtttttatgatgttaaaacatttattgattaaattatagaaagttgagttgttatacagtcaaatatattttcacatatataccctggactatataagcttttaattgaataattttgataatatatacacaatatgttaaccacattggtacacat

SEQ ID NO: 759437 - DNA, 633 bp, Homo sapiens
gcattgttttgcagttctcattgtagagaactttcaccttcctgggtagctgtattcctagtttttttttttctttttgtaacaattgtgaatggtattgcctttctgatttggccttcggcttggctattgttgttgtataggaatgctagtaatttttgcacattgcttatgtattctcaaactttgctgaagttaacttgtacagtatacaaaacctgtttgcaagtgataatattacttgaaacttttacaagtttgacattactgtaattgttctggttatttttgtactggtttattgcttgggacattaagataaatgaactatgttcttttcttaattaaaattgccaaaattytagactttaaaagctttgtatcataaattattcagttttagaagtatatgatggaaactaatataatcaggataacataatcatatttattatacctcgaagactttcccctaggtttttatgatgttaaaacatttattgattaaattatagaaagttgagttgttatacagtcaaatatattttcacatatataccctggactatataagcttttaattgaataattttgataatatatacacaatatgttaaccacattggtacacat

SEQ ID NO: 759438 - DNA, 474 bp, Homo sapiens
acttctgcctccagaaaggtctaaaatacaaacttgaccatgtcatatctctgcctaaaagacttgtgctaaatagtatacaaaactaaattctgaaaaaagtataattttgatatactgtaattacaccctctattactttgtagttcaatctttcattttgtagaaaattgttatgtgttagtccattcttgcattgctacaaagaagtacctaaatctgggtgatttataaggaaaagaaatttgattggctcatggttctgtggrctttataggaagcatggtgctggcatctgcttctggtgaagcatcaggaagcttccaatcatggcagaggtgaaggggagacagcatgtcacgtggatgaaccagagcaagagaaagagaaggggaaggtccctaactcctttaaacaaccagttctttggtgaactaagtgagcaagaactcactcatcaccaaggagatggtg

SEQ ID NO: 759439 - DNA, 559 bp, Homo sapiens
agtaagagggaagtttaaagctatcagcaccttgttgggagcaagccccccaaaatctggccataaactggccccaaaactggccataaacaaaatctctgcagcactgtaacatgttcataatggccctaacgcccaagctggaaggttgtgggtttacgggaatgagggcaaggaacacctggcccgcccagggtggaaaaccacttaaaggcattcttaagccacaaacaatagcatgagcgatctgtgccttaagaacatgctcctgctgcagttaaccagcccaacctactcctttaattcggcccttcccttagtttcccaaaagggatacttttagttaatttaatatctatagaaacaatgctaatgactggtttgctgttaataaatacgygggtaaatctctgtttggggctcccagctccgaaggctgtgagacccctgatttcccacttcacacttctatatttctgtgtgtgtgtgtctttaattcctctagcgccactgggttagggtctccctgaccgagctggtctcgcgcaagtggcgtcca

SEQ ID NO: 759440 - DNA, 669 bp, Homo sapiens
cgagccgcccggcctggggccagggtgagctacgagagccgctctcccggctccgcctcccgctcacgctctgcttccgccttccgtccccgcggccgccggcgacctgggcctacttccacttccggggtcaccagggaagagacgggaaggaaaagaaatagcggttggctgagaggcaagccaatccagctagggctgcgtcgactccaaggaggcggtcctaagraagtactggccccgccatttaaaggcccctccctccgcgtgtgggaatgggattcccgcaggttgcaccgcaggaagcaaggcaggtggactctgcaccaatgcctgcagactaagggcagactctcaggattgctctgggtgtattcctaggctttgtattcctgggagatggagggcagccaccgagccacatatagtctttttcccttgcagacaaaaccagggagctcagaagagtcactgccctgatcccttccgtgccggcagctgcgaggacacaggcccctttgtatcctgcggtgcggaggtggagcagaggagagggtgccccggctggccccctccctcgccccgcagcactgcccctcctttcacagcaacccacggcctcccccgcgcttgacccagctggcgagctgccccttatacctggatccg

SEQ ID NO: 759441 - DNA, 509 bp, Homo sapiens
gcagacaacagagatgacaaaaagtgggtttttcattgtcttgtttagaatactaggatagagaagaggctacactacctgctaacctccactattttcaccacatctaactgaataaaatctgtgcctagagaattaaacaacctaaagacaagcgaccaaattatatagaaggctacactggaacccagaatcccaggatgaagtggacaaaagtatgctcatctggcagttccgtaaacacaaacttaaccaagtcactaacctctgccaaccaaccaaacgctamgtagcaactcattctagtgataaatagttaagcacaagaactaggcaattctcatcagacaatgtacccagctgcaattccaggatgtggaactagaacgctaagttctagaaaaaaagaatccttacttttcttatgtcttactccttttcctccaacttctctcctttcatagatttattctgaaactgcttatattttctacaattatttaaaaaaa

SEQ ID NO: 759442 - DNA, 601 bp, Homo sapiens
atgaataattaagagtggcattgctggatcatgtgataagtgaatgcctaacttagtaagaaattgtttcccaaagtggccatatcgttttgtagtcaatatcagcatgatatgagaattccaggtgttccacattctcacaagcacttggaattgtcagtctttataattttagtcattttagtgggtatatrgtattatcccattgcagttttaatttgcatttccctaatgagtagcgatgttgaacatcttttcatgagcttatttgcaatctgcacatcttacttggtgaagtgtttgctcagatcatttgtccatttgttattgggttgtctgtcttatttttaagttaaaagagtacttttatatattctaggtagaaatgcttcatcttacaggtgtttgcaaatttaaataccctgtctgagtcttgcatttttattttttaatggtgccttttgaaaaccaagagttttttctttttatatagtctaatttaaattttcttctgcactcattttttgttttatttatgaaatctttgccaaactcaaagtttctaagattttcgtctatattgtcttctaaaaagcttatc

SEQ ID NO: 759443 - DNA, 644 bp, Homo sapiens
ttctataattgtgctttccattttaaagtttttccaagacaaagataattcttcatgcagctaagagcttgtgtttaggagagtttacacataacagaagtttctcattaatatttaagttttcttagatctgtagacaaggcagaaatttctagagaaattatgaaaatatgacattttttgttaccgctgcagaaaatactatagctaaccacatgggttttactcatttcagaattaggcaaaatcacagtgttgtaagcaagacaaaaagcaagtggggttctctacttgttgcgtaaattttttaaagtataatgtaataaaacttaattcaatacctttgaacattgtatatttgaaaaacactagtagtaaatggcatttctgtggttgtmatcaaatttgtctcattgtaggtgctgttacagccttggatatcaaggtgcaatggcaatgttctctcaggaagtggaggatatatttgagctccaattccaacccatagagaaatggcaaatccagccatcagaccaacaagtgctccctgtaaaacaagaatgcctttaaaagaaaaataatacaatttgctttgatgtcaaaattaatattagaaagccaagttcaacatggcacgaaattat

SEQ ID NO: 759444 - DNA, 521 bp, Homo sapiens
tatctcattgtggttttgatttgcattcctctgatggccagtgatgatgagcatttcttcatgtgtctgttggctgcataaatgtcttcttttgagagtgtctattcatatcctttgcccactttttgatgtttttttttcccttgtaagtttgtttaaattctttgtagattctggatattagccctttgtcagatgggtagattgcaaaaattttctcccattctgtaggttgcctgttcactctgatgttactttcttttgctgtgcagaagctcttttgtttaattagatcccatttgtcaattttggcttttgttgccattgcttttgscgttttagtcatgaagtctttgcccatgcctatgacctgaatgatgttgcctaggttttcttctagggtttttatggtattttcttaaatagaacaattattatcaatttcaaataaatttgtggcaggctgctgtgcatttaccaaaatgatttcttatcctcctaggcatagtttgattatattt

SEQ ID NO: 759445 - DNA, 521 bp, Homo sapiens
tatctcattgtggttttgatttgcattcctctgatggccagtgatgatgagcatttcttcatgtgtctgttggctgcataaatgtcttcttttgagagtgtctattcatatcctttgcccactttttgatgtttttttttcccttgtaagtttgtttaaattctttgtagattctggatattagccctttgtcagatgggtagattgcaaaaattttctcccattctgtaggttgcctgttcactctgatgttactttcttttgctgtgcagaagctcttttgtttaattagatcccatttgtcaattttggcttttgttgccattgcttttggygttttagtcatgaagtctttgcccatgcctatgacctgaatgatgttgcctaggttttcttctagggtttttatggtattttcttaaatagaacaattattatcaatttcaaataaatttgtggcaggctgctgtgcatttaccaaaatgatttcttatcctcctaggcatagtttgattatattt

SEQ ID NO: 759446 - DNA, 523 bp, Homo sapiens
aagagtcacctttgtaattctactccacacattattttttactcagagtcaacagatataaagcataataaagcaacccaagcccggactcccaattgctggctgggaatttaaacctttggctgctaaatacctccgaagtgcaaattacagtggtttcctgaccttgaagaggcttgttcaatgraaggagaaagtcaagaaaaatcatacaatggtgggactgagaatgtcagagagagaaacggagaaagagcaaaaggaagtcaacctagcagaagaaactaatttacaaaataaaccttattcagtacattttctgtaaattaaaaaaaaaatccatgctctaaacagttatttaaaatatataaactagctaatttacctgtgaatacttcaacaaaaatgtgctttaaattatttaatatacacatttattaaggcactcagatattttgaatacaccccatgagtgatctttgaatggaaatttaaaatttacaaaacactttcacaagcatca

SEQ ID NO: 759447 - DNA, 428 bp, Homo sapiens
ctaccaggccttagtagagactgaaccatgagccagcaagtcaccatgggacctgagttgaccacaaggaattgagtgttagctggcctatcaagctataaatggaggcgtgcacagcaatactccattatccaatggaartggtgtatacgtgatggggtctgagcaggtcgtgaaggcacaagtaatttacatgaagtgtcccaaatgccatggtcgccagttctgctacactgctttctcttttccattttggacttatgacctcatggggggtcccctacaatcagttgacagagaaagagaaggcttggaacaggtttaccgatggttctgcatcatgtgcaggcaccactgaatgtggacagctgcagcaccacagctctttcctggggcatcctgaaggacagtggtagatggaaatcctt

SEQ ID NO: 759448 - DNA, 428 bp, Homo sapiens
ctaccaggccttagtagagactgaaccatgagccagcaagtcaccatgggacctgagttgaccacaaggaattgagtgttagctggcctatcaagctataaatggaggcgtgcacagcaatactccattatccaatggaagtggtgtatacrtgatggggtctgagcaggtcgtgaaggcacaagtaatttacatgaagtgtcccaaatgccatggtcgccagttctgctacactgctttctcttttccattttggacttatgacctcatggggggtcccctacaatcagttgacagagaaagagaaggcttggaacaggtttaccgatggttctgcatcatgtgcaggcaccactgaatgtggacagctgcagcaccacagctctttcctggggcatcctgaaggacagtggtagatggaaatcctt

SEQ ID NO: 759449 - DNA, 683 bp, Homo sapiens
gtcagaagcatttgagttcaggttcagtaggatccaggggcccaaactacatctccaggacttggaacctgtggccgcccctgtaggcaggctttcctcacttgctggtagactctgcccatgtggtgaccgtgggtaaggmtgggttcatattctcccactttagcccagcagaaagagaggtttcttttccaagagttccaacaaaaatcccagttttgtgtctcattgcctgattcggacataaaaaccaatctctgcagccaagagagtggccagtcctgggtcacatgcccactcccccagcccggggcaggttggcccccctaaatccagggacccaacaaaatggcagggttctgttaccagaaggtgagtgcatttataggtatagccacccacaaaatatacattcaagtcctaacctttagtacctgtgaatgtgagattatttgtaaatagggtctttgtggatgtaatcaaattaagatgaagtcatactggattagggcgagccataaatctgatgactaacgttcttacaaggagagacacagacacacagatacacacatgaagagggaagcagaagctagagcgatgcagctacaagccaaggaacaccaaggacagccagaaaccacccgaagctgggaagaggcaggaatgaagtcttccttaga

SEQ ID NO: 759450 - DNA, 468 bp, Homo sapiens
tcactggtaaattttttcaaatatttgatgaagaattgaagtgaactcctgtcaaactcttccaaataattgaaaagaagggaacactgactaactcatgtaatgaagccagcattaccttgatataaaaaccagacaaaggtactacaagaaaagaaaactataggaaatggtcatttgtgactatagatgtaaaataaactcaggaaaataatagcaaatcaaatcyagcaccatattagtatcattatacaccacgaaatagttttaccctaggaatataagggtagttaatacggtttggatttgtgtccccacctgaatctcatatcaaattttaatcctcagtgttggaagtagggcatggtgagaagtgactggatcatgggggcaaatttcccactttagtgcttttcctttgatggcgttcttatgagacctggttgtttcaagtgtgtggcatctcct

SEQ ID NO: 759451 - DNA, 617 bp, Homo sapiens
gtcattatcccctcgggtattcaaattttaccagatgtacctatattagtcagaatattgatgctcaaagatgtacaaacctaatccccagaaacagtaaatatgttacattacatggcaaatagaaataggattgcagatagaattaaaattgcttaccagcctggcacagtggctcacgcctgtaatcccagtactttgggaggccgaggggggcagatcacgaggtcaggagagcgagaccatcctggctaacacagtgaaaccccatctttactaaaaatacaaaaattagctgggcgtggtggcggacgcctgtaatcccagctactcaggaggctgaggcaggagaatcgcttgaacacgggaggcggagattatgatgagccaagatcgcgcaactgcaccctaacctggcgacagaacgagactgtctcaaaaagaaaaaaaaaaagaaaaagaaaagaaaaaawttgcttacccagctgtccttaaaatttggagattattttagagtatctatgtaggctgggtgtaaacaaagggacctgtaaagtggaagaaggagacagaagaggaggtgagagtaatgtgatgtgagaactggacccactgtt

SEQ ID NO: 759452 - DNA, 427 bp, Homo sapiens
aaatctaatagtatgtttgttcttccatctctcagtgtctttaaaattcctaaaattatataaagtaataactacaacattaaattttggggattatgatgcatatatgtaatatgtatgacaaagttttcaaaaaagggggggaaaagaaaatagagatatataaagtaaaacatctatgtcttttgtggaattgagttagtataaatctttagctaattctgaagaactgctttatatgttaagccctataataactactaataaaataactaaaaatatagttwaaaaaattaaagaaataaaatatgtcatcataaaatactcaggcaaaaaaatcagtgaagaagaaatggaggaacgaaaaaagccgtgacataatagaagcaaatagtaaaatgacaaatgcaaataaatcaattacaac

SEQ ID NO: 759453 - DNA, 636 bp, Homo sapiens
tccctgcagctctccccgtgatgtggttttgagccattccttagagactgggagaggagtctcctctgcgcaactgacccagagctccacaatccctgtaatgaagagaatgtgcttctcttccattcagcaggaaacaaaactgccacgcctcggaacctggcagcccttccactctggccactgagcttgccttcggtgcaacagaaacctctcctgctcttgtcaacactgtgcttagatgctgggtacataataatttgagatgatccagggccagagagcacaggaagacagaaaacaggcacctaaaaaacacttgttctcactctgctcaggagcttccaggacggtgccacgttttcacagccacagcacttgacaagacsgggagacagtgacatggagcctcttccatcacctccctccctacagtccccatgacttttctcccatctctaccctggtctaaaaccctcagccctcccctactgaattactgcaacacgccctcagcccatctgtcctttctcatctcagccatatcacttccctcttaaatcttctgaaatttttcttagagaaattctcctttcagaaacctttaaacagactgggtgcagtggctcatgccta

SEQ ID NO: 759454 - DNA, 610 bp, Homo sapiens
gccacctcatacctacattgctggaggttggctcatctccataaacgtgggttggctccaaggtcctcagtactgggagctccctgaccacaggaaggatctcaaataacacatttctgtcttctcagaatgtgtctgctcactcactgaggaccacaccctccttaccaggctatggaaacatttccaggctccagctcagcaggggtggcctcygtaacttgaaacaaccggcagtgatggctctgggccattacaatgttttttgtcttggaaagaatacttgaaaattacaaaaattatgccatttccattgcatgccaaaagcacccaaattgcattttaatcactgtacaaaggaagccctgatacttggcttgtagattcaaatgtgtctggttttaatcaaggcgtgtgctgttcttccagttccctcacatcgggctaacgcaaaagacaccagaatccatcaccagtgctacgtcaaaagagccccagagtccacacttgcctcggcaagcggaggggaagctgccgcccatatacaaagtccgggagaaggtgagtcctgaacactggccactgccatgtgctcctgtggacctcccag

SEQ ID NO: 759455 - DNA, 489 bp, Homo sapiens
cgatagtgcctatgtgggaatgcagtggtggttgaagaaaggagaaaagggcccaggacatcagaaatgggtaggactagagctaggggagcggtacagcttggaggctctggaagtgagtcctggagtcagggctttgagacatgagaggaggctatggcagaggcacatgttctctgtgcaaatccaaggagcccaccaggaagaccccgaattcccattactggcgtmtccaccgactcttgcatgtcctgacctccttggaggctgcctctcgctctcattttcttttctgctcagacacctacagctgtgttggtagctgcccttctaatggcttgggggtgggggagcacagccagggggcacgtagctgggatgagggtgaagaggagtgctatggagaaggggtctcaagtactaaattgaagccgggaaggctcaaaggcaaatatggattctctacagctctgatggaaagccttgctc

SEQ ID NO: 759456 - DNA, 632 bp, Homo sapiens
gaatgatctacctcaaggcctagaatgtgtattcattcactcataattagatatgttgactgtaatataacaggaatctaaccaggataaatcagatgagtaactgttgttgctttacacaccagtaataagatcctttaacccaaaaaatattttcaaatacaatcaattctgctctaacacttgttttgagaaaatgagtttgatccaatacaattcatgtattagggaacaatttgagcataacatgaatttcgcatttgcttargtgcaaaattcagatgagaaacactaggttaatgcagaaagctgcactcagctgaactgagccatgcacctgcacacatgcacacctaaatatctaccagatacctcagtttactgcatgtgttatgagacacacccatctatatctggttttataaattcccatctgacttcagataaccaactattgggagacacttttctatgaatatttttatgttttagcatggtctgacctggctgagcagagcaccagtaaacttggttaaaggatgattaaaaagcaaacatgccttggaaactagagatatgtattactccagaaaaattgagaaacattcctcccctggaagtcatttccttat

SEQ ID NO: 759457 - DNA, 632 bp, Homo sapiens
gaatgatctacctcaaggcctagaatgtgtattcattcactcataattagatatgttgactgtaatataacaggaatctaaccaggataaatcagatgagtaactgttgttgctttacacaccagtaataagatcctttaacccaaaaaatattttcaaatacaatcaattctgctctaacacttgttttgagaaaatgagtttgatccaatacaattcatgtattagggaacaatttgagcataacatgaatttcgcatttgcttaggtgcaaaattcagatgagaaacactargttaatgcagaaagctgcactcagctgaactgagccatgcacctgcacacatgcacacctaaatatctaccagatacctcagtttactgcatgtgttatgagacacacccatctatatctggttttataaattcccatctgacttcagataaccaactattgggagacacttttctatgaatatttttatgttttagcatggtctgacctggctgagcagagcaccagtaaacttggttaaaggatgattaaaaagcaaacatgccttggaaactagagatatgtattactccagaaaaattgagaaacattcctcccctggaagtcatttccttat

SEQ ID NO: 759458 - DNA, 632 bp, Homo sapiens
gaatgatctacctcaaggcctagaatgtgtattcattcactcataattagatatgttgactgtaatataacaggaatctaaccaggataaatcagatgagtaactgttgttgctttacacaccagtaataagatcctttaacccaaaaaatattttcaaatacaatcaattctgctctaacacttgttttgagaaaatgagtttgatccaatacaattcatgtattagggaacaatttgagcataacatgaatttcgcatttgcttaggtgcaaaattcagatgagaaacactaggttaatgcagaaagctgcactcagctgaactgagccatgcacctgcacacatgcacacctaaatatctaccagatacctcagtttactgcatgtgttatgagacacacccatctatatctggttttataaattcccatctgacttcagataaccaactattgggagacacttttctatgaatatttttatgttttarcatggtctgacctggctgagcagagcaccagtaaacttggttaaaggatgattaaaaagcaaacatgccttggaaactagagatatgtattactccagaaaaattgagaaacattcctcccctggaagtcatttccttat

SEQ ID NO: 759459 - DNA, 625 bp, Homo sapiens
ttttttttttgcagaaattgacaagccaatcctcaaattcaaatggaaatacaaggggcccagaacagccaaaacaatcttgcaaataacaaagttggtggattcacacttctcaattttctaagcttcctacaaagctacagtaatcaagactgtgtagtactgacataagaatggtggacatgtagatcagtggaatagaactgagtctagaacatacatttatgggcaactaatttttgacaagggtgtccagacaataacacaatggggaaagaacagtctcccccataaatggtgctgagacaagtgaacatccaaatgcaaaagaatgaagttagacrctaacctcataccatatacaaaaattaaccagaatagatcaaagacctaaatggaaaagctaaaagtacaaaactgttttaagtaaacataggcataaatcttcatgaccttggtgtcttagatatgattccaaaagcacagcgacaaaagaaaagataaagtggaaatcacacaaattaaagatgtttgatttccagaataccctaaaagagaacccagagaatgagagaaaacttctgcaaatcatgtctgataagagtctagtattccagtatataca

SEQ ID NO: 759460 - DNA, 597 bp, Homo sapiens
agaatgagagaaaacttctgcaaatcatgtctgataagagtctagtattccagtatatacagaaatctctaaaagcataatagtttaaagagaacccaattttaaaatgggcaaaggacgtgattagttttccaaagaatatgtaaaaataactgataagcatacaaaaattgctcaagatcattacctatcatggaaatgcaaatgattagctaccatgggaatgcaaatgaaaacaataataccagttcacagccactaggataggtataatttwaaaaaaaaacagataacatgttgagaatatggagaaattggaaattttgtacatgctggtggtaatgtaaaatggtacagtcattttggaaaagagtctgtcagttcctgaaaaggttactatatgacccagtaattccactcctaggtatataatacaagagacttgaaaatgtatgttcccacaaaaaatttatatataaatgttcatagcagatttattcataatagccaaaaagccgaaataacccaaaagcctatcatctgatgactgggtaaacaaaatacagtatatctatatgtaggggaaaataggtaaca

SEQ ID NO: 759461 - DNA, 607 bp, Homo sapiens
tgtagaatgtgctctaatgcaagagccaaagttggcttgcttactgtatccctctaaaacagctcacctgagagaaagtttgaatctgcatggcagatatacttcttctccatcacctcttcccactggttcagcagagaagaaaggagaacatatatcagattacctcttatctggagttcctcccaactgataaccagttgttgtccaccaaccacatgattcactccctttagtatagaggaatagaggctggggtaagatgcaagacgctatgtagcagtgctctcaacaagatgggaataacagaaagaggactaaktttggtgtggggagtaagaagaaggtcatgaatttagagtttgagatatggcactcaattggatataaaggttatcattccaaactacctcttaagtcatgccttttctttttcatttgtgtaatgagtacgttggccaatcttagagccactgacaggtgttacaaattaagaaatctgtgcagcataacaagaatcttcctagtgaatagatttgtacatttgagtctttaagcaagaccagagggcgtttgttgaaaatgctgagaagaggatttcttaatg

SEQ ID NO: 759462 - DNA, 655 bp, Homo sapiens
aaacagagaaaatggtagtccttcccactttaatatttcattttgtttatagtgtctaaccagtaaacttacacgtttgttacatatttaatgtattctctcttatgactcactttttcttaatttatagccataaaatctcgacctgtttcaagagttaccaatggaacttccaataaaaaaagtattcrtgaacaagacactaatgtaaataacaggtaggtcttcattcagtgttttaacctatctgttagctttctctcaaagttaattatatactaactgctagctaaatatttttaaaatatcttttattttttgttaatgtatttacataatattttaacacagttttttatttattaaaagaaattagtatatgcaaaatgattgaggcacaatatttaaaagaatatattaatgtgtactatggcatatgattataccttgctttattatacttgatctacagttttataaacttaaaaagacttatgagcatatgatttttctattttcaggagagatgtattttttatttcttgaaaaaaactgtttcaggtattggtcttttaaaaagttcatgttttggaatctaagtgtaatactgaatgcaaataattttttttagtgtactaaagaaagtcagtggcaa

SEQ ID NO: 759463 - DNA, 600 bp, Homo sapiens
aagttaacttctgtgggacaaaatttgagcaatgagaaaatggacataaggaagagtgaacagataaattgtttacccttcctctttctgagagactgttccaagattcaaaggttccattggcctctccagagatgtggccaagcaaccagctgtttgtagtggagctgagggcaacaaaccttgcatttgcttccctccttctccgttttatgttactttcccctcattgttgcttccctgggtttgaaccctccaataaagcattagttacacaaacttggccttgggctctgttttctgtggaaccaggctaaaacaaaagtcaaaatgactcgtaaaagagaaatcacatacaaacaaaaatggaaacacgacataccaaaacttacaggacattagcaaaagcagttgtacaacagaagtttatagcgatraacacataaaaaaaaagtaagatctcaaataaacaacctaacattaacacctcaaggaagagcaaactaagcccaaagttagtagaaggaaggaaataataaagatcagagcagaaataaatgtgatacaaaccagaaaaacaactgaaaacagcaatgaggc

SEQ ID NO: 759464 - DNA, 509 bp, Homo sapiens
tctatcttcactagcatccattatttctttgtcaatttgataaaagccatttaactagtgtgagatagtaactcattgtggtttttaactcattgtggtttttatttgcatttatctgatgattagtaatgctgaacactttttcgtatacctgttgaccatttatttgtatatgttcctttgagaaccgtctgttcagatcttttgtccatttttaaatttgattaattattttatctcttgctcttgagttgtttaagttcyttatatattctagttattaatctgttacctgtttgaatagtttgcaaatgttttctcccattctacaggtaatctcttcattttctgattgtgcccttggctgtgcagaagtttttaagttaatgtgatctcttgtcaatttttgctttggtcgtgctttagagaacttacacaaaaaaatctttgctcagaccaatgtcctgaaacatttctccaaagtttttttctagggatttgctagtttc

SEQ ID NO: 759465 - DNA, 516 bp, Homo sapiens
ttttatttggaatcagcaggatgattcaaagaccatctgtaatcttaagccacttatttaaattctctgaggtcctattttcacatgtataaaatgaattacatacaattgctttacattctataaaagattgctwtgaaaatcaaataacaaaatataaattacagtggtttataaaaaataatatattttttcattaaaaccaataagatttttgtattcatctattttcactatgaattatgttttctctttgttttatactttattctcatagacatattttaaaaattgtaatgtttgtattactctgttgttcccagaactttggtgatcaagaagaaatgaaagtctccccctcctagggacttgatctcctccacagaaggacctttcagtggtgtgtaatccctcatgagcccctgttctttctcatctcaagacagtgtgtttgcaggactcctctctcacctcctgaatgggacccctcgagggcagtgaaggtttcttatcttc

SEQ ID NO: 759466 - DNA, 545 bp, Homo sapiens
tagtagttgctcttgagtttccaacatacatttttaactaatttgggtttacctttaagtaacactttaccacttcatgttagtgtaggtgccatataacagaatattcccaattcttccctcctatccctatgacatcaatgtcattcttgtcattgatgcatattccataattactcattgcattgatagaatgttactttaaatagttaatcttttagctcaattattttaagaaaaagagaaaaaaaactttctaaattttttctccaacctgtcctttatttatgtagatccaarttctgacttgcatcactttctctctccctgaataacttcttacatgtcttacaggatagttctgatggcaatgaatccttttggttttcgtttgtctaagaaagtcttcatttctctttcatttgtgaaggttaaattttttaaatatataattccagactggcaggttttttctttcaacacttcatgataccctcttcttgcatagtttctttctttctttctttctttctttcttttttttt

SEQ ID NO: 759467 - DNA, 545 bp, Homo sapiens
tagtagttgctcttgagtttccaacatacatttttaactaatttgggtttacctttaagtaacactttaccacttcatgttagtgtaggtgccatataacagaatattcccaattcttccctcctatccctatgacatcaatgtcattcttgtcattgatgcatattccataattactcattgcattgatagaatgttactttaaatagttaatcttttagctcaattattttaagaaaaagagaaaaaaaactttctaaattttttctccaacctgtcctttatttatgtagatccaaattctgacttgcatcactttctctctccctgaataacttcttacatgtcttacaggatagttctgatggcaatgaatcctttyggttttcgtttgtctaagaaagtcttcatttctctttcatttgtgaaggttaaattttttaaatatataattccagactggcaggttttttctttcaacacttcatgataccctcttcttgcatagtttctttctttctttctttctttctttcttttttttt

SEQ ID NO: 759468 - DNA, 629 bp, Homo sapiens
gtgggagagcaatttttgtggaaggtggccttgtgatatccctcatatacaactttcttgctctcagccaagccagcaggcaagccataaagccataggtggtaaccagtctaggttaagataaactctcacagcttcaaagaggaggagagagagaagagaagaaaagcagtgactttaattaggataatttgttctccaaagtataaactcttatcagggcatatcacagctctcctacataccactgctggatttttgttagcataagatgaaacaacaagggcttatgaattattctgagccagtgacacagaaaakaagcagaaatagatgctgcggtgtattaaattgttatttgggatagagctggacaaagaggaatatgacttacaattagtgactacaaatattttaaaacattaaaagaaatagaattttacccaaagacgtttgttttcgctgggaagcctgccttttgctaatcatatttacaaatgtatagtgctaatctaatatatggatatcttgctttacaactcatgtactgacaattttattgcatttacccaaatttccttcaatgctacatttgtaactctctaaatacttcatatatagtgctaaag

SEQ ID NO: 759469 - DNA, 568 bp, Homo sapiens
ttgttatttggttttgaggttattcttcatgcagaactccaaatcacttgttcatatagattgcaaggtggagacaagattctgagttctccattctgcttgttcttcctaagtgcacagctgggttaattcagcagctttccatgcagtgaggctgcttgactaaattcagacaaataacatgtggctaaaacgatacagacagattttaggcctgccttgctttttagaaacatcttcaatgatcatctagaattctctccgaaaaatccagaagccacctgtctcaraaatggcagctgaagctggagaagagctgtctaagatgtggcaagtaaatcaatcaataaatcaatcacataacttttgtttttataagccattgagattttgaagtataattattacagaggcctatcttgggctattccaatataggcagaaaggcaaataatatttaacagccttctctgacacgattagtgtgtggcaattaattcacagccaaaatgacataattgaatgttgttcaacaaatgttgcttcaagaaagcaaatgtgattgcca

SEQ ID NO: 759470 - DNA, 621 bp, Homo sapiens
acttatgttcacttatttggttatcactgtaactttacaaggtacttactatgattaaccccattatacagcctaggaacgtggcttttattatataaatagtaagtaaaagagcccaattagagagctgcactttttttttttttctgtttttgagatggagtcttcctctgtcgcccaggctgcagtgcagtggcacgatctcggctcactgcaacctccgcctcccaggttcaagcgattctcctgactcagcctcccaagtagctaggaccaccggcatgcactaccacatccaactaatttttgtatttttagtagagacagtgtttcaccatattgtccaggctggtctcaaactcctgacctcaggtgattcacccaccttgcctcccaaagtgctgggattgcaggcgtgagccaccatgaccggccagagctgcactcttgacayagctgttcttcagaccgagagtgtgttgaatctaattctaagcctatagctcagcagaagttttgggtatctctgcacaaaccttcactataaaaatgccccatttgtcatgtttatgatttcatgtgctcagttatgagatacagcctccaattactcatcttcag

SEQ ID NO: 759471 - DNA, 608 bp, Homo sapiens
ttttatacctgaggacactgaagcatagagaagacagagcgcttgatgaaggaaacacatctttaaaaggtgagtcaaaagttttgattaatgtttattcaatatcaagcctccaccatatttgcttgaagtttgaaaagtacttggccacaagcctaggtttacagttaaggtcttttgattctgatacttgggaatgtgaaggaggtgccaatctttctctcagattggcctgatctgctgtgctttgggccctgttgtcctaggggtctttggaaccaatgtactgactcagcggaaagattactcagctgcaggagttccgatattctgagactttaaatctttctggaattcctggcatataacagggctacaaagggcwcacaagacaaaacatggtgatgttaaaaaggaggcaagaacggctctattctgacacgtgaagagactttggggaagagcaaatgtaacagggcaacccttactctcatgcaacctactcttattaagactttatcttagatggagtaagaggaaggagaagaaaaagaaggaagaaggaggaagaagaagaaataccttgtgattacgaaagtatggcctta

SEQ ID NO: 759472 - DNA, 600 bp, Homo sapiens
atgcctgtaatcccagctacttgggaggctgaggcaggagaatggcttgaacctgggaggcagaggttgtagtgaaccaagatcatgccactgtagtggcagactccagtggcagacagtgcagactccagcctcggtgacagagtgaggctccatttcaaaaaaaaaaaagaaagagaggaaggaaggaaagaaggaagggaaagaaagaaagagagagagagagagagagagaragaaagaaagagaaaaagaaagaaagaaagaaagacagaaagaaagagaaagaaaagaagagagaaaaagagagagagggagggaggaaggaaggaaagagaaagcaaattatcaaagctaaaagaaaaagtatgtaaagtcagtgaaaagaaaggcatggctacaggttaccaagagcttagggagagacaagtttatagatggggtctatgggaagactgttaacattccttgatcataaaaatagaaggaggcaaaatccagttggcactggaagaaatggaacagaggagacaactcacacttaactgcacatattgcactctcagtagttacagcaataaggtatccttccaatggtaa

SEQ ID NO: 759473 - DNA, 665 bp, Homo sapiens
ggatccggaccggtgataggtgggcttctgcaaaggtctctgacattccctggagacattttcccattgtcttggctattaccatttgactcatgcaaatttctgcagtcagcttgaatttttccccagaaaagtgatattttttttctacacatagtcaggctgtgaattttccaaacttttatgctctgcttcccttttaagcataagttccaattcccaaccatctctttgtggacacatatgactgtatgctgttaggagcaacccatccacattttgagtgctttgcttcttagaatttttttttttttttttttttttttttttttttgccagataccctaaatcatctctctcaagttcaaagttccacagatccctagggcaggggcacaatgctgccactctctttgctaaagcatagcaaaagtgacatttactccagtttccaataaattcctcatctccrtctgagacccaccacagcctggacttcattttccatatcactagcaacattttggtcaaaaccattcaacaagtctctgggaagtccaaactttcccacgtctttctgttttctcctgagccctccaaactgttgcaacctctgcctgttatccagttccaaagtcacttccacattttcaggtacctttata

SEQ ID NO: 759474 - DNA, 670 bp, Homo sapiens
ctaattcttcaattctcagatatcagtgaccatccacaagcatcaagaccatgaaagaaaacataacttcaccaaacagactaaataaggtgccagtatccaattctggagtgacagagatttgttaccccttgcacagagtattcaaaatagctgttttgagaaagctcaacaaaattcaagataatacagtgaagaaattcagaattatatcagataaatgtaacaaaaagattgaaataatttagaaaaaaattagaagttctagacctgaaaaattaaagtgataaaccaaaaaatacatcagagactctaaacagcagaattgattaaactgaagaaagaattagtgagctcaaagacaggctatttttgaaaatacacatccagaggargaataataataataataataatcataataatatagcttgcctacaggatctagaaagtagcctcaaaagggcaaatctaaaagttttggccttaaagaagaagtgtagagagaattcaggatagaaagtttattcaaagggataataacagagaactttgcaaacttagagaaatatattaatattcaagtacaagaaagttacagaacactaagcagatttaacattaataaagatattcaataatcaaactctcaaaggtcaaaaataaagaa

SEQ ID NO: 759475 - DNA, 500 bp, Homo sapiens
caggaggcagataagggaggatccctggagaatccccaacccgccccacaagtgtttacatcagatgcttttgtgcagatgtgggaacctgccaagggtcttgtctgcacatgctggcaacagactgggggcctgcctgcacactgggaaaatggggtgcagccactggggattcatgccttaagcagtgagaagagacctggccccttcagctggtgtgtgtggtgacctggtatgcaatctgtgagttgggagcctgctggcagaaccccttttttttcactgagagcgttctttaataaattctgctctcctcaaactttcaatgtgtccrtgcacctaatttttcctggttgtgtgataaggacctagattttagctgaactaaggagcaaaatatcttgcatcattttggtggcccatgtggggacatgaagaaaggtgagtaaaatgcagatcaaagcatcttttcccctcttgtatctgagcctttttgtcct

SEQ ID NO: 759476 - DNA, 556 bp, Homo sapiens
aggttgttatgctaagttattataaaccacagagataaccaaatttctttgttagtcatgtttctaactgtaactaccatggacattctattattcacagataattgttgtcttattttaatcctcttcaaaggatggtytataatcagccacaaaactctgacaggcagtctcaaatgcaggtttctgaaaactctggagattgtgacattggaataaaggaaaaacatacaggactcaggaagagttgaaatgttcacaaatatcaagcaaaacaagagttaactgaatggactgaattaatagaaaactgaagtaatgttttcagtaatgacttttgattggaacattgctgatctttgttttgtttttcagagtcaaggaagcttattttgagctatttatgacctttaataattgagtaagttatactcctatgaacaaaatttggagcatatttgtctctctctctctgtgcatggcttcttcagaatttggaaactagttctgagtattcttaatttatgccgttatagttgtttgcatcagtacaata

SEQ ID NO: 759477 - DNA, 610 bp, Homo sapiens
aatcaggccaagtataagactaaagtctattttgcaaacaagttagtcctatcatgatttgtttttaacaaaaatgaggactagagagagagaaattctgtttcaaaacttatcatacatttgtcatcaaaatctacattcattagttgcttttaagtttttgcctacattttagagtaaccctgcttattcctgtgaaccaaccagtaatctctgactgcagaccagaagraaaaaaggggtatgggtaatgtaaaaatctggatcaatattctagttctgagcaattatcctgaaaattctgccaggtgataggaataaatagggtgcccattactcagagttttcctttttaggaaagcaagatcaagggagccaaacaaagtcaagacccatcacccaatcttagcaagcataactatagctgccagttttcttggcatgtcacaggatatccttttctctcccttgttggaagaggactcaattttacagcttcaccttagcattcagtttatgataaagagtccccccaaaacacatttttgtcccaaattcaattccaagcttcaggtcaaagccctaggaaagaaaactggatctaagggat

SEQ ID NO: 759478 - DNA, 638 bp, Homo sapiens
tataaatgtggacccttaaaaattcctaaagtaagctttcttcatcttaagtgatttttagcttaaggaggggattattcagataacaattagaattaatacatgatggcctggcacgatggctcacacctctaatcccagcactttgggaggctgaggtgggtagattatgaggtcaggagttcaagaccagcctggccaagatggtgaaaccccatctctactaaaaatacaaaaattagccaggtgcagtggcaggtgcctataatccaagctacttgggaggcygaggcaggagaattgcttgatcctggggagaggaggttgcagtgagccgagatcgcgccactgcactccaacctgggcgacagagtgatactccatctcaaaaaaaaaaaaaaaaattaatatatgctatgttgctattttttcctgcttcaaatatttagttatgatgtaaagttactgctcttgtaataggtaagttctttttgaataaaaaccatgtaaaagtggtaagttataaaaatttaactaaaatgtaaatttggatttttacaacagattttaattactgaaattttttaaagccttcctcctataagcagcattcctaataaatcaatcaagttgtgaga

SEQ ID NO: 759479 - DNA, 592 bp, Homo sapiens
ggtaagtcttcatgattttagattttgcaatggtttcttagatatgacaccaaaagcataagcaataaaaaataaatataaactggacttcattttaaaactgggatgaaatggacaatattatggatgtgaaaagaaaagcagagaacaggtaaaaatatttgcaaagcatatatttgctgagaatctaatatatagactatctaaagagcccttactactcaaaaacaaacaaaatcccaagtagaaacactggcagaggatttacgtagacatttctccaaaaaagatacacaaatggccaccaagcaaacaggaaaaaatgctcaacatcattacatcattcaggaaatacaaataaaaactgaatgagacactatttcacatatactagaatggttaaacttttttttttttttttwaaaaaggaaaatagcaagtgttggccaggatgtgaagaaacaggtactctcatacatcactaatgggattgtaaaatggtatatgtcttgtgaaaaatggtttggcttatactcaaaaagttaaacacagaataagtggaaaataaagtggaatgaccctgtaattccac

SEQ ID NO: 759480 - DNA, 503 bp, Homo sapiens
gcaatattgactcaagaaataagcttaaatataaaaatggcttcgtctgaaataaatgtactaaaaaaataggaaaaacaatttggaaaaaaggtgaattatgttctcaaaataaacattaaaaataatgatatatccatggcattagayttaaactaactcagggagattaggaaagctcaagaaaaaattaaaatcatattggccaatgttcaaaaatcacagtgtaaaacattagctgcacacataggattgatgaggacattagctcaggcatgttcttccaaagttgtggaaatgataaaacaatgtaaaaataaaatgggaaaaattgacagaaaaagaggaaatttcaccttccgatagttgcacttcctcaaacagacatcagaacagatcaaagacaatgaacacaaattttggctttaaagtttctaattgaacacaaatttgaaatgatccaccaagtatcagttaaaatcaatgaacagagcctaattcat

SEQ ID NO: 759481 - DNA, 633 bp, Homo sapiens
catccaaatcccccacaaaaaacttaggaataaatttaacccaaatgaatataagacctttacactaaaaaatgcaaaaagaagataatttttttcaaattgatatatttaattctgcagagataaaattattacatagaagactgttccaacccaagccctattattttataatatagttatttaaattattttacagtatagttgttataatgtcacttgatgtatgaagttgaaaaagagaaatataaaaacctgcataatgtaacagtgattgaagaaaggcatcacatttctctgactgtaaagaayagagtaatttccatgggagagctcatgaaggagaccaccatgtaatgaagttcttttggcatgtacagaagttcaacattacacaaatataaatatattgcaaataaaatttctgtctaaagccatcagtagcaaatgtcttcttatatttattattatactatttccaattctaggtaataatagtctattttgaaaaacataagacaatggcatttctcctttcaaagactaatttttattaataatattgtaaagagatgaaaaaataatggattacgaattttccaatataaactttacccaattaaaatctttttt

SEQ ID NO: 759482 - DNA, 537 bp, Homo sapiens
catactattgaagttatctgagataggttttcttttttggaagattaatttgaagaaataatcttctctttatattggttatgatatcattaagattgtatattttgtgtcagttttgttatattttctcttaattgtcaattccatcttaaatttaaatttaatggatcattacattcaggtatataattgaaaacttgttatgttataacttactacttaagatacatagatcttatgtgggcaactacaagaacatttagatatatattggctataaaaatattatatagtatattttctatatatcatattctatttattgtattatatatgtatgtataaaaatatgtataaatactaaatatataaatatagatcactaatcacaagtttacwttaatagaaggaaaattttcactattacagtaatttttccatcaggtctctttacagcccatcctggcccagaagtaattattaatgtgacatcaatcaccataaattaatttgcctattcttgaacttcatttaaat

SEQ ID NO: 759483 - DNA, 630 bp, Homo sapiens
cttccaggtggctttgtttacactgtgaagggaaaaccacctactcaagacccagtaatggtggatgctagtggatcttagcttgctgggctccatgggggtggtatccactgagctagaccacctggctccctggcttcagcccccttctcaggggagtgaatgcttctgcctcactagcattccagacgccactagggtacaaaaaaaacctcctgaagctagctcagtttctgcctaaatggccrcccagttttgtgctcgaaacccagggacccggtggtgtaggcacccaagtgaatctcctggtctgcaggttgcaaagactgtgggaaaagcatagtatctgggctgagagcactgttcctcatggcatggtccctcacggcttcccttggctaggggagggatttccctcaccccttgtgcttccagggtgtggtgacaccccaccctgctttggcttgtcctccatgacctgcacccgctgtctaacaagtgccagtgagatgatccaggtacctcagttggaaaggcagaaatcgcttgccttctgcattgatcttgctgggaactgcagactggagctgttcctatttgtccatcttgccagccaccccaaccataatt

SEQ ID NO: 759484 - DNA, 587 bp, Homo sapiens
caaacatttctgcatagaagtgacagtagagaaagacatgccgaacattaaagtagtctgaaagagctgaaatgagacaggaatcaatcacctgtagacagagactgtcccaggaattaggaggatataagaaggagagagggatagtctcatttgctatgatgayttgctttccattcttctctatcctgtttgacaccccaagagagtggcttctatgcaccacatcagtgggattctttttaattccagtttctggtggaattgagacactgggagacacctggatgagactggaagacagcaggagagccacttgggatttccacctcctggctctctgcctgtgtattagttcattcttgaattgctacaaagaaatacctgagactgggaaatttatgaagaaaacaggtttaattggcttatggctctgcgggctatgcaagaagcatagcagcttctgcttctaagaaggcctcaggaagcttccaatcatggtgaaaggcaaagggggagcaagtcatctcacatggtgagagcaggagcaagagagacagggaagaggtgctacacacttttaaaca

SEQ ID NO: 759485 - DNA, 565 bp, Homo sapiens
caattgaaacatcccatcttattcttgtttacaacaccatccaagcccccattcccctctatccacagactgatttgtcctctttcctttagaaaaaaaaatttttccaaagagttttctgcactcatgtcttcattttttcatccttcctcatatcttctcatatctctatctccctctcttagctagatcattaaatttatgttttttgcttgaaaatttatttgtgacatagtaataaagtcaaagctttcaaaaacaatctttaaatgcatgcgctgaaaactgtcattcccatttgaggtcctcaggcatctttgccttgttaacaaagacatatcctgttatacttattaatacgttyatattaattcacaaatatttaataataaaacaatatatattttttgtcatacaatatatacattggcatgcatactttttaaaagagctaacaaattctggagggccttttatatcaggtttgttgctctttctgtgcagctacagagtattctactgcacagatagacaataatttatacagtattgatggccattttgg

SEQ ID NO: 759486 - DNA, 540 bp, Homo sapiens
tcaaatgagtaaattgctgagtacctgctatgttccagaaattttcctaggtgacttgtgaataaaacgtagtccttgttttaggagcttatattttatagggggaaataacctccaatgttcttttctaaccagagattccaagattcatcagttccaagtaatgatggcaaaaatttgccaagaattttwaaaaaaattatatagaaattttggcacaaatatttaacagtgatttttggccagggattcagggccctaacgatatttgcacctcacagtgaaagcaataggggcctctggacagtaccttgacaggtagaaacccgaccactgggagctgttctgggtcctgaaaatggagtcagagtcgggagaggttgattcaaagtttgtatttccaaggtacaaatggtccagagtgtagcttgtgaaagagagagttggagaggaacatgtacaggcatcaggtgttgtatatatccacaaatcaccaggaatacatcttagagatgataacttctatatctttctttcaga

SEQ ID NO: 759487 - DNA, 530 bp, Homo sapiens
ctcaactaggcccagaggcagtgaactggggaacaggagacaccacccaccgacatactagctggagtggctaaagtagtgctggaatcaacaaccctcccctaacccaggctgcacagcttatggctccctttcttctgcttgaggagaggagaggagagrgaagcctggggagaactttgtcttgcatcttggataccagctcagccacagcaagataaagcacaggtcagtcctgagtcccccattctaggccctagctcccagacaacatttctagacatatcctgggctagagagaacccacttccttaaaggaaacaacccagcccttccagcactcataacctgcaaacttaaaagcccttgggccctaaataaccagcagcaacacccaggtttagcagcagtactacatcaagggccttggtgaagctgagacttgctggcttcaggtaccaacaatgccatatgggggtagagcaccaaggaggctctttgggatccccatttctaggacttgactctgg

SEQ ID NO: 759488 - DNA, 597 bp, Homo sapiens
ttatctgcatcttaattttgactggccataagaaaaaaaataaatctgactttctgacttaaagagtcagcagtagaattcatatgacaccaagtttgtgttttcaggagctctgatggagttgtaaacagcaaaaatattttctgaacagttgcacagagaagagagttgctttaattttgtgtggggaaaggtggaggcagaaggcagtccatgaagagcagaattttgagaagtgaagagttccayggtctttccatccagagggaggcagatttgggtttacactagggtatttcaagggagtctcccttggcctggagaactgggctgccatgagattattcttaatttacagttgcctttgggatattgagggtagatacaggtctaccacgggactaggttcactccaacaaaatttctatccaaaaccgctcttctagttccatgttcatgcgaaccagagactagcttggattttctggagagggtgggaagaattttccaaagtgaacgtgattcaggatgactatacctcacactcagattagtaaaatttccttcttcttgccttttctgtcttccacatcgatt

SEQ ID NO: 759489 - DNA, 660 bp, Homo sapiens
ggtttttttagttttattttctttttcagagaagacagtttcaagctctcctctaagtaaggtgggagccactggagggcatgaactgaggcgtgagatgttatgatttactaatgaacaagatcactctggccactgagataggagtgggaccacaagaaggaagggttagaaggctgttggaatcaccaagccaagagatgatggcggcttgaactagagcgatagcagaaaaaggggtcagaaaggattgaattctggatatatttgaaggtgagccaacccctcctgggagtgagaataaaggaagagtaaaagatgaccctaaatttgttgtcctgagcagctggacaaatgaagttgccatttacttagatgaagaaggctgcagatggaaaccaggatttggacwtacccgatgctcattctgggatgtctattagactgtccagtggaaaaatcaaataggcagacagggtagtctacaatggaatataactttgagagtcatctattcatagatgtattcaaagccttggaactggatgagatcaccaagggggtgaaagtaaagataagaagaggccccccaggcgctgcaacattaagacatattttcagcctatcaaaatgtaaatacaatgcaaaatcagttaattt

SEQ ID NO: 759490 - DNA, 627 bp, Homo sapiens
ctcagtcccatgggtaccaatgcagtcaccagccatctcaatcagtccccagcttctctttccacccagggatatggagcttcaagcttgggttttaactcaaccactgattgcttggattataaggaccaaactgcctcctggaagcttaacttcaatgctgactgcttggattataaagatcagacatcctcgtggaaattccaggttttgtgaagacctgtaraacctctttttgtgggtgatttttaaatatactgggctggacattccagttttagccaggcattggttaaaagagttagatgggatgatgctcagactcatctgatcaaagttccgagaggcatagaaggaaaaacgaagggccttagaggggcctacaaaccagcaacatgaaatggacaaaccaatctgcttaagatcctgtcatagttttagatcattggttatcctgatttgcaaagtgatcaaaagcattctagccatgtgcaaccaaacaccaccaaaaataaaatcaaacaaaactaagttgtgaaggaagggagggaaggtcatagccttcttaagcagaggtgttccattgttttagccaatccttggttgaatcttaggaatgaacagtgt

SEQ ID NO: 759491 - DNA, 645 bp, Homo sapiens
aaaaaaaataaaagattacacggaaagagcaaaggtgttggctgtatgctaggatcaaatgacattcatttgttgaagtagtctgagtgactcaaagacatacagcagctattattcacttagctacaacacagcaaatattaacacatattttgaaaaagagagatgttgcttcatgtgacaatactgataatatttaagaagagatgtcagtgactcatcagacactcaggcagtcatgatttttccccttaaatgtcactaataatttttcttactgccttttttatttaggcayatgttcagtggcactcacaatcaaaattctattacaaaacacagtatcgaatatcttacttttattttatttaaataaatattgtaaatgatcatagtgaataacataataagtattattcgtatcaccattcttctgtattgtagtgatttttatgtcatcactgtgaatggtggatggtcttttgtctcttctaaatgtcccattcctcatgggataatttaaaatgacccataagcaaagttaagtttcaagaggattttttttcaaatagacagccttgccttgtactattatcctccaatttcctttttacattttcgaaaataatatgtgagttttaaaac

SEQ ID NO: 759492 - DNA, 549 bp, Homo sapiens
agaatgtgcaggtttgttacgtaggtatacatgtgccatggtggtttgctgcactcatcaactcgtcatctatccctcccctagcccccatcccccacacagaccccagtgtgtgatgttcctctccctgtgtccacatgttctcattgttcaactcccacttatgagtgagaacatgtggtgtttgattttctgttcctgtgttagtttgctgagaatgatggtttccagcttcatccatgtgcttgcaaaggacatgaactcatcctttttcatgkctgcatagtattccatggtgtatatgtgccacattatctttatccagtctatcattgatgggcatttgggttggttccaagtctttgctgttgggaatagtgctgcaataaacatacgtgtgcatgtgtctttatagtaggatgatttataatcctttggttatatatccagtaatgggattgctgggtcagatggtatacaactacatttttaaaggataaattttatttttaaaaacacagtgttgtttgcatgtatttacaaaatagg

SEQ ID NO: 759493 - DNA, 435 bp, Homo sapiens
gcaaaggggctataagctccatgcaagtctgaaacccagtagggtagtcattaaatcctaaagctccaaagtaatctcctttgactacatgtctcacatccaggccacactgatgcaaaagaagttgggctctcaaggccttgggcagctccatccctgtggctctgcagggtacagtccctgtggctgctttcatgggctaaygttgagtgcctgcagcttttccaggtgccggggcaagctgtgggtagatctatcattctgtgatctggaggatgatggccgttttctcacagttccagtaggcagtgcttcgtgaggactctgtgtgggggcttccactccacatttctcctttgcactgccatagtagaggttcccgaatgagaactgaagcaaacgtctgcctggacatcaagacatttccatacatcc

SEQ ID NO: 759494 - DNA, 658 bp, Homo sapiens
aaaccccatctgtacgtcaccattgtcaaagaccaaaggtagataaaaccacaaagatggggaaaaaacagagcagaaaaactggaaactctaaaaatcagagcacctatcctcctccaaaggaacacagcttctctccagcaacagaacagaactggatggagaataactttgatgagttgagagaaggcttcaaatgatcaaactactccaagctaaaggaagaatttcgaacccatggcaaagaagtttaaaaccttgaaaaamaaattagacaaatggctaactagaataacaaatgcagagaagtccttaaaggaccagatggagctgaaagccatggcacaagaactacatgacgaatgcacaaaggctcagtagttgattcaatcaactggaagaaagggtatcagtgatggaagatcaaatgaatgaaatgaagcgagaagagaagtttacagaaaaaagaataaaaagaaatgagcaaagcctccactgtcaacattagacagatcaacgtgacagaaagttaacaaggatatccaggaactgaactcagctctgcactaagaggtcctaatagacatctacagaactctccaccccaaatcaacagaatacacattcttttcagcaacacaccacacctattcccaaa

SEQ ID NO: 759495 - DNA, 605 bp, Homo sapiens
aattcagagatttcttcttgatttggatccattgccagggagttggtcttttggggttgttatagaatcctgtttgtcatattaccagaattattttctgggggttccttttcatttggatgactatttctgtggagagttctgaaactcaaggcctgctgttcagattttcttgtcccatggggtgaccccttgatgtagtgccctcccccttaccctagggatggggcttcctgagagttggacagcagtgattgttattgttcttctggatttagccatccatcrgggctaccaggctctgggctggtgctgggggttgtctgcaaagggttctgtgatgtgatccatcttcaggtctcccagctgtggataccagcatctgctctgatagagattgcagagaagtgaaatgaactctatgaaagtcttttgttgtaaatatgtttagtgtgctggctttcttgaatgctggttatgctagcagtgaagttgtcatgtggacatcctcaggacctctggttagccaggatgttgccagcagtgggaacaggtgttgtcttcttgggttcaaggttattctttcatgagttgctgtaatggcc

SEQ ID NO: 759496 - DNA, 481 bp, Homo sapiens
gggagactgtcagggagggatggcccagcctcaggggagccccgttccgatggggagagcacaagccaggttgggcacaggtgggcaggctggccctcagggcctccagaggttgtgaaagggtggtgagcatggatgagtgtgtgtgcatgtgggtgggtaggagtgtgcatgtgtgagagtgtgagttgtgagtatgtcagagtgtgtctgagcatgtgtaaatgtgtatgagagtgtggcagcagccccatccctgcctgtgatgtcccatgactgaggatggtgtgatgttaccttytggttgagagccctggtgcagagccagagctactgcactgcacaattcctgggggagcccttctcgtgttcatccatgtgaaagacactcctactgtggttcagtgcacagcctgtgcaactgtacacctcagccacactgagatccgcatgctcaccactgccctctgcatacataaag

SEQ ID NO: 759497 - DNA, 622 bp, Homo sapiens
tctaaatgatatttagctatattttctactaagaagtttaaagttgtgtttttaacatttaagtctttaatccatctggactagatttgtcaacatcgtgtgaagagaagatacaatttcttcttttcccagatggctaatcatttttcaacttcacttcttcaatagtaaattttgtttgtttttcccctactgatctgacatataacttttgtcacataccaaatgccataaaccttaatgtgaggttccctttctagactatctctctgattgatttctttttccctgcactaatatgacactgtcttagttactataggttcatgctaagtcctaaacaaggtgaggaaaggctttcctccctccttttcatcttcagaagcatcctgcttattcttgcctgcttgctccatatcatttaacaagtttctttaaaaatctctgttgggacyttgaaataatattgaatcaatagatccgtctggggagaattgatatctatataatgttcaactttcctatccatgaatatggtaaatttttccatttaggatttctccgagaactctcagataaaattatataattttctctgtagagattatgaacacagtttgtt

SEQ ID NO: 759498 - DNA, 644 bp, Homo sapiens
cagaatgtattggttcatgtaccatgttgccttcaggcatggctggatccaggctcctaaagagtgcaattaaggttctgcttttcttgaacagtcttagctctgccttcctctgtgttggctttattctcaccagcaactacsagcagcagctcctatcatcttagcaacccaaggacaattgctcctataaaagtcacaggtaaggctttgttggctgggctccgggcatgtgcctttctctgagccaatcactggccagggcgatgtggtgctctgattggttaatcctgggtcatgtaaccatcccacagagagtgagctgttgcctgaagaagaggcatgatgtgggactgggggatggggagggaggcagagacaatagaagtcactgtggcttccccaaagcaggtcacacattcatcgtgcccttgagcttccacacttgtcctagaaaccttgctccttctagggtcttctagcctcatgtagccaatcccagtgaagccataagcatcacataccctgtccccaagccaggctgagcctggggaatctggatgaaagggcaggtggagcccgagcatcagctcctcaccccggtgcaggagctggtgagcccaggacaaggaagaaactgaggt

SEQ ID NO: 759499 - DNA, 644 bp, Homo sapiens
cagaatgtattggttcatgtaccatgttgccttcaggcatggctggatccaggctcctaaagagtgcaattaaggttctgcttttcttgaacagtcttagctctgccttcctctgtgttggctttattctcaccagcaactacgagcagcagctcctatcatcttagcaacccaaggacaattgctcctataaaagtcacaggtaaggctttgttggctgggctccgggcatgtgcctttctctgagccaatcactggccagggcgatgtggtgctctgattggttaatcctgggtcatgtaaccatcccacagagagtgagctgttgcctgaagaagaggcatgatgtgggactgggggatggggagggaggcagagacaatagaagtcactgtggcttccccaaagcaggtcacacattcatcgtgcccttgagcttccacacttgtcctagaaaccttgctccttctagggtcttctagcctcatgyagccaatcccagtgaagccataagcatcacataccctgtccccaagccaggctgagcctggggaatctggatgaaagggcaggtggagcccgagcatcagctcctcaccccggtgcaggagctggtgagcccaggacaaggaagaaactgaggt

SEQ ID NO: 759500 - DNA, 577 bp, Homo sapiens
atttcttagttctgacacatgtaccttggtaatgtagtgtgttcacattagaggacactaaaactgggtgaggaacgtatgagaactctctgcattatctttaaacttttccgtaaatctaggtttattccaaaataaaaagattaacmaaaattctggcatcaaattaaaaattactaaacatgaaaataggatccaaattatgacccacagccaggtaggaatagacacaaaaatgtcagaaatgatagaatgagcagatgaggactttaaaacagctattataaatatgcttcaaaatttaaagaaaatcattaacatagataaagagaaattaaaaatcttatttaaaaaatgcaaatcctagaggtatacaggtatattcctgtaggcatgttcaaatataatatctgaaacaaaaaatttactggatgtgtgcaagagtaaatcagacattacaaaaaaataaaaataaaaatttagtgaacatgaagatatatcaataaaaattaaccataattaaacacagaaagaaaaaggactacacaaaaatgaaccaagcctcggtgaccttatg

SEQ ID NO: 759501 - DNA, 643 bp, Homo sapiens
ttttcaaaccatatattttgttcttctttactatactggtgcgtactcataaagaataggggcttaacagaaattatattttagactaggctaataccaagggttaagtaggaattaaagcaacatgcttttaaaastagtgtgtgagacaccctaagaacggctccagcctctgaactcctgtagttgcttcatatctccgcaaatagcacaaaattatcgtgatttccctgttatatgtctggctatgaattcttctatggcagggtctttcaattccaaacagcagcacaatactggcatatggtagaaactcaactattgtttgaggaattaagagaatgcaaaaatatcacaagaattccacgactctcccaaacagcaatttccttgctttcagggaaatggtgacactttggtttcaattttttgatataatgaattgattaatttactggccattcagatttgagcaatataccatgtatagatcttcattaaaagcaaagagaaaagtctgtttcctgaaccaaaccagaaatgattcagaggaaaatgcaaattttaactggaaaaaaataattttttaaatgtataaagtactatattacttcaagatatgtgtaggcaaatatgctaagct

SEQ ID NO: 759502 - DNA, 575 bp, Homo sapiens
aaaacacaaagcgcaggcccagacagatacacttatgaattctatgaaacatttaaggaaaaaaaaaaaatacaccaattctctcctatctctttcagatgatagaagcacagggagtactccctacttctatgagttcagcattaccatatgaaaatcaggcaaagacattacaagaaactacagacaaatattgctaataaacacagatgcaaaactcaagaaaataytattaaactgaatccaaaaatgtatgcaaaggattatattatacaccatgaccaagtgagatttattctaggtatgcaagggtggttcaacatttgaaaatcaatgtaatctatcacatcaacaaggtaaagaagaaaaaaatcacatgatcacatcaatagatgaagaaaaagcatttggcaaaatccaacacctgctaataataaaaactcacagtaaactaggaatagggtgaagttcctcaatttaatttttaaaaatctacaaaaacccacgctaacatcatacttaatggtgagaaacttgaagccttcccactaatcaggaacaaggcaaggatatcc

SEQ ID NO: 759503 - DNA, 645 bp, Homo sapiens
tccaaatgctgaggaaatatggagatgtagaacacttggaattcaaatacatttctggcgggaatgtacaattatatagacactttgaaaaataatcttccaacatattataaatttgaccatatacttactattcagtccaggaatcccactgggtgatatttcctccggtgaagtgaaaatttgastttaaaattttaagcaaatgtttaaagcaggtttattcatcattgccccaactggaagcaacttcaatgtctttcagcaaacttggtccctggatggactacacaggtcaacaatagaaagcaacaaactatgggtacatgcaagagcatctcaattcagcattatgttaagtgaattcagacagtatcagaatgctacatactatatgattatatttacaataattagtgaaactgtaagggtagaaagtgcatcattgctcaccatggggtggaggatcaggggagtggctgactacaatgaccatggagaatttggtgggctgatggaactttacattttgacagtagtggtagttaaatgactgtatggatttgtaagaaattgagaaattatacatgcaaaaattttactctgtgtaacttataatctaataagaaaaaaaatgatttaaaa

SEQ ID NO: 759504 - DNA, 645 bp, Homo sapiens
tccaaatgctgaggaaatatggagatgtagaacacttggaattcaaatacatttctggcgggaatgtacaattatatagacactttgaaaaataatcttccaacatattataaatttgaccatatacttactattcagtccaggaatcccactgggtgatatttcctccggtgaagtgaaaatttgagtttaaaattttaagcaaatgtttaaagcaggtttattcrtcattgccccaactggaagcaacttcaatgtctttcagcaaacttggtccctggatggactacacaggtcaacaatagaaagcaacaaactatgggtacatgcaagagcatctcaattcagcattatgttaagtgaattcagacagtatcagaatgctacatactatatgattatatttacaataattagtgaaactgtaagggtagaaagtgcatcattgctcaccatggggtggaggatcaggggagtggctgactacaatgaccatggagaatttggtgggctgatggaactttacattttgacagtagtggtagttaaatgactgtatggatttgtaagaaattgagaaattatacatgcaaaaattttactctgtgtaacttataatctaataagaaaaaaaatgatttaaaa

SEQ ID NO: 759505 - DNA, 615 bp, Homo sapiens
cagacttaacttcttgtaataaaattatttcagggcaacccatattcctaaaaaatacatgtgtaatggccaccaaccatttcaatgcatgaatgtaccttaatttatttagctagttcctctgggttgggcacagtatgtttctgtcttttttggttgtttcaataatgaatgacgctgtgaatacagctgtccctttacacatccttagatacgratatatctttagatcaagacatagtgaaagaatggccttgcttatgacttttcaaacttataactaaaaatgtcttctgaaaattgtattaggttctaagttgaacctaagttggtggtatttgagtatttttgcctacaaaacaacaataccatatgactaaacatactatataagcagaacacttttttgagagacttaataacttcacatccagcctgggcaacatgacaaaaccccacctttacaaaaaatacaaaaattagcagggtatggtggcacatgcctgtggtcccagctactggggaggctgaggtgggaggatcaattgagcctgggaagtcgagccagcagtgagccatgactgcaccactgcactccagcctgggtgacagagg

SEQ ID NO: 759506 - DNA, 615 bp, Homo sapiens
cagacttaacttcttgtaataaaattatttcagggcaacccatattcctaaaaaatacatgtgtaatggccaccaaccatttcaatgcatgaatgtaccttaatttatttagctagttcctctgggttgggcacagtatgtttctgtcttttttggttgtttcaataatgaatgacgctgtgaatacagctgtccctttacacatccttagatacgaatatatctttagatcaagacatagtgaaagaatggccttgcttatgacttttcaaacttataactaaaaatgtcttctgaaaattgtattaggttctaagttgaacctaagttggtggtatttgagtatttttgcctacaaaacaacaataycatatgactaaacatactatataagcagaacacttttttgagagacttaataacttcacatccagcctgggcaacatgacaaaaccccacctttacaaaaaatacaaaaattagcagggtatggtggcacatgcctgtggtcccagctactggggaggctgaggtgggaggatcaattgagcctgggaagtcgagccagcagtgagccatgactgcaccactgcactccagcctgggtgacagagg

SEQ ID NO: 759507 - DNA, 615 bp, Homo sapiens
cagacttaacttcttgtaataaaattatttcagggcaacccatattcctaaaaaatacatgtgtaatggccaccaaccatttcaatgcatgaatgtaccttaatttatttagctagttcctctgggttgggcacagtatgtttctgtcttttttggttgtttcaataatgaatgacgctgtgaatacagctgtccctttacacatccttagatacgaatatatctttagatcaagacatagtgaaagaatggccttgcttatgacttttcaaacttataactaaaaatgtcttctgaaaattgtattaggttctaagttgaacctaagttggtggtatttgagtatttttgcctacaaaacaacaataccatatgactaaacatactatataagcasaacacttttttgagagacttaataacttcacatccagcctgggcaacatgacaaaaccccacctttacaaaaaatacaaaaattagcagggtatggtggcacatgcctgtggtcccagctactggggaggctgaggtgggaggatcaattgagcctgggaagtcgagccagcagtgagccatgactgcaccactgcactccagcctgggtgacagagg

SEQ ID NO: 759508 - DNA, 547 bp, Homo sapiens
gaaggtggacccttccaccacttgttccctatacagcccccttaattgtcttcacagcagctaacccaaccagtaattccaccatggccatgttccttttttatcttctgcgttccccaccgaactgcaagctctatgatttgatctgaacaaccttcatcaggttggaaatattttttatctcttctgaaaaattaggtaacttttactccctttaagtaatataagaaggcagtactctgcatatacatcttttaattttaatgcttctcatactatgatctttytaaagaattttaaaagacaagctaccatcctcattccagccacaaagccaaccccttatagtgctactaatggtaataaacacaactaaggtgtcaagtgtttgaataaacactcgctacttatggtcacattcacaggtgtgatgaaaatgacaactatagtgaaatttattcctcaattataagatgttttgtaatttaaaaaatgccaaagtgaaggtgtggaatatctgataatcaagaaaagagagtattgcttt

SEQ ID NO: 759509 - DNA, 514 bp, Homo sapiens
aaacttttgagttagaaactatatagggaaaatttgtgatgataatatctcctgtttatagagcatctatgaaccatgagaccctagggattattctattcctttttcaattaatgactccttcctttcttgttccaggtgagctttgctgttctttaagttaggcactctctgtatccaagcattgtcctattcattctctaaacaagtcctcagggtggacagggctgtgcagctggasccctgtgctctgtgtgcaggccccagcctgaggaggagctgagcaggagattccttcgtcaggctccatccagcgggaagcagcgaaatcctctgatttacatcaagaggctggtctcctggccaagccttgccacggagggctatgcctttgtgtagtctcttttctccaagagggtgccctttttctgtataaacgcagtgcccaacctgcagatagtgctgaggtagggattgcaatgaagaaacgggctctagagggcaaatgagttgc

SEQ ID NO: 759510 - DNA, 514 bp, Homo sapiens
aaacttttgagttagaaactatatagggaaaatttgtgatgataatatctcctgtttatagagcatctatgaaccatgagaccctagggattattctattcctttttcaattaatgactccttcctttcttgttccaggtgagctttgctgttctttaagttaggcactctctgtatccaagcattgtcctattcattctctaaacaagtcctcagggtggacagggctgtgcagctggagccctgtgctctgtgtgcaggccccagcctgaggaggagctgagcaggagattccttcgtcaggctccatccagcgggaagcagcgaaatcctctgatttacatcaagaggctggtctcctggccaarccttgccacggagggctatgcctttgtgtagtctcttttctccaagagggtgccctttttctgtataaacgcagtgcccaacctgcagatagtgctgaggtagggattgcaatgaagaaacgggctctagagggcaaatgagttgc

SEQ ID NO: 759511 - DNA, 688 bp, Homo sapiens
ggtgggtgggtagatgagtggagggggaggaggatgggtaaagggtaagagttggaggttttaaaattttctggtggccttataggattcagatggactgagttgccccatcttgcctttatcttcccacctcatccatttccctgtcaggaggcgaggtcctgtgagagcacagcacagcaataaatagagtactcttgaactcgtctccaaacagtggactcctgcagatggtcactctaccaagctcaccagttctccctgggactccatyaagatggccctgccattcatccctcacacatcaagctggtttcccccctctcttccctgctgtcacaccctctccccacctccttgggggctctcagtccagttcttccccttgccagtctctgcccctccctctccctccagtctcacttccttagtggggcctctttttccctctgagagtccacagctgctgtgacttgcagtttagcctttcacttctgaagacagctctttgtttcttgtgtgtttattttgtctcttcgactagatttcacagaagctcaggagagcaggagccaccccctttcaccccacttttctagctgcaggatcctgcagagtgccagacgctctctgcatttggggctggagggctgatttgattgatttcaccataaactctcttccaact

SEQ ID NO: 759512 - DNA, 637 bp, Homo sapiens
gtaaagatccttgtaggatagattgttcaaagaagaattagtgcatgaaaacatatagacatatacattttaggagagattgtcaattaccttggaagatacagtaaccaatttcctttaattgaccatttccccataaccttgctaccattggacatacaatcttgtagatttttgttgatctgatgtgtaatttgcaactttttggtggctagtatggttgagcatcttttccatatttattgaacatctatatttactaaattgcatgttcatatcctttttctattcttattttgggtatttttttcttattggtttttaaaatttttcatgcatcattaataktaacccttttacagtaacatattttacaagaattttctcccacttatcctgttgttccattgcatagaaagattttaatttgcaggctgtcatatttgtcagacttttactttatggttattggattttgtatctagagatttattctttattcttttaaatgtagattataagataaaacaacattccaaagccattgtctctgaaactatgttctattggagcctcttgtcccataggatggtgctaggtattctgtaggggaaaagggttcgcaatcaaagaattt

SEQ ID NO: 759513 - DNA, 525 bp, Homo sapiens
gagaagaatagtgctttggaggcagatgacctggatggattcaaatcctagctccagcactatgaatacatgtaatttgggatgaactatttaactttatgagcctcctatgaacactgaggatagtggttccttgaagatctctggcgggatttaaaacactgtatatgaagatcccagttccatgtctggaacatggtaggtacctgatcagcagaaagtgtttttattgctcctttcctctgaacwactggctttcaattctccgtggtcttggtgagctgctgccacgccgactcagaacaataagaaaaaccacagaaagcaactcacaaaagctgggtgagcattagagatgggcaataacttgcttaggtttcagagttaacagtggacacagctgagatttgaaccagatctgctctactcacaattaaattggtcacaaaagagggtttccaacataagccgctacccagctggatgtgaaaagtttgaaccaggaacatcaaccacgggcattca

SEQ ID NO: 759514 - DNA, 634 bp, Homo sapiens
ggctaatgccgtggtagtgagtatggtctttagagccaggcaggaacagatatgaatctgagccatcccacttctcagcaatggtgcctggaggaagctgtttcaactgtctgagcttcaattccctcatcaataaaatagaaaccttaagacgtatccctagtgttatacattaattaattcaacagatatctattaagcatcaactaataaatgattattagttgaagacacactaatcattgtgttttcaacactcagaataatcctaatattaggattagagaactcatatgattattatggttttggcataagtctttttacccaggttcttcttgtccgggtagctgtgttagaaatgccttgttttccttgtgatttgggccrgattatgctggtttcttcccatagatttccacctcagagacatagaaaggggcttcatctctttttcaagttgctctaagggccaaatttagcctcagggattttcataaaaccaatgatgctttccacctatgtgtatggctgttgaaaagttatcaaagaagaatttaaagttgtgttcaaatatggaaagcagtaccatgtgaagagaacttagtgatgagggcagaggggtgaagcccat

SEQ ID NO: 759515 - DNA, 613 bp, Homo sapiens
gataactgaagcaacgggcgtggatgcattcagctagggagtgggaagcgagtgaaaggaggacaccaaaaagcatttaggacctccagagagaaaataacggtatgaggaatacaaaaagagttctgtgttagtgagccaagggaagaaaagtgattccaggaagagacagaggtcagcagaataaaatgctgtggctcatgctatttagggtattcttaattattagcatgatagtattatcacctgtggcttattcacaaaatatggttattgytttttgttttgttttaagatggggtctcactctgtcacccaggctggagtgcagtggtgcaatctcggctcactgcaacttctgcctcccgggttgaagtgattctcctgcctcagcctcctgagtagctgggacttcaggctgtgccaccatgccagactaatttttgtagttttagtagagatggggtttcaccatgttgcccaggctagtctcaaactcctgagctcaggtgatcctcccacctcagcctcccaaagtgcaagattacaggcatgagccaccacaccaggccccaaatataggcaagctcttcattttatcactcctatggca

SEQ ID NO: 759516 - DNA, 613 bp, Homo sapiens
gataactgaagcaacgggcgtggatgcattcagctagggagtgggaagcgagtgaaaggaggacaccaaaaagcatttaggacctccagagagaaaataacggtatgaggaatacaaaaagagttctgtgttagtgagccaagggaagaaaagtgattccaggaagagacagaggtcagcagaataaaatgctgtggctcatgctatttagggtattcttaattattagcatgatagtattatcacctgtggcttattcacaaaatatggttattgctttttgttttgttttaagatggggtctcactctgtcacccaggctggagtgcagtggtgcaatctcggctcactgcaacttctgcctcccgggttgaagtgattctcctgcctcagcytcctgagtagctgggacttcaggctgtgccaccatgccagactaatttttgtagttttagtagagatggggtttcaccatgttgcccaggctagtctcaaactcctgagctcaggtgatcctcccacctcagcctcccaaagtgcaagattacaggcatgagccaccacaccaggccccaaatataggcaagctcttcattttatcactcctatggca

SEQ ID NO: 759517 - DNA, 613 bp, Homo sapiens
gataactgaagcaacgggcgtggatgcattcagctagggagtgggaagcgagtgaaaggaggacaccaaaaagcatttaggacctccagagagaaaataacggtatgaggaatacaaaaagagttctgtgttagtgagccaagggaagaaaagtgattccaggaagagacagaggtcagcagaataaaatgctgtggctcatgctatttagggtattcttaattattagcatgatagtattatcacctgtggcttattcacaaaatatggttattgctttttgttttgttttaagatggggtctcactctgtcacccaggctggagtgcagtggtgcaatctcggctcactgcaacttctgcctcccgggttgaagtgattctcctgcctcagcctccygagtagctgggacttcaggctgtgccaccatgccagactaatttttgtagttttagtagagatggggtttcaccatgttgcccaggctagtctcaaactcctgagctcaggtgatcctcccacctcagcctcccaaagtgcaagattacaggcatgagccaccacaccaggccccaaatataggcaagctcttcattttatcactcctatggca

SEQ ID NO: 759518 - DNA, 513 bp, Homo sapiens; identical to SEQ ID NO: 736968

SEQ ID NO: 759519 - DNA, 548 bp, Homo sapiens
atgcatagaagtttttggatatacagacatcatttttagtggttaccttcagggacagaaatggagagaggcagtaaaaaaggaaggagttgactctttagaaggaaaatgaattagacaagctgaattggcccctatgtccccaggggaaggtcagagcagctgtgtctcacctggcatgatgatctctgggaatcccagcttcctggccaccacggtkgtcctgtccaccaggtgtggatagtccttgcgaatctgaatgatgtcacccaccagcatcttcatggtcacccagaggcctgcaaaggaacagctcaccgtgaagagcccacttttgcaagtgacccctcagtcggccctcccgccacctctcccctctgtctttctggagatcactgggaacagagtcatacagccacagatgcagccacccagcccacagggcctctggaacaggcgatctctgggtctgaatcccgctaatgatttctagcggtgtcagcctctggcaaattatcccacttctctaagcccaaagtgaggatgac

SEQ ID NO: 759520 - DNA, 582 bp, Homo sapiens
acttattaaagtgcccccggaacaccggagatattcaggatgtatcaattcctctctgcttttgggcaccaggacatgcctccaattttcttcagaaaatgtgacttatccctgtagatcatatgttcccattcttcccagtggtctgtctggaaggaaagctaagtatyccagggttcaggattttgattcatttgctgaagagttaggggctcccaagctggagcaggctcagcccactggcatattggcactttaccttgccctccactgtcccccttggaggctatgactttgcccagcaggctgtgtaggaagtcattctcagctgtaaccctggaaaggaaaagagagcatgaaatgtccacatcgtgtcctccttgcgtttcaaggggccccatgaatctccccagcccctccacacgcctcaggtgaaaagtgagtttgcatatgtcagcccagggtatatacatgccatcaagaggtacctcactttttatcacaaagcaatgtggctctgaaatttgggaatatcaatgctacaggtagaggccatttcttattctccaggaagatgcttat

SEQ ID NO: 759521 - DNA, 559 bp, Homo sapiens
tctgaaacctttccttaaatcagccactaaaggtcccaaaaccaaggtaaagaactcctacactagaatggggattatagaagtgggagtgtaggagagggctgagaaaagctactccaatcaagctcataccctagttacagaaaatacgtcaaacactccaggcactgggcaggggccattaaaattgcttgggtaataatcaaccactgactgcatctagatagagaggggagtcagagagcagacaggaggagaaaccgagcatccattctctctaactgactctcctcatccatcctcagggctgtgattagggcagggcaatttccctttggctccaaagttattcataggacctggtagatcagataatcatctctccctgcccagagtaaagaytatggagatgaggacgtgacctatattaaagctcctggggcttctgctgaaactaatgggaaagaggtacattctttccactggttgctaagttggtaggatgcaagcttggaacagctggctgataatttgccaactagttggacagccatcttct

SEQ ID NO: 759522 - DNA, 633 bp, Homo sapiens
tgtctgcctctcctgacttttctcccctttatttcctgtgccccaagcgtactgaactttctttattcctcaaacttattatgttaattttggtcttattgacattgtatttgctattctctaggcctggaatgttcctcttcacagctacctgtagctgacaccacccatcttttgggcatcaattcagatgatctcctaaggcagatcattttctgataatcttatctaatacttttcccttccctaccctcttaatctctatgttattctttgttttatttttcgattgcactttgcgttatctgaatttattggctgttctgcttgtttattttctcatgagaataggtacattgacttattcactgttctatccttagcagctagaatagtscccatgagaaatattcaataaccatttattggtataataaataaatgaagaatgaatacatattcaagtaagcaattgacaagactattacccagggatcagagatagaatcagtggtaggtgaaaagaacagttccctcctgttctgtcacctctctgcaataaatgcactttggtgatattgaccttttggtaaaaacctaattctctattccacatcttctcatcctccagag

SEQ ID NO: 759523 - DNA, 649 bp, Homo sapiens
ttctgaaataatcttttgttaagtaaaacatcctcctttattcaaatcagcattccacatatgctgaaacatacattcattttgccttctgctcccatcctttctattaattgaaaaaagtttaaacgaagttctagaatgttccatcatccacaaacccacctagcaactgccttaaatacagtaccacaaatgaaaatgtatccttgccaaatgctaatttatttcckctggtgtgattctatttttacatcagactcaagcagatagtcaaattatctcatttcatagggaagaaattgtaataggtatcatttaaaggaaaaaaattattgagggggatgagaggaaaaggtaaaagaaaaaaactttcaaggagatcaacaagtagctttcagctagaagttctgatatcctatacacaccacatagagacaataataaactggtacaggaattgtatctgacagcatttcaacattagagaatatgttaatgttaatatctccacaggagttagtttatttcaaaccacaaatgaaatttacacatttcagggcttgctaattccagtgcttacaagagctaagtaggtaacataatggaacaaggataaagttgggagttggggagctaagaaaggcatgtg

SEQ ID NO: 759524 - DNA, 661 bp, Homo sapiens
tatttttaaaaagggcttttctctaagaagtaaggctatattcctgtcttagtctatttcatgttccacgcctcagtgtactgaccaaacagggcattgatagttaattagttcagaaatgtaagctgtatcattcaagaattaaagcaaactgaagaaaacaaggaattcatgagacgcacaagttgttcctgctgctgtttgtgttgttattgcaggtagtgttgtgtggttgctagggtagcagtgtgtgtattactgataggcatagtattatttggccacagtctttctcatgagtagatagtgtctgtagattgatcgttgacactagcaaagagaggcactagttttaccagagagaaaatgagaaataaataattctccacaagaaagcagttagttatatttgtgtggctctgaaatcttgtcagcctgaacacagyatttgaagatttttttttttttctgtgaactttaccctgggaaggtgtaaagataaaatataccatatgtgttacagtattgtgaaaattgttgaagtaaaatccagttgctcagaaagggaatacgaaatttatcaaacatctattgaagcattttaaaaaaattagtttgaggattctgaccaaaagcaatacctgaaatcttgataataacc

SEQ ID NO: 759525 - DNA, 499 bp, Homo sapiens
ttatgctttggcatgaaacacatcaggtctgtagctcataagcaatgaaatgtcccagacaggaagataagaaaaaaggtgggaagctgagtataatgaaaagaaaagcagactcaggactcacagcctgtctctaaccacaaagcctaggataatctgattagcaataaaattctcccattctacaatttcagttcatataatcaactatttaaatctgaagacaggagttcacayagaataggaaaaacatgagaaacactgataaaaataatgtatccaaacccgaactcattttctcctgaccaagaccactatttgttctgaactctttttttgtttttgtttttctttctggtcaagacaattttcatatttaatggcaatgatatttttaagtatgtaatatacacattaaaattaaagggtgatttttccatgtggtatgtattttttcagttaacaaatatttattgaggatctacatgtgctagctaca

SEQ ID NO: 759526 - DNA, 583 bp, Homo sapiens
aacaaaagtttgtttcctcacctggagtgtttttatcccatctttccacctatccaaattttagccattcctatccccattttctttcttaagtccatttttcaacactctaagccacattaatttgcctcttctstgaattcacacacacacacacacacacacacacacacacacacacacacacacacaatttcagcaaggaaagaatgggtcaatgccggacctggatgctaatgacatttgattgctgtatgtttcatttcactttggcatggagccagcttgtctaacaaccaggtgttttctctctctctctctctctttttaaaacattctttatattaaacgtaataagtaaatgacttttccaaaaagaaaaaggaatttaagaaaacacccgactttcctctacagtacctctgatcacaaaattggacaccacactgaaaatgcaacacttgattcatttctgtggggagtctttcaaaagctttaaacacggtgaccccatgcccaaaagggcatttgaaagacaatttcaaaagtaagccctgctgttactccactccagagaccattt

SEQ ID NO: 759527 - DNA, 627 bp, Homo sapiens
aaaatgccaaagagcattagttgaccttaagcaacacaggttcaaactgggcgggcccacttatatgcagatttttttcaaaatacagtcagccttccatatccaaaggttccatctgcaaccagacacggattgaaaatacaatattcttggggtgtgaaacttgtggatgcggagggctgacttttcgtatccacaggtccctcagagtccactgtgggacttaagtttgcttggattctggtatctgcaggtgggcctggaaccaatcccctgcagataccgagacccaactgtactggcttccttctgatgctaaccactaggatatgacgaatagctaaagaattcagctttcagagcacctattggcattcttgcacatacaaaagaggtgcattctagcaaatgtagcctgaaaactgaacrtgtaaatcaaaccccattttcccatggacattccttttgaaacagggtttggattcacatggggctgagggtctgggagaaacctggctccagtggttccagcatgagcaccagaagcagcatctctagcagtgcagccccagatgcaaagtccaagtttccatcccaggatcctagaggttgcctgatctctgggaa

SEQ ID NO: 759528 - DNA, 538 bp, Homo sapiens
cttaccatttactggccaaatgacctttggcaagttacccctttttaccttctctgtacaatggaagcaatactagccacataccagggaaattggctgaaagcttctagttctagttctcagccttaactgtaccatagcatcatctgggaaacttcttcaaaaataccacatttgggatcctccaaatgttggaggagaagctgatatcagagaagctgataatccatttytggtgggatccaagcattggtagttgcaaaatcttcccaagtgactctgcctcacagtgtgatttgaaaaccataggtgtagcagcatcaacgtcacctcttagaaaggcagactctcgggactcacctcagccctatgaaatcatgtcaaaagatgaaattacaacagatttattttacagattgaataagctttcatttttgattctagaatcaggcaaaacctcattctatataaaacaaaataggtgttccaaggagctgagcagagaggttggctttagagacagaaaagggtgaaagaa

SEQ ID NO: 759529 - DNA, 634 bp, Homo sapiens
acgcacactgcagccttgtctgctagtctcttaaattgattctctcagatctccaggtctgatcaaactgaatcaatgacttcaaattatgacaggcacaaaaaaatgcaaatgaatgacaaggaaacactcctcagggccagggctgtgctcagtgtggtggctctgaggtgcctacagcaggaatgaggctgttaggatgacttgggtccatggacagactctatacacaacccactgcctgcaaaatctctggcaagtggtacagcctctaggctaaatcctgttttaaaagcaaatacaggttgagtatccctgatccaaaaatctaaaattggaaatgttctaaaactygaagctttttgaacgccattgatgctcaaagggatgttcagataagcgattagaggtgttcaaccagtaaggataatgcaaatattccaaatctaaaaaaatccagaatccaacatatttctggtcctaagcattttgaataagggatactcaacctctaattcctgttctcagaactttagggagctttggccccaacgaaaggcagagtccttatcaattaggggcacataatacatatttacagatgaaagaatgtgatatttgagcttcatgtcat

SEQ ID NO: 759530 - DNA, 555 bp, Homo sapiens
gcttgattcaaccaccacctcaactcccccgttgtaaagatgactcaatacttcccaaatggccccaggttgagtgattgttattaaaccttcgaggaagtttaggatgaatagaactgtctggaacatctataaagggaacccagaaaggyccaagcagcctatcatcggagatcacgcctgggctttcttcgtagactgtctgtccagggccgtccggccgtggagctcgggcctccacgtggtgcctggagacctattcaaaaggctgatatggttttccgggggaggaggcagacaggaaaggggagaaagttcttacccggtgaataagaaacttcagcgcgtttctggaagacaagaaaatgaatggagccacacggaatgatgaaagggggaggaagtcgtgactaggaattcagtggaatggtggggaggcggggtgggaatccagccaggccagcctggtggaggctggggaaagggggactgagagtggcatgattaggaaacgtctgctcccgtccgctttcaccagccgtctccctggcccac

SEQ ID NO: 759531 - DNA, 620 bp, Homo sapiens
agtcagctcccggaaatgccctattcaacaagcacatgttgagcagcaagtgcagcccagagagggaaaatgacttgccaaagtcacacaactagaatgtggcagaggcagattcaagtccacacctgtcagactcaagtccacacctgccatgctytttcccctaccccaggaacattcacgaatgcatgctctgtagcagcagaggaggcattctaaagagggaatgggggtgtggggatcaagaaagaaaacacccaacaaatggtgacaaagttgggctggaggtgtggcgagggcctgtggaaatggaagtggagggacatcaaggggaggtgatgctgactgggccatgttcccgttgatcagaaacacagagcacgggagaagcaagccccaaactagaaaaggaggtggagacagcccttgaatgccaggagatcatgattaatggtcaaaatggccaccactgacgcatgggctggagttaagcgatggcctttggcagctgggaagggagggcctagggttagcaccttggacagcggctccagctaggcgagcacgggcaaggcattttgggtaatggggcgtgtcctggggaatggccgatctttact

SEQ ID NO: 759532 - DNA, 516 bp, Homo sapiens
attcacagggtggtcattcgagaggaaatgcctcactggaggcattgtactgtgaagctatcagaagaggtgctgggtaagctgctgactactgttaggggcaggaacctggagcccctggaggaagctgatctgcagcaggctggtgacagaggcacaaccaaacccctgcagtgcccttcactgagaagccttaccttcttgataactggcaaaggagaagtatttgcagagcccatctctcatcactgagcaggcaaagaagggtrgatttggagctgagaagcaataagttaataacttaaagaagataagacttgtgtcttgtgggctctcaatatccatgctttctgcttccattccctgcactagctcattaaaactttcaactctaaaattctagggttttgtattcttcacttaagtgtgaattgctgtgcttgagatcccaagtccacattaactggactttaaaaaatcatgactagacactgtagtcatgatcgctgttgttgc

SEQ ID NO: 759533 - DNA, 493 bp, Homo sapiens
ttaacatttattttaagaaagtttcccaacgaatgtttagcttcaccaggcactttgtttttatttcttttcttttttttttttttttttttgagatggactcttgctctgttgcccaggatgagtgcagtggcgtgatcttggctcactgcaacctctgcctcccaggttcaagcgattctcctgcctcascctcccaagtagctgagattacaggaacgcgccaccacatccggctgatttttgtatttttagtagagatggggtttcaccgtgttggtcaggctggtctcgaattcctgaccttgtgatccactcgccttggtctcccaaaatgctgggattatatttcatttttagtatacataatttctgtgaaggagaactaatgaaagttataaatgcttttttccatctttctaggatgtaatacaatataactttgttgcttttcacactctgatctgaattttgtcgttctgttttattatag

SEQ ID NO: 759534 - DNA, 485 bp, Homo sapiens
ctctctgcctcagtctccccatgtgtaggtgtccatttcactcaggattgctcatgtgggtgcagaaccagagcggcctctgaaggccagggtgctctggcttgcacctgggaccccatcccagggcccttggctctccagttcctggctggccacagtcctgtcccccgaaggcaactccacstaaaaagccactgctgaggccgtaaggggcaggggaagggaggggctccaggatggggacagagaaggaaactggaggctctgggcactgcctgtccatccatccccagacctgaaggggtagaagagggacaggaatgacaaagccacgtcctgccgggcgtcttgcataatctaatttaatcctcacagttccccaaagaggcagatgttcagaaacctcctgctttccacacgaagctcagaaaggtgcgttaacttgcccaagctcacacaggcaatgaggcaggccaggcatttgg

SEQ ID NO: 759535 - DNA, 740 bp, Homo sapiens
ccatgctcagtcactgatgggagcagcagggggaagcaggcctcagcatggggactgcaagggactcagaagtgcagcagctgggggctgttagtccccacaggagggtgtcctgccagagacagaggtggagcacctccgtggctacaaacctatctctccacttcaaagcaccactatcccactttaaatctttaagcatatataatttctggccccaattctgtgactagcttggggtataaattggcaargcaagaatatgtgaattaattaatttatttattaatttatttattttttcttgagacagagtctcactctgttgcccaggctggagtgcagtttcaggatctctgcttactgcaacctccacctcctgtgttcaagcgattctcttgtctcagcttcctgagtagctgagactacaggtgtgcgccaccacacctggctaatttttgtattttttgagtagagacaaggtttcactatgttggctggtctcaaactcccacctcaagtcatctccctacctcggcctcccaaagtgctgggattacaggcgtgagccaacacacctggctcaattcatttaaagctaagtgtgtaaacttatacatatagataccatgtaaagcctctaatgctctcagtaacgcataatctgcaagatagtttggagtcagatggcaagagatagttgttctgttattcagcactcattatcttgcccatgcatg

SEQ ID NO: 759536 - DNA, 740 bp, Homo sapiens
ccatgctcagtcactgatgggagcagcagggggaagcaggcctcagcatggggactgcaagggactcagaagtgcagcagctgggggctgttagtccccacaggagggtgtcctgccagagacagaggtggagcacctccgtggctacaaacctatctctccacttcaaagcaccactatcccactttaaatctttaagcatatataatttctggccccaattctgtgactagcttggggtataaattggcaaagcaagaatatgtgaattaattaatttatttattaatttatttattttttcttgagacagagtctcactctgttgcccaggctgragtgcagtttcaggatctctgcttactgcaacctccacctcctgtgttcaagcgattctcttgtctcagcttcctgagtagctgagactacaggtgtgcgccaccacacctggctaatttttgtattttttgagtagagacaaggtttcactatgttggctggtctcaaactcccacctcaagtcatctccctacctcggcctcccaaagtgctgggattacaggcgtgagccaacacacctggctcaattcatttaaagctaagtgtgtaaacttatacatatagataccatgtaaagcctctaatgctctcagtaacgcataatctgcaagatagtttggagtcagatggcaagagatagttgttctgttattcagcactcattatcttgcccatgcatg

SEQ ID NO: 759537 - DNA, 547 bp, Homo sapiens
gatcataaacaactatgttactggtttatgtctttattctactgtactttttatcattgttttagagtgtactccttctacttataaaaaaaaatagtcaactgtaaagcagcctcagagaagtcctccacaaggtatccagaagcaaatattattatcataagagatgacagctccatgcacgttattgccactgaacacctgccactaagatatggaggtgggagacagtgttactgatgatcctgaccctgcgtaggcctgggctaatgtgtgtgtttgtgtctttggtcttaacagagtttaaaaagtaaaaaaataaaaataggccaggtgcagtggctcatgcctgtaatcccagcactttgggaggccgaggcaggcggatcackaagtcaggagatcaagaccatcctggctaacacggtgaaatcccttctctactaaaaatacaaaaaattagccgggtgtggtggtgggcacttgtagtcccatctactagggaggctgaggcaggagaatggtgtgaacctgggaggcggacctt

SEQ ID NO: 759538 - DNA, 478 bp, Homo sapiens
tgatggagtctttattaagcttatatgtgagcaaaaacaggtgaaatcctagggttctactctagttagactaaatgtttattcaaagataggtttattttggcttaatagccaactgaacatgaagaaacaattgaattgtctatataattcaatgtaatctctttgtatgcccacctgaaagaagcttaaccttgacctaaggtttctgtgtcttaatgcagttttctgggtatgtcatatgaattatatagcatgttgttataatgcatatggaaacacatacacacagtctaktttcactagtcatggtagttatgttctagaaaatcaatggttacctcacggcttgcataaaatatcttgcagttataactttttattttaagtcagcttcatagcatacaaaaactttacaatgttactctcctctgtagctttatattcttatagtctgcgtttagttctttatatatgg

SEQ ID NO: 759539 - DNA, 599 bp, Homo sapiens
agcttagtatttctttgttagcaaaactcaaagttttcttttaataattgagttaaaccaattcacatttattgaaatgactaatataacccattttatatttcttataactatataattataattgtataattattgtattatattatatttattttgtctcctgcattagttgggtttactttgttcttttacattttaaattaaatttggtatttagaatagtttgtattttcttctagtggttacttttttacttattactttctaatgttttcagtatcttgtttcttatctaaacatttactattaggtttgttgatttttaatagtatcttctgactcctgactattgcctgtataaaaatcagtgagcttatcccatgttcctcttttgcttttttccattattttagtgcattatttttactttatcaaaatacataacactsgttcaccattattccaccttcttccccactttagccataatctcagttctacacttcaataaataagtgctcatcatgatatcttttgctgatgattcccccccagtcatctcttggttttaaagctctgatagattcttcaaaaag

SEQ ID NO: 759540 - DNA, 638 bp, Homo sapiens
ttagccaaggaatatggagataggtcctagtgacctaacatagattatcacttttttctcagttttagtccaagatttccagcttccttcctcattacagaatattttttttcaccctgcctcacaatataattacccttccaaatccaccctttytgaagaattacagatgcttagttttctacattgctcattatcagtcacccaaaggtgggagctgcatatgattattcttctcagctgatttacttctctgtttgcaagcatctcctcataaaatctagtctaggagctggaggacttttccaccagaaaaaaaaaaaaaaaaaagttaaacacgagatgtaacctgcattaggcctgctgtatccagtgagcagtgatgtctgtcaagccatggctgtataccttcactttccacatctccgtgaggcaaataataggttatttctatactgaaaagactgccagactatactttccagtggctaacgtaattacaaacaatttagatcttttaactcccctctttgtctctaatattttatccttctaagatgcctagattataaaaaaaaaaaaaactaaacgcccccccctttttttttagaagattcccatctgtttaatgtatataa

SEQ ID NO: 759541 - DNA, 639 bp, Homo sapiens
ctgccctgcctgggtcctgctctctgctttggcagctgctggcctcagagggctgcctggactcactgggctgggctgcagggtgaggtcagcatttgctgtgagctcatctgagctgggagctcccagcagagctggccrctgctctggccaccttgtgcaggagctggaggaagtcatctggggctgggcagctgttgtgtgtgcatgcacacgtgtgtgtctgagtgtgcccctgtgtgctggcttatgttcaggatggagtgaatacatgtgcatgtgcacaaaatcgaatgagcgctccctcaaccaaggctatggagcagccttgtggggcctgggcaggagccagtgtgcacataggtgcttgcacacctgtgtgtccttcacaagtggcaacctgaggagccccttggagtcacttactgtagtgaacattaacttagagaatggtgagaaacccaggagtgtgggaggctgctgtgtatgaatctgcaaggcacattcagcgttacattcaacattaaaatacagtttgggttttttttaatttttatttttctgaggcagagtctcgctctgttgcccaggctggagtgcaatggcgcagtctcagctcactgcaacctctgcctccca

SEQ ID NO: 759542 - DNA, 581 bp, Homo sapiens
aggtaccaccaccaccatgcccgtccaatttttgtatttttagtagagacggggtttcaccatgttggtcaggctagtctcgaactcctgacctcaagtgatccacccgccttggcctcccaaggcagtttcttattaaactaaaacatgcaataccaaatgacctgacatttgcactcctgggcatttatctcagagaaatgaagatttatgttcacataaaaacctgtacataaatgttcataggagctttatttgtaataacccaaaactgaaaacaatctagatgttcttcagtaagtgagttgccaaaaacagttaaacaaattttagtacttscgtatcatgtaatactctcagtaataaaaggaaacaaacttgatacatgtaacaacttcagtgaaatgttcaggaattatgctgagtgaagaaagacaatctcaagaggttatatatatgattccatttatataatattcttgaaatgacattatagaactggaaaatggattaatagttgccagggctaaacgatggcgggatcggggaggcagaggtagacgcagaggcagaatagggta

SEQ ID NO: 759543 - DNA, 535 bp, Homo sapiens
gaatattattagggatgatgtctttaataatatatttcaagacaggagaaactttttctatatagttgactttaataaaaagcttagggcaaaactttcaatatattaacagtatttatgaggcagttaagaatttgggtcatctccatttctgctaaaaatacraaaaattagccaggtgtggtggcgggcatctgtagtccctgctacttgggaggctgaggcaggagaatggtgtgaacccgggaggcggaggttgcagtgagccgagatcatgccactgcactttagcctgggcgacagagcaagactccatatcaaaaaaaaaaaaaaaaaaaaaaaagaatttaggtcatctcaattaaacatagaatttaagattatgttgaaaattcagtacagagtattttgccttcatctgttgtttgagtctcccttcttttagccatccttccatcagaaatagaataccaacttaaacttcttaattagaatcaggaatcaggactctttggctgctgattggaggaagaac

SEQ ID NO: 759544 - DNA, 378 bp, Homo sapiens
cagtgctgcgggctcctgttctaatggaaaagaaggatccctgggctcaggcctgtggagtaggcaggggatgtcccggagccaggcagccatcgggtgatccagccccaccactaacaacctggctgacctcggccaagtcatttaacctcccactgcctcagtttccccacttgtaaaaggaattgctgggaggactgggcaggtaaaaagtgttccatgagctgccgygcaaacattagaaagctgtcccctctcccctagggagctgacctcggccaagtcatttaacctcccactgcctcggtttccccacttgtaaatgagattgctgggaggactgggcaagtaaaaagtgttccacgagctgccgtgcaa

SEQ ID NO: 759545 - DNA, 505 bp, Homo sapiens
tgttctcccgctccaaggttctggggccccttttgtttgggaggccctgggtgtgtgtgttgacataattcacagttccccaagccctctcagtgcgcgctgtaccatgtctgggcctcatggcagggatccattggcttggctgtcaccatcctcgctgtagagtccccaggcagctggggctgtgcagcccagctttagcggatgaagtcaaacgcgcagtccacaaacattgckctccgggtgaatcctggctcgcgccgatttccagctgctgctactaaattgattgcaactggaatctatctagtgtcagcggctgtgctactcctcggggacaatcatgcttgactaaactgcaaatttaggaggcagctcaaatctttgggcaacatcggtacatacccccctttcatgctcacccccaccttggggatacactggccaagtggaggagctgatggcagactcctcccagtgtgtccctgttgtttatttactttga

SEQ ID NO: 759546 - DNA, 596 bp, Homo sapiens
ctcaatgtacaagaccgaagttgtgtcttctttcagtttatataactttgatctgctatgtcagttttacccagggagctttgtttaaaaaaaaaaaaaagattttaagattctagaccaaatcatggcatctagaggaccacaagctaaacttaatccatagatggattttgtttgttaggagtagagttaaaaaagaaaaccttgaatttaaatgactttagatggggcattccagtttgccacaggctctaagttctcacaggccccagcatttactaactgcttctcatcattcatttttgtcttatatttttctggcatcttttargtctccttcacccatttatgttgactattactgcttctcaaggcatttgtatttaaggcccttgcctcagctctgctaagtcagaatttgcagagttgggctctagttacctctatttagaaatctccttaaatgaatctgatgacagtcaggtaatggttaaggaagatggatcttacatactggacataggtcttggttcagcaacttaacctctctggctttcagttttctatccataaaattgatattaaaatggtagaac

SEQ ID NO: 759547 - DNA, 644 bp, Homo sapiens
ttgatttagctagggaacaattacaacctgagctgcttaaatcaccttgctcgtaatctgtccgtgatcaacttacttgaaaagaggtgattaaaaaatccatagaagagattggcatggtattagagacaatgtatttaaactgaaaaggtgtaaaattatcttatctagcaggcaacttttaaatagtttattcaggccgggaacagtggctcaggcctgtgatcttagtactttgggaggccgaggcgggtagatcacctgaggtaacgagtttgaaaccagcctggccaacatggcgaaatctcatctctactaaaatacaaaactcagccggacgtggtggtgcacacctgtaatcccagctacccaggaggctgaggcatgagaatcgctcgatcctgggaggcggaggttgcagtgagccaaggtcacaccactgcactccagcctgggcgacagagcaagactcygtctcaaaaaaataaaaataaaaataagtaaataaatagtttattcatctaaaacaaataattaaacatttctctaacttttctatcatttggactaaaaaacatgtaatgtattttaattaattctttagagctgaggttattttaatttgcaatcaagtcaaatgcatg

SEQ ID NO: 759548 - DNA, 614 bp, Homo sapiens
ctaacagtacattttcattcataaaaagtagtgtacaaaaaagaatatttattctatcaaaaacaacttgtaaagatgtagtacaaaaaagtaatttacaatgtaattgctaacaaaacaacaggctgttcattctttatgtctgtcccaaaaaggaacagtaaacataagctattagtttttctctaagttatgtcaaaagtgtctctaagtagagttttacaacccaaagagaaatgacaacactaccgaggagagacatataagaacagaaagaaaaaaaaatctaatgtgtccttaatattaaaaaaaaagcatatgaggcaattctgtagtgtgatatctatagatgtcacagtacagcaatgtgtatcacagaatttgaagacataaaaaccyggatacaaatcttggctctatcatttacaggctatgggacttcaaaaaattgcttaacatctctgggcctcagttaccacattagtaaaacagggtttacttacaattacttcatatagctttaaaaattaaatacaaaaattaattaggagactacattaacacatacaaacagctgctttctcatgacatgctctaaatcttggtgacagaga

SEQ ID NO: 759549 - DNA, 633 bp, Homo sapiens
tattttcataatttttcttatataatattaaagtcagcaattcagaagcttttctgggtgtaacagcatcgctcatctgccaccggcaaccatgctttacaatctacttttcataataactgaacaaagtaactttgaaggtaatttacttattaaactggtttatacatactccactaaaaaccaggtaagtattctgataaacattggtattcttctccacatttatttaaataatgtattcactccttccttgcttctgtatgactacaaccaacttctaaaatacaactctctccgagggagactgcagccccgagaacatgggggacctgccacccacgtgccgggaacccaaagaccttgccctaatatgtgactagcaacagaaagcagcctccgtaaggggasatacagaagaacaaaatgtgccaaggtctggttaccacaggattctacgctcaacctggaatgagcaaactcctacaaagtgctatgtatcaggcaagtaacaagcaaagtgctatgtattcagcaagtaaggcttccctcccctctcccatttcactgaacccattcacattccttgatgaactccccacgtccaatatcttttggttaaagctagcagat

SEQ ID NO: 759550 - DNA, 602 bp, Homo sapiens
cagtagtagccttggggtttctggcactagctcagtattgacagcagctgatgtggtttcttttcgctcttttgactcctctttaataaaaagcatgccctatggctcattgattttgccccctctgggctggtagcaacttcttgaggagtcaaggagtcagacttggcattaggccaaataaatagcacggcctgttggctcccaacagcacattacaatcaaagctgcataaggcacagtaaagcagtcagctactatatgaaaccagacagaaacaatgaatgtgccctttyagatagaggcccaattactgttcaatttatatggcattagtctctgaatggtgtcacctttaaactaactcaagaagtaccgtcatataagcctagaagataggatttagaaactatattactccaaattaaacaatgaaaaaatcatgtactttttggaaaccttaggtaaactgctgtttgtctgagcagagactactgaagtaatagagagcctcatttatgtataggatgagagagacatacataatggcttcctaacacaatgcttttctaactgcaactggggagaaaccagggcttttc

SEQ ID NO: 759551 - DNA, 518 bp, Homo sapiens
gtgaaagccattttggtaaagagaagtgattgtaaaaaggaaggtggaaagggggacttttagaaaatagataccaaagatgacagtgttagttctgatagaatgtattttgagccactctgatttgatacttagakaccagaactattctagttaataaaatgaggcatgattagtataagaaagaacacttaaccttcctgctactaaggcaggtgggggcattcatccagattatttaatatgtgagacaaatatgttcaggtaactgcttgtctgtttataattgttttatttaaagtaatagttctcaaatgttttagttttgaaatcctgatgctcttaaatattgagaaccccaaagagcttttgtttattctggttttatctgttgttatttaccatatcagaaatgaaaactaggaaatttaaaaaatacatttattcatttaaaaataataataacccccttattggttcattgaattatgccaatcttctgatttttgtatacattt

SEQ ID NO: 759552 - DNA, 619 bp, Homo sapiens
attcaacctataaggttgaggaccgtgtctcggactttcttcacatcaaggaaacttagagcactgctaggcagttttctgctttgggtagaactgaaggaaaattaaggactatgatttcttttaaataaacagatttcggctgggcacagtggctcacacctataatcctagcactttggaaggtcgagccgggaggatctcttgagccctggagtatgaggttacagtaaactatgatcaactccactgcactccagtctggacaacagagtgagaccctgtstctaaaaaattaaaataaattaaaataaaatgaaacaaattttatataaggatataatatgtttaattgtaacagaatagtactttgatattaactgatataagttccctatgattctttttatttatcttacagcccttccctcattcttgagatatagattgtcttaggaaaggttgttgcagaaaaatcggagaacaaaagagtgaaattttaccttttgagttttaaaagcttaggtccagaaagaaggcaaaaacattaagaataatacttgattaatcaaagatagttctttctccctcctttctatctgagattagataaagtgtc

SEQ ID NO: 759553 - DNA, 561 bp, Homo sapiens
ttgttgcccaggctggagtgcaatggcatgaactcagctcaccacaacctctgcctcccgagttcaagcgattctcctgccttggcctcccaagtagctgtgattacaggcatgtgccaccatgtccggctaattttgtattttcrgttgagtcagggtttctccatgttggtcaggctggtctcaaactcctgaccccaggtgatctgcccgccttggcctcccaaagtgctggaattacaggcgtgagccactgcatccggcctggagttattcttatattaaggaaataaaccctatgggatatgcgttatagtcattttttcaacttattagtcttttaactttattatttcttgacaagtaaaattttttcatttttttgcattaaaatttatcaatcttttttatggcctctgggatttgtatcaaacataaaaagccttttgccacattgttattatatagaaattctgctatgtttttgctagcattttgtaagttcatttttttttgtttatatctttgatccacctggaatgtattagatacaaagagcaa

SEQ ID NO: 759554 - DNA, 561 bp, Homo sapiens
ttgttgcccaggctggagtgcaatggcatgaactcagctcaccacaacctctgcctcccgagttcaagcgattctcctgccttggcctcccaagtagctgtgattacaggcatgtgccaccatgtccggctaattttgtattttcagttgmgtcagggtttctccatgttggtcaggctggtctcaaactcctgaccccaggtgatctgcccgccttggcctcccaaagtgctggaattacaggcgtgagccactgcatccggcctggagttattcttatattaaggaaataaaccctatgggatatgcgttatagtcattttttcaacttattagtcttttaactttattatttcttgacaagtaaaattttttcatttttttgcattaaaatttatcaatcttttttatggcctctgggatttgtatcaaacataaaaagccttttgccacattgttattatatagaaattctgctatgtttttgctagcattttgtaagttcatttttttttgtttatatctttgatccacctggaatgtattagatacaaagagcaa

SEQ ID NO: 759555 - DNA, 585 bp, Homo sapiens
tgttatatctggaactgtatccctttcttcatttgtaatgcttcctcttcttggccagttgtgccaaagcattgtcaatttgattatttttttcctaagaagcaatttatggctttatcagttctgtaggatattacttactgttactttaaattctatcttatttccttttcttttcttctctttttttgggggggyagggggatggagtcttgctctgctgcccacgctggagtgcaatggcataatctcggctcactgcaacctctgcttcctgggttcaagtgattctcatgtctcagcctccatagtagctgggattacaggtgcccaccaccatgcctggctaatttttttttattttcagtggatacggggtttcaccatgttggccaggctggtgttgaactcctgacctcaagtgatccactcgcctcggcctcccaaagtgctgggatgacaggtatgagccaccgtgcccggccatttccattacttgggcttatcctgctactcttttggggatttcttaaattagaagattcagtcattaatttttgacctttcttcttctttaatattctt

SEQ ID NO: 759556 - DNA, 630 bp, Homo sapiens
aaaataaagatgtgcaatgcacattcctggacctaaaaatcctataatctggttagggagaccaaacttcaacacttaaaagtttacaaagaattttagaaataaataataacctttggagacaatgacagaaaaaatcctgaggcatttgtgatgtgagtagaaagtagaataaaaaataaattggaggtcagaagaaaggagagkccagaacgggctggagttgacagagaagacatcatgtgggggagggaatttaactggaccttggagaatggagagtggttgtagggtcatcttatcattattgtcttgcttatacaagagcagatgtataaacatggaacctcgtgagtttccatttgagaggacactttcagaccaaattctgaaaacaattcagacttctgaattagcgtcagtaagtgttaaggggaggaggagatgggaagaaatgcactgaaagctaactttcctaagatcccattttcccccctggcaagaaccagctctggggattaggggagtttacttaggattatcacaaccctggatctcacacatgttcccttgtgcctcagatctctggacttgtgacatgaatgaatcctccagctgccctagttcttg

SEQ ID NO: 759557 - DNA, 630 bp, Homo sapiens
aaaataaagatgtgcaatgcacattcctggacctaaaaatcctataatctggttagggagaccaaacttcaacacttaaaagtttacaaagaattttagaaataaataataacctttggagacaatgacagaaaaaatcctgaggcatttgtgatgtgagtagaaagtagaataaaaaataaattggaggtcagaagaaaggagaggccagaacgggctggagttgacagagaagacatcatgtgggggagggaatttaactggaccttggagaatggagagtggttgtagggtcatcttatcattattgtcttgcttatacaagagcagatgtataaacatggaacctcgtgagtttccatttgagaggacactttcagaccaaattctgaaaacaattcagacttctgaattagcrtcagtaagtgttaaggggaggaggagatgggaagaaatgcactgaaagctaactttcctaagatcccattttcccccctggcaagaaccagctctggggattaggggagtttacttaggattatcacaaccctggatctcacacatgttcccttgtgcctcagatctctggacttgtgacatgaatgaatcctccagctgccctagttcttg

SEQ ID NO: 759558 - DNA, 610 bp, Homo sapiens
gctctattatagtttgctcttccatgaggtaaaagtaagagaactctttcctaaacctgtgcattttccaaaatgttcacttcagagtttcctgagacagcctcctgggattggcaaacactgtggcctgcatagaatcacggcagggcagggtgttgctaccactcatttctcaactggaaatctggtgggcaagagctataagaatagatagcttagagactctacccatctgaagactggatggtcagttggtgggtgtaaaaagttgttgagtcctctggactcactgggtccattctgggcagtgaacttacttacatcggaacaacttttcaagaataggtccctggcatccgtaaccagaactcagcaggctccgaacttgtccattctctcgcaggctttcccaaatacacacccttgccctttgttattcctgaacacaaatgccttattcccttattatmtcatacagtgaggttaggtgacccatagagaagaacttatttgtaagtatgtagccaaccttgttagtaagaaataaaaatgctggtgtcagaaattaagagaatctacagaggtggaagtatttacatttcatgagcaa

SEQ ID NO: 759559 - DNA, 615 bp, Homo sapiens
aagtctttgctattgtaaatagtgctgcaataaacatacgtgtgcawgtgtctttatagtagaatgatttataatcctttgggtatatacccagtaatgagattgctgggtcaaataatatttctggttctagatccttgagaaattgccacactgactcccacaatggttgaactaatttacactcccaccaacagtgtaaaagcattctgatttctccacagcctcaccagcatctgttgttgttgaactatttacttgttgaaagacatttgtgttcttccagtttttgagcattatgaatacagttgttagaaactttcatgtgccagtttttatgtagacatacattttcattttaccggaacaaatgagtaagagttcagttttttggtcatgtgacatttgggtgttttggttttttttttaagaaactgccaaattattttccagagtggctgtatcattgtgctttctcaccagcaatgtacgggtaatccagtttctccacatttttagcagaatttagtgttgtcacttttttgttccagtcattctgatagatgtgcaatggtatttcattgtggttttaaaatgcacttaatggctaatgta

SEQ ID NO: 759560 - DNA, 613 bp, Homo sapiens
gttgctcatcggctaattcaattttgttgttgagcccatttagggaatttttcattttaattattgtacttctcaactctagaatttccatttgattccttttttaatagatactattcttttattgagagttatttttagacattttcatattttcttttaattctttaaatatgttttctttaattacttgaatatatttacaaagtcttcttagaaggctctactcaatacagtatctgggcctataaagttagtttctactgattgattatttttcccctgaatgtgggccacattttctcattcccttgtcttgkctttttcttttttctttcctttccttttctttctttcttttcttcttctttcttttttcttctcttttctttttctctttctttcctctttctctttctttctctttctttcttctttcatcttcttcctctttcttcctttcttctttctttctcccttcctttcttcctttttttcctcctttcttcctttcctcccctcctcccttcctccctttttccctttctctctttccttttttttgagactggatcttgctctgtcacccaggctgaagtgcagtggcatgatc

SEQ ID NO: 759561 - DNA, 625 bp, Homo sapiens
actcaaccatcagactcacaccttcaacagacacttcaatgaacacaggctatataccaaagactgtagagaattaggatgctgcaccagagaaaaaaagaagtcaccgatgaaccacgtttctctgtccactcatttgggcaatggtgatgtattctgagacgaagaaatggcagatttatagaagtcatgttttgactgttttatgtttgagatggcatttgtgagctgtatcaagaaagcagttagctctatgggtgtagggttcaggggagagcttaacttagcaattattagcatacactaattaraaagtttaattctcatcagaaaatgtgtttcagccataagataatatttcaccttattctatacattctctactttgttgcgtctgccttggtgctgcagtcacatctaattttcagcagatccatgtatactcatacccaaaatccaatgaaataaaataaaacaaggtaacaacaactgatgtgtagcattttaatttaacaggaccaaattgcatacaacaacacaagacctattagaattttgcttttctttctcccacctttcaaatgcttcttttggatttcacatccaaaatgaaaacatccacagg

SEQ ID NO: 759562 - DNA, 634 bp, Homo sapiens
gagaattcagaactcagaccaaattttgcattaaaaaaacaaaaaactaaaaagctaagccaaatagtattttaaatatgcctgaataattatggagtcagtatccagtgatcttatcccagagttgtctatccattcatgaagatgcagctaagaggctgtgaaattgagcaaatagttcaatagcctcataggtttacagggagaataaaatggagkgtggtgcccatcacggtgaataatgataaatctcccatgctttatattaagacccttaaaaatataccctgtgagtaagtacattaactaggaggtgtctggctggcctccaccaaaactgaaacccaatgaatcccgtaaaatgcatcgtgattctagtttcctacttccactggcagcaaatgaactctgtttttctaaacatagagaaaattatcctagacttaaaattagtcatattttttgtatacaatgtctgacattcagttagaaattgctgggcacttaaaggataaaatgacattgccaagagaaataatagataataaaatagggtgatgaagatcttccattctctgtaacaaacaagacaaggagacattaaaaatacagtgttgtaatgtatagaagctct

SEQ ID NO: 759563 - DNA, 581 bp, Homo sapiens
agattatgtcttccctttgggagagggacatgttcaaggactacctgatgtaatttaataagaagttagaccccttgccacaagcaaaacgaactccttgtcactattcacattcttgagctccctgtgggatcaggctgagactccttggtatcttcttttcccttgttttgcctgataaccccatctgagtttctcctgagagcacctcctcagtgtatcacctgtataacaagctctgtgttacattctgtttccagaagacctagtattttgrtactcagatgattttctcctgctcctcaaagcagttctcagagttaccttggagagtgtgcctttccctgcagtctccctccagctttgtgataccagcggaggaaaccacaaagcccgggagagatgcttggttttgctcctgctgctacatgttgtatggcaccatcaccttcttggaacgcatgacagcaaggcgttttccactgagtaggctctgtgtcaggaaagccaatggtgaagctggaatgattcgtgcctacccttgctctttcttctctttctctacatcctccaagcaaaaa

SEQ ID NO: 759564 - DNA, 581 bp, Homo sapiens
agattatgtcttccctttgggagagggacatgttcaaggactacctgatgtaatttaataagaagttagaccccttgccacaagcaaaacgaactccttgtcactattcacattcttgagctccctgtgggatcaggctgagactccttggtatcttcttttcccttgttttgcctgataaccccatctgagtttctcctgagagcacctcctcagtgtatcacctgtataacaagctctgtgttacattctgtttccagaagacctagtattttgatactcagatgattttctcctgctcctcaaagcagttctcagagttaccttggagagtgtgcctttccctgcagtctccctccagctttgtgataccagcggaggaaaccacaaagcccgggagagatgcttggttttgctcctgctgytacatgttgtatggcaccatcaccttcttggaacgcatgacagcaaggcgttttccactgagtaggctctgtgtcaggaaagccaatggtgaagctggaatgattcgtgcctacccttgctctttcttctctttctctacatcctccaagcaaaaa

SEQ ID NO: 759565 - DNA, 609 bp, Homo sapiens
tttttttttttttgagacgtagtcttgctctgtcgcccaggctggagtacggtggcacaatctcagcccactgcaagctccgccttctgggttcgcgccatttcctgcctcagcctcccaagtagctgggactacaggtgcccgccaccatgcccagctaattttttgtwtttttagtagaggggtttcaccatgttagccaggatggtctcgatctcctgacctcgtgatccgcccgcctcggcctcacaagttgctgggattacaggcatgagccaccgtgcccggccccaagtgatttttcttgcttcatctttccatgtagctgggaacataagcacacatcactgcacttagctaagaatcaaaggatttatttatttatttgagacagagtctcgttctgttaccatgctggagtgcggtggcgcaatctcggcttgcaacctctgcctcctgggttcaagcgattctcctgcctcagcctcccaagtagctggaattacaggtgcctgccaccacacctggctaatttttgtatttttagtagagacgaggtttcaacatgttggccaggatggtcttgatctcttgatctcgcgatctgct

SEQ ID NO: 759566 - DNA, 671 bp, Homo sapiens
taggatcctgctgattggtgcattttacagagtgctgattggtgcattttaccatccccttgctagctacagagcactgattggtacatattacaatcctagctacagagtgctgattggtgcattttacaatcctcttgctagaaagaaaagttctccaagtcccactctacccaggaagtccagggacttcatctctcaccacactttgggaggccgaggcaggtggatcacctgaggtcaggagttcgagaccagcctagtcaacatggtgaaaccctgtctctactaaaagtacaaaaattatggccgggcccagtggctcactcctgtaatcatagcactttgggaggccaaggcgggcagatcatgaggtcaggagatctagactgtcctggccaacatggagaaaccccgtctccactaaaatacaaaaaaattagccaggcgttgtggtgggcgcctgtagtcccagctacttgggaggctgaggcaggagaattgcttgaacccgggaggtggaggttgcagtgwgctgagatcgtgccactgcactccagcctgggtgacagagccagactctggtctcaaaaaaaaacaaaaagaaaaagcttcagccccagcacttagtttctcctgtggtttcatgcttggttcatccgagcatactc

SEQ ID NO: 759567 - DNA, 662 bp, Homo sapiens
tgtcctcggtgatgtttcctcgtttagtttcactgtttttcatctcatttcgctttttttctgaaatgtccggaccaaatctcatggcctcgcatgttaatcttttaatagtctgggccacgacaggcatctcactactgccatggtgtatgacagcacgtgtatgcggggggtgcagggacacaggttgtggggagcatgctttcctgcttccccgaagcttccctttcatcctctgggatcttgtgtacctcaactatggccatgccaccatctgtagacttggggtttcctcccagaactttggcctcaggaaaataatttttccctttacctttctaatgtaacatttgttcccctttctacatcaattcatggatctctgtttgagtctgtccaatgccactcttgttacccattaagagtcagatatcaagtcttttcatactacatctaaatcttcaacytccttccccttacatttcatgcgttcttccatcccggccctgtcctggacattgctatcaagatctcattgatgattgttatcaacacctcatcctgcttctgccaccaccggccccatctaacactgctcagtccactgctagtggaagacagccatggatctggggaactcagggaatgattcagttgtgacc

SEQ ID NO: 759568 - DNA, 627 bp, Homo sapiens
actgcgcctggctcctgggatatttatcccctggctccattccccattgtcaagttgccctctgcacttctgagctccacatgtgctgagacagagtaagctcccccactgtttgtggcatcagaggatcccagggaagaggctwcactgtcagcttgcaatggaagcctgcaaggaactatcccctgcaaccatggctgaaatcagaagacaagcatcttgtctcctttgttctccagatgtgaagcagaacatctgatctgtctgctacaatctactttgcagaagtgttaggaagactgatagaccctccaggcttgtacggttcttagcaaattaccatgtaaataacaaacactcacaaatgttctcagtttgtatgtagatgaattgttgaacttctgttagcagcttaatgaatcctacttcgtttaatgttcagacagcagtgctctgtaggggagaatatgctcattttacagatgaggaaactgaggctcaaaaactgactttgcagcttgttcagagtcaaaccactaataatcagaagaacaggtttgtctattctgctttttctactgcaccacaactccctggtgggagaagaaggagccctctctcttaggc

SEQ ID NO: 759569 - DNA, 601 bp, Homo sapiens
ccccaagagagaaagcgcctcactactgagggctcaacaggaaaccagctttgaagaacactttcccctcttatatcccttctggggcctcctcctcctccctccccaggtccaagacaagttcaggaatttgcttgtctctgctcaaatgccctggttgatatctgagaaagaagaggcaggcggatcatgaggtcaggagacygagaccatcctggctaacatggtaaaaccccgtctctactaaaaaaatacaaaaaattagctgggtgtggaggcagatgcctgtagtcccagctactcgggaggctgaggcaggagaatggtgtgaacctgggagaatggcgtgaaccttgcagtgaaccgagatcgcaccactgcactccagcctgggcgacagagcgagactccgtctcaaagaaaaaagaaaagaaaagaaaatgtctccttagaaagcccatatagagtctccagctgcacctctcccttcctgggggactttgaggacataggcaagtcctgtaggcctcagtgacccacattaagcagagccgacatcatctgccgtaacaacctgcccacaaagccagggctagaggca

SEQ ID NO: 759570 - DNA, 601 bp, Homo sapiens
ccccaagagagaaagcgcctcactactgagggctcaacaggaaaccagctttgaagaacactttcccctcttatatcccttctggggcctcctcctcctccctccccaggtccaagacaagttcaggaatttgcttgtctctgctcaaatgccctggttgatatctgagaaagaagaggcaggcggatcatgaggtcaggagactgagaccatcctggctaacatggtaaaaccccgtctctactaaaaaaatacaaaaaattagctgggtgtggaggcagrtgcctgtagtcccagctactcgggaggctgaggcaggagaatggtgtgaacctgggagaatggcgtgaaccttgcagtgaaccgagatcgcaccactgcactccagcctgggcgacagagcgagactccgtctcaaagaaaaaagaaaagaaaagaaaatgtctccttagaaagcccatatagagtctccagctgcacctctcccttcctgggggactttgaggacataggcaagtcctgtaggcctcagtgacccacattaagcagagccgacatcatctgccgtaacaacctgcccacaaagccagggctagaggca

SEQ ID NO: 759571 - DNA, 621 bp, Homo sapiens
gttcccagggggaatatggctgcctttgctgcatcatacatatcaccagggaagtggggaaaaccagcagtgacaggtgtcacccagcttccatgcagccagaaaggccagtctcactcccatcatgacccaccaatagcactgagtttatgtccaggcagcaggrctgagatcttcccccaggctaccagcctccccactgagaaagcaagcagggctatcaggtcttgcctctccctgcctgccttattacagaggtcagctagaagcttccttcaccctttggcccctccccaattctgctggctgcctttcccaaggatccctgtgagataaggccagggatggcttccctgggcttggactggagaccaggggtgcctacagggctctttctattgcttcttctacttttatattttgctcggttccttaaatctgctttagctctaggtaaggttaaatccttctctcccatgatctgattttcaggttccctagtggggatgtgggtttggaggcagacttttctccctctcacacattgaaaactcagtttttcagctgccttgcagagtttgcagcggcaagctgcttctttcaaagggtatgtgaattctt

SEQ ID NO: 759572 - DNA, 600 bp, Homo sapiens
atggctctattctgcccaatcctgcaggcagtcagatcttatggttgtcttcccttgttccttaaaatcgctgttattctgttcttttcaaggtgcactcatttcatattgttcaaacacacgttttacaatcagtttgtacaatagtggtcctgaggtgacgtacattctctgcttacaaagataacagagttaagagattaaagacaggcataagaaattataagagtattatttgggaactgataaatgtccatgaaatcttcacaatttatgttcggagattgcagtaaagacaggcataagaggggaggagccaagatggccgaataggaacagctctggtctacagctcccagcgtgagcracgcagaagacgggtgatttctgcatttccatctgaggtaccaggttcatctcactagggagtgccagacagtgggcgcaggtcagtgggtgtgcacaccgtgcgccagctgaagcagggcgaggcattgcctcacttgggaagtgcaaggggtcagggagttccctttctgagtcaaagaaaggggtgacggacgcacctggaaaatcaggtcactcccacccgaatattgc

SEQ ID NO: 759573 - DNA, 630 bp, Homo sapiens
gagctcccatcccctgggttctactccaaagtgggccccccacaagtaggaggcttgtctttctgcacgtgctcctgggaaggatgagaagacacactacaataggctttttcgcctttctattcctgccacggaaagttccagttgcccctaacaccagggccctcctgtgttttcctgagagctctttgatcccttgatccaagtgcagagggcctttcttttggggcttgagtgggaggagggaaacctcaagctcccttcaaaagctacacatggagccaacaataacaactcattggacatagcaggagcytaagggaaaagttctgaagtgggcgcagaggggttcagtcctaaagatttccaggactgtggcatggagaggtaccctcagtctgggggaataaggtcatggttacctgagccaaacctagtcaatagctggcctggagtcatgcatgcccctgaagcaagataagggttaaacgtttggaatgtgcctgatggcactgctgttctgagtattctattttgttttttattctgagtattttagatgcacacatgcaaccaagtgctcattctgagttttgaaagaagacttgattttgcttccagtgagtggtg

SEQ ID NO: 759574 - DNA, 605 bp, Homo sapiens
tgggatatctactttgcttcatctttcaggtctagagatatcaagatctatcaaacatctttttattcttatttccgtttgtaactgatatttataaatgtaactagtcacactcacaaattttgcaaaagattaagctccttgcatctgacagagttgaagaaggattaattcactagagaattcaaatccattcatgtttattaggctttgagtaatgtttttctttcttactcttaaatataaaattaaatagacaagccaatgatcatcagctatttgtgaaaagttccagtcacaaaggacataaaaacaaaaataaacaaataaaccaacaaagaaaacaagttgagtaggataaattttaaaaagtaaaaaatagcataagcatcaagagaaagcgttaaaactaaacaaawtacttaaagtgataagggaatatattgtattcatgaagcaacagaggtgaatgtttaaaaagaatcaattaaaacactctaaaaagttaaatataataaccaaaaaagaaaaaaataaccatcagtagaaatgattgggaagaattaaaatcgaaaaagacaaaatgtaagaaattcactggatca

SEQ ID NO: 759575 - DNA, 588 bp, Homo sapiens
ccatctatctattgctctatcatctgtctatctatcatctatctaatttcctatttgttctgtttctctagagaactctaataatacagtaatctaaccatagtgacttctatacaaatgtttctgtaccaggtagctatttataaattaatgtgcattaaaaccatttcaaaattaagtggtataaaacaaaaggcatttaatgccatgatcacacatctgtcattttgctgaggttggtttatttatcttggcagagatcagctggtgtgtctccaagctttgtattgggtccatgtatcatctaattgtgtctacttggagaaaataactactttggcttcttttcttctcattttaatggcagaaacataacagatagstgaacagaaaataagatggttcttatatccttggcttgaaaatgtgataccataacttccacctcattctcttagccaaagtaagtcacagagtgaagcaagacacctagagaatggaaaggtcactctatgtctaatggaaggaacttcagtcccaaggcaaatatgcagaaacagagagaggtaaaaacttggaacaatagtg

SEQ ID NO: 759576 - DNA, 634 bp, Homo sapiens
ttctgtatttttcctaattagcacatttgtcttttaaaatcaggaatcaattgatgagcactaatgaccataagcgatgaatctaaatatatagctaacattaagtaatactgttttaacaatgtttatttcaaattgagtttgctaattatcacacactatagatgtcatttgtgtttgaagctttagtgaaaagctgtatttttgtctgtgcaaacaaagctttcgaaggcacacagaaatgaagacatagactattgcatctgtggttattctggagtactcacaggtccccatgttgttttgggtcatagagatttttaatagatagtaatgaactccagggattagggttgtgggtggtcatgaatactcagagagggtagcatagtctgttttgtgaggattactaactcccacagagagtgaaatytcactggtcagtggaaaaaattactgcaattagccagtaacctgaagtacagattgcatagtgtttaaaacaagtaggttttgctgtgtagtcattcagcacagcatcactcactttaatagctattatgtaaaaaagtagaaatgaggcagcatagaaatttccaacagacctagatcttcttaaaatagtaccttttcc

SEQ ID NO: 759577 - DNA, 633 bp, Homo sapiens
aaagaaacatcaattctccaaaatgaggaagaatcagttcaagaactgtggcaattcaaaatcccagagtctccccataattcccaatgagttcactagctcctcagcaatggttcttaaccactctgaaatgacagaaatgacagacacaaaattctgaatttggatggcaatttagcacactgaaattcaggagaaagtggaaacccmatccagggaatccaaagaatacagtaaaatgatccaagaacagaaagatgaaatagccattttaagagaacaaaactgaacttctagaggtgaaaattttactataagaatgtaataatataattagaagtattaacagcagagtagaccaagcttagggaagaatatcagagtttgaccactggttttttgaatcaactcagtcagaaaaaaataaaggaattttataaaatttaataaaccctccaagaaatatgatattatgtgaagagaccaagtatatgactcattgtcattcctgagagagaaggagagagaatatgcaacttggaaaatatatttgaggatatagtccatgaaaatttccctaatctcatgagagaacttgacatgtaaatccaagaaatgcagagaaccctgggt

SEQ ID NO: 759578 - DNA, 579 bp, Homo sapiens
tgaagagatagagttgggggttgagaataggctggagtggctatagagtgagtggggacaaagtcaaggaacttctgtgtgtgtgtgtgtgtgtgtgtgtgtgtgtgtgtgtgtgtgtttgcatgtctgtttattgtcactgtaaatctattgtttacccctaagatctggcctggttaaacaacaacaacaaaggtctgcttcagtttttgggaggaccttctaagtagatttctgaattaggcctctcttcaattgtctggggtccctttcacatgaagacttttctgaagtggtcctaactccatcacttaaagtgctgttctagcttacaggtccaccaacggaggwcctagatggttagttgtgatttctgaggggagtggtggtggtcattattgtcattttccagatgatgggtaatcaatgtagacaaaggctctccctggcaaagtgacaagagtataaggaatcaggaggtgttaattagcctttcgtggctcagcttcttcatctgtgaaactgaggtgattcttacagtgtagtgtgcaacagaatcatctgcagaactaaaaacaa

SEQ ID NO: 759579 - DNA, 579 bp, Homo sapiens
tgaagagatagagttgggggttgagaataggctggagtggctatagagtgagtggggacaaagtcaaggaacttctgtgtgtgtgtgtgtgtgtgtgtgtgtgtgtgtgtgtgtgtgtttgcatgtctgtttattgtcactgtaaatctattgtttacccctaagatctggcctggttaaacaacaacaacaaaggtctgcttcagtttttgggaggaccttctaagtagatttctgaattaggcctctcttcaattgtctggggtccctttcacatgaagacttttctgaagtggtcctaactccatcacttaaagtgctgttctagcttacaggtccaccaacggaggacctagatggttagttgkgatttctgaggggagtggtggtggtcattattgtcattttccagatgatgggtaatcaatgtagacaaaggctctccctggcaaagtgacaagagtataaggaatcaggaggtgttaattagcctttcgtggctcagcttcttcatctgtgaaactgaggtgattcttacagtgtagtgtgcaacagaatcatctgcagaactaaaaacaa

SEQ ID NO: 759580 - DNA, 625 bp, Homo sapiens
ttatctagaggtatcacacatctttttttagatatattctaggatactttttagttttgttgcttttgtaagtgttgtcatgttgggagtctctgagaacctcctcaagcttgatgacccactagaaggactctcaggacttagaagtggttatattgatggtcacagtttattataacaaaaagacacagatmacaataaacaaagagaaaaggcacatggggtgaagttcaggagaaataaggcacaagccttcaggtattcccctcccaggagtaaatatgctaactgaagcacacaaaaaaagaaaagataaatgcaaaaaagagcataaaatatatatgacatagttttaaaaatgtgtaacatgcatgtaattgaagtatcagaaagaatggagacaaggaataggggaagaaggaatatttgaagagataataaccaaaaactttctaaaactaacccacaaaatcaagaaattctgaagaaactagaaaagatacatgcaaaataaatcccattttggctcatagtgaactcctgaaagccaaggacaaggaccaattacttaaagcacccaaaaaaaaacaacattgctttcataatagcaataaaagactaataa

SEQ ID NO: 759581 - DNA, 609 bp, Homo sapiens
taagctttatcagtagagggtgtggagggatattgcttctggggtgctgctgtgttgtagtcttcctgctcctaccacagcgcttccagaagtagacatggaaaaaatccagtggtgctccactgcagctgcttgtccagagcttgtaggtccttgcaagcccacattccttaccctagcctagtggccacctcactgtggccctctccacagtcaccacatgctctatgttttacagcaccctgctaggaagtgatctctcagtaccctaattcagtattctaatgcacactgcttagagtatcttctgggaccttctgagaaattgatctgactggagagttttccagctttamtaataaatccactctagaatgttcttttttctgagccttttgttcacttattctatagtcatatggccatatcgattctggcattttcacttcacttagtgtgtgccatcactctttctaagctttcaagagccactctaaccactgttagcaccacctctaagggcctttctagggtgttaagtcctttaatactataggagagtacactcatatcaataaactctctcttatccaaccctatattccatct

SEQ ID NO: 759582 - DNA, 497 bp, Homo sapiens
actcagaagtggagtacaatacttaattcaaaccaaaggccatttagaatccctagctactcaattttctccatcattcactcattttatttttcaatttcaccctggggaaaacagttattcatgttagggtaaatcaatgtgcacacatatttgctattgctggtttcagaagtttgtactgaaaaaaagaacaagaaacarcatacacccatctgaatgaaaagttgttggatttgaaatttcctggatgagtactgggaagattagatttaaaaagaatccactcactctcctttaagcaatgttgagagattgtacaatagatggaaatatgcatttatgattcatagtctttgaaatgtagatataaattatcagggcaggctgagagtcctgagttaagtggaatgaaattctcaaaaacaaagtttcaaagaaacaaatgagaattgcattcttcaagggtttttttttttttccacattacagtactg

SEQ ID NO: 759583 - DNA, 497 bp, Homo sapiens
actcagaagtggagtacaatacttaattcaaaccaaaggccatttagaatccctagctactcaattttctccatcattcactcattttatttttcaatttcaccctggggaaaacagttattcatgttagggtaaatcaatgtgcacacatatttgctattgctggtttcagaagtttgtactgaaaaaaagaacaagaaacaacatacacccatctgaatgaaaagttgttggatttgaaatttcctggatgagtactgggaagattagatttaaaaagaatccacycactctcctttaagcaatgttgagagattgtacaatagatggaaatatgcatttatgattcatagtctttgaaatgtagatataaattatcagggcaggctgagagtcctgagttaagtggaatgaaattctcaaaaacaaagtttcaaagaaacaaatgagaattgcattcttcaagggtttttttttttttccacattacagtactg

SEQ ID NO: 759584 - DNA, 497 bp, Homo sapiens
actcagaagtggagtacaatacttaattcaaaccaaaggccatttagaatccctagctactcaattttctccatcattcactcattttatttttcaatttcaccctggggaaaacagttattcatgttagggtaaatcaatgtgcacacatatttgctattgctggtttcagaagtttgtactgaaaaaaagaacaagaaacaacatacacccatctgaatgaaaagttgttggatttgaaatttcctggatgagtactgggaagattagatttaaaaagaatccactcactctcctttaagcaatkttgagagattgtacaatagatggaaatatgcatttatgattcatagtctttgaaatgtagatataaattatcagggcaggctgagagtcctgagttaagtggaatgaaattctcaaaaacaaagtttcaaagaaacaaatgagaattgcattcttcaagggtttttttttttttccacattacagtactg

SEQ ID NO: 759585 - DNA, 463 bp, Homo sapiens
tgggtttccaggctcagggagatgaggaggcccataggcaacgtcaacagcagaaggctccactggcagagagtctgcacccacatggcaggctgtggcagccggagggatgcatggaaatgtctgccaatgtgctttgaccatttgaggcaagtgtccttacatcatagcccatctggacaatgagaagagctacatttaagggttagaacaaataggtattaygtcttgcactttgccttttgtattgcttatttgtttaatctgttttgtactttttctgtgaaatggcagagtgacaagtgatctggaacccaagaaagcagggtaaaattgcaggttccccactttctagcaaagcaggtttgagcaaatcaactaacccatctgagcttctctgtcttcatttgatgataatcacataaagaggcttgtattataccttggatataaaaagtgctca

SEQ ID NO: 759586 - DNA, 552 bp, Homo sapiens
aatccattgttatttcttttcctcttcccctcccatttctacttagttcccctttcctttccttatgatatagtttgcaattttggctttggttaaagatgctctttcttctctgtgcctgaaacctaatggtgcaagctagatctgtggatatgacagacgtttgcccaatgtggttgttccagatctctctgggaagcaatagtctcatgcaaagatctcaaatactagaaaactttcaatgtgcttaaataatgtcaattcaattttaatttttacaatgtgacatctgaaagctagaaatgagggaaccaggaagatgtaaggactttcataggcagtctccatatgaaagtgttgggattacagctaggagagtctgccccttcccycttcatcaacactgcagtttatggtgtgctctgcagtatgggcatggctggatctccctgaaatgagagggaacttgagagtaaatattcattagccagttgatttcactgaataagaacaaaaatccacacacacagcccatacttcattctctacttg

SEQ ID NO: 759587 - DNA, 665 bp, Homo sapiens
gtccatgattttaagacatggtttgttgcaatttaaaaatctaaataattgtttcagttgcgtagaaaggtcaaatcataaatctggaaacatgagaaaatattagcattcattgctattctaaaatttttattcttcctacttatatggatacttgcaaatcaactaggctgtgggtttatgtagttaccattcccattacaataacgcaggggatgactataatrtagtcatcctgaaaataaagcaaaaaaaagcacgctatcagaaagaaatagattcaaaggaagccagcaatagtagagaaaaatactcagctatttcccccttatctcttcttcaaacctctcatttctaggaaggagaaaaatcatgactcctatgattctatgttgttctttcggcctgaagagtcccagaaggaaagaaaagaatagggagttgtaagattttatatatatatatacacacacacacacacacacacacacacacacacgattttaagatatgacattatatatgattttaaactatatacacacatatacatatatattttgtatatacatatgtatatatgtacatatgtgtatatataaatggatatatgtttagctaattgtttattactggacttgttccacaataggctggaagtatta

SEQ ID NO: 759588 - DNA, 665 bp, Homo sapiens
gtccatgattttaagacatggtttgttgcaatttaaaaatctaaataattgtttcagttgcgtagaaaggtcaaatcataaatctggaaacatgagaaaatattagcattcattgctattctaaaatttttattcttcctacttatatggatacttgcaaatcaactaggctgtgggtttatgtagttaccattcccattacaataacgcaggggatgactataatgtagtcatcctgaaaataaagcaaaaaaaagcacgctatcagaaagaaatagattcaaaggaagccagcaatagtagagaaaaatactcagctatttcccccttatctcttcttcaaacctctcatttctaggaaggagaaaaatcatgactcctatgattctatgttgttctttcggcctgaagagtcccagaaggaaagaaaagaatagggagttgtaagattttatatatatatatacamacacacacacacacacacacacacacacacgattttaagatatgacattatatatgattttaaactatatacacacatatacatatatattttgtatatacatatgtatatatgtacatatgtgtatatataaatggatatatgtttagctaattgtttattactggacttgttccacaataggctggaagtatta

SEQ ID NO: 759589 - DNA, 632 bp, Homo sapiens
cccgaggatgtgaagttaatttatatggacaaatgagagaaatgtttacctcagaattttatgagacaaaagtcaccttaagtcccctactgacattatttaaatccccaaataaaagtactaaaggtccattaaaatgcatrtgagatatattttttggattccttaagtacatagtaatttgataaaatatttggtactaaattactaaaacaaactctataaattaaaaaatgaataaaatattttttattcatctaaatttaaaaattattgaggactaaagttccatgcaaatacttcaagccatcgcaatacttttttttctgaatttgtctcaaaagacattttatgataattcaagaaaatatatttcctttccctgaataagcatacgatactagtgaaatttattataatcatatgtctacatgatttatttatgctacactaaaatccccttataactgttttgaaagggttaaataaaaaatgcataaaatgttggtgcataatagtccataagaattgttacattacatttgatgttttattatacactgaaagtataacaacaaatacatttattttaacatatttcgccttctacttaacaggattgtgactaagca

SEQ ID NO: 759590 - DNA, 629 bp, Homo sapiens
taaaaaaattgagatcatgaaatataaatattttcctaatgttacaagtcaaaaaattaacaagcatttttttttttttttttttttttgagacagagtctcactctgttacccagactggtgtgcagtggcacaatctcagctcaccacaacctttgtctccggggttcaaatgattcttctgcctcaacctcctgagtagctggtattacaggcacctcgtccacacctggctaatttttgtatttttagtagaaacagattggccaggctggtctatgttggccaggctggtctcaaactcctggcctcaggtgatcctcctgyctcagccccccaaattgctgggattacagacgtaagccaccgctcccagccaaacgtgaatttttttaagccctgtaaattatgtattttacccaaattatattttaatacttaatcaattgcatacatttaccattaacctaagttataaaagttacttaacattgtcataaataactgctcatttattaaatgctaattttatgaggaaagaaagttgtcactagatcattagataagtttgagcacaaaactttagtgaaaaggaacaactaacacgatcacaatgtgttatatttaag

SEQ ID NO: 759591 - DNA, 624 bp, Homo sapiens
aggaaaaggggggcaggaatatgaggaagaggcagaagagtagatggagcaaaagagaaggaaaaatgaaaagaaagacaaaaaaaaaaagatactgtcatttgcatgtacacgaaattctgaaaactgccatgtggccattctaaggcagatactattcccattttacagatgaacaaactaaagcataaatatgytaagtatcatgtacaaggtaaagtattaaaatggcaatgtcaaaaattaagaattgtcaaaatttctaaggttacaaaggtataatttgtatgcactcttactatcctgtaattatttctactgttttctgaggacaattgttatttttactattagaagaattagagaattattgaatgctttattttattcataagaaatatttaaaaagcttttgagagttttaccaaaaaaaaaaaaaaaacaataggagaaagagagctcttgaggtcaggttacttggagaaaagattgaagaaaatagaatgagatgatattggaaacatttaccatttatcaactcaggctcttagagttcttgcatgctcttcaatcattgacttatcagtagataagcttctgacattttacaagaaagaaatgaga

SEQ ID NO: 759592 - DNA, 624 bp, Homo sapiens
aggaaaaggggggcaggaatatgaggaagaggcagaagagtagatggagcaaaagagaaggaaaaatgaaaagaaagacaaaaaaaaaaagatactgtcatttgcatgtacacgaaattctgaaaactgccatgtggccattctaaggcagatactattcccattttacagatgaacaaactaaagcataaatatgctaagtatcatgtacaaggtaaagtattaaaatggcaatgtcaaaaattaagaattgtcaaaatttytaaggttacaaaggtataatttgtatgcactcttactatcctgtaattatttctactgttttctgaggacaattgttatttttactattagaagaattagagaattattgaatgctttattttattcataagaaatatttaaaaagcttttgagagttttaccaaaaaaaaaaaaaaaacaataggagaaagagagctcttgaggtcaggttacttggagaaaagattgaagaaaatagaatgagatgatattggaaacatttaccatttatcaactcaggctcttagagttcttgcatgctcttcaatcattgacttatcagtagataagcttctgacattttacaagaaagaaatgaga

SEQ ID NO: 759593 - DNA, 552 bp, Homo sapiens
ccaaatgggaggtgattggatcatgggtgcagatttccccctggctcttctcataatagtgagtaagttctcacaatatcttgttgtttaaaagtttgtggcacctccccatcacgctcttcctccttctttggccatgtaaaacatgccttcttccccttgttccgtcttctgtcatgattgtaagcttcctgaggcctcctaagccatgcttcctgtacagcctgcagaactgtggtcaattaaacccctattctttataaattacccagtctcaggtagtccttcataacaatgtgagaatggactaataggaaaaattggtaccaggagtggggcattgctatgaagakacctgaaaatgtggaagtaactttggaaccagtcaactggcagaggttggaaaattgtggatggctcagaagaagacaggaagatgaaggaaagtttggaacttcctagagacttgttgaattgctttgaccaaaatgctaatcataatacaggcaatgaagtccagcctgagtggtctcagatggaggggaacttatt

SEQ ID NO: 759594 - DNA, 623 bp, Homo sapiens
attaaaattattctcattagccaggcctctcatcaacattttgcaatttgacaggaagatattaaaaatgaaaaggctgttgccattttgtcttatatcctggaaaatatgtttttattgtgtcaaagattgaagccaaagtgtctcaactgtacttattactatcaacacctgatatgattctctgagaaattcattacctccttttttccccactctctcaatttcataattaattcatgcaatttttaatggaatttcccttataaccactcctccttctaatgtaccttcaggtccatcagctctgtttgctatttctatgctacttttatgcttaaaataatttttctcctgcttcagcacttgttatcctgtgaagttaatatctatcttcataaatgcaaaccaatttatttctggaagcttgccttatttttggagctttatctaggaattggcataatatcttayatttcaattcccctaagtatttctaaaagttttacttcctccttggtgttttgtctgtggagtgggttttagggtttctatctctgatagcgtaatataccattcacctatttcttcatctatccctttgcccatccaatcatccatca

SEQ ID NO: 759595 - DNA, 613 bp, Homo sapiens
tatcataaattattggtccttatggatattctcatcaatatagttgatttaaaatatcatttatttttcacgtttcctaaaagaggacatattcaaagttacttagattcctcctgtgataaatcttttgaaaatatactgaatcttattgctaatttcagacgtgctatattgtatctcaataatttctgttattccaaaaataatattgcgtcaatgcctcatttataaaaacaatttttaaaattcaatttgtgtatgttatgttgggaaggcatcagattcawtacaatgagtttatttttgaaagataataatagcttcagttttcaatataataagatatatataccagatacttttcccaaaatacaaattacaaagaataaagtattatacacttactgctagcattttcattaatatgatgacccatctcttctgatagacacaaattttacctattgttctccaataccttttcctatcaaaatatttctatatgtatttccacataaatatatattgatccaaataatattactggaaatatacttttgcttgatgtgcaatatacatcctgtagatataaattctaactgcctccataaga

SEQ ID NO: 759596 - DNA, 613 bp, Homo sapiens
tatcataaattattggtccttatggatattctcatcaatatagttgatttaaaatatcatttatttttcacgtttcctaaaagaggacatattcaaagttacttagattcctcctgtgataaatcttttgaaaatatactgaatcttattgctaatttcagacgtgctatattgtatctcaataatttctgttattccaaaaataatattgcgtcaatgcctcatttataaaaacaatttttaaaattcaatttgtgtatgttatgttgggaaggcatcagattcaatacaatgagtttatttttgaaagataataatagcttcagttttcaatataataagatatatataccaratacttttcccaaaatacaaattacaaagaataaagtattatacacttactgctagcattttcattaatatgatgacccatctcttctgatagacacaaattttacctattgttctccaataccttttcctatcaaaatatttctatatgtatttccacataaatatatattgatccaaataatattactggaaatatacttttgcttgatgtgcaatatacatcctgtagatataaattctaactgcctccataaga

SEQ ID NO: 759597 - DNA, 584 bp, Homo sapiens
gcacatgtatcccagaacgtaatgtataataataaaaaaaattaccgcccagatcaaagtcataaacctttcccactaagttttcttctacttctattagatcaagttttttagattccacagatgaatgagattgcatttttttctagtagtttcatagtttcaggtcttagatttattcctttaatatgttttgagttgatttttgtatatgctgacagataacagtctacttycattattttgcatgtgaatatccatttatcaacactatttatagaatagtctgccctttccccattttgtgttcttggtgcctgcatcaaaaatcagttagctgtaaatttgtggatttatttcttagctctctattttgtttcattggtgtatgtctttgtttttatgccagtaccatattgttttggttactataattttgtagtgtattttaaagtcaaatcatgtaatgcctccagctttgttcttttggttcaggattgctttgactgcttggggtcttttgtggttccatacaaattttattatttttttttctatttccgagaagaatgtcattggtattt

SEQ ID NO: 759598 - DNA, 564 bp, Homo sapiens
ggttttacgatcaatagctcctgtgatatttgtgtggcagccacagaataatcaattgaaggtcatataaagtaaattaccatcctcctataatgattcttgtttctagatgaaaattgggttttattatttcatcaggagcctctcacgacgcatgctctgtctgtttgagaaagagagatatcaaagttgtgagcgtgttttgaacatagtattaatatccattacttgaatttatggtattggattattgaattagtggattcacactggaattccttcaaaaccctttcttatgtactcagtgacacacttaacagtcgagagcaaacggacgsctttgccgcgtggtggagtgagtcactttgcaaaagtcaatcttggtagctgtctctttaaagcaaatttagagttggttaaatgtgttatattgacagtgtgaccgactgagcttctctctgcaaacccttttggagagtgactggtgaactaaacaggagatggagtcaggaatgctgaatactaatgcatagtccatgagtagctcaaggtgaaaggggggca

SEQ ID NO: 759599 - DNA, 526 bp, Homo sapiens
tattggattattgaattagtggattcacactggaattccttcaaaaccctttcttatgtactcagtgacacacttaacagtcgagagcaaacggacgcctttgccgcgtggtggagtgagtcactttgcaaaagtcaatcttggtagctgtctctttaaagcaaatttagagttggttaaatgtgttatattgacagtgtgaccgactgagcttctctctgcaaacccttttggagagtgactggtgaactaaacaggagatggagtcaggaatgctgaatactaatgcatagtccatgagtagctcaaggtgaaaggggggcaagtggtgggcggagaggagagagkcctgtgcacctgctctccagccaggtctctccctcatgcaagatgcctgacctggatttcagactggcagtgcgagccagagtgatggctgtgcctctataaaagattgcaatttgccaaccggaggcatgcaatcccccaactgtcttaaagggacccattttcaaagtttagcctt

SEQ ID NO: 759600 - DNA, 526 bp, Homo sapiens
tattggattattgaattagtggattcacactggaattccttcaaaaccctttcttatgtactcagtgacacacttaacagtcgagagcaaacggacgcctttgccgcgtggtggagtgagtcactttgcaaaagtcaatcttggtagctgtctctttaaagcaaatttagagttggttaaatgtgttatattgacagtgtgaccgactgagcttctctctgcaaacccttttggagagtgactggtgaactaaacaggagatggagtcaggaatgctgaatactaatgcatagtccatgagtagctcaaggtgaaaggggggcaagtggtgggcggagaggagagaggcctgtgcacctgctctccagccaggtctctccctcatgcaagatgcctracctggatttcagactggcagtgcgagccagagtgatggctgtgcctctataaaagattgcaatttgccaaccggaggcatgcaatcccccaactgtcttaaagggacccattttcaaagtttagcctt

SEQ ID NO: 759601 - DNA, 362 bp, Homo sapiens
  misc_feature 341, 342, 343, 344, 345, 346, 347, 348, 349, 350, 351, 352,353, 354, 355, 356, 357, 358, 359, 360, 361, 362: n = A,T,C or G
tagtggtaattggcttctgactccaacccctcagaaggatcaaagtcatatgccaagaaaaggaacatagcaagaaaatctagtactcctggtaaacatgtcaaggtccagaaatccaaaactaaaagaaaaaaacacatgtatgtacaagatataaccaagaattagaggttcayattagaaagcataattagtttgtgctgtggtctgagagactgtttgttatgatttcagttcttctgcatttgctgaggagtgttttacttctgattatgtgagcaactttagagtaagtgccatgtagtgatgagaggaatgtatattctgttgttttagggtgnnnnnnnnnnnnnnnnnnnnnn

SEQ ID NO: 759602 - DNA, 603 bp, Homo sapiens
gatttctaccaccaacttttaaagagcaggaagctccactgtcattttcacacatttgattgatggaacaaatcaatccatcattcaggtgaaagtaggaccccaagagttagaggaacagctaggtcctccaattgtcaaccgtttaggtcaataattggaacctcacaggtgtctaggtcctgttcccaggatggtaacactataagtctgaaacctattaatcttgaagagatgtcatcattgtcagtgataacaatgacaatgacagtgggccatatcatgaaaaggaggaaatctttaaagaccrgacttcagtcctgctttcactgtgcagaaatccaactctatgctctagaccctgtctctctcagcaccaaataggaccccctatgcacacattgcagggctggtcttcagggtccctggaacagggaactgtaagagaaagtcctatggggcaagcaggtctagaatgatgaagagctccaaaaatcagacagagaaaaggatggggcctcttccctcttgccccccaggagacgtttcaggaaagaaaacacaataaagaaactgattttcttggctttgctgccaagttgc

SEQ ID NO: 759603 - DNA, 633 bp, Homo sapiens
ttcacacacatactatacatatatatgtagagtgtcattctatctatcaatcatccatctatctgtcaacaaaagttctctgaaaaaggaatttggaggaaagagactttattccagtgaacagtttgcaaaccagggagacacagcctccaatataaaatgaaggtatgttccaaagaacaaaggaagacttgggttttagagcaaaagttcccacccaggttcccaatcaggtctgtttattcaaattaaaaaaaatgaaatttgcttagttctgattggctgatacggctgagtactggttggttggttcaggtgagctctaaaagtcccaaagataaaaaggtgcaggtttgggggggatctcagcatacctgtatgacccctagtyggcaaatggccacttggctctatttcaaatctggacccagtgagccactaaggatctatattggaagactggcccttccaggttcacatttgttcacatctacctacctacctacctacctacttacctatctgtctgtctgtctacggtgtttataagtatcaagcatgcctgaaaataaggaagcatttgcacaatctctggagcatctcctactttttcctgcctgtccagttgctgga

SEQ ID NO: 759604 - DNA, 509 bp, Homo sapiens
tatggtgaagtactcaatcctagtacttcagcatgcgaccctatttggaaatagggtcataacagaggtaatcaggttaaaatgaggtcattggcatgggttctaatccagcatgactggtatcctaataaaagcatttgatttggacacaaagacacagatgaaagaagggaagatgatatgaaaagacataatgccatctacaagccaagcaatttytgaggctaccagaatgtaggagaaaggcatggaacagatttttcctcacaaacctcacaagaaaccaaccttgctgataccttgatttcagactactagcctccagaactgtgatacaataaatttctgttgttcaaatctatctagtctgtggtaccatagcccttggaaactaatacactttctctgtggcttcatgttaagtttggccaatgggaggcgccagaagctagaagaagagaaggttgcaagggagttcagagcctttgttttcttggctccctctttgc

SEQ ID NO: 759605 - DNA, 644 bp, Homo sapiens
gtgtgtgtgtctgagtgtgggtgtgagcatgcatgcatgagtgtatgaaaacacgtgtgagtgtgtgcagatgtggagggagcggaatgggtgctggagacatgggcaaggacactatcgcttttgcagtgcctgctacattttctcacttcacactcccaacaatgccatgtggtagatgttataatctgtgtttatagatgagaaaattagattctgagaaattaagtaccctgccaagtcattctggtgaatggtagagctgagtgttgactcttggtcagcaaagctgatgaccttcttaccaacaatgctgaaccgcaagattgccagggccctgacattgtttcagggtaaagaagccaggagacaacatcrgaggcaggagctgtgctgtattcatcctgaaaagttctggaggaggaagccacctactggtctctgagtgggtggtggggggcagatggaagtggaggggcaaggctaaaaccttaaggaactgcctgtcagtgagcactcctgggagaatcagaacactgggaggaaagaggtcaaggagacagccttcctgccacatagatagaacattctggtggatggaaatttccacgagtgcttcagcctttctgcctggcttacacaga

SEQ ID NO: 759606 - DNA, 644 bp, Homo sapiens
gtgtgtgtgtctgagtgtgggtgtgagcatgcatgcatgagtgtatgaaaacacgtgtgagtgtgtgcagatgtggagggagcggaatgggtgctggagacatgggcaaggacactatcgcttttgcagtgcctgctacattttctcacttcacactcccaacaatgccatgtggtagatgttataatctgtgtttatagatgagaaaattagattctgagaaattaagtaccctgccaagtcattctggtgaatggtagagctgagtgttgactcttggtcagcaaagctgatgaccttcttaccaacaatgctgaaccgcaagattgccagggccctgacattgtttcagggtaaagaagccaggagacaacatcagaggcaggagctgtgctgtattcatcctgaaaagttctggaggaggaagccacctackggtctctgagtgggtggtggggggcagatggaagtggaggggcaaggctaaaaccttaaggaactgcctgtcagtgagcactcctgggagaatcagaacactgggaggaaagaggtcaaggagacagccttcctgccacatagatagaacattctggtggatggaaatttccacgagtgcttcagcctttctgcctggcttacacaga

SEQ ID NO: 759607 - DNA, 531 bp, Homo sapiens
cctactcctgtccagacctccctccaggccttcctcctccactccaaccagagcgaacacactgaagtgttaagtgagtgagagctacatttttattgttaagccgttggagttgtggggtttctttgttaatacagcagttagcrttaccctaaccaaaaatagagcttcctttaacttccctttaggggaagtgagtggattgaacagctgaaaagagggtagtgggcctcttcaccagagtggatttcccagttaggcagttactacatcctatgctgatggtcacatgtttagaatatgggcctggggggatgagagaagagggcaggtgggtgctcaaggtgaggcttgggggagaaactgaggttgagaatggtctctctttagcccaggtggtacattttcaattataggaaactttaaggagacggtggtagataacttaagagaaagaaaaatgcgaaccgacatggatgtgtttaaaatgagtgagcaggctgaggtgggtggatcacctgaggttgggag

SEQ ID NO: 759608 - DNA, 570 bp, Homo sapiens
agaaggttcttggacctcgtgcaagaaagaatttggggcaagtccataaagtgaaagcaagtttattaagaaagcaaaagaaaggggctgggcgcagtggctcacgcctataatcccagcactttgggaggccgcggtgggtagmacacgaggtcaggagtttaagaccagcctgagcaagatggtgaaaccccgtctctactaaagattaaaaaaaaaaaaaattagctgggtggcaggcgtctgtaatcccagctactcgggaggctgaggcagacaattgcttgaacctgggtggcggaggttgcagtgagccgagatcatgcctttccactccagcctgggtgacagagcgagactctatctcaaaaaaaaaaaaaaaaaaaaggtaaaagaataaaagaatgcctactccataggcagagcagcagcatgggctgcttgactgagagtaaacttatatcttgattatatactaaacaaagggtgaattattcatgaattttctgggaaaggggtgggcaattccctgaactgagggttcctcctctttttagaccatgtagggta

SEQ ID NO: 759609 - DNA, 601 bp, Homo sapiens
agagaaaggataatgtttccaacaaatggttctaaaaaaattaaacatacatatgcaaaaaagaacctatgcctcaaaccatatataaaaattaacccaaaatggatcgtaggcttaatgtacatgtaaaaatacaaaacttttagcaggaaacataggagaaagtttttgtgactttgagtgaggccgagggttcttgcatttgacaccaaatatttgattaataaaagaaaaagttgatgaattgaacttcatcaaagaaacacaagagattgaaaagacaagctacatactgggagaaaatatttgaaaagcatgtatctgagaaagcacctgtatgcagaacatatgaagtactctcaaaattcwacagtaagaaaacaaacaaccaaatataaaaatgggcaaaaaacttgggtattcttctttaaagatttgtgaatgaaaagatgctcaacatcattagtcattaggggaatgaaaattgtagccacaatgggacaccacatcacagctactgaatggctaaaattctaaaaacaaaactgacagtatcgattgctggtgagcatttggagcaggtgaatgcatatattgctga

SEQ ID NO: 759610 - DNA, 576 bp, Homo sapiens
ttcctgttcactactgtataatatttcattgtgtgactataccagaatgtattctaccactgataaacatccgtgctgtttccaattttttgctattataaacagtgctgcaatgaacattcctgtattggtgcatatgatcaaaagattctccaatacatatggctagaagaacactgctggatcaaaggttatgcctaattttgactttagctaagctattttgacttttgactatagcgtcaaattatttttccaaagatsttcttccagttcacagtctaatttcctatttcttggcagaaatgttgaaaactaccttggagaatgttattcctagattttttgagcttaatctctgaatttcatttaccttagtggcccgtcaagctgtctccaacatttcagaagccacattaatgtgagaaaactatgagaattatatccaatttgtttctttctttactagaaattaagctatctactcttgcaatggaatactttgaagaaatgatggcaagtagcctaaatcgctctttttcttcaatacttaagaatgtaactaaaaattcatac

SEQ ID NO: 759611 - DNA, 613 bp, Homo sapiens
aatataagtttatagaaacatataagctaccaatatcctcttaaaagggactgttaatgtaaaaaatgtttattctgccttttgacatattttctgtctttgctttcttcacttttcataatctttcactgtctacatgtaatgctatcagtgtctttagaagcgttattcaacttgtagcatggctgcaagataaaggtctttaaaaatatcattttagtgaagtacgaaaagttggccatcactgaataatggatcaggataattgtgccattgcttcttactcaaaggttcacctatcctaccagagtctggatgtatggaaacaactggtgtttagtcagaacatttgctttccttctggggttgccagatttcrcaaataaaaatacatagtaccaaattaacatagactttcagataaaccataagtaatttttagtataaatatgtctcatacaatatttaggacagacttatactaaaatattattcatggtttatctgtcgttcagtctaattgggcttcctgcattttatctggcaactgtatttcttttacctcttaagttaataaaataacaaactcagtcttatttccattagctcttgt

SEQ ID NO: 759612 - DNA, 601 bp, Homo sapiens
tggattatagtactgcaagatccagaaaggccattttaattataatgctcaaattctgtcacctttctgtctctttttgttttctagagtagaacgccaatctattgaccttcaacttatgctgaatgtaatctatgtattttggttcttgcctggaargcaactgagcttgaggatttaagaaacagagcttaaaagtgtttcttctttcctgagaattagaaaatagacattacatctttcaaatatccctttattaaagagctaaacatacaccttgtttctacccagtctctattctcagaccaggatgttctgattatttctgcaagtgatgcttcaaccttggggtcaatggggactttcattgtgttgactgcattgattctgaaagtctgattagatcaagtaactccactgagatgtaggcacaatgcaatccatacttagacgtgtcctcatgaaataggactttggaagtttgctaattttgccaaattgcatttaattctgaatattttagatatgttgacaaaatttaagattggcaaacttacagctaaaattcctaggaataatggaagatgtcaaaactgttggt

SEQ ID NO: 759613 - DNA, 593 bp, Homo sapiens
tagataatgttacaactatagttataaaaagttaataatttcttattggttattttaactacaaaattggaaatcaatggatattggtaagtcaatatttaaaacttagttgagaatttggaatattaataaacttccatgttaaacaattatttgttaaatataaattaaatgactgacattttgtaaacaaagagtaataataagtggtaaactatctcttggggaacatttaatgaagtgctgaagatccaaatgtaatttggcagagggttctattctataaggaaccatcaccttggttcataagggggttaaacacattcatgcagatgaaacaacacaactggctgggtcaggccaaaaatagagaataaataaccaatggaacaaataaccaatggaactcctttctatgttgatgtattagtctgttcagattaccattttwaaaaatgccatactgagtagcttaaataacagaaatttatttctcacagttcctgaggttgggaagtcccagatcaagctgacagccaatttgggttctggtgacagctctctttctgacttgcagataactgccttatcac

SEQ ID NO: 759614 - DNA, 646 bp, Homo sapiens
tacttattgaataattatttgatcagttaatggactgcaatgtatcccacaagatattatatagtcatagatatatatacacacacatatatgtaaagattatgctaattgtcatgtacacatatatgtatctgtgtaaacgtttattcttcttactgaaattctttcaaaatagcatatagaaatataactatttactcttaaaaactttagaatcatttgtcatttgccaaattgtcaaaaaatggtattttgattggattgytatataaattacaaaatagtttgtgaaaaaaatctacacctttacaataatcaattttgtcttctggaaaagtggctactatattttcaatggtctaaggcttcatgtttcattcttgagtaaaattctatgatttttaatatagatcccaatttattatttatgaataacataatatgatattatatataggcttaggatctatattatttattaatatattatctattaatataggtcctaatcctggctatacaaaagaaccatctgaggagttcttaaaaattgccatttgtgagccatccccagagatatttcctaagagaaagagacagacagataaatgtagatttataaataaatatagatttaaatatagac

SEQ ID NO: 759615 - DNA, 606 bp, Homo sapiens
ttactttttattttatctaaaatatgataaattttaaattatttagcatattaagaaatcttcataatatccctgtactgagtttattttaaatagtttagttgaactagaatacaagtaaaattttacctggttgaaatattatttttttgattgacccctttaagcctaagcaactgtgcactttaaattttccagataacagatattttgctctcttctgaaggtaacaaaggtaatgaaartttttacatctgaaacctgtcacggcacagcccaatttaaccataaattgtatgtatttatgtaatcagagtaagactgtcatctagctggcacttacctagaaagtaccatatgtactttcacaaagtgcctagaacttactataatcatttttattgacctggtaaattgacaatagtagagtttttattgttcaccactgtttctactctgcacttttcctgccccatctccttttcttaaacaacaacaaattctgcagttactaggatactatcaccaaagcctatttgtccatcagatataaaactacaattatttgtgcataagtttctcttttgattttttcttattgactgc

SEQ ID NO: 759616 - DNA, 617 bp, Homo sapiens
taaagtcctatatagccatgaagtgaaaatggcacatttgattttgtgcctagattgttagatacagaatataaaaattatgcttagtactatttttctgcattgggttcaaattaacctctttatgtaaaagttaattttgtgattttttattgtacagtacactttgaaaagattttgaagatatataagctggagaattagaatataatcaacatgaaattcactattcaatgagagctagcatttaaaatagagataacattgtttcaatttctaattgcaaattgcastgttacctctaaatgtgattttatttttctctaacttgcatggctacataacatgctatgatacttttctaatactctaaaaagatataacttaatttttttcctctggagattagatataaactttgaaatactagacttggtgtgtaactttttactcttcatcttcttctggaggtgtagggtattcattgctattgcaatatagaccttgtgaagttactgaaagcctctgagtacttgtggtcaattaggccatgttgtggtgactgatcgatgactttcataggatggtgatattctggaaatttcaactttgcctta

SEQ ID NO: 759617 - DNA, 606 bp, Homo sapiens
tcctcctgaatggcttttgggtaaataaagaaattaaggcagatatcagaacaatttttcaaaacaaatgaaaatagacaaactataaacaaaaacctctggaataaaacaaaagggctactaagagaaaagttggtttcactaactgcytacataaaaaagagaaagatctcaaattaacaacctaatatcacaccttaagaaactggaaaaacaggaacaaattaaacacaaagcaagcataagaaaataaatagcaaagataagaggagaactaaatgagactgagaccaaaaaaattatacaaatgaccaatgaaagaaaaagttggttctttgaaaggataaacaaaattgatagaccactacctagcttaagcaagaaaaaaggagattcaaacaagtacaattagaaattataaaggtgacattaacaactcatatcacagaaatacaaaagatcatcagagactactatgaacacccctatttgcaaaaactagaaaacctaaaggaaatggataaatttctaaaaacttacaaccagccaagattgaatcaagaagaaatagatacccttaatagaccaataatgagtaataaaatt

SEQ ID NO: 759618 - DNA, 655 bp, Homo sapiens
gcattttgctattaacaatatcccaaataaactcaatattttaaaaaacacctaagcctttagatcacattattgttgggaaaaagtattttttgggattatgtcatctcactcagaatgtttagaagacattaggatttcaagtcatgtgttgctatgtagcacagctgcacctagcaaatttgctgttttggtgacattgtccattttgatgagccttcaaacaaaattatgccaaatagaatgcaaacycttatgcacaatgcacttcatgattatcagtttgactttgcatcagtttgcttagagaggaaaaacaatgaaaatccaaaatgaatgataaggtggatacactaaaaaaaatgcatttagattatgtgggttagtccactgtaaaagttgcataatacagaagtaaatggataattccgggtaagtttatttaagtccaaaggaaaacacatctttgtttattactatccaatgtagaatctattgggaactgattacctctttgaaacagtcttttatatttggtagattgtctcttccctctgagctgctaattagttgctcctgagggatggtgagggtgacgtgcacagtaaagttgtctcagcagtaaaagattatgtcgctgtaagataagtgtagt

SEQ ID NO: 759619 - DNA, 635 bp, Homo sapiens
gatccacttcccaagtagtcttatgaagtggcaaattctgtattatcttcttgaatgagtactcatacctgtataaatttttcatttcttttaaaatactcctcttttgttaaaataatcagtgaattctatcctgtgaaagagaaaattgttcagacatcctggagaatcctccaataaccaggtaagtatgtctatgatgacttggtctagagaagttggtctgctaaattccagctcaggtactaggagaatagacagatcgtcagttgatggaaattatgctacatactgaaatatttatctaaatccagattttacgtggcatgtcttgttgtaaaaatgatacctttttaaaaattcagctcttacaataaagatcctggttgctgtttaaaaataattaacctccagttaatcttctggaggtagcaggtagaatgatagataccaaaggctgggaaggatgtgtcaagggggctagggtgggacagmgaatgaagaaaggttgactaattggtaagaacatacagttaggtagaggggatactttctaatgctccatagcacagcaaggtaactataattagcaacaatatattgtatatttcaaaatagctagaaaagagaatttt

SEQ ID NO: 759620 - DNA, 624 bp, Homo sapiens
ttttcatttgataagttggagctatcatgtacctctatacagtatgttagaggtaccaaaactagaaaaaacaaagctctgtttgacctttcttttttctactatgtcactttattttatgcaatcatcacaaaacactatttggaaagtaggtttgcaagagaaaatattatttctttcctccaatatggaaactgcatctcagagagattatgtggcaacacgagggttcaaatacagaacttcaaatttctaaattgaaaagggcatgacctccaaaatgtgtaatagtggtgcaagggtrtgcaaacaacactgtgaagcaagaaaaccatgaacatgtttttacattttcccctttccgatctatgtccctctcttttcttttactacctgcattcactcttttcttccttgtaatttaagctcatgccctataaaaaaatctagattctgaggagttaatctgaaaaattatcatttgtattaaatttatattaaattgtatgttcaacttccataattatctgcattttaacagtgtcctagacttcaggttgtattaatctcagtgtataaaggataaaaataagaattgcatattttgtagctaatatattttcc

SEQ ID NO: 759621 - DNA, 569 bp, Homo sapiens
gcttttcctataaaatttaaaatacatatcagctcatgtttcccaaaactgttactttattatacatgaaaatagggaagttttaaaaaatgtatttacaaaagtttcttagccacgtgctaaggtcaatctaccatatttataaaagtacagaggttattccaaactctgaaaagagaaggctaaaacaaattcagagactccaatttacatccactatgccagcagtaaatgccacggtcttagctacaagaagagctgtagaaataaattaccaccataaaaacgggtaagttcaacaaacagagcaagtatgtagttgacatttgaagttgaagactgcacaaagacaatgaaagcactatggatactgtagatagatagatgatagatagatagatagatagatagatagatagakagatagataaaaatcgagtaacattttttcttgagattgggtttatgtgcttctttttaactagtgactctattcaaggtgaagcaaggtatttttagtaaatgttcctctcagagccagagcatgtttctgaatgtacacaactagt

SEQ ID NO: 759622 - DNA, 546 bp, Homo sapiens
gggctatcagcatacaagggctgtcatataatgcagctatatagaaaaaaagaaaacaaagaaaaaaataaaaatgtcatcaaaattatataaatttttttgtcaaatggagacatatgtcaaatggagacatatgtgatgtcagggacatcacaaaaaccaaaaagtaacattattgatgacgacttgtatatatagtaatcatccaacttatgactgggttgttatctttaagatgtcttgtttgggtccccaatgtgtctggactacaggctgcaaaacctagatccaagggcttttgaaaatagtgtccacagccaaaactaatcagatgttcaaacacagtgtctaccaaatgttgtgcatgagtgtacaaaaaatggcmccgtgaaaagagtgctagctgatttcaagagggtgactgggggactgcatcaagaacacacagtggcaggaacgattttaatgaaaaatcctgaagacaaatccacgttttagttttttaaatgaagcgcgttaacataatatctactatctatcatcacc

SEQ ID NO: 759623 - DNA, 660 bp, Homo sapiens
ttgtctcccttccctcccattgttttctaaagagttttatgtttaagtgtacttattgtggacaagagtgctcattctgtccaacaggggcaaagaatcaccctccagtaaatatcccaagccagaaaattcttcccctgagtcagtcaccaagtaccacctgttttatttaataaatagttctgaatccatttgtacctccctatctcgatagtctcagttcagttcttcattatttcaaccctgctctataatataatactaactagtttccctgcattcaaacttttcccacacaggtggcagagtgatctttttaaaaatgcaaagcagcttgtgtctttgctcagctttaaaactcttcaacagctccccactgcctataggataaagtacaaaatcctcagcttggtaagtaagrtcttctatgatacacagctgcctttttctccaaccttatcacccacccaatagccctcagccacacaggtagtctggtagtcccagaaggcattgtgtgcctttatataacacgatgcttaacttattcctatttcttttacttggaacacatctcttccctaatcctactgataagctcagtgtcttcatgaaaatgcccagaaaaacaagggcagagttaggtaattcctcctatgt

SEQ ID NO: 759624 - DNA, 607 bp, Homo sapiens
atggcagcagcttctaaggccctacactggagccccaagtgaatcattgatttgagattaaaattaagggactatataataattttctaattttaatctgttaaaaattaatcatataacaaattggtaaagagacttaacctctatttaaggtcatattagaattaaccatactcaaaataatatcttcccttactaggtaaaatgttgtgaaaaatactatatgaatatataagaataaatagttatagctgcttaaatcttgctaattcctcttaactatttgctagatataaaatgaattttgaaagagttagaagtaacgattaagactatataaaaccaagggcaaataaagaayagaactttaaaactctagtcctatagagaaccttgagtaacctctatgaccttaatttttgctttaagatgaccttgagataaggaaccgaatattggtgtatcaacatcaactttgttttctacttaaaagcatagtatatactatcaaagacaattgtagaatgagtaactccattgatagcaagaataattcttgagggagaaaaagaaacagagagaatgaatcagatttgtagtcaataaa

SEQ ID NO: 759625 - DNA, 649 bp, Homo sapiens
tccttttatcgatacataccacaacatgctttcatctaaaaaaacaagcaaaaagcccgcaacgttcttcttaatgaaataaatcagatgcaaacggcctcaagttgcttgattctaattacataagatgtctagaaaagaaaaatttatagacagacagcagataagtggctctctaaggatgtagttagaggaggaattaactgcacacaggtatgaggcgactatttgggttagtagaaatgttctaacagygaattttgagtgaaagttgcacaaggtgaatagatatactaaaaattgtggaattgtatacttccagacagaatttatgacctataagttatcactcaataaaactgtgaaaaaataatggtgagtgaaaagctctgtttgccatttaaaacctacaaatttcaggattgaatttaatctcatcaacttttattacatgtccactcatgaaataattactgtacctatggggaaggggtttacaatagtcaggtataaattgtgggccaaatggatctggagcctatggacagtctctcctggttaatagggagaggatgcaggagttagtttaccagtaaaaatactaaaaaggaagaaaaagaacaagaatgccactacttttaaacgaatg

SEQ ID NO: 759626 - DNA, 559 bp, Homo sapiens
ggtattaatgcagatataaatgtatgtaaggatacaaggtgtattttggactattaaaaatttacaatttgtttaaatggggaagataaaaaaactttagttgtgcctggatgtgcaaggaaaacatttaaaaatcaagttatacaaaacttaaatttgacattctcgttcaatttttcaagttaagagatcaaatgttttgttcatcttacacaaatttaaatctcaaagatggatattggtaggatggatatgggtaaaattctatagccaaataccgtaggatgagaaaagggtctaagatatcgcaaaggcaaattttagaaattttcaacaataagaaaagaatcttttaggaaaaagagggcttwgttatgttaggtgctgttttatggaaagctcttcattgccaggttaaaattatttgcaaaagtttaaatcaatcccagatcacacaacagaaacctatcatttcacttcttactaaaataaagaacaagtaagttgttcccaagtgagcatcaccagccaggtgtgagtagggagatgaagtggtaga

SEQ ID NO: 759627 - DNA, 503 bp, Homo sapiens
taaaatataataaataaactcacaatttcataaatgcagtcataatttatttctgtaatgacagacattctatgtaactgttttatataaactgatgcaaaaatcaacaaaatattgtattaaaatttaaatataaaataacactcaatgcagaagtcttgagaataagttttaactaagtgtagacacacacacacacacacacacgcacacacacacacacacagatrgcctagacattcattaggaaaaatagttttgataagaaccatgaatgcctcccatactcatggagtatgccatacagaattgagataatggtgagctaggagcctttctgactcaaaccctacctgtttgagcagcaacataggttagaactatagtatctaggtttaatattttagtccaacacttactagatttgtgatttttggagaacttatttaatcactttatgtctcattttgctcattttaacaatagggacagtaatagtgtca

SEQ ID NO: 759628 - DNA, 526 bp, Homo sapiens
ttcatcagctgatggacgtttgagttgtttccatttttttgtttttttaagagacagtctccctgttgcccaagctggtgtgcaatggcacaatcatggctcactgcaacctcaaactactggtctctagccatcctccttcctcagcctcccaagtagcttggactactggtcacaacaggctaattttttttttagacggagtcttgctctgtcacccaggctggaatacagtggcacaatctcggctcactgcaacctctgccccctgggttcaagcaattctcctgcttaagcctcccgagtagctgggattacaggtgcgcatgaccacgtctggctaatttttgtatttttagtagakacggggtttcaccatgttggtcaggctggtctcgaactcctgacctcataatccacccacctcagccttccaaagtgctgggattacaggcgtgagccaccatgccccgcctaaaccaaatatctttcctcaaaagctagaatgcttcttggcttatttctg

SEQ ID NO: 759629 - DNA, 561 bp, Homo sapiens
tcttttctatttatttaatttttttttttttttgagacagagtctcgctctgtaacccaggctagagtgcagtggcaagatgctggctcactgcaatctccatctcccgggttcaagtgattcttctgcatcagcctccygagtagctgggattacaggtgcccaccaccatgtccaactaatttttgtgtttttagtagagacggggtttcaccatgttggccaggctggtctcaaactcctgacctcaggtgatctgcctgtcttggcctcccaaagtgctgagattataggcatgagccatcgcacccagccttattttattttattttttgagatggagtctcgctctattgcccaggctggagtgcagtggcatgatctcgagtacagtggcacaatctcagctcactgcaatctctgcctcccaggttcaagcaattctcctgcctcagcctcccaagtagctaggattacaggcggacaccaccatgcctgtctaattttgtatttttagtagagatgggatttcaccatgttggtcaggctggtctccaactc

SEQ ID NO: 759630 - DNA, 660 bp, Homo sapiens
agaaattaaaaggaaaatccatgactcactgatttctgttctttttcgtaaaatcatttatcattctgtaaatcaggttttttagagaataattaaatattttcatattcatttattcaacatttatcaaatactttacgagaaactccccaaagtgtcaatgatcatctaagacytcagttgagtcagggaaatgcataaataaattgataaatatgttgaaagtgttataggtgtaaagcactttgggaatccgaagtaattactacttagcctagattgaatgagagaggttgtgattatttaatagcacctggtaatatgtgaggcttaatttaatatcttagctgaacatttcaggaaaagcagctggaagaacaattcagggagagataagaacatgaaattatatacatatataaataagtatatattatatataatatatattatatataaataaattacatatgtctgtatatatacgtgtaatacaataaaatataatgccatttccaatgaacagggcagtcagtttggatggaatataaagtttgtgtttagaaaaggtgatggacaaatgttccagtgacataaatttaggcaaaatagttagaaatgagaagatcaattttcttgtatggtatgcttagaagtcta

SEQ ID NO: 759631 - DNA, 660 bp, Homo sapiens
agaaattaaaaggaaaatccatgactcactgatttctgttctttttcgtaaaatcatttatcattctgtaaatcaggttttttagagaataattaaatattttcatattcatttattcaacatttatcaaatactttacgagaaactccccaaagtgtcaatgatcatctaagacctcagttgagtcagggaaatgcataaataaattgataaatatgttgaaagtgttataggtgtaaagcactttgggaatccgaagtaattactacttagcytagattgaatgagagaggttgtgattatttaatagcacctggtaatatgtgaggcttaatttaatatcttagctgaacatttcaggaaaagcagctggaagaacaattcagggagagataagaacatgaaattatatacatatataaataagtatatattatatataatatatattatatataaataaattacatatgtctgtatatatacgtgtaatacaataaaatataatgccatttccaatgaacagggcagtcagtttggatggaatataaagtttgtgtttagaaaaggtgatggacaaatgttccagtgacataaatttaggcaaaatagttagaaatgagaagatcaattttcttgtatggtatgcttagaagtcta

SEQ ID NO: 759632 - DNA, 620 bp, Homo sapiens
cttcgaatacagtattaagaggttgttgtaaaaatcagatactgtctctctgtcttgaaagactttgattatcgccttctgtacaatggaaagattttgtagttaatactttatcttattttatatttgaatgaaaaatatcatttcctttaaatatgttcttatgtggaaaacatacttattagtcataaataagcatgcataaaagatgtaaataatgtattagaagacaaaatccaaaccctctaagaattatartctttttcagcttattagacagagacaatatcatctcaaaaggtatatataactttaaagttcattaaactttaaactcatatttagaaattttatttttacttccataacaataaaacaatatgtatttctcaagcaatttgcaagttccatggaactttcatggattttaaaattaatactgtcagtttagttgacaataatcaacatctaggtcctttactgacccctcatttaaagaacaccacagcctacaattcataattcattgaaatatatacacccaaattaaatttgatttaatttttaaaattaaaatcaacctccccaaattgtttcatttttcaatttttgcctaatgt

SEQ ID NO: 759633 - DNA, 474 bp, Homo sapiens
atatataaagaatgggaacaaataagactacttttatctagactaataaagtcaatatccttaactaatggttagaaaagataaccgaccccagttggctgcgatggctcacgcctgtaatcccagcactttgggacgttgaggcggctggatcgtgaggtcaggagatcgagaccatcctggctaatacggtgaaaccccgtctctactaaaaatacacagaaaattagctgggcgtggtggcgggcgcctgtagtcccaattactcgggaagctgaggcaggggaatggcgtgaacctgggaggcggasgttgcagtgagccgacatcacaccactgcactccagcctgggcgacagagcaagactctgtctcaaaaaaaagaaaagataaccgcccccctcaaaacaaacaaacaagcaaacaaataaaaaaccagagtataaactgtccattcaaaaaagactctagagg

SEQ ID NO: 759634 - DNA, 474 bp, Homo sapiens
atatataaagaatgggaacaaataagactacttttatctagactaataaagtcaatatccttaactaatggttagaaaagataaccgaccccagttggctgcgatggctcacgcctgtaatcccagcactttgggacgttgaggcggctggatcgtgaggtcaggagatcgagaccatcctggctaatacggtgaaaccccgtctctactaaaaatacacagaaaattagctgggcgtggtggcgggcgcctgtagtcccaattactcgggaagctgaggcaggggaatggcgtgaacctgggaggcggacsttgcagtgagccgacatcacaccactgcactccagcctgggcgacagagcaagactctgtctcaaaaaaaagaaaagataaccgcccccctcaaaacaaacaaacaagcaaacaaataaaaaaccagagtataaactgtccattcaaaaaagactctagagg

SEQ ID NO: 759635 - DNA, 614 bp, Homo sapiens
aaataagccatttggtatgcagaattctgttagatatttttatttttatttttttgagacggagtcttgctttgttgccaggctggagtgcagtggtgcgatctcggctcactgcaacctccacctcccaggctcaagcgattcttctgcctcagcctctggagtagctgggactacaggcacgcaccaccacgcctggctaacttttgtatttttagtacagaacttttgcatttttagtagagatggggtttcaccatattggccaggctggtctcaaactcctgccctsgtgatccgccctcctcagcctcccaaagtgctgggattacaggcgtgagccaccgcgcccagcatcttttttaaaaaaaattgagacagggtcttgctctgtcacccaagctggagtgcagtggtgcaatcacggctcactgcaacatccacctcccaggctcaagcaatcctcccacctcagcctctcgctagctgggaccacaggtgcacaccaccatgcccggctaatttttcaaattttttctaaagacgaggtcctgctatgttgcccaggctggtcttgaactcttgacctcaagctatcatccggccttggcctc

SEQ ID NO: 759636 - DNA, 647 bp, Homo sapiens
gtgatcctccagccttggcctcccaaagcgctaggattacaacaggcgtggaccaccacacgcctttaaacagcattttaaaaatctgtattcattttccgaatcaactaaactatgcttttaaatctatacagctttctactccccattctaggtacaaaccacatattaacttactgacttcccgtgcctgaattccttctgtccacgttcagttctgtatgtccagcagactcctggacctgtccgcaaggcaggcacctcaaaygtgtttaaaaccaaactcatcgtttccccccattacctactcttcatccagcgttctcatcttagtaaatggaattactgtcccaccagctgctcaagctagaaatatgagaataaactttttcctttattgtttgctatgcctttaaaataaatattgaatcagtttctctccattcccactgtccctccgtgatacaagccagtgtcatcttcattagactagtcagtcacccctaaagtagtgtaaccccctaccccaaccttccaagattttttcttttttttttttttttgagatggagtctcactcaggctggactgcagtggcccagtctcagctcactgcaaccccctgcctcttggattcaagcgactcc

SEQ ID NO: 759637 - DNA, 621 bp, Homo sapiens
gagccacttctaaaatgtgccaattatatttagacatttagaactggaaagaactttcaagattaacctagtttaagatcctcattttataagtaagaaaaaatgaacacactctaggtcatcagtagaacatgcacagctagtcatgtttttattttattttttactgtattatgtgccactcttcaaaatgtacaatacatgggccaggcgcagtggctcaygcctgtaatcccagcactttgggaggctgaggtgggtggatcatctgaggtcaggagttcaagaccagcctggccaacatggtgaaaccctgtctctattaaaaatacaaaattagctggacatggtggtgcatgcctgtaatcccagctactcgggaggctgaggcaggagaatcgcttgaacccaggaggcggaggttgcagtgagtcgagatcgagccattccactccagcctgggggacaagagcgaaactccgtctcaaaaaaaaaaaaaaaaaagtacaatacaccaatacacgaaacttgcagggtctattctacctattctaagaaagggcacagaagttcattttgctctcacaaaagacacactccaaacatccaaactcatggaaa

SEQ ID NO: 759638 - DNA, 621 bp, Homo sapiens
gagccacttctaaaatgtgccaattatatttagacatttagaactggaaagaactttcaagattaacctagtttaagatcctcattttataagtaagaaaaaatgaacacactctaggtcatcagtagaacatgcacagctagtcatgtttttattttattttttactgtattatgtgccactcttcaaaatgtacaatacatgggccaggcgcagtggctcatgcctgtaatcccagcactttgggaggctgaggtgggtggatcatctgaggtcaggagttcaagaccagcctggccaacatggtgaaaccctgtctctattaaaaatacaaaattagctggacatggtggtgcatgcctgtaatcccagctactcgggaggctgaggcaggagaatcgcttgaacccaggaggcrgaggttgcagtgagtcgagatcgagccattccactccagcctgggggacaagagcgaaactccgtctcaaaaaaaaaaaaaaaaaagtacaatacaccaatacacgaaacttgcagggtctattctacctattctaagaaagggcacagaagttcattttgctctcacaaaagacacactccaaacatccaaactcatggaaa

SEQ ID NO: 759639 - DNA, 621 bp, Homo sapiens
catacatgcaccaaaagacatatacagaaatgttattaggacttctggtttccagttccacatgtagggagcttagaagttgccactccaaccctaacaagtaaaaagctaagcaaactgagaaatcaattcttatcggacccaggataggggaggacacagggaaaaccactgtccccaaaagactagagagacagactggcaaataccgagagccacaagttactagagcatgcagtcacaaacagaaacccccacaggaagcagtgccatggtasaaaaacctgagctgtaattgatgaattataggaggttcagtatgaacaactctgaaagttttaaactccaggaggacccactcatggggaaacaccacaattttgttagacttacctacatgagctcaattagattctccaagtaaatattgcagaaaaatccctatgtgcttctggcagggggaaggtgaaatgaaccattttgaaatatgccagagcactgtgctcttcttaacaaggtctgcccccaggagaaattagttagctaaatcctaacctgctggggtattattagagcctgacccaagggaagggaaatacctaactcttgtcagctctaacc

SEQ ID NO: 759640 - DNA, 559 bp, Homo sapiens
aaaagaacgagagaaagaaacaagaaatatttcaaacaataatgacagagacatttcttaaattaatgtcagacatcaaacttcagatccaggaaactcagaaagaaaataataggggtttgaaactcagatctccataaagaaaagaagagcatcagagagggaataaacaaagactaaaatgttcatttttcttattcttaattgatctaactgataagtttgttcaaaataataatagcaacagtgctttcgattttgtatgtttatatgttatatgtatgcttacatataastgaaatgaatgacaacaacacaaggagcaggagggaagacttaggattattttgtttttgtatgatacactacttataaagtggtatagtgttatttaaaagtggacttgggggtgcagcgcaccagcatggcacatgtatacatatgtaagtaacctgcacaatgtgcacatgtaccctaaaacttaaagtataataaaaaaaaaaaaaaaagtggacttggactagttgtaaatggatattgcaaaatctagggcaaccac

SEQ ID NO: 759641 - DNA, 539 bp, Homo sapiens
tcagaaatggacagatccagcaggcagtaaatgggtaaagacctagttgaattcaacaacaccatcaatcaacttgatataattgacgtctatagactacttcatccaacaagagcagaatacacattcttctcaagatcacgtggaacattcaccaagatagaccacattatggtccataaagcacaccttaacaaatttagaatagaaattatataatgcctgctctcagaccacagtggaattttactagaaaccaataaaggaaagataactggaaagtcccaaaatacatggagattaaacatggattagaaaagaaattccaagataaattgagaaataattttgaactaaatgaaaatgaaaacacaacttatcaaaatttatrggatgctgcaatgagccaggatcgtgccataaaataaaattaatatatcagagatgtatgtactccatgtccattgaaacacccttcacaatagcaaagttaacagaatcaacctaagtgtccatcagcagatgaatggataaagaaa

SEQ ID NO: 759642 - DNA, 591 bp, Homo sapiens
tacacagatcctttattggcatctgcatgagaggcctagaaatcggatgttagaagctaggaatcatggctctgagcgccttgcatacaggagatactcactgatactaaatcaaggcatgtaaacaatactgggtaaatcatacctaccagaataaagagtaacattcagagcttttcttttakctgttattttaaatgttactccatatttcaaaagtctgcacgtatgaaattgtgtcttatttctggtttttagagcctaagaaagatactcattcttaattcctatttatcatctgaaaaccaaatgaatttttgaaataaatgttttaccagcatttctgacctggtctggcctgatctctgtgttgggcaagagagggtacaatttgagcagttctcctgagttagactcggctcaaagtctctcttttaaagtgaaaagcacctttctcattgcttttttcataggtggaagaatcagatttcaagagactgaagttcattctgtttcattagggattagactaaaatggacaaacagtggaagaaatccattttccagaagcagctctgcctgtatgtccca

SEQ ID NO: 759643 - DNA, 613 bp, Homo sapiens
gtgtttaagcattttttcatgtttgttagctttttagactatcttttctgtaaattgtctcttcatatcatttgtctaggttccaagtgagttatctttttcttatcagtctgtaagaaaactttgtataatgcagatactaactcttttctgggtttccatattttacatattgtttcccagatgtctattttaatttttattagtctctacttctaaacctttaatccattatataaggatccaacttyattttctttcagatggaaagctacttgtgttaataccactgtaatacagaaaccatcttttcccccactaaattaacatatattatttttcatgcattaacttttcatacttactgagaaagagctttttaatcacaatgttatactgtcagtgagtctgacaatgaggggggggggtccatggtttatttttaattatattgtagggataggaatcaaactgataaacctcagcagtcaatataacctaaatctcaagtatggccactgaaagttacctgttctacttaatttttgttttttcttagatttacctaatttgtcatctatgtaaaatcttcagtattcttcaagggaaatga

SEQ ID NO: 759644 - DNA, 533 bp, Homo sapiens
ggccaaattccatataggacaaaaccacccttcaggaacaaaggggaacaacattctcagatgacggaaactaatttgtcactaacagacatatctttaggaggttctcctaaaaaaaagttcctcaaacaaaaaggaaatgatgtatcaataaggtttaatttgagtaaaggaagaacactggaacrggtaatagtcatggtaaatataaaatgaactattcttcatcttatgagtttcttaaatcatatttgatagttgaagtaaacgttataacaacatttgatgtggtgttcaaggtgtatagagaaaatacaaatattaaattttaaaaagggaaaaggagaaaggacctacatggaagaaaggtctctaaacttcaattggcaaaaggcaataaaagtatcccttgtgataagttgttacatctattgttatacccaaagcacactaaaaaaggttaactaagccagatactcaaaaacactataaacatgtcaaatagaattctgaaaatattcaagcaacctaca

SEQ ID NO: 759645 - DNA, 533 bp, Homo sapiens
ggccaaattccatataggacaaaaccacccttcaggaacaaaggggaacaacattctcagatgacggaaactaatttgtcactaacagacatatctttaggaggttctcctaaaaaaaagttcctcaaacaaaaaggaaatgatgtatcaataaggtttaatttgagtaaaggaagaacactggaacaggtaatagtcatggtaaatataaaatgaactattcttcatcttatgagtttcttaaatcatatttgatagttgaagtaaacgttataacaacatttgatgtggtgttcaaggtgtatagagaaaatacaaatattaaattttaaaaagggaaaaggaraaaggacctacatggaagaaaggtctctaaacttcaattggcaaaaggcaataaaagtatcccttgtgataagttgttacatctattgttatacccaaagcacactaaaaaaggttaactaagccagatactcaaaaacactataaacatgtcaaatagaattctgaaaatattcaagcaacctaca

SEQ ID NO: 759646 - DNA, 626 bp, Homo sapiens
  misc_feature 225: n = A,T,C or G
aaggtactgtaactcatctgtgttatagttaacatatattgaactgaacatatatataccactgaaataaaagagccaggatttaaaaccacttctttccaacttgaaattctggactattaactacaattctattatcacatttaattctaattgtcagtaacctccaattagttttgagtttctttagcacacaaaatataatttacatatcttcatgttccncagcctctgcctttcagcataggtcctatgctgcaccgcttaattcaatttgaagtaaaaagtaagtctatgttggctgttttaccgagcaaggatacagcattcaycaaaagagcaaagatggtgtttcatatctgttatttcccttttctgtttttctgtgtataaaaggcatggtcatgaacctagtgactgctatattaaatgcaaatgtagagctaggaagaattaattcaccttcatgttcttagtagtataccgtgtatcccagttcagtgcaggaaatgtcacacagataattgttaactaattcttccatacagagaccctcaatcttattttcgtatgacactaaaatcctttagcttttgcatagattgtttgaaaataatattgtgcta

SEQ ID NO: 759647 - DNA, 529 bp, Homo sapiens
ggtgactctaattatatgacaaaattataaccatgagagggcccaaaagaagtgaggatgtttccttcacctacagcactgttgaaggactctccaggattttcttaaacttcacttacgtgcagtgagttttgtatcaatattaaattatattgaaatactagtaaataactctgattttcaagtttaccatatttatttattgaacctagtttaagtactaccctcttaaatgtgtgatttcattctttgtayatatttttccaaactttatgttgaggtatagttgacaagtaaaaactgtatatatttaaggtgtacaatgtaatattttgatatatatgtatacattttgaaataattaccaagtgaattaacatatccatcacatcacatagctaccactattttttgtgtgcatgtgtgtgtgtgtgtggggtggggtggtgagaaaacctaagatctattctgttagcaaatttcacatatacaataagttattaactgtagtctttgcattacattccca

SEQ ID NO: 759648 - DNA, 621 bp, Homo sapiens
acaactggcaaaaaggggctcgtgtaagttctatgaacatgagaaacttccagcccagtcttctttttccccttcccctgtcttgcctaagttgaatgatcagcctaaatttttttctctgatagctttcttgaggtataatgtacatatcatacaatggatccattttttaacttcacaattcagtgacctttaataaatttacagagttgggcaaccattgccacaattcaattttagaacatttctatcactttcaaagagcccatatactcatttgctaccaatccctgttcccactcccagacctaggcaaaaaacaaaaagaaaaaaaccagttttgtgataccatgttcatgttttgtctactttttcactgtgacaatttttcaaaaatcggaatgtcaaggtgatctactttatgtctctattgacttgccttttctggtccattcatctaaatggaatcatgyaatatgatgtcttctgtgtttggtttcttttacttagcacaatatttttttatgtttacccacattgtagcatatatcagaatttcaaatctttttatggctgcatagtattccatcacgtatatataccatattttatttatctgtt

SEQ ID NO: 759649 - DNA, 585 bp, Homo sapiens
gaaatgagatagacagcaatataataatagtgggggacttcaatactccactgacagcattagatgggtcatcaagaaagaaagtcaacaaagatacaatggatttatactataccttggaacaaatggacttaacaaatatatacagaacatttcatacaacaatcacagaatacacaytgtattcaagagcgcatggaactttctccaagatagatcatatgataggccataaaacaagcttcaataaatttaagaaaattgaaattatatcaagcactgtctcagaccacagtggaataaaactggaaatcaactccaaaaagatccttcaaaaccatgcaaatacatggtatttaaataaactgctcctgaatgagcattaggtcaaaaatgaaatagagatggaaatttaaaaattcatcaaactgaatgacaataatgacacagcttatcaaaacctctgggacacagaaaaggcaatgctaaaaaaaaagttcatagccctaaactcttacatcaaaaagtctaaaggagcacaaacaatctaaagtcacacctcaaggaactagagaaacaagaaca

SEQ ID NO: 759650 - DNA, 632 bp, Homo sapiens
tctctgtggctcatatccaagctccattccatctgttcaaaataaaccaccatccaagcctaggctacccctcaacaccacaggatcaagagaatatggtcagcagatcagaaaatactttggctggccactttgacatccattctcaatatttcccccacatctccattactcaacacaggtcagtatgggtgtcagttccccaaattttcctaagaaggagctaggctacccagctattcttcatattctgagatctcttatgtacacaaagtttattcattttttccttttcattagcctctgaatttcttaccagcaacaatcatattagaattatttattactgattggcagcatctaacacagcacccagtctgtagtgttctggatgaatgggtaaatgcctttctcactggctactgtttactgatggaaaattctgagtatgtcctgttacttcatttaaacttaacagttrtatgttaccactcttctcgtatgtatttgtttgcttgggctgccgtaacaaaataccacaggtagcttaaacaacagaaatttattttcttccagttttagaggctagaagtccaagatcaagggcttggtttggtttcttctgaaggctt

SEQ ID NO: 759651 - DNA, 606 bp, Homo sapiens
ctagctatggctcagagatttttctggggttggcagcagaaagagaagaggaggtaggccaatggactaatatgaacctatatatccaaatttctcctcaaagtaacttattttatttgcaagagtgtgaagaagttcaaggctaagggcactctmaaaaagagtagcagttgtggtgaaaggaatttgatagagaagtggaaatggacacagttgggaagagacctcctggagtcaggggcaaatctcaaatacttctctagaaactgtccctgaagaagcctgaccttgattggattagtctgtgaagcaaattatgccccaaggtattggtgaaaacagcagagcaaaaaaagccctgtccaaaccactgtcatcccatgggtatacacaatatactcaaggctgtacctcctgaagagcaacaatagagggtttatgctgtgggggtgggggtaggagaatagacttcactaaaataatccagccagtcactaaacaagtaaataagaaacaacaacaagagtttctggaatatattatctaaaatgtacagttactgacaaaaatgataagtaagtcatgcaaagaaacaagaaactatga

SEQ ID NO: 759652 - DNA, 328 bp, Homo sapiens
ctacttgcataatgtgttctaagtgatcagtattgtttttcttagcttaaaggtaagacattaggcttggaaaggttaaggtaattgctccgcctgaggctggttccctccacctgtgcttggtttgtatctcctcctctcygaggctgattaccctggcaccattactgtctcccctatctctagcctgtttccttttacaagtggcttctttttggcatttcaacttgcttaagtatctctcatctaaaaactagccaacgttttccctttacccttctattccccttcagctctgaagcaaaacaatttgaaagcattttctacg

SEQ ID NO: 759653 - DNA, 620 bp, Homo sapiens
aaatcctcttgcctcagcctcctgagtatctgagaccacaggcacatgccactgcactgaaccaaaaaaaatgtggctgagttcaaggtcttgtgaggaagagcttatgtattatccatgtgagccctaaatgcaatctcacatgtccctatatgagtgaagctagggagcatttaacacacacaaaagaggagaaggcaatgtgaccatgaaggcagaaactggagtgatgcagccaaagaatgtccgcagccaagagcaggtaacaggcctcccctacgccctccagaaggtgtgtggccttactgatacccctatttcgacatttttatcttcagaaatttaagaaaataaatttctgttgtattaagccaccacagttgtgcaatttratccagaactcaaagaaactaatataccatctttatagcctggcttgaattccatttccaattgcaccaaaggatgccttattgtcttggggttggtgaagttccctaatggaattatttcagcatcttgttttcacacttaccatatttatactgccatattaatgataatacatacatatatatcacatacacatccttataatacacataacaaacaatacacct

SEQ ID NO: 759654 - DNA, 603 bp, Homo sapiens
ttatggctcaaggtcattatttttaaaatcaataactttactgggctataatatagttattccccggcaatatacggagacagattggagctattttcaccttatttaataagaagcctcagccagctgggcttgcttaggtctcatgaatgcttttcaagacctggaaatataagaggaggcaggaaaactactagctgtcatttctcagtgctaatagtgtgaataactcaaaccagttctcttatctattctaataccctactcctcttctgctgtggatatgagaaccacataaaccagggtgatgtaattatatggaaagtaaagacaaatgggcttttagtgtctaccatacgatccttatgaactcatttacacattctgtgacactgattttagcttttaagtggatttgttgcatattggttagttcatttggttgcattttccayagctgagtctgctaaacagctacattttgtaaaagcaggtggttgctacattgcttattaaatgtttcaatgaaatgcaggacttatcagcatcttctcagattgggtctgaaaagactttttcagaaccaacacagcacattcaacc

SEQ ID NO: 759655 - DNA, 520 bp, Homo sapiens
aaatagcaaatgaagcctgtgtggtcacctgttaattgctcttagcactgttatttttaaggattcagcactggtaatacagtaactgcctcctcctaggggttcaagctctgtgtgctcctcagaagagagaagatacactctagattcttctttttcctaattcatgtggttctaarttcagtataaattaattctctgactaccaaaggaaccctgatatttatcacctatccaaattgtttcaatatttcaggatccagttcaaaacctattctcctcatgaaatactctctgatgactctgaagttcattgactgcttcatgtttaaagacagtgtctgattcataatttaccagtttaccacttacgattcatatgtttatcactttctaattaggcaatttgtctcatctttctaactttagcttttggaagtccttaaaggtgaaagcagtataattcttttgttttccttctcaatggattttttcccgtagtttttttttttcccccatc

SEQ ID NO: 759656 - DNA, 625 bp, Homo sapiens
atgcagtgctctaaaaatttgtccttcacaataaaagtttcaaagtttagatatctatcctaaataatttctagtttttcccaataaattactaaattactgttatgatgaaatatgaacattttcctgttgggtgaggtggttcacacttgtaatcccagcattttgggaggacaaggcaggcagatcgtttgagcccagtagtactagaccagcctgggcaacatggtgaaatgctgtctctacaaaaaattagccaggtgtggtggcacatgcctgtagtcctagctactctggaggctaaggtgggagaatcactttatcctaggaggcagaggtggcagtgagcccagattgcaccactacactgcagcctgggygacagagtgaaaactgtttcaaaaacaataataataataataataataataataataataataaatcaaaccaaaaaatggaatatatctcatcttcctgccttgaaaataacttaaattgcttcatttactattctgaaattttggttaaatcaaattaaatctttataattattaaaaaatgaaactatttgcaattctagtatttaatatttatccaattgctaacgtagatatcacccttc

SEQ ID NO: 759657 - DNA, 618 bp, Homo sapiens
gaaataaagcatatagaatgcggatctaaaaaaggaaatatttttgtacatctgtataatgtgtttgtgttttaagctattttaagttattgcaaaagggtcaaaaagtttaaaagatgacaaaaagttagcatcagctaattttgatttgttatcgaagtaaaaatatttttataaatttagtataggctaagtgtacagtgtttataaagtctatayagtgtacagtaatgttctagaccttcactttcacttaccactcacttactgacacccagggcaacttccagtcctgcaaactctgctcatgctaagtgtctaatacaggggtaaccactgtatatcttttacaatatatttttattatacctctcctatgtttagatacacaaatacataacattgtgttacgactgcccacagtatttagtagaataacatgctgtacaggtttgtagcctaggaccaaagctacaaaccatctatagcttaggcatgtagtaggctgcaccatctaagtttgtgtgagtaaattctattatgttcacacaatgacgaaaccacctaatattctcaccaagaaaatgcctatatttctgacaatgtatccccattgtt

SEQ ID NO: 759658 - DNA, 550 bp, Homo sapiens
aaaaatttcttctggaatatctcctaaagaacttgccttaggctgttttgcagttagcacttttttttttaatagagtacactctaaaataataataaaaagtatagtatagtaaatacataaaccagtaatgtcatttattattatcaagtagtatgtactgtacataattgtacattctatatttttataggactagcagttcagtaggtttttttataccaacatcaccagaaacacatgcactataacattatgatggctacaatgttactggacaataggatttttcagctcctttgtaatctatttttatctatctatctatctatctatctacttatttttgagagagagtctccctccrtcacccaggctggagtgcaggtgacgcgatctctgctcactgcaacctccacgtcccaggttcaagtgattctcctgcctcagcctctggagtagctgggattacaggcatgcaccaccatgcctggctaattttgtatttttactacagacagggtttcaccatgttggccaggctggtctc

SEQ ID NO: 759659 - DNA, 574 bp, Homo sapiens
gcaaagacatggaatccacctagatgcccatcaacagcagactagataaagaaaatgtggtatatatacaccatggaatactacgtagctataaaaatgagatcatggctttctcagcaacatagatggagatggaggctgtaatcttaagtgaataattgcaggaacaggaaccaaaataccatatattctcatttatgagtaggaggtaaacattgagtacacatgggcacaaagaagggaacaatagacaccagggcstatttgagggtggagtgtgggaggaggcagaagactgaaaaaccaattatcgggtattatgctgattacttgggtgacaaaattatctgtacactaaacccccatgacacacaatttacccatgtaacagatctgcacatatacccccttggacttaaaataaaagttgggacagaaaaaaaattgaaaagacaacccacagaaccaaagaatatacttctaaatcatatatctgataaagcaatcatctagaatatataaaaatgcaactcaacaataggaaaataaataacccaattttaaaaatgagcaa

SEQ ID NO: 759660 - DNA, 492 bp, Homo sapiens
gcatcaaaatggaattttagaaaatattcaagtaacctaaagaaaggcaagaaaaataaaacagaaatgaaaaacagagaaaacattttaaaaagtcggacttaagccctaacatatcaataattacattaaatgtaaatggtcaaataattcagttaaaaaatagagcttgacaaagtgtatttaaaaacgtaactgaactctatgctgtctataagaaactcacttcaaatgtaacaatataggcaggttaaatgtcaaagaatgaaaaaagacatatcgtgcaaagatttgccaaaaaaagaaggagtggctacttwaatttcatataaagtagactttggggaaaagtaaattttcagagataataaaaggactttcagtaatgattaaaagggtcaatccatcaagaagatacagtaatcttaaatgtctatgtaaaacacagcacagcctgcaaaatacgtgaagtgaaaactaacagaactgaaa

SEQ ID NO: 759661 - DNA, 513 bp, Homo sapiens
gtaatctaaggatgaagcccaaggcatgactgtaaaattctttaagaaccgaaaaagattaaaggtaagtcttaagtcatgcaaaaggccttctgagtttacaagtatgtctttcagactctctcaattatacaataaagctcctaggaagcttgagggcatcctctgtcagccttctcaacacccccaagggcytatgtcaaagagatttgtgggtgtggcttttgtctaatggaataaacctccccaaagattcacaggaaatgcacaaagtttctaagagaattatatcaggcaaagatcttttggcttgtgctgaaaggtacagagacaatacaaaatgaatagagccactaagcttctgcaatcagggaacaagtggagaaaaacaaaacaaaacaaaacaaaacaaaaaaaccctagctataaacaagtgctcctttcattaaaaagtcaggatgcctcagagggaagaagcaagaacccagagggtggagccaagggtcacagaga

SEQ ID NO: 759662 - DNA, 610 bp, Homo sapiens
gcattatgtctaaaaaatatacatacgtctgttaaaaatactttatgctaaaaaaagactaatgagcatctaagccttcagtgagttactctttttgctagtggagggtcttgacttgatgttgatggctgctgactgakcaggttggtaattgctgaaggttagggtggctgtggcaatgtcttaagataacaacgaagtttgccgcaacaattgactcttcctttcatgaaacatttttctgtagcatctgatgccatttggcagcgttttacccacagcagaatttttttccaaaattggagtcagtcctttcaaaccttgctgctgccctatcaactaagtttacatgatattttaaatcctcacttgttatttcaacaatgttcacagcattttcaccaggagtagattctatctcaagaaaccactttctttgctccttcatgagaagcaactcctcatctgtgaaagttttattatgagattgcagcaattcagtcacatcttcaggctccacttctaattatcgttctcttgctgtttccaccatatctacagtgactttctccaatgaagtcttgaacccctcaaagtcatccatgagggt

SEQ ID NO: 759663 - DNA, 608 bp, Homo sapiens
ttagtttggaaggcctgtagaacctttgcctctgtctttcagtagatttggagaaataacatctcacttctggccttgttcgtccttccatgggaaaactataaggataataactcctactcacaggactattggaggattaaaggtggcagcatctatacatgtccctagtgcttcttcatagcagggactcaagagaatgtcagggagtcaaaaatgatttttttwaaaaaaaataagagctgattcctctaatcttggagcaaggttctttcaaagttgaatcatttataatcacaaggtgatttttatcgtctgtctttgtaaatccctatagccaaataggttagggtcagcagaattctcagaaagtaacagcagaggaaaggggaagctaggctttaatccagagccccagaactttggggttttttcttgatggctctcaacccttccagagaaagagatctctgaccaataaaatagaaagggagttggtcagaaaccagttgatgcccgggaaaaatgagactcttgagcaaagagtctggctgataaagttgtcacagtaaccactgagaaggcccttctactagggggccttactg

SEQ ID NO: 759664 - DNA, 611 bp, Homo sapiens
agtttgctctttgtggcttcctgggtgccgtctcctgtcagggacctaactgctgtggaaggtggctggctggggtgcagctatagccagattaggatcaaaattaatttcaggactgtgtaacgagcattccaggttagtcaaagttgacaacatttttctaaattgagatttcttatcctgtaacaaatgttgtaagcctcattgttcactattttcagaattttgtttttaatcaacagtaaaacagggcagtgcttttttaytgatggtagaacagtgtctagcatacaataggcacctaaaatattatgtgtccagaaaaatgtatagttatgtatgtacatatacatctatctatacaagcacacacacgtaccatattgataacacagctgcttaataaattaacctgtccatttttatttagaggaaataaaattaactgccagagtatgaactgatccatctgatctctctgtcaaaaatataagaatcaatcattttgggctgggcacgggtggctcacacctgtgatcccagcactttgggaggtcgaggtgggcagatcccccgaggtcagaagttcgagcccagcctggccatcatgg

SEQ ID NO: 759665 - DNA, 611 bp, Homo sapiens
agtttgctctttgtggcttcctgggtgccgtctcctgtcagggacctaactgctgtggaaggtggctggctggggtgcagctatagccagattaggatcaaaattaatttcaggactgtgtaacgagcattccaggttagtcaaagttgacaacatttttctaaattgagatttcttatcctgtaacaaatgttgtaagcctcattgttcactattttcagaattttgtttttaatcaacagtaaaacagggcagtgcttttttactgatggtagaacagtgtctagcatacartaggcacctaaaatattatgtgtccagaaaaatgtatagttatgtatgtacatatacatctatctatacaagcacacacacgtaccatattgataacacagctgcttaataaattaacctgtccatttttatttagaggaaataaaattaactgccagagtatgaactgatccatctgatctctctgtcaaaaatataagaatcaatcattttgggctgggcacgggtggctcacacctgtgatcccagcactttgggaggtcgaggtgggcagatcccccgaggtcagaagttcgagcccagcctggccatcatgg

SEQ ID NO: 759666 - DNA, 592 bp, Homo sapiens
atcttacatttaatatgtgaaatgattttgtggagattttgagatcccatttattaatagggaaaactcagcttcagggaggttgcctaatgtgcctgacattcagtcagccccaaacagacttgaatctagatcatgtggttcaaggcatggatgcatctgtcaccccacagaactgtgcccctcayaccacagctgcacatgggccacattcgatggatttggattatttgtgtaggcccatcagtgaagtcttctggagtccttttcccagaaggtctgctgttgattcgagtgggctaatagaaactccagggcattacgttgtcccacagggccttagcattcccaagacagttctctgggctaagctgacagaatgtttttgtctgcagttcctaggatgtgcatgggagaatctctgctcctcgaggttttagttttctacagtttgcaccaaaatatctactgaattttagatctccctcccccttggtgtgaagtgtcaaatagtagatatgttgaacaaacagatctaaaattgaagaaatttcagacttgaaatgttcagtggttatgcgctttggactct

SEQ ID NO: 759667 - DNA, 592 bp, Homo sapiens
atcttacatttaatatgtgaaatgattttgtggagattttgagatcccatttattaatagggaaaactcagcttcagggaggttgcctaatgtgcctgacattcagtcagccccaaacagacttgaatctagatcatgtggttcaaggcatggatgcatctgtcaccccacagaactgtgcccctcataccacagctgcacatgggccacattcgatggatttggattatttgtgtaggcccatcagtgaagtcttctggagtccttttcccagaaggtctgctgttgattcgagtgggctaatagaaactccagggcattacgttgtcccacagggccttagcattcccaagacagttctctgggctaagctgacagaatgtttttgtctgcagttcctaggatgtgcrtgggagaatctctgctcctcgaggttttagttttctacagtttgcaccaaaatatctactgaattttagatctccctcccccttggtgtgaagtgtcaaatagtagatatgttgaacaaacagatctaaaattgaagaaatttcagacttgaaatgttcagtggttatgcgctttggactct

SEQ ID NO: 759668 - DNA, 607 bp, Homo sapiens
tggctcactgcaacctctgcctctcagtttcaaacaattttcctgcctcagcctcctgagtagctgggattacaggtgcccaccaccacgcccagctaatttttgtatttttagtagagatggggtttcaccatgttggccaagctggtygcaaactcctgacctcatgatctgcccaccttggcctctcaaagtgctgggattacaggcgtgagccactgcacctggccttaattagtcttgcatgtaagtttcaggaccacaagaaagacccatcaaagggctttactgtttttttcttctttcatccactgtgaaaacaatgctcccaacatacccagagaccacccacagtgctctgctggggttactgagttggtgtggctcacttagccaaaaggtggaggcagagacacacggtcagccacagtcatgctttatgggtaccacagggagacagcttcgaaggcagaaactctaggctcaagtgactccagggatcacgtcttcacctcacctgtggaggagatagcctaaccatggtttcacttcattcactcaattcgggcactgaggcctcaggacaagccagcacaatctccaaacc

SEQ ID NO: 759669 - DNA, 607 bp, Homo sapiens
tggctcactgcaacctctgcctctcagtttcaaacaattttcctgcctcagcctcctgagtagctgggattacaggtgcccaccaccacgcccagctaatttttgtatttttagtagagatggggtttcaccatgttggccaagctggtcgcaaactcctgacctcatgatctgcccaccttggcctctcaaagtgctgggattacaggcgtgagccactgcacctggccttaattagtcttgcatgtaagtttcaggaccacaagaaagacccatcaaagggctttactgtttttttcttctttcatccactgtgaaaacaatgctcccaacatacccagagaccacccacagtgctctgctggggttactgagttggtgtggctcacttagccaaaaggtggaggcagagacacacggtcagccacagtcatgctttatgggtaccacasggagacagcttcgaaggcagaaactctaggctcaagtgactccagggatcacgtcttcacctcacctgtggaggagatagcctaaccatggtttcacttcattcactcaattcgggcactgaggcctcaggacaagccagcacaatctccaaacc

SEQ ID NO: 759670 - DNA, 555 bp, Homo sapiens
ttcactttataaaggtggatgctgtatttggtgcatatatacacattagtgttatatctacagtgaattgtggcatttatcattaaaagtgtcccttttatcatacttaatacattttggcttaaattatactttaatactggtmtagcaactcatggcttcttgttgtttctgattgtctgcatatctttgcctgtcccttttttaggtgaatcattttgttttaggtaagtcttttgtatacagtatagattcgggtcttgtttgtgagttgaaacccctttttttaataggtgaattaaaccatccacatttatgaatattactaagaaatttgatctcaactgtcatactgtgttatgattactgtgtgcattactattttattcttcattatgtgttttgtttgcatttttattaaacttttttggcatttaggaagttttctgtctgttctgttggttatctttgtatttatatccctttaatgctgttaatcccctgttttattcatttataatttcacttgtcatttttaatagtatttttttattt

SEQ ID NO: 759671 - DNA, 475 bp, Homo sapiens
cttaatttaaccattttaaatatgattctctgggaattttttcttcaaaatatagaatatgtgtgcattagtttgctaggcttgctgcaacaaagtaccacaaactgggtggcttagacaacagaaatttattatctcatagatctggagactaaagttctagatcacgttgttagagttggtttcttcgacaactgtgagaaaccttatgttccatgcctctcccctggcttctggtggtttgctggtcatctttggcatactttggcttgtaggtgcatcacctggatctctgccttcatgttcacatggtgttctacctgtgtgcrtatctgtggcaaaatttcccctttttataaggataccaggcatattggattagggttcctctctactccagtaggacctcatcttcactaattacatctgcaataaccctttccaaataaggtcacattctgaggaactagaggtt

SEQ ID NO: 759672 - DNA, 562 bp, Homo sapiens
agagaaatattttgtgaaggggtcaatcagtgtcatgaacttcattgtcttattttaagaaattgcacagccacttaatacctttggcaactaccaccctgatcagtcagcagccatcaatattgaggcaagaccctgcaccagcaaaaaaggttacaacttgctaaaggcccagatgattattagcattttttagcaataaacattttgaaattaagttatgtacttcttttttttttttttttttttttgagacagagtctcgctctgtcacccaggctgtaatgcagtggcatgatctcagctcactgcaacctctgcctcccakgttcaagcaattcttctgcctcagcctcccaagtagctggaactaaggtgcccgccaacatgcctggctaatttttgtagttttagtagagatggggtttcaccacattggccaggctggtctggaactcctgaccctgtgatctgcccgcctcggcctcccaaagtgctgggattacaggcattagcaagttatgtacatttctttagacataatgctgttgcacacttaata

SEQ ID NO: 759673 - DNA, 628 bp, Homo sapiens
atcactcttccattttttaaagaagagaaacggacctacaaaaagttcagtgacttgatcagggttaaaaagtagggaggtcttaatttactttaaaaattatgaattcactataaatgtctttgctgataataatggcctaaatatgacccaactactagatgaggaggccgcagttcccacccccaaaaatgtttggtctaatgagggaagaggacagtgaagaatagccataaaacaacccggaagtccagggctcaaaatctacatggagtctagcgggagcatctgagagggctaccctagggcagagcaacccatgacctttaaaaacgccaggtaaggagcaggaaaacagcaagaggcagccgcagccttgccaatgagaagagccatggggaaagcagactttccagcttctggaggccacctgcaygtcttggctgatggtccctgtctctcttctcaaggcctggcgtagcatcctcagacctttctgactctgacactactgactccctttatgaagacccttgtgataactgcacagataatccaggaaaatcttcccagctcaagatcaggactgagggttgatgccttctaagatcttgataaatttgtgttg

SEQ ID NO: 759674 - DNA, 640 bp, Homo sapiens
ggaggatcacttgaggccaggaattcaagaccagtcggggaaacatagcgagaccctgtctctaccaaaaattttgaaaatttaaataaataagaaagtgtattaacttttttagaacctgcttaatcattgctctaactayaaattctgattagcaactaggtaaaatacaacacagaggaaactgatacatacctctagtttcagagaggtcattaaactaaaccatttgacatggattattctgaacagtgcaaaaccattccaaacacgaaagccaaacataaagaactctggaaaagccattttataattgttgaagcataagtataatttaaaatttatccctttctcaaaatttataattgacattgacaatctttgagaaaaaaatcatttgaattagaaacactttcagcagctgtctatacttcctactatatatccctggattccacaggcataccaaggaactataataactacttctatcaagctacctacagaacaagaagtgttttggcttaggaaagtaactaagacatggacatttattttaccattttgatatcctttttggctctgtgagaatcagctttggcctggtcataggttaatgctttacttcgtgcacaccaca

SEQ ID NO: 759675 - DNA, 626 bp, Homo sapiens
gacacaaaaggccatatattctaatgtctccatacacacgtgaaacgtccagcataggaaaatccatagagacagagcagagcagtgagtgccacggggtggatagaatgagtggctgctgataggtacagggtttcttttcagggtgaggaaaatgttctggaattacacagtgctaatggttgtatactcttgttaatatactaaaaaccactgatttgtatactttataagggtggattttatagtatgtaatatctcagtttttaaaaaaattagtgcctctttagcagtggatgctaaaattagtggatgaatgtttaaggacaaacaggatataagcataagtacctccttctcctgccaagacagttatcgattacaaaggaaaaaatagtcactttactagtgaaggaacccagcactagtttcagtgggatgctgaatcatcttaaccaaataatcaagrttatcctcactaataataagacgttattgacatcctgtatctatgataggatgcactgaggacacaagatcacatccatggtgttcttagaaaaaaggcataacctcaacctaatcatgagaaaacatcacagatccaaactgagagacattccaca

SEQ ID NO: 759676 - DNA, 640 bp, Homo sapiens
gtttatataaacattattcaatgctgagtattataatgtactttatgtcttattttttacttttttgtttttcctatagtttaataattgctgtgtttttgttttcgtttttgttttttaattgagacagagtctcactctgtctcccaggctggagtgcagtggtgtgatctcgtctcactgtaaccttcatctcccrggttcaagtgattctcctgcctcagcttcctgagtagctaggattacaggtgtgcaccaccatgcctggctaatttttgtatttttaatagagacggggttttaccatgttggccaggctggtctcgaactcctgacctcaagtgatccacttgcctcagcctcccaaagtgctgggattataggtgtgagccactgcacccggccaattgccttgttttttgatttgcttagtcatatttgcatctgttactaaatcttctcatgcctgccagtagcttttggtacaatttctcacaaggtccacgtcctctatacatatattcgttttagttctctcctggagatctttgtttccctctatctagtaatgtcctatgcctgctctcagttgcctattagtcctcttgagacttccctttgctggtattttaggaattcc

SEQ ID NO: 759677 - DNA, 645 bp, Homo sapiens
gtacaatgaaaatattcttcaaacatgaaggagaaataaaggctttcccagacaacaaaaactgaaggatttcaccctcagctttcatcagacctgttctgtaagaaatgctaaagggaggctgggggtggtggctcacacctgtaatcccagcactttgggaggctgaggcaggtggatcacctgaggtcaggagtttgagactagcctggccaacatggtgaaaccctgtctctactaaaaatacaaaaaattagctgggcatgcatggtggtgaatgcctgttatcccagctacttaggaggctgagtcaggagaattgcttgaacccaggagctggaagttgcagtgagccragatcatgccattgcactccagcctaggtgacagagtgagacaccatctgaaaaaaaaaaaaatgctaaagggaatactccatttagaaagacaaggatgttaatgagcaataagaaatcatctaaaggttcaaaactcactagtaatagtaagtacacagaaaaacagaatactataacattgtaactgtggtgtgtaaactactcttatcttaagtagaaatactaaattatgaaccaattaaaaataactacaacaacttttcaagacatagacaatgcataagat

SEQ ID NO: 759678 - DNA, 604 bp, Homo sapiens
aatggaggagagttctcaaattaaactttttatagcagattgtcagtcatctctgataacgtgttatcacactgaacgctataaaactgcccttgtcattatgtcacaaacattgatatattagaatttttatatggttctactttaaaatatcagaaatttaygttacaaatcccatagtaaagtattcccagaagatgttttaaaaattcaaacacatttcatttaattctagactaatataagattaattccttatattcacatctattaattatattcatgtttcctctctccaacaatcccagagaatacattctcatacttgaaattctccgcttctgaagaagtagatctattataaggcattactactaggagtaaccaggaacatggaatatgaattgtaattacctaaacattcctgggtaaaatatttaaatatgtaatatgggttaattatttaaaaactataaatttcctgagcttaaatgtcagcacacaaggacatcagtcatggtctatcaactgacataatgcaaaagacactagttatagactatgtggacatattaatttcaatatatccccaaaatccaaacaa

SEQ ID NO: 759679 - DNA, 620 bp, Homo sapiens
ttaactttcattttatatttcatgtcatgctatttgaaatatgggtttctctatacttttttatttccattatcaaaattactaataatttttttctaacagagtaatgtgtaaagtgaaatcaattagaaattgattagctttcaagtttatctgctatagatctttgctttttttgctataagtttttctgcagtagctttaaatttatttttgtacataaattatatatatgttgtattcatgttaaaaatatactttatcagcacctactgcatgaatgttatacatgtatttattttattctcccaattggtgcaagtaaatctcgaygagaaggtataaaaaatgtattagaaataattccattcactttaagatcaggtttctataatgctgtttcattatttattattacttttttggaaacttagattccactttcttgcccaggctagtctctctaactcctgggctcaagcagtctttcccccttagcctccccagtagagttccattatttttaatttactttagcttacaaatcatcagtcatttccaaaagattacaatgatgttaacaataatcaatgtgtgcttattttaatatctaaaattaa

SEQ ID NO: 759680 - DNA, 604 bp, Homo sapiens
ctgaatactttttttttttttttaagacatagtctcattctgttgcccaggctggagtgcagtggcgtgatcatggctcactgcaacctccgcctcctgggttcaagcaattttcgtgcttcagcctccggagtagttgagattacaggcgtgtgccaccatgcccagctaattttcatatttttagtgaaggtgggatttcacctctctgagtaattcttatatttacccaagattacttgcaagccaaaatgccatcagggttgatttggttgttttatatctcattataaaattaaaaaaagtaagattcttcagtctcactattgaggacattaacattcttcatgaaacttcataaaaaactctattaaaatatgttagttatatcatattgttatatgtcacatcacatagttgtatatgaagtagaaytagtttttttgaaaagtttatattattcataagacaaatttgtgatttacccaattattccatctattaatattacatagtttcaccataaatcttgacataaagaaatctgtttttgaacaagataagtttcttaaaaatacaatgtctccaagtttcactaaaataa

SEQ ID NO: 759681 - DNA, 608 bp, Homo sapiens
gggttgatttggttgttttatatctcattataaaattaaaaaaagtaagattcttcagtctcactattgaggacattaacattcttcatgaaacttcataaaaaactctattaaaatatgttagttatatcatattgttatatgtcacatcacatagttgtatatgaagtagaactagtttttttgaaaagtttatattattcataagacaaatttrtgatttacccaattattccatctattaatattacatagtttcaccataaatcttgacataaagaaatctgtttttgaacaagataagtttcttaaaaatacaatgtctccaagtttcactaaaataaggacaaactcaatgcatacagtggaatttaattttgaatttgcctatttaaatatccatgcacttatatgaatacttatactttaatatactttgtatatatatttatactttaaatatccatatacttatatgtgaacacatactactacttagtttttgatgacacattatactttcctttttataaattaaataatattaaaattacataagggaaagttgaacatttacatacatatatatttatcattactcaaatacc

SEQ ID NO: 759682 - DNA, 631 bp, Homo sapiens
agtcagagaagctaggaaagcgggtggcacagatcaccatgtttgacgttgatggctctaatccttgctattaggaattcctgctcagataactgctgaagacaaggattaggtttaattagcacttgaggtttagggaaaactaccgcagattgatcacaaaccttgaaaactaaatcctaaaagtatggtattcaaaactagaagttgtgaaattgaccacygtggaaggagaggcctattggtcatattcatacttttctcactgtactctgaaccaaagccatactttcccctaaatctatagtagctccaagacagtcacgcattccctgcatttccccttcctgtcccaatctaaccctttctcgacatctagttttgtcttatcaaacctaatccacttactttcatggggaggatatcagattttaaaagaatcctgctccctttctttttttgttatttaagatgactttctttcttatggcttatagagttttgttctgttggtggctgtttttatttgtttgttttcagcacaaacactcctataactcaaacaaatgtatctcttttagtgggctttcaaaaatagttaataaagaagtgagggaagatattttagaat

SEQ ID NO: 759683 - DNA, 580 bp, Homo sapiens
caaacctagaaacctcctgcatctatgactaagccttcctgttcccacctgttctattacagagactggtcttctttctatctaaattttgcccccaattatattctatcacacccaccctttcaataaccatatacaatcagtcatgctgtctcttctttttatcctaatcctctcaatttctaccaggtatattccatcatttatgtattctcaaatctcagtgatataaataataatgtaatattacaaaacyaaacaaaataaagcaaaaggccaataaacaacaaacataatatctatggactttagtttccagctacactccataacaggctttttattcctagtcatatttccatcatgtaatttttcccactttgtacaaatttcaatcaccctcttctccttccttagataacttgaactggacatttaatcccatatgagcaccaaaaaacgttttatctaaagtcaatgattctatctatgtcaatatattgaatgggcattttcttagacataattgtacttcacctctcagaataattctgtactattgaaaatttccttccaaata

SEQ ID NO: 759684 - DNA, 594 bp, Homo sapiens
ctatttagggaaacatcaaacagccccacaaacacagctcgggggaggaggccactctgttctcctccgcatccccagctggctgaagtggtctgtggagctgcggggcatcttagatgtgcctcctggcatgagcaggtgccatgggctggcttcctcagccaggcaagcctgtcatcctgctcactgcctgtcccctgcatgggtcagaatcagggtgcttgctggagaccccagaagggctgggcacccccagagatactgcaggtgccccatggaggaagaaagcctccaggtcgtgtgaacctgggacctcaatccaggtcttttggcactcagacctcaagcacttttgtttgtgccacatggttcttgagagttaataaataaagggcggggragtgggaaggaatgtcctaaaggcttacttggttaaatctttacctacttccattaccaggctcaactttgaaatttcagaaggaaaggaagagatgaaaagaaaaatgtcacatttcaaatccttcccacagtgactcatttcagaagtggggtttcgtcctttttaaaaacagaatcaataccgtctttcat

SEQ ID NO: 759685 - DNA, 594 bp, Homo sapiens
ctatttagggaaacatcaaacagccccacaaacacagctcgggggaggaggccactctgttctcctccgcatccccagctggctgaagtggtctgtggagctgcggggcatcttagatgtgcctcctggcatgagcaggtgccatgggctggcttcctcagccaggcaagcctgtcatcctgctcactgcctgtcccctgcatgggtcagaatcagggtgcttgctggagaccccagaagggctgggcacccccagagatactgcaggtgccccatggaggaagaaagcctccaggtcgtgtgaacctgggacctcaatccaggtcttttggcactcagacctcaagcacttttgtttgtgccacatggttcttgagagttaataaataaagggcggggaagygggaaggaatgtcctaaaggcttacttggttaaatctttacctacttccattaccaggctcaactttgaaatttcagaaggaaaggaagagatgaaaagaaaaatgtcacatttcaaatccttcccacagtgactcatttcagaagtggggtttcgtcctttttaaaaacagaatcaataccgtctttcat

SEQ ID NO: 759686 - DNA, 588 bp, Homo sapiens
aaaggagctgctgagagtcggggggcactctgagagcccaggtgctccttccagccagaagatggaccaagtaagtaaggacccagcaagctggcacccaaggtcccttttggtttcacagcctccttgaggccagggtggaggtttctccggagcacagggatcacaaagctagtcctgtgtctgaaycacatccctggaaggcacagaggaaacaatgaaatcttcatcaccaaccccctctcctggcctgccagatagatgctccttgttttgtgaacagggagcgaagaggagaggctgtgttttacttggctaggtaataccactcttcttgactgaagaaatatacgctagagggactaaaagtagaaagtagttctcacccaagacagctttattcccagaggcgaggccctacagtaacataaagaagctgtatgtatcctcgatgtgccaatggcccaattatctccctccccaccccacccccaagattttttccacctacacatcacccactcctgcttaagatttagctcaaatgattcctcctccatgacaccttccccatcttcccgggcaaaa

SEQ ID NO: 759687 - DNA, 588 bp, Homo sapiens
aaaggagctgctgagagtcggggggcactctgagagcccaggtgctccttccagccagaagatggaccaagtaagtaaggacccagcaagctggcacccaaggtcccttttggtttcacagcctccttgaggccagggtggaggtttctccggagcacagggatcacaaagctagtcctgtgtctgaatcacatccctggaaggcacagaggaaacaatgaaatcttcatcaccaaccccctctcctggcctgccagatagatgctccttgttttgtgaacagggagsgaagaggagaggctgtgttttacttggctaggtaataccactcttcttgactgaagaaatatacgctagagggactaaaagtagaaagtagttctcacccaagacagctttattcccagaggcgaggccctacagtaacataaagaagctgtatgtatcctcgatgtgccaatggcccaattatctccctccccaccccacccccaagattttttccacctacacatcacccactcctgcttaagatttagctcaaatgattcctcctccatgacaccttccccatcttcccgggcaaaa

SEQ ID NO: 759688 - DNA, 624 bp, Homo sapiens
ttctcatatgacttgcaaataaataattttaaccaaattaaaacttccccattatcttttctaagttgtctcagtgaggttaacccattttttctgaaaatgcacatgttctgggcccataattttatacataaaagtagctggagtcccagaatgtggagtcccaggctctttgaattgagatgaactcattaccaaaaaggtacccacctgaggccctcagcctctaactgaatctaatccggttgattattgaatccaatccaatcccaaayccagcccagtccaaagattgctcaaacaaacttggagagctgagaacacaaattcttggatcttggaatctgagagaaaattcagccacgacctccagttacaaacaagaaatcagtgggcacagctggcttcgcaggtatctggtctggttccctggtgttcctgggggttgctgaagttttactctgtattctcacttctgacaccaaatctgttaaaagaaaaactttagacatattaaatttaacagagtttaattgaaaaaaaaaagaaaagaaaagaaaaaaaacaaccaaaatgatttctgaatttgatagcccccagaatcagaatagattcagagactcc

SEQ ID NO: 759689 - DNA, 624 bp, Homo sapiens
ttctcatatgacttgcaaataaataattttaaccaaattaaaacttccccattatcttttctaagttgtctcagtgaggttaacccattttttctgaaaatgcacatgttctgggcccataattttatacataaaagtagctggagtcccagaatgtggagtcccaggctctttgaattgagatgaactcattaccaaaaaggtacccacctgaggccctcagcctctaactgaatctaatccggttgattattgaatccaatccaatcccaaacccagyccagtccaaagattgctcaaacaaacttggagagctgagaacacaaattcttggatcttggaatctgagagaaaattcagccacgacctccagttacaaacaagaaatcagtgggcacagctggcttcgcaggtatctggtctggttccctggtgttcctgggggttgctgaagttttactctgtattctcacttctgacaccaaatctgttaaaagaaaaactttagacatattaaatttaacagagtttaattgaaaaaaaaaagaaaagaaaagaaaaaaaacaaccaaaatgatttctgaatttgatagcccccagaatcagaatagattcagagactcc

SEQ ID NO: 759690 - DNA, 582 bp, Homo sapiens
aaatgcccaccacaacccttaacatcagtggactctgtgccctctcccttggcccttctttccctcaacagatcacctacttcactcccagccacttagaatcccgtacccatcatttaatcactcctgcccaaaacctraactatcagtctctttagttgtccctttactcttgtttgggaaacctcaacctctgagaaagccagctgcttgttttctctaagtctgctctcagacaactgggcccttagagaaggtggcaccagagagcacagagtccattacttacttgggatcagcatcctcaggggaccttcaacatccatctccagacctactatttctcttatcaccaccctccctgaaaaggctattttaaagctatgacgctcccaccacttcacctactctcctccttcacagataaagagaatggaagttctgagaaaggaaagacaaactttcctccacataaagccatctgctacttctgcccaatggttataacaggacaggttcctccattcctgtccctccacttgggctcaggatcccatccccatcctcccttcttcagggtca

SEQ ID NO: 759691 - DNA, 582 bp, Homo sapiens
aaatgcccaccacaacccttaacatcagtggactctgtgccctctcccttggcccttctttccctcaacagatcacctacttcactcccagccacttagaatcccgtacccatcatttaatcactcctgcccaaaacctaaactatcagtctctttagttgtccctttactcttgtttgggaaacctcaacctctgagaaagccagctgcttgttttctctaagtctgctctcagacaactgggcccttagagaaggtggcaccagagagcacagagtccattacttacttgggatcagcatcctcaggggaccttcaacatccatctccagacctactatttctcttatcaccaccctccctgaaarggctattttaaagctatgacgctcccaccacttcacctactctcctccttcacagataaagagaatggaagttctgagaaaggaaagacaaactttcctccacataaagccatctgctacttctgcccaatggttataacaggacaggttcctccattcctgtccctccacttgggctcaggatcccatccccatcctcccttcttcagggtca

SEQ ID NO: 759692 - DNA, 606 bp, Homo sapiens
aaaggttataaaaaagaaccaatgtacaatatagaactgaaaaaatacaataaccgaaataaaaacctcactggataagctcaatagtagagtgtagatgacagagagcagaaccagtggacatgactacaaataaattaaacttatgaaatctgaaaaacrgagaaaaaatagacaaaagaaaaaaaatagagtctcagggatcagtaggagaataacaaaataacttacattcatatcatcaaagtcccaaagaggggaagagagagaaaatgggactgaacaagtattcaaagaaatcatgcccaaaaaatatccaaattcagcagaagacataaatctatatattcaagaagctgatcaaactccaaataggattaaaccaaataacccacaccaaagatatatcacaattaaacttctaactcctaaaagcaaagagagtatcttcaaaatagagaaataacacattacttataaaggaatactaacagaaataacagatttgaaccatgatatgaaaccataggggacagaagaaagtagaaaaattttaaagactaaaaaggaaaaaaaaaactgtcaactacaagttctaaatgcagt

SEQ ID NO: 759693 - DNA, 611 bp, Homo sapiens
tgtcattggtctgtgtgtctgtttttatgctagttccatgctgttttggttatcaaaactttgtagtgcatttttaagtctggtagtctgatgccaccagcttttgttctttttttttttttttcccccaaaattgatttggctctttggggtttttaaaaaaaaatttaraattttttttctgtttctgtgaagaatgtcattggtaatttgataagaattgcatttaatctgtagatcactttaggtagtatagatgtcttaacaatatcaatttttctaatccatgaacatggagtatctttccatttacttgtgtcctgtttaatttcttcatcactgttacatagtttttcttgtagagggctttcacctccttgactaaacatattaagagaattttttttataacttataaatggtattgctttcttgatttttttcagatagtttgctattgatatatagaaatgctttactgaattcacttaatatttgtaagagttttttggtggagcctttaggattttctatagcttcaagattatgccattcgcaagcaggaacaattggagtccctttttttttcttatttttttttccagtttgga

SEQ ID NO: 759694 - DNA, 633 bp, Homo sapiens
acacaccacacggaagcactaggctacagtggttgaaatctggtttttcacctagtatcagttccaggttttcactaggagagcacctcttagaggctctacccaaagatcaaagcaaagtgacacactgtcccagatcacaaaatccccctgtgtggtttcatttattggctgatgaactacagtaaccttccctttggggtcataaatcctaaycaaaaagaaaactctcatctttggcaaatcagacatttataatcatccatgtatgaggcaacaccctttcccaaagaacagctttaattctacttggaaacaataaaaaacactagcattatgatgcacaaagtactgtgatagaagctgaagtaaaaatgagagcaataaaataataattcaaatacaaagcccctaccctcaaggaacataataaacggaaaaggcatgcatacaaatgtgcatctgaagtgctcaagctcttattacaaagtctgcacagagtagctggggcataggaggaggagtgatggatccacaggaggatgaaagctcaggaggggctccacagagacaagtggcaggaaatgaatcctgaaagataagtgtttttctttatgcatgtgttagggattg

SEQ ID NO: 759695 - DNA, 483 bp, Homo sapiens
tcacctggctgttgtcaggaagtttccatttcttgctatttgggcctttccttaggactgctcacaacgtggctgctcacagactgagtgatgagagagagagagagagagaccgagagagagagcagaagcaacactatatttatgacatagtctttaagttgtataccaacccttctgccttattcttttcattagaagcaagtcactaagctcagcccacatttaagaggggattacacaaargactgaattctaagaggtggggcgcatcggggtctatcgcggaggctaactataacaatctagtctctggcccttcattgattcatgttcttcccacatgcaaaaagtactcgccacctcccaagaccctcaaaaatctcagcccattataatatcagcccgaagtccagaatctcataaccaaaatgaggtccagctgtagatatagcccttacataaagttcttcttaatcatta

SEQ ID NO: 759696 - DNA, 483 bp, Homo sapiens
tcacctggctgttgtcaggaagtttccatttcttgctatttgggcctttccttaggactgctcacaacgtggctgctcacagactgagtgatgagagagagagagagagagaccgagagagagagcagaagcaacactatatttatgacatagtctttaagttgtataccaacccttctgccttattcttttcattagaagcaagtcactaagctcagcccacatttaagaggggattacacaaaggactgaattctaagaggtggggcgcatcggrgtctatcgcggaggctaactataacaatctagtctctggcccttcattgattcatgttcttcccacatgcaaaaagtactcgccacctcccaagaccctcaaaaatctcagcccattataatatcagcccgaagtccagaatctcataaccaaaatgaggtccagctgtagatatagcccttacataaagttcttcttaatcatta

SEQ ID NO: 759697 - DNA, 583 bp, Homo sapiens
gattgacacgttaaatgcggcctcctgtgccgccctggggcgccactctcactgggttcttggcggtgctcaccctactccacctgctcagcccaggctcctgcgcccctgaagtcacgccatgggagcgaggagcttgccgaggccctagacaaggacaatgaggagggggtgcacgtggagtccccgcggataggctggacgctgggcaggagcctttgcgggggtgcacagcctcctctggaagccctggtcgctgcccggtgcctgctgcgccctgcgagctccgcggcggtggagccaggcctgggctgcctgctctcggccctgcctgcggaccctctgccttttgtcttgcccgtggggmccggggcctcagctggcccgggattcctgaagttagctgatgatgggctggcctctgggactgggtcgtgggccttgtgcactggccgccacgtcaccagcgcctacccggggtgctgctggagatgcgggatgcccgggctcgggctctgctgggtcccctggcgttgcgaaccccgtcaccttccatcgcggccaccatgctgcccgctggtca

SEQ ID NO: 759698 - DNA, 529 bp, Homo sapiens
gaaccagttttgaaatactctttttgtaggatctgcaaatggacatttcaagcgccttgaggcctatggtggaaaaggaaatatcttcacataaaaactagacagaagaattctgagaaacttctttgtgatgtgtgcattcatctcacagagttgaaactttcttttgatggaccagtttttaaataccctttttggagaatctgctagtgggcattttgagcaccttgaggcctatggtggaaaatgaaatatcatcacgtaaaaactagacagaagaattctgagaaagatctttgtgatgtgtgcgtttatctcacagtgttgaacctttctttttattgagcagtttgaaaacactcttttgtagaatctgcaartggagatttggagcgctttggggccaatggtagaaaaggaaatatcttcacataaaaactagacagaggaattctgctaaacttctttgtgatgcgtgccttcgtctcagagagttcaacctttcttttgacagagcagtttggaaatg

SEQ ID NO: 759699 - DNA, 660 bp, Homo sapiens
ggcagggagaatcctgttgcagccgcggcgatggcaggatgcaggttccagtagggggcggcaggggagagagggccgcggtggtcccagggccaaatcccgaggagtcctgtcttaaagacttccttgagctgacttccaccggtggagggagagcttcagggcacctgctggcatctsaagacccctcttaagatctgattttggacccctccgggtgaagaaggatggactcaccacatctgctgagaaaggaagggcctcattgcagggcagaatgatcacatgggcctcaaggtgtggtgtcagcagaaaaatcactgacccatgagccctctgcctccctcctcctttgaaagagcagtcgcctgccccacttgtaaaagctctggggcgcttgcaagctgatacctctttccagggcacatgcaaacagggacaagggcaattccaaagtggagtcaattccaacatgcgtggcactggcgtatcccagagcagatggtgtgaatgtgtgtcactgaaggcatatggggtgatggcgaaacacaagatggtgttcaggcatgtgccaggtggaaggggggcacaagtgacctttgcatcaatgccaaggaatattgaagaacacctggatccaggaggccaaaagattcaggg

SEQ ID NO: 759700 - DNA, 549 bp, Homo sapiens
attaggaccaatcaaaggaagagacatatcacataaagtggaatctaggaggattttgaatgttaagtttccattgtcttcaggacatattacctgtcattattgtacaggaataaacatggagtactaccaacctggggagctcacctgatgctaaaaagacactattttgaaaatgaaaaggcaaaggaaaggatgagataagatgaccttccacattaaggcactggaaaaaaaatagcaaactaaacctaaagccagcagaaggaagaaaataaaaattagagaaaataataatttataatattaatcatatttgttagtattgactaattgatattaaytcttgactaactttttaaaaaaaagagaaatattcacttcccaatttattctgtggggccagtgttaccttgatacaaaagttagtgcaaatagcatagaaaaataaaactactataagtataaatgcaaaattccttaaaaaatactaacaaatcaaatctagcaacatataaaagaattatacactataacaaagtgaaattt

SEQ ID NO: 759701 - DNA, 603 bp, Homo sapiens
atttaaaagtaatgagtttgtctgtgactttaacaagaatagtttcagcagagtagcatggccagaagtcagatttcagaagtttgcatactcaactagaggatacaagtagagaaagcgcttgtagatgactctttatgaaatttgattataaaatagaagagaraataaggggaacagctagaggaggatgtagatttggttatttgttttattacaaggaagaaaaatgtttaaatgttgttgtaggtggtggccatctaggacacaggctagaaagtgtgtatattagggagggtggtcccagagaaggctgtatgtgttaggcaaacagaaatatagaagcaaggtgggaaacttttacatggtgtattagttcattttcacactgctataatgaagtatacgagactgggtaatttatcaagaaaagagatttaattgactcacagttcaacatggttggggggtctcaggaaacctacaatcatcatggaaggtgaagggaaagtaaggcatgtctttcatggtggcaagagagagaaagcatgcaagggaaactgacacttttaaaccatcagatcttgtgagaacttcctcact

SEQ ID NO: 759702 - DNA, 613 bp, Homo sapiens
agactggggataagcccttttaatattttttcttcccttactgttctgtatagtttgaatttttataataaattaacatatattatttaaatgactatttatgtaaaacatcaaaataagaactaaaaacttactctatgtgtccgttaaatagtacctacttaaaattgtcagcctgatacatgagaatgtgagggctgatcttggccaatgtatattctgctaattgatttgcttcaatagataggcctccaaaaaaaatgtatttatttatttagagacagagtctcactcagttacccaggctggagtgcaatggtgcaatctcagctcactgcaacttctgcttctcgaattcgagtgattctcctgtctcagcctctggaatagytgggattacaggcacatgctaccacaacaggctaatttttgtatttttagtagagatggggtttcaccatgttgggcagcctggtcttgaactcctgacctcaagtgatacacctgccttggcctcccaaagtactgggattacaggcatgagccaccatgcccggccaaattttttttatttaaaatgagtaatagaaattatatatcagttttctgcagg

SEQ ID NO: 759703 - DNA, 589 bp, Homo sapiens
acatttaatgtttagtattctaaatgtgctttctcaaaattaatagagtaaagcaatccatctctaacgattgactttgaggctggtaaattcctgttaatgtttcaggtcttttaagttttcaaactagttgaaaacttttgttagtatcattcagtatttaatatttgcaattattaaataattattcacttcaaataatgaaataaatgaagctttttgaatatcccttatttgaaactccacaggtgaaaattatagcaattattctgttcctcaaattcctaagacttttttttagccagagatagtatggtctgaaaatgatttggacattttccttttccattgtcacaccttagaactgccattgcatttctgtaagaacattaactcttgctgttttttttttttttttctcagcaaccatttcttggctacttctttaraatatatttttatataaatagaacatggcaaaacatttttaaaactaatacagtatattctatttaaggtaaaggaaagttttgtatgtgtatcatcacctcctttccttcttcctgtgtatctttgactgcattttgca

SEQ ID NO: 759704 - DNA, 615 bp, Homo sapiens
aaaggtactaaaatatttgttgaatatatgtgactattgtttttattacataaatatggttcattggtagaaaacagcactaatattttatagttaggatccattaccttaaaatagacattttatctagttgacrtcctagcaaattacctaatctttaagtacttaaaatgtatattttaaattactaaatcttgctttattttccctttaagagcaaactactagctacaatcttttctgaaagcttttcctactgtatcttttggaatagagtaaccttttgcacaaatcccagctcagcacttggataatttgaatgacgatttctctatttcaatatatgaaatcagaggagtttaaggtgaaaattcactaagtatatataggcattcctcaacttgcaaaatattttcatgaacaccttaattttataaatgatgtgttgcaagcttttattcagactacttaaatataaaacacttattgctcagactgggcgtcaatattgttctctaaggggggaaatagcagcagtttttgattgcaagaaaattatagtctttcctgtactgtaaatatcaaagacatcataaggcaggtagaaagttgtaa

SEQ ID NO: 759705 - DNA, 637 bp, Homo sapiens
ccctattctcaatttttctgttttggcttttatactttccttcatggaccaacacccgctgtatgattagagctgaactttttcaaaagactagtttcacaaaagcatagaaagcttccactgtctcagatgcttttccctttaggtccctcctactggtgatatgtatacacacatatgatatatttttcctctatatagatcatatattattttcctgtatatatatacacacacacatatcagatatattttcctgtatatttatatatcatatattcttttcatctctatatatatctatatccatatccatagatatagatatagacagatatattctttcctctctctatacattttagtcaagataaacagaaacagttcttctgccagaaaaacagcctttcctcatagatagataaatatagatatagatatgsatagatatacatatagatagatatagatatagatcaccaataggagagacctaaggggaaatttatacacacacacacacacacacacacatatatatatatacacacacacatatatatggggaaattatatatatatataatataaagacatatatatatgtctttattatgcctgttttcctttttttctc

SEQ ID NO: 759706 - DNA, 615 bp, Homo sapiens
cagttaaaaaccctacacattatatgtaaacaaacgtaagaagatcctcaaaggtagagagaagaaggcgaccaattaaggaccctgggacccaagaaacaacacagtagtaagtccctaagttttgtttttggctcgtatatcattgacttagagctgaaaaaaaaaaaaaaactggtaagccaaaaatgccaatgggcatagacaaaaaatacatatatatatatatatatatttttccaatatatatatggagattggatatattatatatatccaatcaaaatccttctttgtctagcccaaggactgtgaaagaaatagtctagaaagatataaaactttaaacaataatggttttactccagacaaacacatagaaaaaaaaaaaaaactgtggcccgaccctactcacagtagcaaaggttgagtgggragcctagacttccattttcaactggcttgatgaggcagcccaaagccttcctccctgaaggtggtatcagaaagactaagtagaaagctagcactttcatccctacccagcagtaatgaggagaccctactcctcactgctggagtggtgccagaggaagcctcacacagtcaggactt

SEQ ID NO: 759707 - DNA, 529 bp, Homo sapiens
aacacccataaataacaagcactttttctctccaccctacccacctagagtcagatgttagtggaggctgtgcagtgagcagtaatgaggagtattcccacacatgtcagctgtcactgaagattcagtaaggagcctggacttgtacrtaactgcctcccacatcttgcagtattgaggcagagtgccttttcttcccctggtgaagtattgtcagaaaaagccaatgaaaagaagtttaaataagactcgaaatcttataacataataccccaaatatttagcttttaatcaaaaatcatttgtcataacaaaaagagtatactgagtgggaaaggaagtgaatactgagaaaatagagatgttagaattctctgaagaagattttaagacaacaataaaggaaatatttcaacaaacattataaacaagcttgaaataaattttgaaaagaggaagtttcagcaaagtgatagaatacagatactcctctactcatagtgggattacattcctaatagcccattgc

SEQ ID NO: 759708 - DNA, 596 bp, Homo sapiens
atgatacagtcactttggaaaacagtttggcaattacataagaaaaaaataagcttgtcattaccataccatacaacaattgcaccccctaagtgtttattccagaggaatgaaaactaatgttggcacaaaaagcctgtacatgaatttttatagcaactttattataatagctgaaaactagaaaaaaactcggattccttcagtgggtgaatggttaaacaaaccatggtacacccataccaggaaaaattactcagcaataaaaagtaatggactatcaatacaaagaaccacctgacaaacctscagaaaatcatgctaagtaaaaaaatatatatagcagaaggttacatactacataatttcattaataaaacactttttgacatgacaaagttatacaaataaataacaaattcatgtttgcaaggggataagaaggtggtgatggtgagagtaaagtgggtttggtgatacaaggagaacatgaaagatccttgtgatggaaatgctttgtgtgttgactgtactgatagcaatatcttggttgtgatattatactatagtgttacaagatgttatcgttgggggaa

SEQ ID NO: 759709 - DNA, 607 bp, Homo sapiens
tgaactaaaatacaatgaaatatgaaatatcaaacttgagggattcaacaaaggctaaccttgggcttttatatcttatatatatgcatttttttaagactcaacatctgtaatccaggaatctagatcaagaatttagaaaaagtttaggaagaaagagagaaagtatgagagataaggagagacccaaaagccaaaataaaamaaaaaaaaaggaagtattggatgcaggcactaatgaaatagaaaaaaaatacaaataggtattcaacaaaacaaaaaataattgttaagagagaataataatgtaaatactcatggcaagcatcagcgtaaattactaatatccatgatatcagatcctacagatattataattatgtttaagaatcttataaatgatattttgcgagttacttttaagatttacctgagaggccaggcgcagtggctcatgctgtaatcccagaactttggaaagccaagatgggtagatcacttgaggtcaagagttcgagaccagcctggcccacatggtgaaacactgtgtcttctaaaaatacaaaaattaaccaggcatggtggcagatgcttgtaatcccagctg

SEQ ID NO: 759710 - DNA, 621 bp, Homo sapiens
agtgttgcaataaaggaatcaggaagtcgaggggcactaaagtggaagagattcattccaaatacatgggttaaagaaaatctcatggaatagatggcacctgagttaacttcttaacatttgaaatggattttgacaggtagaaataatacaactggtatttttaacggattcttcagttgttaagaagtccagtcgatagtcttcaaaatacagcctgaggtgtgcagaatatgtgttgccttcttcatttcacgaccagaggaactgmgggtcagagagtttcacggtgttaactgacttgcaaggacctcagagatattgaaggagcatagatgggcatctcagacaaaggagtactggggagaaagacgctgttgcaaaaagtgcaggacttctttagggaatgacaagttatgtggtttcaattcatgaaacaactggtgaatttaagatctggaaaataagtcacaaaaaataacttgaaaaagctcctgatgtatctaaacagcttaggttttgtgcctgaaaaattaaaagagatgacatggcagtgaaccaaggtagtgcacacagggaagaaacagctcaggcctgctatgtgtggattacactcaacaa

SEQ ID NO: 759711 - DNA, 561 bp, Homo sapiens
gataccaagtgggagaattggaccagaactgtgctaaggaagcgctggggacccgcctgcgagccgccatctggaaaaggtggtcggtgtgggctttggggtaatggccagatctgagaggaggccaggaggggactgaggagcacagctctgatattttacagtgacccccatcaggatgtggagtccatttccccactcccgaaatctgggccagcttcatgcctcgctttcattgacagaatgtggtccttgtarcttctacattcaccctctaagatcagggccccaacaccatggtggcccaccatgctaccaaggaggagaaaccacgtggagaaagagatcctgcacccagctgtccccaccaagcccagcccaagccgactgccagatgggcacaacttcatggccagcccaggagagaccagggggaataataatcccggttgtttaagccaccgagtgctgatttggtttcctaagcagcagtaggtagctgagcagagtagctatctgtggcccggccggcacgctcctgcaggcaggacctcactgtgc

SEQ ID NO: 759712 - DNA, 568 bp, Homo sapiens
cctggatgccagctgaggtgttctgtggctgcgtgactctctcatagctcctagtttcccctgcctgccccctgcaccggtgtcctcagcccaggtccagcgaggccacacccatcgtccatctccagcttcctcgggagtgggggacccattttctccccaagccagkacccgttacggagagtgtgagcaaacaggttgctatggaaaccaagccagtcacggtttgagagacttttgcatcttttttccgcctttccccttacactttgaacttattagtcttaattgacataatttttgcgaggttgtcaactcaaggcacaaggagccagctgtgcctctcgctgcccagcaccagcactgacccttggggatgctccctgctgcctctctccctcccatctgccaccaccctgcctttccctgctactgactagcaaatcctgaggccacactcggtcccctcatgtcgggaagaacctgtcctaaagcaggagggggcctcccaggccagggtgggggcacgggctgcgtgcaggaccgcgtgcatctgtgggaagcaggt

SEQ ID NO: 759713 - DNA, 486 bp, Homo sapiens
tccccagaaaattcccatgtggcctttccttcccttatcatgcctaataaccattaatttgatttctattactctagatcaattttacctgctctagaactttatataaataatcatgttatgtactcctttgtatctggtttcttttgctcagcataatagctgtgagattcatctatgttayttcatatatcagtaacttttttttggccaagagtatttcattgtatgaatatatcacaatttggttatcactttacctgttgaagaacatttgggtaatttgcaaattagagtaattataaatgaagctgtcacaaacattgaagtacagccctttcatggacagacagatgttttcatttctcttcttgtgtgtaaatacctaggaagctgaattgctggctcatagggttgatgtatgttaccttttcaagaaactgccaaatggttttctggaggggttgccccatttcatattcacac

SEQ ID NO: 759714 - DNA, 581 bp, Homo sapiens
tataaacatatgtgtacaagtttttctgtggacatgagtttacatttctcctggatgtatatctaggcattgaatagctggatcatatggtaatctagctcaactcttttaggaactgccaaacttattatccatacttattatcccaccagcagtgtatgagggtctctgtttctctacatcaatgtcagtaattgttagttttsgttttttcgtttgtttattaaagctattctaatggttatgaagtggtattattgtagtattgatttgcatttctttaatgaccacgatgttgaacgtctttttatgggcttggtcatttatatatctttttttgagaaatatctgttcacgtcctttgctcatttaaaaaattaggttgtctttttgttgttgagttttttatgtgttctggatattaatatatttcaaatatattcaataatacctgttgataaacaaaggatttttattttgataaagttcaatttctgttttttgtttgtttgttttgttttttgctgttcgtgcttttgatgtcaaagaatccattgccaaatcaagagtcatgaggatcc

SEQ ID NO: 759715 - DNA, 607 bp, Homo sapiens
gtattattgtagtattgatttgcatttctttaatgaccacgatgttgaacgtctttttatgggcttggtcatttatatatctttttttgagaaatatctgttcacgtcctttgctcatttaaaaaattaggttgtctttttgttgttgagttttttatgtgttctggatattaatatatttcaaatatrttcaataatacctgttgataaacaaaggatttttattttgataaagttcaatttctgttttttgtttgtttgttttgttttttgctgttcgtgcttttgatgtcaaagaatccattgccaaatcaagagtcatgaggatccaacccatgccttctgagagctttacaaatttagcttttatattcagattgttggtccattttgatttagtttctgtacctggtgtgagacaggcttccaacttcattcttttgcacgtggttatccagttgtcccagtaccatttgttgagaagactgttcttttccccattgaatggtcttggcactttgttggaaatgaattggccatagacgattgggcttatttctggactcttaaatctattccattgatctgtatgtctaccctgcttcta

SEQ ID NO: 759716 - DNA, 593 bp, Homo sapiens
attgctagatcacatgatagttttattttgagttttttgaggaacctccatactgttctccatagtgcctgtaataatttacattctcaccaacagtgtatgagagttcccttttctctacatcttcaccagcatttgttattgcctgttgtttggataaaakccaattaactggggtgagatgacatctcattgtagttttgattttcatttctctgatgatcaatgacgtttagaccttttttttttttttttttttttggttgagacgtaatctcgctctgttgcccagactggagtggagtggcaagatcccagctcactgcaacctccatctccctggctgaagcaattctcctgcctcagtctcccttgtagctgggattataggcatgtgccatcacacttggctaattttgtatttttagtagagatggggtttagccatgttgtccaggctggtcttgaactcctgatctcaggtgatctgcccacctcggcctcccaaagtgctgagattacaggtgtgagccactgtttccagcctttgggcacctttttatatgcctgtttgccatttgtatgtcttcttt

SEQ ID NO: 759717 - DNA, 400 bp, Homo sapiens
tgaggtcaggagttcgagaccagcctggacaacatggtgaaaccctttctctactaaaatacaaaaattagccaggtgtggtagcaggcgcctgtaatcccagctactcaggaggctgaggcaggagactcacttgaaccyggaaggtggaggttgcaatgagctgagattgcaccactgtactccagcctgggcaacagagtgagactccatctcaaaaaataaaaaataaagtaacccagatttcactgggttttgtcatccgtttttactgcaggacgcttaaaatgcctgcaaagtctcttaagggggcatttgtacttaggaacaggtcctattagctacctcattccctctctgatttggcaagccatctgctgtggctactgatgagcctcct

SEQ ID NO: 759718 - DNA, 400 bp, Homo sapiens
tgaggtcaggagttcgagaccagcctggacaacatggtgaaaccctttctctactaaaatacaaaaattagccaggtgtggtagcaggcgcctgtaatcccagctactcaggaggctgaggcaggagactcacttgaacctggaaggtggaggttgcaatgagctgagattgcaccactgtactccagcctgggcaacagagtgagactccatctcaaaaaataaaaaataaagtaacccagatttcactgggttttgtcatccstttttactgcaggacgcttaaaatgcctgcaaagtctcttaagggggcatttgtacttaggaacaggtcctattagctacctcattccctctctgatttggcaagccatctgctgtggctactgatgagcctcct

SEQ ID NO: 759719 - DNA, 614 bp, Homo sapiens
gggatggacttgtgatggttaatactgagtgtcaacttgattggattgaaggatgcaaagtattgttcctgggtgtgtctgtgagagtgtcgccaaaggagattaacatttgaatcagtgggctggggaaggcagacccacccttaatstggtaggcaccatctaataagctgccagcaaacatacagcagacagaaaaacgtgaaaagacgagactggcctagccttccagcctacatcattctcctgtgctggatgtttcctgtcctcaaacatcggactccaagttcttcagttttgagactcgaattggctctccttgctcctcaagcttgcagacagcctgttgttggaccatgtgattgtgtaagttaatacttaataaatatatatatatacactattagttctgtccctctagggaaccctgactaatacatacacctataaaatgaggctgcagcagtagatggagccaggctttacaaggcattgaggactatgcaaacaatttgggtctttatgctaagagccatgcttaagagaggaggtggaaaagatgaaaagaaaaaatatgatcagatttgcattgtgaaaatatcactgtggatgat

SEQ ID NO: 759720 - DNA, 635 bp, Homo sapiens
ggtattcaccaaaatattctttcaactttgtgtatgtgtgaacattttcatggatcaatagctacatatggtgaatccctgcatattagacagcacagctcaacaacatgctctgcagtgccacagtgcaccctcagcctcagacaggccttcatgcmcttgaccacctaaggtttgcacttcctttgagacaccattcgaaaaccagatcttttctgatgccccaccccaacacagatatgatcagggcctttttcttctgtgctgtgccttgtatactccacctttgtagtttttatcatgtcgtgttgagggtgttagtttatacagcttagattcctactaaactgtaagcttcctgaggacaggggctgtgatttcatccctgcattcttaggtctcaaatcagatctcaactcaattataatctccattgagaggccttcccttcctgtcccaagctaagtgagttgcccattatacatgttcataatatcctgtacttctccaaatcataacatgccttatactttatgataatcattggtttaactctctttcttccctgctagactataagctccatgagggcatggaccattcctgccattcatccatagtgtcccaacatgaag

SEQ ID NO: 759721 - DNA, 644 bp, Homo sapiens
tggaggtcttgattggctctttctaactggtaggaagggtcttggtttgggagacttctcctcaatcaggaaaatttccaggaggtttctcagacagaaaataggaggatagtttggaaaggatactcttggagttcttggttaggggtctgatttggaaggccttctgtccatctcatctttgtgtgtgtttgtatatgtggaagggatctcagaggggttgttgatggaagtccagcaggcctaactcagagaacccttcttatttktctggtcacattagatgaaccctaaagaaggctcaagaagcctatctcttggggtgactatctgctcttccccttgcccagagaccgcattgtgaattactgttcagaagtcgtccatccccacctggagtggatcaaaggcaacagggaccaacgggaaaaagtttgagctttgccaggttgatattggatgctgaatgaggtgactaatgcttgttttgttgtgtgtattttgctgggatggaaaatgttaattcagttccccatgcagcctattgggcagcatcttgcacattaagaatcttacctatggttccataaaacagtaaagggtgattttcacttgtaaagtgacttgaaccccacagctatagc

SEQ ID NO: 759722 - DNA, 575 bp, Homo sapiens
tattacaaacgtatttcagaaaaatatgcctactaaaatatgattacttttgacaacaggctgctgcaaaaagggtgatgaggaatattatacccacttcttcaattatacctctggttatgttgaaaaatgtcatagtagctcttaggagttttgccatgcctatgggtttatggcatgatttgcctttcatgttatattgacttccaactttaaaattatattttatgatagcgaatcaaatgcaaatcctaggaaaatttcttttaagagatgggatctggttccactgtgtgtgccaccatgccaggctaattttttattgatcataaawaaatatatatttttttcttttctttctttttttttttttaagacattgtctcactctgttgttcaggctggagtgcagtggcacaatctgggctcactgcaacctccacctcccaggttcaagcgattctcctgcctcagcctcctgagtagctgggattacaggcatgtgccaccatgcctggctcattttttcatttttagtagtgacagtttcaccatgctggccaggctggtcttga

SEQ ID NO: 759723 - DNA, 616 bp, Homo sapiens
gttacatcttcaaaggtcactggttcctaaaaatccagattcttgttcagccacaggccatccgcatccacgacaaaagaaagacaggggaggctgaccaggccagtgaaagcacagaatggtctacaagatgacccaagggcattttgggagtctcatcctgagttcctgtctttgtctgaaaccccaagcaaacccaagcttgactctattcaggttacaataaggagagcaacacatgagatctctgtagcatatgaaaatctgtccattttatttatttatttatttatttaatttatttatytattgttttgagacagagtctcactctgtctcctagtggagtgcagtggcgcaatcttggctcactgcagcctccacctcccaggttcaagcgattctcccgcctcagcctcctgagtagctgggattacaggcgcataccaccatgcccggctaatttttgtatttttagtagagatggggtttcaccatgttggtcaggctggtctcgaactcctgaccttgtgatctgcctgcctcggcctcccaaagtgctgggattacacatgtgagccaccgcacccggccctatttttcttttctttttttt

SEQ ID NO: 759724 - DNA, 550 bp, Homo sapiens
ttcctctgaatatctgtcttttctgctgtcttagataccttctctcatgatggagactttatcttttgctccttgcctcccacccatattgaagagactatcagaaagcagacaggaagctccacagacaggcggggctgctttaacagtacgctttgctcgagggtgaagagggcgagaaccagctatcaggtaaaaagttctgaaatgccagaataaagcagcccttgctgcagagcaaaatacatcagattcccttgtcccctgaactaatcttttagcacatgactccttccctactttaatttttgctaacccacagccagataggtaatgccaggcaagaaaaaaaaatgsggaagagtctgagtttcatggacagaccttcgattaacccactttctggtctatcagtctatggctctgctggggctgccacatctgctgccacagcctctcctcgcctgaccctctccagccttcctcattctgtatgtttcgctattggctatacttccatcttttttttttttttttttttttttgagac

SEQ ID NO: 759725 - DNA, 637 bp, Homo sapiens
tgttcttgatcatgtttatagtctgtttatctggagaatgccttggtttaagatatacacagtataaatgctttgggaagcagaaatagatttcactttattattcctttcaccagtagaacctcatctgtttgtgatgatttaatcagtaacagtgaactgtttgaagataacctcctacataaatcaaaaacttccaatatgcatttgcttgagacttttctagtgacctctgatcagatatgtatctctctttctctctctctctccatatatatatatgccacacacttttatatctgtttaatatatatatatccacttatatgtgcatagtgaattatcacagcatcagaacagattgttttataagtttgatgatcaccagcatttagttgattcacatgcactccatagtttgaaaattcattttctttaaatgtagaggtttgattttttttctttagatgagagtttatttaaaagccagayatcctcacttttctctgtctcttccttccttctttctgcctatttcagtttggtttctttggtctcaagcaaggtacaaaaacttagattaattaagaaaaaacataatgtaagaaaagttatgttgaatagatttgggttcgtt

SEQ ID NO: 759726 - DNA, 628 bp, Homo sapiens
ctcactaacaaatttgatttttggtaggacacataagcagttgtgagatacacgcatattcaatttttccagcatgttctgtttccatgctctccaatctatattcttattattatttgattttgcctgtaagtcaatgcaagggagacagtggctggccatgtggattttaagcccctcagtccagtgagtgttgcttcttgttatgggccattttcttgcctctctgcctgtaggcattgtgtatataaatttagtcaatgtgagtcatccacacaaagggtacttttttactcagtattctaacataagtcatatttctgaatttccaggacccagggctcaactctgaaacatggccctgactggttaatatatcaggactactagagcttaactattcaaagtgtgtccttgggccagcagcatcagcatcacttgggaacttaacacacattagaattgcagaatttcatgctccrctccagacctactgaatcagaatctgtgtttcactaagatccctaggtgattcatacacacttgaatgtgggaaaattgctctactagaacataaggactgtccacatgatcccaagtaatcccatatatgggtgagcttctgcct

SEQ ID NO: 759727 - DNA, 626 bp, Homo sapiens
ttcaatgtggagtttggatggaaatgaggtggtcacaggagatagaaagagaacttttaacaaacaagtaacttttgagagtggtaagcactataaaggaaaaaacgtaggacactgagatagactaactgacccaaggtcaccagtatttgyaaggaagaaggacagaagtgaaggagtcctattacatactccctcacacagagggagagcaacttgatttaccaagggactcagaattcaagggaaaacctgagtttggggcatgtgcaaattttcttctggaagagaagaatgtggaaagggaagaccctgaaaaactatgcagagaagacacaagtttagtttttcgaaaggcagacaaatgtactctgagggcagtgacctttgactggtgctgtcctaaattgtcttctgatatttttatgagttataaacttttagatgcgtaaaaagcttagtatgtgaagaacaaataactataattcaccaccgaaggaagcagtgggcctatagataggcatttacatatgttctggcattggcaaagtaattcagcagccgccagtgggcttcagtctagttctgaaccagggggggaatgtgcccccaggagacatttggca

SEQ ID NO: 759728 - DNA, 616 bp, Homo sapiens
ggcatggtcactctgaccctcagttttcttatctgtcaaaataaggcaggtgtaaatgtagtgtaaacacacataacaagcagccagccatgtaagacacagaatagatcctcaagtcttctctctcacaactgtcacccccaccctggtggctcaaacagcattattaagtcactctacsctcatttctaattttgaatcaataaaaaataatttttttaaatttttcctcatgtagatatcagtctcaactgctcaatcactttttttagtgggagttggattataagaattgaaatcagaaagaaagtgtagacattattttccaacattatatttttcagtggtttttaaatttttaacctaagttcttcggaaggaagagaaacctgaatacagagaggagatcagcacataaaagtgagacttcagaatcagtaaaataatcctgtttggaagaggttttttttgttgttgctgttttagtgtttgtttttgtttttcccctaagggtttattctcctatttgagaaatcaatgggctagctaatcaaaaatgaaagacaagaagatttaaatggttataatgagtcctgtgagcttggctgtggatcat

SEQ ID NO: 759729 - DNA, 616 bp, Homo sapiens
ggcatggtcactctgaccctcagttttcttatctgtcaaaataaggcaggtgtaaatgtagtgtaaacacacataacaagcagccagccatgtaagacacagaatagatcctcaagtcttctctctcacaactgtcacccccaccctggtggctcaaacagcattattaagtcactctacgctcatttctaattttgaatcaataaaaaataattttttwaaatttttcctcatgtagatatcagtctcaactgctcaatcactttttttagtgggagttggattataagaattgaaatcagaaagaaagtgtagacattattttccaacattatatttttcagtggtttttaaatttttaacctaagttcttcggaaggaagagaaacctgaatacagagaggagatcagcacataaaagtgagacttcagaatcagtaaaataatcctgtttggaagaggttttttttgttgttgctgttttagtgtttgtttttgtttttcccctaagggtttattctcctatttgagaaatcaatgggctagctaatcaaaaatgaaagacaagaagatttaaatggttataatgagtcctgtgagcttggctgtggatcat

SEQ ID NO: 759730 - DNA, 619 bp, Homo sapiens
ctaacagagaagtattaacgtggtaatatggttttgttaaggaaagtggtgaagtacggaaaagaagggagttgggttgcctagaatctgtgattctagcattgagaatgttctgatgggctgactcgggtcattcagtgttaggagaaagtctagctctmtaatagccactgctgttgttctgataaagagtcttgtatctaggctccttcaggtactatattctaactactacatgctacagataatacataaggtatacttcattctatttcctatttttcacaatggccctcttagtaagagataaccatctctattttataagtaaagataatatggaggcttagaaaagttaattaactttcccaatgttacacaggtggagattgggataaaaattaaatttccatctgtctgactccaaatgccgtactttcactggtgaaaagaggatgtcattaattaatgacagtttcctttgctgtcttccaagcaagctgccacctttctcagttcagtctatcaaaggaagccctccagtctggctgctgaaaatattgaccacaagctttctccaaacaaatgaatactttaacatgttggtttccttctcctt

SEQ ID NO: 759731 - DNA, 655 bp, Homo sapiens
ggatacttcccagaggagatggccaataagctggggttgaaggatgaggaggaatgtgcaagataagcaataaaatagtctagatttgccttatttggttgaatcttttgcttttgtacatccatctgtgagccctgtcacttcattaatgatttttaaatgaagatggctcaagttcaacagactccttaacatgtctatatcctagagtattaggaccacggcatttttgtgaggagagtacagggtgcatagaggatgtttgctgcaggtatgtgtgtgcgtgtgctctgttaccaggactctgctcccacttcttgtgataaaaaggccttgattttgttaggtgttctgattccctattactctcctttcgagtgttttagggaaagctaatgctatgcctgagccagtgaatcgggaacaacaaccaggcactcctattgtttttgccrcagtggttggttcacagatgggcaaatcatcacatccgagtcaatggtatccactaaaattagtgctgaggctccttggaaataaactcctgttctgatcttgaaacctgggaaaagagaggtaaggtcttgaatggctactttcatctggcagagattaaaatcttaccaatcaaaggcagagctaagggatagaggaa

SEQ ID NO: 759732 - DNA, 611 bp, Homo sapiens
ttacaaggaatgtattagggggaggcgtgcctgtgaaggataagaggcggaatgcatgtgggtagatggggaaagtcggccaatctcagggtaggtctagaatcagggagagagagaggtagagcctcaggtggcagagcagctctgagagagtcttgatcaatgattgggagtccagattaaagcagaggttctgcctaggcaggatagccatccctagtatctgtaatgtgctcagttgatgacgagaagcagccctaggagggtgtgatctaagagtgcaccctgcagaagatcccaaagatgtggcagctggaggctgtarcttcactccttgaagcaggctgcctcatgaagggagtgctgggtggcacaccttcatggctcttgcaaggaaagaccaaaaaatgcctaagacagcacctgaccttatatgatggtgtagccagtgtgctttgggaaatccactatgattcgctctctttgataattgtcccatcccacgctgaagcagggtgagctggagcgtcatgtaacattttaaccatgggatctttctccaatggatcctaggaataggaatggaatctttaaactgtgaaaggaaaata

SEQ ID NO: 759733 - DNA, 633 bp, Homo sapiens
ataatgacaggatcaaatccacataaaacaatactatccttaaatgtaaatgggctaaatgccccagttgaaagacacagaatggcaggatgaataaagaatcaagacacatatgctgtcttcaagagacccatgtcacatgcaaaggcacaaaaaggcttaaaataaagggatagaggaaaatttgccaagcaaatgaaaaacagaaaaaaggagaggttgcaatagtagtttctgacaaaccagactttaaaccaacaaagatcaaagaaagacaaagagggcattacataatgctaaagggttcaattcaacaagaagaactaactattctaaatatatgtgctcccaatataggagcatccagattcataaagtgaattcttagagaccttaaagagacttagactcccacacaataatagtgggagactttaacacctcactgacaatattagacagatcattgagacataaaattaataaagacattcargacctgaactcagctatggatgctgtggacctgatgtccacagatctctccaccccaaaacaacagaatatacattcttctcatcactgcacagcacttactctaaaattgataacataagccaaaggaaaatattc

SEQ ID NO: 759734 - DNA, 632 bp, Homo sapiens
ccaaaagatgcatcatattcttgctggtaaccaaaagctatgtaaagtgcctttcagaatagatttcaggaaaagacataagaaagagcaatttccctgtggcggtgagcaacagccactcactcgggtttccctcctccgattttcctgcagaagaccacgttgagaagtgcctggtaggaacaggctgagaatgttaaaagttgaaatgcagcatgcctcatcactcrttctctttcagcagcattggtggcaatgcagaactcctagttcagagggggctaggcatgggaagatgtggcagccaccatctgggtggactcacagggaaacaacctcagatctttgcttgtcagaagcaaatatctttggacttggtgttaaaatggggcaaatatggatgcctatttcttcagcgttgctgaaccttggtgccatgtgccccagttggagccactgacagtccttaaaagctgttttattccctccatgtgtgctggggaaatgcacctttactggatttcaggtaaatcatccattttccccagctggctcctctgcagccttttagggcttggtcttctctgatggtatcatcagaagctctatgtttgttcacccactggtagtgg

SEQ ID NO: 759735 - DNA, 531 bp, Homo sapiens
aaacaactgcacaaagaaaaattgtgtccttgtacaaggaacagttgagccaatcagatcctgtctcctttccgtctccttcccctggtacacagaataaaccctgcagccctggcctcctgggtaaacgtggaaaatcgttcctacagtgagcaatccaccttgctcactggatggatggatgtgrgaagcagcgactgtggtcctacagatactgaagcgggaaaggggttaaatgaggaaagccagctccactgcaaagaaaaacccaccctggcaattgcagaggcctccagcctgcctactgatcttcagccagctggaatcccaaattaaactcaaccagtcaacaggcctcacataccacatatcagccctttctttaaaggaaaggctattggagaaagagacttaggcacgaataaaggaaactcgtattgccaacttctataccaatcaatttaatcatttattcataatataaacgaagaaacagagatcaccaggcatttgagaaataaacagcattaa

SEQ ID NO: 759736 - DNA, 531 bp, Homo sapiens
aaacaactgcacaaagaaaaattgtgtccttgtacaaggaacagttgagccaatcagatcctgtctcctttccgtctccttcccctggtacacagaataaaccctgcagccctggcctcctgggtaaacgtggaaaatcgttcctacagtgagcaatccaccttgctcactggatggatggatgtgggaagcagcractgtggtcctacagatactgaagcgggaaaggggttaaatgaggaaagccagctccactgcaaagaaaaacccaccctggcaattgcagaggcctccagcctgcctactgatcttcagccagctggaatcccaaattaaactcaaccagtcaacaggcctcacataccacatatcagccctttctttaaaggaaaggctattggagaaagagacttaggcacgaataaaggaaactcgtattgccaacttctataccaatcaatttaatcatttattcataatataaacgaagaaacagagatcaccaggcatttgagaaataaacagcattaa

SEQ ID NO: 759737 - DNA, 625 bp, Homo sapiens
gaaaaaattaaaatatttaactcacacaacacagaaagtgacagcaaagttaaaaactcagatctttataaaaaggaaatttatgctgtataccaaaaatgatatttactaaattacaaaggcacttgtatatgaataagattaaaatagaaactaagaacagtacttttagtttctcctaccactttatattctctaaatgactgcccttacctgatagacacacaccaactatcgaaaaaagtaaccttaatactatcctgggagcaaatgaacttaaattttttcaagccaattcccaaatgagggcccactacagaaaacacctctgaaccaccgtaattcctttctgaggatgactccaaaaactctgccaatygatgctaaacatgagcccaaagaaacaaaaaacaaaaaaacgctgacaaattcccataagcttaccaatggaccaagattgtccaaaacgtaatattcccagaggataggaaaaaaatgtcttagggggttgatgtctgccttcaatgtcacagcagaaaccttgcagtttaccagatgacccagtaaaggaaccaacacccacaacccattccacatgggcagttcattccagtcactgatgaga

SEQ ID NO: 759738 - DNA, 613 bp, Homo sapiens
atccaataaaaattaaactatttgttcacaaaaacctgtactcaaatattcatagcaacttaacttgtaaaagtcaaaaactggaaacaacccagttgtctttaagccagtaagtggttaaacaagctagtaaatcctgactgtgaaatactactcagcaatgaaaagcagtgaacaatgggtgcgtgcaacaacctggataagtctccrgggacttatcatgagtgaaaaagtcaatccccaaagcttacatactgaatggttctgtttctataaaacttttgaatgatgaaattatagaaattgagaatagattagtagctgccagtgattaaggacggcagaagtgaggtgctaggggattctatcaaagagcgatgtgaggatcctggtgataacagaattgttctttatcttgactgtaacgatgatgatatcctagttgtgatactgtaatacaattttgcaagattctactattgaggaaaactgggtaacaggtaaatgagaggtctctgtattatttatcatacctctatgtttatctatattatctaaaatgaaatgttcattaaaaacaaaaacggaagaagagtagattttacatggtcat

SEQ ID NO: 759739 - DNA, 632 bp, Homo sapiens
atttcctgtctctgtgtcacattttggtagttatcacaatatttcaaacattttcattatatctgttagggtgatctgtgatcagtgatctttaatgttactattgtaattgtttttggggaccgcaaaccacatccatatgacatggcaaacctaatcaataacagttgtgtgtgttctgagtgctccaccaacaggctcttctctatctctttccctctccttcggcctccctattccctgagacacaacagtgttgcaattaggccaacaacacaatggcatctaagtgttcaaatgaaaggaagagtcacatgtctctcactttaaataaaaagctagaaatgattaagyttagtcaggaaggcctgtcaaaatctgagataggctgaaatctaagtctcttgtgccaaacagtttgctaagttgtgaatgcaaaggaaaagttattgaagaagagtaaaagtgctactctagtgaacgtaaaaataagaaagcaaaacaaccttactggtgataaggagaaagttttaatagtctggagagatcaaaccagctacagtcccttaagccaaaacctaacatagaacaaggccttaactcttttctattctatgaaggttgagagaggt

SEQ ID NO: 759740 - DNA, 455 bp, Homo sapiens
ttgaattttcaggatccagaatgaaccagtaagtaacctcactggtcaaggattttcattttttccttcacttgccagctcactttcaatcaaatccagcagaggtgcccatgtcgagcttctgagattggcactctcctccctcctcttcacaccctcagttggtgactctggcattacaatattgagcctctcacaacagaggctggtgacaatgaagccatgctatagcttmctcctatagcaatttggatgattattgtgtttcagaatgtggctttctgtcccactgaatttcatcatgttcttactgtcgggaagggatggaggagacattgaaaatggtcatgtgaagtgcagagcttgtgtgctctctacaggagccccttgcagatggtctgcttctctcctggtgcccccacgtaagtccacttatcagcctaagaaggagttca

SEQ ID NO: 759741 - DNA, 515 bp, Homo sapiens
cagatgtgaggggcctgagtggcctttagaactgtgcagataatgatatcagtaaatagggagacttttcaaatcctactctagctacgccctcctactcccagcttatcaagccacacgtgcatgatttttgcttgacctgcataaatgcatatgtgtacaggtgcgcacgcgtgcgtgtgtgtgtctgtgtgtgtatttgtgtgtttgaaggcctcaggtaagggctacttcagctcgaatccagactgaagyacccttctgatgaaagatgttttattttcctaaatacctaagtaatgaacccaaacttatggaaaccaggttcttatgaaaaggtggcccaagcaccagcaagcttcaagactgtttcctgagagaaccaaacagaagagaactaggtagactggagtaaggagtagagcttcatttcagccatcccagaaggatcattaagctgttctgttttctctgcattttaattatgttggggctggaaatggacccacactgtg

SEQ ID NO: 759742 - DNA, 515 bp, Homo sapiens
cagatgtgaggggcctgagtggcctttagaactgtgcagataatgatatcagtaaatagggagacttttcaaatcctactctagctacgccctcctactcccagcttatcaagccacacgtgcatgatttttgcttgacctgcataaatgcatatgtgtacaggtgcgcacgcgtgcgtgtgtgtgtctgtgtgtgtatttgtgtgtttgaaggcctcaggtaagggctacttcagctcgaatccagactgaagcacccttcygatgaaagatgttttattttcctaaatacctaagtaatgaacccaaacttatggaaaccaggttcttatgaaaaggtggcccaagcaccagcaagcttcaagactgtttcctgagagaaccaaacagaagagaactaggtagactggagtaaggagtagagcttcatttcagccatcccagaaggatcattaagctgttctgttttctctgcattttaattatgttggggctggaaatggacccacactgtg

SEQ ID NO: 759743 - DNA, 532 bp, Homo sapiens
ataaaataccagatgatggacatgaaacagtaaagaaacatcttgtattctactggaaaaaaggctgtgtgtgtgtgtgtgtgtgtgtgtgaaattatttttgtcagtaataagtgatataaagataaagcaggataactggatagaatacagtgagaggtggaggtgatagagagctacttttgataaggtactcagagaagaaatccctgtggaccagagttcttaagaacagagaaataaggggaaaaattgtggcaacattcaggacagagcatcacasacagtgaaacaacaaatggaaatgccctaaagttcatgctgtgttccaagtacactaaggaagccaggggagtggcatcagtgagcaggcaggcaggagagtaatggaaaatggggtttgggaggtggcaggaggtcggggaaaattgttccggtgattgtcgggcaagagctttccatattttctcctagtatatttctccaaatttttgacatacaactaccaactgtcataaaaatatgggccatt

SEQ ID NO: 759744 - DNA, 520 bp, Homo sapiens
ctgacactaacaatagctgatgagctaaaaataaaaaagtctgtgcataattttgtgatatctgccactacagatataccaaaaagtcctcatattcaaagggttggacacggctgatagagatatcaaaaaccatcatcaggccaggtacagtggctcatgtctgtaatcccagcactttgggaagccgaggcaggcagatcacttgaggtcaggagttggagaccagcctggcgaacatggtgaaaccccacctctactaaatatacaaaaattggctggatgtgttgtcagttacctgtaatcccaactacttgggaggctgaggcacaataatcacttgaacctgggaggcagagcttgcagtgagcygagatcatgccactgcacttcagcctgagcaacagagtaagattctgtctcaaaaacaaacaaacaaacacacacaaaaaattatcataaccagtgatccagaatttattaaagatttattagtactgtgcacactattaggtattga

SEQ ID NO: 759745 - DNA, 638 bp, Homo sapiens
tactgttaaggggccagtaccaaaatatgacaatacattatttttaataaggcactgttagattctgagttggcagtattatatccagaagctaaaagaaatctgttatagaaaactctgtgaaactctagggacaagcaggtgaccaaatgtgagggctattcttccagcctagcacagtactcagcacagctctggttcatggagaatctgtggttttgggagcagtggaagatgagacttgtgacaaagatatctacttgattgtgttggggaccattattgacagtggcaaagacaaggttccagtaggtggtctgcagaaataggtttctggcaaggctggtctgagcaggaaaggaagaaaatggagttaccrtatagatatagaaaatggcactgttcactatatattcatgtaagctgttctcttaggggtgtctctgaaatgctgattctttgttgagtttcactgcctgattatttctatgagcagatttggagccactataatttaaacacaaaagcaaagatgactttgtctacacagtctttaagtccaggtgacatatattaaaacaaacaaacaaaccactcaaagtagtacaaagtttatgtgaggaggtatgaaaataaaa

SEQ ID NO: 759746 - DNA, 465 bp, Homo sapiens
agtgtatttttaggtaaaaattatcattttgacctgtatgtcatgaagagcaggtctcttttcaaaactggaaattcacgtcattttgtcacctatatgtgaaagaggcttatgcatgggagatcttcagtaagaggatttcttcgccactttcatctcaactgaaaaatgtcctttaatgtgacacattatattaatgtcacctttgaaagcaaaacttcagagcagaggaattatmtacttatttctttgaattttaagtaaccataaacattataattctaagaaacagacttttgaaaatgtaaatattaataagaaaaaaatctaaattccaaagcaggattatcactttacttgtgtaaaaggacaatttatcagaaaacattttgacattgtaaaatgatatgcaaatgtaagcattataatggctaaaaattaatctatggaattaattccataaaa

SEQ ID NO: 759747 - DNA, 546 bp, Homo sapiens
aaaagggggtgtacaccccctgcgatattgggattaatgtcatcctctgcccccctggatattaggaacaatataacaaaaatagtacaccctgtgatattgggagtaatatcatcctctccccacctggattttaggaacaatatcatggcgggggggatgtacattccctgtgatattgggagtmatatcgtcatctccttccccaaatattaggaacaatatcaacaggaggatatatagtcctcgtgatattgggaataatatcgtccccttattttttgaattctaggaacagtatcacaggggacgtgtacatcctctgctatattgggagtaataccaccctctcccccactgtatattaaaaacaatataacagtggggttgtacaccgctgtgatactgagagtaatatcattccctcccttactggatatgagaaacaatatcacagaagaggtgttcaccccttgggatattgggagaaatatcatccttttccttcctggatattagaaacaacatcacggggagtgaggtgta

SEQ ID NO: 759748 - DNA, 655 bp, Homo sapiens
tttattttttaaaattatttttttctttatttttgtctgactgagttgattcaaagaatcagtcattgagctctgagattctttcctcagcttggtctattgtcctgttaattcttccaactgcgttacgaaattattatagaaaattcaattccagaagttcagtctgattctttcttaaaacagttcttttgactrtcagctcttggatcattttactggattccttggattccatggattgggtttcaagtttctcctgaatctcaatgagctaccttgtcatccagattctgcattctattttttgtcatttcagccatttcaatgggttagaaaccattgttctgggactagtgtgtttgtttggaggtaagaagacactagcttttgaattgccagaattcttgcactgatttttctcatctgagagggcttttgttttattaactgtgacacaaaatgagtataatcagctcgcttcatttctgggtgctttcagaggtctaaggctctgtacaggatctttattcgtgaacaaatttttgccttaggtttcaggcactgtatactggcaaaatatttttggtgttgtaatttggtctggtatccagtaaatggcacttaagagtgatggctggcagataggctctta

SEQ ID NO: 759749 - DNA, 575 bp, Homo sapiens
ctggaagccccaactttgagtcgtccacgcctttccagatcgaaccaatgtacatgttacacatattgattgatgtctcatgtttccctaaaatgtataatagaaaactgtaccaccgaccatcctgggcaaatgccatcaggacctcctgaggctgtgtcacaggcacattctttaccttggcaaaataaactttctaagttgactgagacctgtctcagatattttggattaacatatgaaaccatttagaattggcatttttacttgatttaaatcttagagattcatccaagttttaatttacatcaatggtttstttaattcctgagtaatatcccctggtatcagtgtagtgcattttctttagtcattcactcattgaaggatatctgtgttggttccagttttgagatataagcattcatatacaggtttttatgtgaacacgtgtttccctttttctgtgataatatcaaaagttaaatttgtagatcttatggtagtttcatgtttaggtttttaaaaaaccgtcaaactgttttgcagagtgcagtaccgtttaatattcccac

SEQ ID NO: 759750 - DNA, 632 bp, Homo sapiens
tggtctatagatatctaatgctatagcatttttagttgaaaggctactcttccaccactgattattttgctcagtgtcaaagatcagataggcatgtttgtatgagtctattttaggggattttcattctcttttattgatatgttgtacctttccccctgttaacacmacacagtcttaattgctatagctatataagtttggtagtactgatgagtagtgattcttctaacctttggtctcctttttcaaaattgtagctattgtaatgcttttatatttctataatattatggaatatttctgtcttctcaaaattcaggtattgaagccctaatttcaaatatggtggtatttgaaggtggaggttttaagagattttgaggtttagattaggtcatgagagaggagctccaagatgaggtagtctcctcataagaagaagaaaatgaatcagagctctttctttctctgccatatgattacaccgtaagagggaagccatctgcaagccaggaagagagcctgctctatctgaatgtatgtgtttctccaaaattcatatgttggaacttaaaccccatggtggtggtatcaaaaggtggggcttttgggtggtaattagggcatga

SEQ ID NO: 759751 - DNA, 571 bp, Homo sapiens
cctaaaaaccatacaatttcattaaaaaaatttttaaaattattctggtgtaatgtggcttgctttctaacctgactctggtatagcatcaatgacagcagaccttgagggaaataaaaatattttaccctagagtatatctttttgacataytttgaaaagtcctacaaggtcctcttctgggggagaaaattgggttagtagagaatctccattattgcagccaggtcttccctttctatgtttttcctggatctaggagagattaatagagagcttgatggctttatggcacttcatctgcataagaagggctttggcctccctaactccccttatcttaactcaagcatttctttctactgacttcaagtctttacataaagcttatttctgttaaccaattaccaatcagaatctttgaatcaatctatgacctgtaagcccccacttcaacatattccccttctttaggctgaaccaatgcacaccttccatgtattgatttattattttacctacaatttctgtttttctacaatttataaaaccaaattgtaaccagagtgcc

SEQ ID NO: 759752 - DNA, 637 bp, Homo sapiens
agtaaaagaatgcaccaacctaggtatatgacaaaattctattttctcactccttgctttactatattagcaatatttttttcttcatgtattaaagatgtcaaacattactggcatgttaaattttgctaccgtgttcccattcttctatttcagaaaaatgatgtatactctcttctaaaatagtattttcttattgtttccatagacaaggccrtggatcatattatgtttttccatttttctatggctagtcagacagcatataaacccattatgcaaatgagtaaaaaatgttttataatcaatccagtacattgtgatttataattcaccattctgtactataaataaaaactataagacctgcatttagtccatttgtaaattcagtcaaagaccacaaggctaaaaatttaataagtaatgtaagcaaaaaatagcaggtatgagttattatgtgaagatggggagataataagtttaatttgtcattcagtcactcaagaatcaagttgcactcctgacatttagggtatagcttctataaatttccacagactcccatccttttaaatttaaatttaatttaatttaattttttgtgggggatgatagctaaaatgatttctttgcc

SEQ ID NO: 759753 - DNA, 619 bp, Homo sapiens
gtggggtgaaaaaggtgaaatgctcagggaggccagagaaagattcactattacagtgacaatgaattaaaagttcaggcacctgcttcttggtcgctaagggacgttttccagcagtcccatcagctctcaagttttccccttttagggagaaaaaggtcccagggtttcataatcctgcttatgcctaatgctgtcacccacagccaacagcaaagaatgcaaggcagattaattcaaagagaatagtggttaacatcccatagcaccagatcaattcttagcagagaatgactttactgagrgagaggcctctagccccctaactcataggaagaactctaaacttcccaagttttgggccttgaacccgggtttgctcaagagttcttgccttttactgagaggaacctttaaccctctctgtttcaggagagactctaactcccctaagttgggcctctaaccaaatcccattctttatctgggtaaaaaagcaccccacttacacaaagttggccaattggtatgcataaatgattcccttttggctttggggtctgtattactctgttttcacgctgctgacaaagaaatagccaagaatgggcaatttaca

SEQ ID NO: 759754 - DNA, 619 bp, Homo sapiens
gtggggtgaaaaaggtgaaatgctcagggaggccagagaaagattcactattacagtgacaatgaattaaaagttcaggcacctgcttcttggtcgctaagggacgttttccagcagtcccatcagctctcaagttttccccttttagggagaaaaaggtcccagggtttcataatcctgcttatgcctaatgctgtcacccacagccaacagcaaagaatgcaaggcagattaattcaaagagaatagtggttaacatcccatagcaccagatcaattcttagcagagaatgactttactgagagagaggcctctagccccctaactcataggaagaactctaaacttcccaagttttgggccttgaacccrggtttgctcaagagttcttgccttttactgagaggaacctttaaccctctctgtttcaggagagactctaactcccctaagttgggcctctaaccaaatcccattctttatctgggtaaaaaagcaccccacttacacaaagttggccaattggtatgcataaatgattcccttttggctttggggtctgtattactctgttttcacgctgctgacaaagaaatagccaagaatgggcaatttaca

SEQ ID NO: 759755 - DNA, 520 bp, Homo sapiens
ccctcagataatttctcacagttcattaacatctctttgtttcagataaagtctcctttacttttccatctgctttttttcaagcatgagtctctccccatagccaccacagctgagaatgtgctgagtcttgcctgaagccaacaactctagagtctcattcaaggcccacagtatactacctgggtaacatttattcagggtccaagggttctctagtcaacttgtgatrggtcctgtcagaactaggtccttttcttctaaaaaacaggttattcttgccctgggtgtgtctggaaatatagtctgggagctagggtattgaaagggacactcaggactgattgatgccatatcatactgtggctgaactagtatccgagatgcaagacaaaggcctctttaatctttcctctcctttcctcgagaggaaggaagtggtcccttttggagaatgagctttatagcctaaaattgggagagaggtgacacaagcactcccttagccaccttggctggt

SEQ ID NO: 759756 - DNA, 545 bp, Homo sapiens
actaccttaaaagttcatgggcatattctgggcaggattttgagagtctcatgtctagatcatataatcattattttagaattggtaaagagtccaagtttaatcctttctttttatagtttagaaaactgaagcccaaggatgttaagaaaataattaaaattaacaaagctgattagtagaagagccagaactaggtgttaaatctttcattcctagttcagctgttcgccctgaatgatattagagttttaccatattwgaaatatactaaagagaaaggaaaagaaatgaattttcttgtgaacacggaagtccaactattggcttacagaattggaattgccgaaactaatataatttgaattacagaaatttgtaacataatacttgtggcaaaaacatatgcataaggcctttaaaacttataatcctgtcaaatctgtcttgtaaaactgtgactgatatgcatagagaactaagcaatgcttctctttgccttgttttaaaaatcaattggagtcaatgttatttcagaaaatgtc

SEQ ID NO: 759757 - DNA, 517 bp, Homo sapiens
tcgcttgaaaccagaaggcagaggttgcagtgagccaagatcgcaccactgcactccagcctgggagaaagagtgaaaactccatctcaaacaaacaaacaaacaaacaaacaaacattacataaggacttcaagattgatgtgccaaataagattaactttgttgggtaatgagtaagtgtgtacttgacagttgttatggagggaaatcaaatatagatctctgaattagcataatgacactataacrgaagtctactgaatcagcatcttaagatgcacgtgagttgttgcctgtatccaataatttaaggacccacacataaatccttctctaattgtcagctaaaagccacaaattataaacttagaatcatgaaggatggaaattattgggtatcccttatctgaaatgcttgggaccagaagtgtttcagattttgatttttttcagattttggaatatttgcatatatatacggagatacctcaaaaatgggacccaagtctaaagaca

SEQ ID NO: 759758 - DNA, 481 bp, Homo sapiens
cacaagagaattaattatttgggggtgatgataacattttgtaacttgactgtggtggtagtgattacacagcagaatgtgtcaaaacttaaactatacactaaaaagggtgagtttcattatatacaaagtgtamctcagtaaaactgacagatatataaacatgtttaaagcttacttttaagtaataataataataggtgccacgagagatgtaaagaggaaggagactatgaaaaatttatttcccagtgagaattagagaattgtcacggaagtgttcatatgcatgttgagcctcaaatatacatgaataatatctggggagtgaccatcttgaagaactaatttccaatttcaaattcatggaagaaagtatcagagaatcatatttctgtacttttgccatagcaccttccactgagccacaaaccaagtagatctaagagccacttagtctcatctgtcatggcacaccttt

SEQ ID NO: 759759 - DNA, 543 bp, Homo sapiens
tccacctagagaaaaccattattatccctttccctccaaaaacgttgaacttaaacaaaaacaaccttcaccacccaaccctacccacgaaactactactttcctcagttgagaaaagaatatatgcacatgccgggcacggtggctcacgcctggaatcccggcactttgtgaggccgaggcaggcgaatcacgaggtcaggagtttgagaacagcctggccaacgtggcgaaaccttgtctctgctaaaaatataaaaattggccaggcatggtggcccgcacctgtaatcccagctgctcggggaggctgaggcttgagaattgctttaacccaggaggcggagtttgcagtragctgagattgcaccattgcactccagcctgggcgacagagtgagactccatctcacacaaaaaaaaaaaaaaaaaaaaaaaaaaaaaagattatgtgcacatggttgaaaaattcagaagtaaccttccttcccacccagatccccaagacccctccccagatgcaactgttgatatctgtgtatt

SEQ ID NO: 759760 - DNA, 632 bp, Homo sapiens
tcagattctggtatgcaagtgttcactgacacttagatatctaataggtattttaaaggtaataaatctaaaacagttcctgtctgtatatctyacctatctcagtaaatgtcagcactgtctaacccagatgcttaagccaaaatccctaagagtcatccttgatttattttcccctcacacccccactaccctgtcccaggactgctaatgtataaataagtaatttcagaattatccacaaaatctatcttaagtctacttcatttcacctccattgccaccactttaatgaaggccaccatcttttcctggactcctgtctgagtccattttgtgctgctataacagaataccacagactggttaatttataatgaacagaaatgtattggctcacaattttggaggctgggaattccaagatcaagaggcaaacatctggcaagggccttcttgctgtgtcataccatgacagaagagcaaagagagggcaagagagagagtaaaagagggtcaagttcccccttttataatgaaccttctcccttgaaaatggcatgaatccattctctccaccttcctggcctaatcacatttcactgggcccatctcctaacactgttgcattg

SEQ ID NO: 759761 - DNA, 546 bp, Homo sapiens
aatatctgcagccccacatacagagttattttctaaataggtatgattatgagatgtagaaatttgtgggtcatgtaaggaacatggcaataccaaacagcacctttctgggcattcatagatttgggatgatacctggcattctttgacatttactgtgtacaatgtactgtgccaggtgctttacttgcactatcaaatataatcattccaacacccaacaagacaggcactattatttctgcttcgtagatgaagaaactgaggttcagagagggaaratagtgagcagcatcaggcagcaggtactgggggatccccaagcttgtgtgactctagcctttacgggtgaccgctaccctacactataatagaaggaattgaacaactggcttcttgtcagtcagggatcacttttaatcctaggactatagcaatcaataatgtggttacaaattgtgcatttccatcttcatgctgctggccatacaaggtgagggcagagatacctgaagctagcatccttgatttttgaagagccatgag

SEQ ID NO: 759762 - DNA, 546 bp, Homo sapiens
aatatctgcagccccacatacagagttattttctaaataggtatgattatgagatgtagaaatttgtgggtcatgtaaggaacatggcaataccaaacagcacctttctgggcattcatagatttgggatgatacctggcattctttgacatttactgtgtacaatgtactgtgccaggtgctttacttgcactatcaaatataatcattccaacacccaacaagacaggcactattatttctgcttcgtagatgaagaaactgaggttcagagagggaaaatartgagcagcatcaggcagcaggtactgggggatccccaagcttgtgtgactctagcctttacgggtgaccgctaccctacactataatagaaggaattgaacaactggcttcttgtcagtcagggatcacttttaatcctaggactatagcaatcaataatgtggttacaaattgtgcatttccatcttcatgctgctggccatacaaggtgagggcagagatacctgaagctagcatccttgatttttgaagagccatgag

SEQ ID NO: 759763 - DNA, 610 bp, Homo sapiens
cctcaaaatataaaaccaacctcatttttttgcccttacttcaaatctgctctatctacactacctcattccataaaggcaccaacaccatccatttattcacccacccaagctagaaatcttaaagccattccccctctttctaaccagtgccatctaatcgtgtcaaactctaccttctaaagacacccaaaacttgtccaccttactctttcctaccttggttcagggcaccattatttccccccaggagagttgtaacagtctcctatgtggtcccgggtcttcagttttgcccatacccaatscatccaccatgtaaactacctgtgtgatctaaaatgcaaatcagatcatcttattccacttcttaaaattttcagtggcttctcttgcccagagggtcgtgtctgaatttctgagtgaagcccactaggttcccagtgtactgaagtccatgcaatgccccagcctcatctcccaccccccacccccattgcatgctctacgcctcaagccctgagcccaccttgctatttcatgcccttaggtgacacacaaacacctcctctgcctgcaatcacatttcttctccttcaagaccctttca

SEQ ID NO: 759764 - DNA, 610 bp, Homo sapiens
cctcaaaatataaaaccaacctcatttttttgcccttacttcaaatctgctctatctacactacctcattccataaaggcaccaacaccatccatttattcacccacccaagctagaaatcttaaagccattccccctctttctaaccagtgccatctaatcgtgtcaaactctaccttctaaagacacccaaaacttgtccaccttactctttcctaccttggttcagggcaccattatttccccccaggagagttgtaacagtctcctatgtggtcccgggtcttcagttttgcccatacccaatgcatccaccatgtaaactacctgtgtgatctaaaatgcaaatcagatcatcttattccacttcttaaaattttcagtggcttctcttgcccagagggtcgtgtctgaatttctgagtgaagcccactaggttcccagtgtactgaagtccatgcaatgccccagcctyatctcccaccccccacccccattgcatgctctacgcctcaagccctgagcccaccttgctatttcatgcccttaggtgacacacaaacacctcctctgcctgcaatcacatttcttctccttcaagaccctttca

SEQ ID NO: 759765 - DNA, 592 bp, Homo sapiens
ctcgaccatatcctttcacccattctgcattcaacatgtaggatggaatggaagcagcacactcttccttgtatttcttccatcttccttcctgtctcccgtgctttctagtggggctttcaggcactttgcctgatgccaatacatagagtctgaacagctcttactgaatgggcttcatattgtcagataaattaaatctatgccaaccagtgattcagctgcaaatagaggccacctgttccaattagtgagattaaaatagtaycctgctgactatctgaagccaagttcaggctttctggatgatcacaacatcttgacaaagacagagaaaagggacttttggccccaacacagaattgaacacactggagtaaatatatttaggtgctgaagcacagctttcactaaaggcattctttatttttggacaagtgcttatactgaaatttctgtggaaggctgcagctcaagacaccatttaatttccttccattacaacaagcctacatacacatcttaattaggttcaactttactttagaaaaaacatgtaactcaaatttcttctccacccactaactgtcct

SEQ ID NO: 759766 - DNA, 626 bp, Homo sapiens
acctggtccagccacagtgggggctccgggtgagcgcctccgcccctggatcctgccagcacctggcagggccaatacagaccagcagccacagggtcccttccggaaccagatcagccatgtctctcctttccccaaagccctgctggctccccgcagcccacatgacagcatccaagtctttagcctgcaggcaaggcccagcacactctcagcttcccctcggcctgctacccaagccacattccaacatctctgagcctttgcccctatcgtgtgctctgcctggaatgccttccccagccccatctgtcaagtgctgctccaacctcccctcctccaggaagccctcccgcactcctctgatgagctggttagtgtgtggcatctgtctgatgtcatgacctcctccctcaccattctgggggctcctggagagggtccaatttgtctctcttgggggctgtcctgyagcaagctgagcctcctcccatactcacatactctagagagctccccacccagagcttggacgggcatgcgatgttaccaaggaggtgctggcctctggtatgtgtgggtggagacagctacaggcccggtagcaggagtccacaccagggggt

SEQ ID NO: 759767 - DNA, 618 bp, Homo sapiens
aggtataatggattacattgtgttgtactagggttgataactctttattgccggttacgttgggcttgaggaatattgaaggcaagatttttttgtttcacttcatgtagtaaaatcttataaaatataatgataaagatcacagcacccttcccagtacctgacacacattaggtacttggtaaatgcaaatatctttgtagagaatgcttatctaacacttactatgtgccaggtactcttccaatgctttatatacattaactcattaaatccttaccactacccattttgcagtggaggaattgagcttcagagacgttaagtgagttgtccaaggtcacacacrgcatagctgggatttgaaatctgggcagttgggaaccatatgcatccttttaactgtgatactccactgcttccttgtaatccatgaagaacaacatgaggagttagcattgcacttattttcaagatgactgaatttaaaataacttaaccttttatgttggaactatttctaagatacatcaattgtcttcctaacacagatcgcatattttctgatattagagggttatgaaatatgaacaccaaatctgtgttttgcttaattat

SEQ ID NO: 759768 - DNA, 563 bp, Homo sapiens
gagttagtgtctgcattaactagatttatctatcattggacttcctctccaaaacagcatagctagttattgcaacagacaattatctcacagtttccatccctactcttgttaaaaataatagggcaagataggcccaaggcactgatgtaccaaatgacaaygttatactcttagaatcttgtgaaaatgaagtaacttttcaggtactgcttaaatataaatattctcttaaaattaaataaatatcaatgcctaatagaattattccttaggctcaattaatttcatttcaaaagctataacttagttatattctagttgtaagtcatagctagtataccattatcttatatgtgggtatgtaatttgtatcaatttgcattaaatttaataagaatttaaatgtgaatcatcattgtcacttagcttacagtaatcaatatctgtgaaactgagatccctgcagatagtcatgggatgcctcccacacagacaaaattccaatttactagttaaaagatggttataaagaaaatatggggtaattgctgtgtaagata

SEQ ID NO: 759769 - DNA, 509 bp, Homo sapiens
accacactcccatcttgtgagaccttattctctgccccgcgttccttcaatttctcacactgaaaaagccgcttgtgaactatagtttcatctctcattttcatcacttttaaaatgagaatcatcatcagagaaaaaaatccagaagctgacctggaaatgtctatgataatgatacagtaataatttttcctcattaaacatacagcttgttttttatgttcatctttttaatgttttattatttttaaaacttaaaagcgaagtcrgaactgaaaaaactctctttttagataatgttagcaattttctctgaaggagaaaagttctgacacaaagcatgagtgtggctataaaacatgtttttctgcaggatctcaacaagctatttttgtgatatttttacccttttaagatcttataaattcaatcagcatagaattatcagagggaatctgagaacaaattttaaatgcattcaactagtgtttaggaaaagaaaatgaaga

SEQ ID NO: 759770 - DNA, 665 bp, Homo sapiens
tgtctatatcttttgcaagacttgagaagtttttagctattatttcattaaataggtttcctctgcctttcctcatctcttctccttctagaactcccaaaattcaaatatttggtctctttatggtgtcacatatatcatgtaagtttcttttttagtcttttttcgtctgattgaattatttcaaaagccctatcttcagaaattatttcttctgtttaatctattgttaaaactcttgattatattttttatttcactaattcctcagttccaggacttatgtttggttcatttttatcatatctatctttttgttgaatttcttattcagatcataaattgtttttctgatttcttygtatttcttatctgtgttctcctgtatctcactgaatttcttaaatgttgtcattttgaattcttttgcaagaatttcatagattttcttttcttttgggatttattgctgaagaattattgtgttcctttgattatgtcatttacttgcttttttaatgtttcttttgtccttacattcatatctgcacatctagcataacagttgcttcttccaattgtacggattgggttttgtagagaaagaattttttttacaatagagatatctatagtattggttgagtagggtgctttggctttga

SEQ ID NO: 759771 - DNA, 622 bp, Homo sapiens
gcataccttttttattttaccatcaattttgacttcaggaagaaataggccaatgacttttgaggcacgtttatggggatttattggggaaggaggagtctgattatacttagacttggagttagcagggagacacgtgtctgtaaggtacttttaaaatgtctcttattagagatgaatgcagcgattatagttgttaactcaatacctgtatttgcctgtaacagcagctcattagttgcagcagatgctcttgattgtccttccatatctcctagtttttcatgcgtgctagctggactttcaatgatcagtgcctgcatttcttctcctgagggctttctctgactgttaaagcccagtttgcctcctatatggtaaacagatatgccagggtattaatgttccctggaagccttcctcaaccaataaatgagttggtatgtaaataccctagctcctttacccctgaggcatgtgttttccrttggtttgtagagtttcttcacagtggtagctggcttgataatgcaccctttattggctgcttttttctgtttcacttccctaactgcttattgatatttcctttgcctctcaaatgaaccacttgcaccctaat

SEQ ID NO: 759772 - DNA, 633 bp, Homo sapiens
ccaatgatggtggtagggcagcattcttaaggcgatcccccacaattactgttccttggctattcaatcaaacactaatctaggtactgcagtgtagggattttgcaagtgtaattaaagtctcaagtcaattgatttgaagatacagatattatgtgggtggaccagacccaaccagatgagccctttaaaagcagtttcctctggctggtggcagaaggggaagtcagagatattcaaagaacaagagggattcagcaggccactctggctttgaagctgcaggggagtcacgtgcaargcctggagagcagcctctaggaatgaggagtaacctcctaccgacagctagcaaggaaatgcagacctcacacctacaactagattcagccaataacctggatgagcttgaaagtggattcttcccctggagcctccagataagaaatcagccagcttggctgacaacttgatttcaatcttatgagacccccgagcaaagaacccagtcaagcccagcttctgacttagaaaactatgagctaatcgatgagcattgttttcacagctgctaggtttgtggtatttttgttttacagcaacaaaaactaagaccacaaccttcttctaact

SEQ ID NO: 759773 - DNA, 576 bp, Homo sapiens
  misc_feature 72: n = A,T,C or G
atgtttttcattccccattttgatctagatctgtcttttagttctcctgaactttgcagcaggaggtgtagnttatcatatttacactttagtatctacttaacagtgttttctattgaaaaagactgtaagatttgcaatgtggtaattattttgttctcctgtcagttaccagcaacattgtgcagcttgatttgtttttttaatccaatctccccacatccctcccccacaaattgagtgaaatagtagtttttgataaggcacagagccttatcaggctcaggcatgttttagataagctaagtcttgtcaagtctgactctgtagatctctcataactaatgcacaatgaaataatatgatagaatagaaataaaacctaagttcttggwcctgaccatcatttactgccctgggcaagttgtgtggcttctctgagccttggttttcttgtctgcaagtagagattttctgtcctgcctatctgccaggtaattgttaggatcaaacaatataaagactgctagagaaatgtaaaaattctgaaatgccctacagtagctgttaggttat

SEQ ID NO: 759774 - DNA, 638 bp, Homo sapiens
agaagacacactcacagtgataaaattgttacagccaagtgctgacaagtgctatgagtgtgtcgggaggagctgctggaagtgggaagagagggagctgagtgctggactttgatctaagccccgaagacaggccagaggggacgggcttccaggcgggggccccgcagcagcagaggcrtcctgctaacagcttgttctgggctggagaggatgacatggccccagtttcatcctatattctgccaaggaattccagtctaaaggcagtagggaatcatgcaagattttgggatgaagaacactgtacatgaagctcagtttaggggttttggtggactctgtgcccaaaagacaaatacagagcctactgaagaggtcgagaggaagatggtgaggcctagactagcgtagtagccacaaccacagtcagggaatgaccagttcgagaagcaaggatagaagtaatggcacctgttgcctggcttggaagggcaggatgggggtgggggtaggtaaagaagatgaaggaatggaagaccactaagtgtgggtgcctgagtggctggggtctcagtggtcgtgtcagtgggaataaggaagccggtggttggaggaggcttctaggggaaggtgag

SEQ ID NO: 759775 - DNA, 638 bp, Homo sapiens
agaagacacactcacagtgataaaattgttacagccaagtgctgacaagtgctatgagtgtgtcgggaggagctgctggaagtgggaagagagggagctgagtgctggactttgatctaagccccgaagacaggccagaggggacgggcttccaggcgggggccccgcagcagcagaggcatcctgctaacagcttgttctgggctggagaggatgacatggccccagtttcatcctatattctgccaaggaattccagtctaaaggcagtagggaatcatgcaagattttgggatgaagaacactgtacatgaagctcagtttaggggttttggtggactctgtgcccaaaagacaaatacagagcctactgaagaggtcgagaggaagatggtgaggcctagactagcgtagtagccacaaccacagtcagggaatgaccagttcragaagcaaggatagaagtaatggcacctgttgcctggcttggaagggcaggatgggggtgggggtaggtaaagaagatgaaggaatggaagaccactaagtgtgggtgcctgagtggctggggtctcagtggtcgtgtcagtgggaataaggaagccggtggttggaggaggcttctaggggaaggtgag

SEQ ID NO: 759776 - DNA, 641 bp, Homo sapiens
agccagggacagagctcaaagacctcgtaagatgagttgaatttgatcctgagtggcaatgggcagccactgaacaggttcaggcagtgaagtgacatcatatttgcatttgagaaagatcactttggccacagagtgacaaatgtgacgggggacaggggaccagaagcctaggaggtgatgcagttgggactacaatgctgayggtgggaaggtagaaattggcagactgaggaggtacttagttggtgtagacaacaggcatttgtcagtggatatgggcagggagggggccttgggagaaatggggacagggagcaggtttggggaaaaggtcttggatttggttttgcacgtttggctggcagtacgtgtttggcatctccctgggagatgatggtcaggtagttggatgtattggtatgggctcaggagagaggtctggcttcaggggaaatggaggaaagagaataggggatagaaagaggagctcaaagggcagcgatgagcacagtaccccggggcagtgctctaccaggaaggatgtgctgcctgggctgactgcctaaaggaggtggctgagcccctcttcagaggagcagcctgagtagggcgtgctctgccctccctgcctgtcccat

SEQ ID NO: 759777 - DNA, 583 bp, Homo sapiens
cttggagaatggttgtgtctagctaagggattgtaaatacaccaatcagcactctgtgtctagctcaaagtttgtaaacacaccaatcagctctctatgaaacagaccaatcagctctctgtaaaatggaccaatcagcaggatgcgggtggggccagataaggaaataaaagcaggctgccccagccaacagtggcaagctgctggggtctcttgctgcgctggggaagctttgtttttttgctctttgcmgtaaatctttgggtccacactacctttatgagctgtagcactcaccgtgaaggtctgcagcttcactcctgaggtcagcaagaccacgagcccaccgggaggaatgaacaactccagacgagaggaacaaacaactccagacacgccgccttaagagcttgtaacactcaccacaaaggtttgcagcttcactcttgaagccagcgagaccatgagcctgccagaaggaagaaactctgaacacgtccgaacatcagaaggaataaactctggacacaccatctttaagaactgtaacactcactgcgaggatccgcagcttcattctgga

SEQ ID NO: 759778 - DNA, 589 bp, Homo sapiens
atgtgtatgtttatgacagcactatacacaatagcaaagacatggaatcaacctaaatgcccatcagtgatggactggataaagaaactgtaggacatatacattgtggactactacacagccataaaaaataatgagattgtgtcttttgcagcaacatagwtggagctggaggccatcatcctaagtgaacaaacacaggaacagaaaatcaaatgttgcatgttctcacttataagtgggagctaaacattaaatacatatggacacaagggaacaacaaacactggagcctattgtggggtggagggtggagtgtgggaggacctgggtgatgaactaatctgtacaccaacctccatggcacacaatttatataacaaacctgcacgcgtaccccgcacctaaaatgaaagttaataacataaaaatatgtctgaaagttttagacagaagattttctcaggaatagacggagtaacaaataaaacagaatagaaagtccagaagcagatccatgaatgtgtggaaacttgatgtagagctgaaccgacaccaaatatcactgggcaaagaatagactgtttga

SEQ ID NO: 759779 - DNA, 589 bp, Homo sapiens
atgtgtatgtttatgacagcactatacacaatagcaaagacatggaatcaacctaaatgcccatcagtgatggactggataaagaaactgtaggacatatacattgtggactactacacagccataaaaaataatgagattgtgtcttttgcagcaacatagttggagctggaggccatcatcctaagtgaacaaacacaggaacagaaaatcaaatgttgcatgttctcacttataagtgggagctaaacattaaatacatatggacacaagggaacaacaaacactggagcctattgyggggtggagggtggagtgtgggaggacctgggtgatgaactaatctgtacaccaacctccatggcacacaatttatataacaaacctgcacgcgtaccccgcacctaaaatgaaagttaataacataaaaatatgtctgaaagttttagacagaagattttctcaggaatagacggagtaacaaataaaacagaatagaaagtccagaagcagatccatgaatgtgtggaaacttgatgtagagctgaaccgacaccaaatatcactgggcaaagaatagactgtttga

SEQ ID NO: 759780 - DNA, 603 bp, Homo sapiens
ggagcctattgtggggtggagggtggagtgtgggaggacctgggtgatgaactaatctgtacaccaacctccatggcacacaatttatataacaaacctgcacgcgtaccccgcacctaaaatgaaagttaataacataaaaatatgtctgaaagttttagacagaagattttctcaggaatagacggagtaacaaataaaacagaatagaaagtccagaagcagatccatgaatgtgtggaaacttgatgtagagctgaaccgacaccaaatatcactgggcaaagaatagactgtttgacaaagtgtatgagataaatggaaactcattttaaaaatggaatgggtacccccctcatatcayacacaaaattgtctctagagagattaaaagctgaaccgtaagaggcaagatttttaaaaattttagaggacaatatagtggaaaatttttgtgatctttgggcaggtaaagaattcttaaacaaaaaataagagaatactaaacataaaattgtaaattgataaatttaaatatatttttaagagttaaagcaaaatatagagtgtgcatacaatatgctatctctttaataataaaga

SEQ ID NO: 759781 - DNA, 603 bp, Homo sapiens
ggagcctattgtggggtggagggtggagtgtgggaggacctgggtgatgaactaatctgtacaccaacctccatggcacacaatttatataacaaacctgcacgcgtaccccgcacctaaaatgaaagttaataacataaaaatatgtctgaaagttttagacagaagattttctcaggaatagacggagtaacaaataaaacagaatagaaagtccagaagcagatccatgaatgtgtggaaacttgatgtagagctgaaccgacaccaaatatcactgggcaaagaatagactgtttgacaaagtgtatgagataaatggaaactcattttaaaaatggaatgggtacccccctcatatcacacacaaaattgtctctagagagattaaaagctgaacygtaagaggcaagatttttaaaaattttagaggacaatatagtggaaaatttttgtgatctttgggcaggtaaagaattcttaaacaaaaaataagagaatactaaacataaaattgtaaattgataaatttaaatatatttttaagagttaaagcaaaatatagagtgtgcatacaatatgctatctctttaataataaaga

SEQ ID NO: 759782 - DNA, 594 bp, Homo sapiens
agcacgaggtaattttgaaatgggaaaaatataaatcaaatatttatttaaaaaataaatcacatacatgatcacaaatgtatgatcatcacgaaagccctacaggaaaatcaggacagaaattattttcttgattttacaaagagaaactgaggctcagggatgatgaatgactagcccaaggactctgcacttaatctggggcagagctggaaaagacagtcctgacccccagtctcaggctctttcccaggtaccccctgggaaattgtcaaacatctctcagtttccctgcttcccaaccctcaacttcaaaggatgcagattactgttggtatttccctttcttataactcgttagtccctcctgctgcttggagttcargccctgccagagggccctgagctggaggttctgctggaagcattacagtcagctaggctgacagtggctgggagacttggcagactttctccttcacatttggctggggggaggacggagagctaagaaaccactggagaaaggagggaggctggaggaaggcaagaaggcaggggccaacctggagaggaagtggtatgaagaggagg

SEQ ID NO: 759783 - DNA, 664 bp, Homo sapiens
ctccatttttaaaatggattttcccttttaaatgattataagattcctttttaaaaacatttttcttatttcataaataatacacaatcactgttgacatttttaaaagtatggataaattaaaagaaaaaataacaataattcacaatcttaccacctaatgattgacactgttagcatttttatgtattccttttggtgagactgcttgggattttagcatcactgaatatatatctcccagtgagagttgcctcttcaaagcctttccaagccttgcacatgtaccaacaatgctgcccataaattaggaagttggggaactgctcttcggtaactcactccctgtagactgtgactctgtctttggaatgtccttggtaataataagtcatctgagggtcgtagtgattattggaagagtcatttgaagacaaatttacatgattggaagaatgatcaagctgagtacctccatttgtttttctttattttaaagtcattcctataaagtttaaagactttttcatgtttctctggtgttttcaaaatttttgatgtgtacgtttacagaaggagaggaataaatttcaytattttggagcaacatttctcaaagtgcgttctatagcacagcagatactggaaatgccctccagaaaga

SEQ ID NO: 759784 - DNA, 644 bp, Homo sapiens
aagtattactgctgtcatggtttgctttggtccctgtgggttcccccaccctttgaaacaagtgcctgacacatggtagggttcacaataaatatttgtagaataaataagagctgagccttcaaggggtccaaaatacttgcacggagtttttctaggtgggcacgatgccacccagctgcaggactatttcagggtgttcattggctcctctggttgatcttttgatgcctgtataagaactcccacttctccaaatctgggggccacatctttagagttctcagctttctgtctctcaggaatgaaggagataatatcactgattggagccarattgtctggatgttgaatcccagctccttgctggtgcctttgagaagtgactttagccctccatgtgccttatttctgcctctgtaaacggagatcatcatagcacctctcatgtggggctgtttgacgattcggtgaggtatgtgcaaagagctttttgcacttgcaaaaagtgtctgggatatcattgtgtgctgtaagaatgagctgtaatgattatcactgagacttgttgttgggattaaaagagatcaggtctgtcagggcctggtacacaagaggtactagaaaaataatgggaggtttag

SEQ ID NO: 759785 - DNA, 609 bp, Homo sapiens
ctgtgtgaagagcgtgtgcactggcctccgtgtgtccttcctgcagaccggctggggcaggaggagagggagcttggcagcgcccttgctggggggagtctgtggggctaggagggaagggtgtgccagaggcccctgcctagagcctgaatttgagtgctggctgagggagaggtgggagcagatgggagagaagcctgttttctccaaaccccacaaatgccctccrcctctctcatgttcctttcttcttcctggtccatcctgtctcctccaggttccggcctccagcctggtgtcccctcctcaggctgccttttcctcctcctcctccctgtttcctggctcttagccgctccatctgggaagtcttcctcaactttaaaccctcgaacccttgtcctctgccctccatctcccactcctcaggctttcagcagcttcacgtggagcattgggctggtcctgtccacagttgttcagttgctgtaacagcttgtgcaggctgccctggagccctgttctgggaagcacaggtctgggcaccctggggctggggcgaggcccggagctgatctcctctgtccatcccagtagagccagcaccag

SEQ ID NO: 759786 - DNA, 609 bp, Homo sapiens
ctgtgtgaagagcgtgtgcactggcctccgtgtgtccttcctgcagaccggctggggcaggaggagagggagcttggcagcgcccttgctggggggagtctgtggggctaggagggaagggtgtgccagaggcccctgcctagagcctgaatttgagtgctggctgagggagaggtgggagcagatgggagagaagcctgttttctccaaaccccacaaatgccctccacctctctcatgttcctttcttcttcctggtccatcctgtctcctccaggttccggcctccagcctggtgtcccctcctcaggctgccttttcctcctcctcctccctgtttcctggctcttagccgctycatctgggaagtcttcctcaactttaaaccctcgaacccttgtcctctgccctccatctcccactcctcaggctttcagcagcttcacgtggagcattgggctggtcctgtccacagttgttcagttgctgtaacagcttgtgcaggctgccctggagccctgttctgggaagcacaggtctgggcaccctggggctggggcgaggcccggagctgatctcctctgtccatcccagtagagccagcaccag

SEQ ID NO: 759787 - DNA, 638 bp, Homo sapiens
gaaggcagggaggtccacccgaaaggaagggaagggatgatggacagagaatgagagggctccgaggtcctgggggatctagaaggacccttccctttacagaaggggacaccaaggcccagagagagaggagggcctcacagaggacctaacacaagcagagttgcatgaatcagtgtgaacggacagtcccaagagcacagccggaccttgggaggtacttgactcttgagtttgatgttattgccttcctgtaggccagtgtgaggggcactgtgaggcttccttccagagaaggaggcatggagccagtgccaggcagtggggtgagccataggaggacctgtggagatggggaaaggcatagagactyatgaagatgaaacaggaaagatcttatggcagcgaccccaaccctcaggaagggcgttggtcttgtgcttgtggctccaaaggggataagaccaaggtctctggtttcatagaatcttaggctttaagaacgagttagaagtaatttagtccagaccctctcctctccccagataagtgcagaaatgcagatctagcccacggctgagccccaaccctggcttcagaggaggcctgactcagaacaggctcccctttcttggtac

SEQ ID NO: 759788 - DNA, 634 bp, Homo sapiens
ttaacatagagtagaaaatctagcgatttggatggaagagaaatggtagtcatgaatacaaatttcaaatagctgaaggcctattatatagaaaaatatcatttgtgagttttcagaaaatttatagttcttcaaaccacacataagaataaataacagatggattaaagagacagatgtgggaaaawataaagaaaccataaaaactgcagaagaaaatagaagcaaatacgaacatacctcaaagatattgtgggtttggttccagaccaccacaataaagcagatattacaatcaagtgagtcacgtgaattttttggtttcccagtgcatataaaagtaatgtttacactatcctgagtctattatgtgtgcagtagcattctatccgaaaaacaatgtacataccttaattttttaaaaaaactttattgctagaaagatgttctttagcaagttatcatatttttgcttgttgagggtcttgccttgatgttgatggctgctgactaatcaggatggaggttgttgaagactgggttgactgtggcaatttcttaaaaataagagaacagtgaagtttgccgcaacaactgactcttcttttcatgggcgatatctctatagcataca

SEQ ID NO: 759789 - DNA, 561 bp, Homo sapiens
caaaataactgctttgaggaagttcaatgaaatctaagataacatagagaaggaattcagaattatatcagatacatttagcagagaaatggaaataattaaaagcaagcagaaattctggagctgaaagatgcaacagacatactgaagagtacatcaagagtctcttaaaagcagaattaatgaagcakaagaaagaactagtaagcttgaagtcgggttatttgaaagtacacagtcagaagagacaaattagaaaagaatgagaaaaaaatgaagcacatctaccacaactagcaaatagcctcaaagggacaaatctaagagttattggccttaaagaggaggtagagagagatataaaggtagaaagtttattcaaagggataataacagagaacttcctacacctagagaaagatatcaacattcaagcacaagaaggctacaaaacatcaagcaggtttaacccaaataagactacttcaagacatttaataatcaaactcccaaagactcaaggataaaaaaaggatcctaaacgcagcaagagaaaaaaac

SEQ ID NO: 759790 - DNA, 534 bp, Homo sapiens
cttacacatttctcagatattagtttaaatgccccttcacctgaaggcctccccactcctggacattagcccttgctaacctctccctttgctccttgctgttttcctggttcacttttcttccccacgagatggcatgttcagagggtgaagggcagtgcctatcttactcactgctgcataaccaatgtctacttcagggtcaggcagtaaacctgactttagggttaggcttttttttttttaatttgcattgtggttcttaaagaggttctgtaagatatgacagaastttataggaattactctattaatcaaaatcatgaaactttggaagaaatccttgtacaaaataaaacagaaatgtgcatatttaaaaactgtccctttagtgtttgtaagtacagatccagttcccacatttaaaaaattctatgtggccaggtgcagtggctcatgcctgtaatcctggggctttgggaggcagaggaggaaggattgcttgagcccaggggtttgagactacagtgagct

SEQ ID NO: 759791 - DNA, 601 bp, Homo sapiens
aaaaatatgaagtgcgagtagcacttctaactggatccatgaattagcatccagttagtaaagacatttaaactgctatccatgaattagcatccagttagtaaagacatttaaaaatatgtgttaagaaatgggggtgctggccgggcatggtggctcactcctgtaatcccagcgctttgggaggccgagacgggcggatcacctgaggtcaggagytcaggaccagcctggccaacatggcgaaacgctgtctctactaaaaatacaaaaattagccaggcgtggtggcacatgcctataatcccagctactcgggaggctgaggcaggagaattgctggaacccgggaggcggaggttgcagtgagccgagatcataccactgcactccagcatgggtgacaaagcgagactctgtctcaaaaaaaaaaaacaaaaacaaaaacaaaaagaaatgggggtgctttgagtccaagccattgagcaaggaggacacacactatgattaaatatcactcatccttagaactgctcacctaagtgggtttcacagagccctgtacttgctctaagccaccttctctagaccttgtttctcc

SEQ ID NO: 759792 - DNA, 677 bp, Homo sapiens
gagtcatagtttctgcatctattaaataggggtgataatagtgcctacatagatagggtgtctgaggatacaaagagataatagttaatgttttctccttttttatttatgtatttattttgagacggagtctcactctgtcacccaggctggagtgtggtggcgcaatctcggctcgctgcaacctctgcctcccaggttcaagtgattctcctgcctcagcctcctgagtagctgggactacaggcacccgccaccactcctggctaatttttgtattttaatttttaaatttctattatttttattcttttttgagacgtaatcttgctctgttgcccaggctgagtgcagtggcgtgatcttggcttactgcaacctctgcctcccaggttcaagtgatcctcctgcctcagcctcctgagtagctgatatcacacctggctattttttttttttttttttttttttgkatttttagtagagatggggtttcaccatgttggccaggctggtctcgaactcctatcctcaagtgatccacctgcctcggcctcccaaagtgctgggattacagacatgagccactgtgcccagccaatagttaacgttttctatgttattacaatgcaccatagactaggtaagtgcccaggaaatggatccttttaccacca

SEQ ID NO: 759793 - DNA, 514 bp, Homo sapiens
caacatcaaatggaatcaaatggaatcattgaacggaattgaatggaatcgtcatcgaatgaattgactgcaatcatcgaatggtctcgaatggaatcatcttcaaatggaatggaatggaatcatcgcatagaatcgaatggaattatcatcgaatggaatcgaatggaatcaacatcaaacggaaaaaaacggaattatcgaatggaatcgaagagaatcatcgaatggacccgaatggaatcatctaatggaatggaatggaataatccrtggactcgaatgcaatcatcatcgaatggaatcgaatggaatcatcgaatggactcgaatggaataatcattgaacggaattgaatggaataatcatcggatggaaatgaaaggaatcatcatcgaatggaatcgaatagaattatggaatgaaatccagtgtgatcatcatcgaatggacccgaatggaatcatcatccaacggaagctaatggaatcaacatcgaatgaatcaaatgga

SEQ ID NO: 759794 - DNA, 569 bp, Homo sapiens
gttccattcaatgataccattcgattccatttgatgatgatttcaatcaattttattcgatgattccattcgaatccattcgatgatgagtccatccatttcaatttcatgataattccattcgtttcaattcgatggtgtttccattcgattcattcgatgttgattccattagcttccgtttgatgatgagtccattcgggtccattcgatgatgatcacactggatttcattccataattctattcgattccattcgatgatgattccattcatttccatccgatgatgattccattcgattccgttcaatgattattccattcgagtccattcgatgattccattcgattccattcgatgatgattgcattcgagtccgtggattattccattccattccattagatgattccattcgggtccrttcgatgattctcttcgattccattcgataattccgtttttttccgtttgatgttgatgccattcgattccattcgatgataattccattggattctatgcgatgattccattccattccatttgaagatgattccattcg

SEQ ID NO: 759795 - DNA, 558 bp, Homo sapiens
gaatcaaatggaatcattgaacggaattgaatggaatcgtcatcgaatgaattgaatgcactcatcgaatggtctcgaatggaatcatcttcaaatggaatggaatggaatcatcgcatagaatcgaatggaattatcatcgaatggaatcgaatggaatcaayatcaaacggaacaaaacggaattatcgaatggaatcgaagagaatcatcgaatggacccgaatggaatcatctaatggactggaatggaataatccatggactcgaatgcaatcatcatcgaatggaatcgaatggaatcatcaaatggactcgaatggaataatcattgaacggaatcgaatggaatcatcatcggatggaaatgaaaggagtcatcatctaatggaattgcatggaatcatcataaaatggaatcgaatggaatcaacatcaaatggaatcaaatggaatcattgaacggaattgaatggaatcgtcatcgaatgaattgaatgcaatcatcgaatggtctcgaatggaatcatcttcaaatggaatcgaatggaatcaccg

SEQ ID NO: 759796 - DNA, 615 bp, Homo sapiens
tggaatcaacatcaaacggaacaaaacggaattatcgaatggaatcgaagagaatcatcgaatggacccgaatggaatcatctaatggactggaatggaataatccatggactcgaatgcaatcatcatcgaatggaatcgaatggaatcatcaaatggaytcgaatggaataatcattgaacggaatcgaatggaatcatcatcggatggaaatgaaaggagtcatcatctaatggaattgcatggaatcatcataaaatggaatcgaatggaatcaacatcaaatggaatcaaatggaatcattgaacggaattgaatggaatcgtcatcgaatgaattgaatgcaatcatcgaatggtctcgaatggaatcatcttcaaatggaatcgaatggaatcaccgaatagaatcgaatggaacaatcatcaaatggactcaaatggaattatccttaaatggaatcgaatggaattatcgaatgcaatcgaatggaattatcgaatgcaatcgaatagaatcatcgaatggactcgaatggaatcatcgaatggaatggaatggaacagtcaatgaactcgaatggaatcatcattgaatagaatcgaatggaatc

SEQ ID NO: 759797 - DNA, 567 bp, Homo sapiens
tgactgcaatcatcgaatggtctcgaatggaatcatcttcaaatggaatggaatggaatcatcgcatagaatcgaatggaattatcatcgaatggaatcgaatggaatcaacatcaaacggaaaaaaacggaattatcgaatggaatcgaagagaatcatcgaatggacccgaatggaatcatctaatggaatggaatggaataatccatggactcgaatgcaatcatcatcgaatggaatcraatggaatcatcgaatggactcgaatggaataatcattgaacggaatcgaatggaatcatcatcggatggaaatgaaaggaatcatcatcgaatggaatcgaatagaattatggaatgaaatccagtgtgatcatcatcgaatggacccgaatggaatcatcatccaacggaagctaatggaatcaacatcgaatgaatcaaatggaaacaccatcgaattgaaacgaatggaattaccatgaaattgaaatggatggactcatcatcgaatggattcgaatggaatcatcgaataaaattgattgaaatcatcatccaatgga

SEQ ID NO: 759798 - DNA, 556 bp, Homo sapiens
atcaaatggaatcattgaacggaattgaatggaatcgtcatcgaataaattgaatgcaatcatcgaatggtctcgaatggaatcatcttcaaatggaatggaatggaatcatcgcatagaatcgaatggaattatcatcgaatggaatcgaatggaatcaayatcaaacggaacaaaacggaattatcgaatggaatcgaagagaatcatcgaatggacccgaatggaatcatctaatggactggaatggaataatccatggactcgaatgcaatcatcatcgaatggaatcgaatggaatcatcaaatggactcgaatggaataatcattgaacggaatcgaatggaatcatcatcggatggaaatgaaaggagtcatcatctaatggaattgcatggaatcatcataaaatggaatcgaatggaatcaacatcaaatggaatcaaatggaatcattgaacggaattgaatggaatcgtcatcgaatgaattgaatgcaatcatcgaatggtctcgaatggaatcatcttcaaatggaatcgaatggaatcaccg

SEQ ID NO: 759799 - DNA, 478 bp, Homo sapiens
gaatcatcatcaaatggaaccgaatggaatcctcattgaatggaaatgaaaggggtcatcatctaatggaatcgcatggaatcatcatcaaatggaatcgaatggtatcttcatcaaatggaatctaatggaatcattgaacagaattgaatggaatcgtcatcgaatgaattgaatgcaatcatcgaatggtctcgaatggaatcatcttctaatggaaaggaatggaatcatcgcatrgaatcgaatggaattatcatcgaatggaatcgaatggtatcaacaccaaacggaagaaaacggaattatcgaatggaatcgaagagaatcttcgaacggacccgaatggaatcatctaatggaatggaatggaataatccatggactcgaatgcaatcatcatcgaatggaatcgaatggaatcatcgaatggactcgaatggaataatcattgaacggaatcaaatggaatcatcat

SEQ ID NO: 759800 - DNA, 638 bp, Homo sapiens
aatcatcatcgaatggaaatgaaaggagtcatcatctaatggaattgcatggaatcatcatcaaatggaatcgaatggaatcaacatcaaatggaatcaaatggaatcattgaacggaattgaatggaatcgtcatcgaatgaattgaatgcaatcatcsaatggtctcgaatggaatcatcttcaaatggaatggaatggaatcatcgcatacaatcgaatggaattatcatcgaatggaatcgaatggaatcaacatcaaacggaaaaaaacggaattatcgaatggaatcgaagagaatcatcgaatggacccgaatggaatcatctaatggaatggaatggaataatccatggactcgaatgcaatcatcatcgaatggaatcgaatggaatcatcgaatggactcgaatggaataatcattgaacggaatcgaatggaatcatcatcggatggaaatgaatggaatcatcatcgaatggaatcgaatagaattatggaatgaaatccagtgtgatcatcatcgaatggacccgaatggactcatcatccaacggaagctaatggaatcaacatcgaatgaatcgaatggaaacaccatcgaattgaaacgaatggaattaccatgaaattgaa

SEQ ID NO: 759801 - DNA, 638 bp, Homo sapiens
aatcatcatcgaatggaaatgaaaggagtcatcatctaatggaattgcatggaatcatcatcaaatggaatcgaatggaatcaacatcaaatggaatcaaatggaatcattgaacggaattgaatggaatcgtcatcgaatgaattgaatgcaatcatcgaatggtctcgaatggaatcatcttcaaatggaatggaatggaatcatcgcatacaatcgaatggaattatcatcgaatggaatcgaatggaatcaacatcaaacggaaaaaaacggaattatcgaatggaatcgaagagaatcatcgaatggacccgaatggaatcatctaatggaatggaatggaataatccatggactcgaatgcaatcatcatcgaatggaatcraatggaatcatcgaatggactcgaatggaataatcattgaacggaatcgaatggaatcatcatcggatggaaatgaatggaatcatcatcgaatggaatcgaatagaattatggaatgaaatccagtgtgatcatcatcgaatggacccgaatggactcatcatccaacggaagctaatggaatcaacatcgaatgaatcgaatggaaacaccatcgaattgaaacgaatggaattaccatgaaattgaa

SEQ ID NO: 759802 - DNA, 561 bp, Homo sapiens
ttcttttttatgtaacaaatatacttgctctttggaaaaaaaatataatttcttgtggggcctttgaatatatatagaaacactcaagatgggttcataaatcaaaaataaaatcctgtggctcccaaattgattgaatgaacactccataggccatggggatcccagagaaacctgaaaaactgaattccatgccacaagggaagcaaagtcagccatacttccttgtactcccctgttttggagtttaagtacagctgaccagcattaatgttaaaacagagatcataaagctgacaaaacatactctgtggcaataaaataccaaattataaagaagacctaagaccatgcaagccagggttaagttacacagtacaaaccataaaatctttttttttttgacctctgaastttttattggcctcctgctccccaaagggtaccctgcttctgctggcttaatgtctcagaactttggtgtcattggtctcacaccccactttgctgtccactatctgatgggtggtggtctttggatggtttgcatagagttgctgc

SEQ ID NO: 759803 - DNA, 432 bp, Homo sapiens
gataacgtgtgcttcatagctggttgtaaagattaaaagctaccatggctaggagcttttggaattcttttttcttttaattttactttaagttctaggatacatgtgcagaacctgcaggtttgttgcataggtgtacatgtgccatggtggtttattgcacctatcaacccgtcatctaagttttaagccccacgtgcattaggtatttgtyttaatgctctccctccccttgccctccacccccacccggtgtttgcttttcccctccctatgtccatgtgttctcactattcaactcccacttacgagtgagaacatgaagtgtttggttttctgttcctgtgttagtctgctgagaatgatggcttccagcttcatgttcctgcaaaggacatgaactcattctttttatggctgcatagtattcca

SEQ ID NO: 759804 - DNA, 650 bp, Homo sapiens
atgagactcaagcaaaaagactgtttagtatgcatacctctgaatacacacacacacgcacacacacaatgaatttacaagtcttctactgaaactgaaaaggtttctacagaacaagaaatgatcactggaaacccatcatacaatttcgctattactagttgaaaaatgtaagatgtcattgagattgccattgttgaagatgtcatatccgttgttttagtttagtgaatacgtgactatttagtgggattttataraggtgttttctctcttggctctctagtcatattttcccccttaagtcccaagtttcttaattcttaatttcaaaattttcttacattagcagttatcaacaaccagactcctaaactgtagtgggaaaactgtattctgttctaagactaaaaataaatgtcatctgaattatccaatgctggcacttatgattcttccattagtacaacttctaatgagagttcatgctgggcaggacttcatctcctctcaacccacaagagaacagatgatgccactattatttccttctaatagccctaaaaaatgtaaaagaatagcaaatcaaattcaaagaaagcaacaggaaggaattaataaagataagtgacaatttatgaaatagaaaa

SEQ ID NO: 759805 - DNA, 530 bp, Homo sapiens
tgttgtgttttacagggtgaattcaatgagtgggatatccaaatctggggaatcatgagccatatgaagttggagtttttctttctttctttctttcttttaaaggcaattttatttctaagtacattcagttattcaaactaaagtgaaaagccctgccgaacggaggccttgctgactctgctccaaggactagaataaaggcacatctgtaattagcacattaattgctttagcacacatggttactactacagtatttgaaaacagctgcaaatagataaaacattcctaggatcttcatctgtcaatttgctcggcatatcccrtcttcataaataatgtaaaatctgaatcttagtaaaatgttcatagatttgcgttagtgaagttctatcacatgaaataattctataaaaatctggggaaatgacaatacttattaaggttgtgctgaaccataccaacaaatcagctgttttccagttgatttagtttataagtccatcttaacatggcacaatttactt

SEQ ID NO: 759806 - DNA, 583 bp, Homo sapiens
ataatgtttgtggttttttgctgtggaaacattgaacacttttaattagctatactcatcaatgttttcattcattgccttctgggtattttattgtaccctgtttagaaaggccttcactccaaattcataaataaacccacttgtcttttcttctatttatttgttgttacacatgttgcttcattttttacatttaaaactttggtccattttagaatttattttcgtgtaaagaattagactacagatctagctcaaattgttttcccaaatarctctccctttctactccatttctgtaagtaagcaagtagaagaaaagaccataggtcaaggaaggaaggaattgtggatatacctgaggcatgactttagtgcggatgtttcttgtttgccatactcagtcctcctatcagcgctatgggttaggataattccttccatgttacttacaggcaagacacagatgctgatgttttctaagaattcacaaatatacatacagctagtcaggagtagagattagatatggacttacataggactcagttcagggattctggaaaaccttcccagaagg

SEQ ID NO: 759807 - DNA, 555 bp, Homo sapiens
cgtgcatgtgctctgttccataactctgcatgctgaaatcctccctgcgctcctgtcccatcaaatgtcatctttttcataacaagcccttccatttcttctctaattggatatgattccctttgaaccctgattacattccattttccttttatcataactgactatatatctaccttactcttctagtctagaggctcttttgggtaagtgtgtgtattatcctatggtgaaaacacccatcgttttagaattggaaaaggactgttctttgaccatccctaagcagagtttgacacgcatttgattagaggagactgaatgggctggtgttagtgtgacttagttcctgtttcttgcagagagttggcacgctgtgtggtatggtgtatgttggcagtcccrtgactttccttttacttttccctataaaaacttactcatgttaaaactagaccttattttttttgttatttcaagagatagcaatgaactgtttacttgctcaaaatcactatcggttgcacatcataaactcagaccgatggggtcaca

SEQ ID NO: 759808 - DNA, 623 bp, Homo sapiens
ttatttataaatctgtttatatggacaagtgtgagtttacataaaacttccgaatcctatccaacaccacagcgttcctttttagttttccctttcactatctgcaactcttgtctctgatgagaaacctgcctcactacccttgatgcatttttttgtagatcactccttgtgtatcacttatctcccatctcatgaggacgccctccccacctctctccggttctgatggtgctggacttgtccttacatgagtgccctcatcacctagttgaggctctgacacccatgtacagctcctctaygtggaggcactcttctcacccatctaatggcttcaggactgaattgtttgggaagagaagaggtagagaaagaagaactgatctttccttaagtgcagaattttgagtcagaatcaaaatagtacttgactgccccatgcttgctctggggcagaaaggagagatgcctggacttaagctggaagagtggaataggcggagtgggcacaggtcccggaggtagagtacctgcattccaggcacagctctgtttctaaggggccaaatgatcttagagaagtaatttgatctctttgtgccccagctcttccaataatg

SEQ ID NO: 759809 - DNA, 664 bp, Homo sapiens
tcaaaatagtacttgactgccccatgcttgctctggggcagaaaggagagatgcctggacttaagctggaagagtggaataggcggagtgggcacaggtcccggaggtagagtacctgcattccaggcacagctctgtttctaaggggccaaatgatcttagagaagtaatttgatctctttgtgccccagctcttccaataatgaattggaccaaatctaaatcaaagactggtgccctatggccaaaattggtctaagtgcttattttgtttgggagtcaacttcctttctttctttctttytttttttttttttttgagacaggtctcccactgttgcccaggctggagtgcagtgttgtggtcatggctcactgcagccttgactgcctgggctcaagtaatcctcccacttcaacctctcaagtagctggtaccacaggcgcatgccaccatgcctggcgaatttttgtatttcttgtagagatagggttttgccatgtttcctaggctgctctcaaaatcctgagctcaaacaatccacccgcctcagcctcccaatgtgctgggagtgatacagagaggaggcagggagatactgcgtagaagagggtggttccctggcaaagtccccaccctgaagcttggaaacccacggcccta

SEQ ID NO: 759810 - DNA, 542 bp, Homo sapiens
attttactctcaagcatttttttaagtcaaaattctacacatcagtaatagttatactgccatttgaggtcataacctgacccactgacaaagaagcccagtgatataatattattttcatatgcttcttttacacctctccctgctaattaccatcatgttaccatattcttgccaaaaaaaaaaaaaaaaaacaccagagtcgttacatgaagtatctttgatcactgaatttccagcacttctttgttgtgtctagatgctaagcccttttctaatttgaaaaaaaaaaamaaaaaactggagacctgattctgtttatctcttgtagtttctcttatctctgtttctaaccactctatgtagtgcctctttttttctgtctacacacacacggagcatccaccataccaataatcacagtatgtggtaatgaaaagtggaagggaaaaatggcccttgcttctcacagacaaactcactatctcaatggatcatttttgtttttttgttttgttttgtttttgagacagtctcactct

SEQ ID NO: 759811 - DNA, 630 bp, Homo sapiens
aaccttagctaaatcgggaggctaaaaattatcacaagaacattatttcagctgaccttgtcatactggaaattgtaaaagtatctatgaaaattttcatttttaggtcacagcagtatatttttcatacacttaaaaaaatctatactcttcttcttcttcttcttcttgtttyttgctcttgtcacccaggctaaagtggaatggcaagatctcggctcactgcaacatctgcctcctgggttcaagcaattctactgcctcagcctcccgagtagctggaattacataattacataattacaggcaccagccaccatgcctggctaagtttttgcatttttagtagggacaggggttacaccatgttggccaggctgctcttgaactcctgacctcaggtgctccgcctgcctcagcctcccaaagtgctgggattacaggcgtgagccaccaagctcggccaaaaatcaacaatcttattgttaaaagtaaatctgtaagactcagataatgatctgttttacaatcaattgttttctctctattgtctacaaaactagatcattcagaggggtcatatttgtcttgactgtttggcataattgcccaaatatccagagacatttg

SEQ ID NO: 759812 - DNA, 628 bp, Homo sapiens
gttccagatatagcatagtaatgttctcaactccttaaatcgtgtgaaagttattcattgaataaaaacataggatacaaaaggcaaacatattctacttaaaacttgtccctcatcagcactcagtgccaacagtattaatttgctccagatgatagtgtgtattataaaattataaagttcatctaaattatgttttgaccctctgtgtagaatataaaatcactggatttcagagcataccacctgcttttttacatactttatacagagtatgatttcggagtatgattagagagtatgatatcagtatactgataaccaatttgttgtgtaattataactaatttgaatatattgacaaccaatgtgtttgtgtataaatatatattttgtgtatatattttgttgtggcaagcaaatatatatgtgcatgaaatcaaataaaatwttcattttccaaagattttttagtatgtataaagttatataaaatgtaccattgtcaaggttttgcaagtattttgaatattatgaagttttttcaagataaatttattataaagaatgtttgaaatctcccttgtattttgaataattctgctaaatgtgtaattattaatgttac

SEQ ID NO: 759813 - DNA, 534 bp, Homo sapiens
cgttaggtctgttttaggaagtcaattttggtcattgacactatgttttgggctaacctgtgtgcttctacaattcaaattttgaagtcctcacgccagtagctaagaatatgactgtctggagacaggtctttaacgaggtaattaagttaaaatgaagtcaggccccaatccaatatgagtgtgtccttataagaagaggagatgtggacacagacagatgcagagtgaacmccatgagaaaacacaggaagaagatggacatttgcaagccaaggagagaggcctcggaagaaaccagccctgctgacaccttgattttggacttccagattacttggaaatgtggaagtctggaaatcttggatttccagatttattccaagacaacaaatttctgtttaaattacccagtctgtgttactttgctctggcagccctagcagactaatgtactgtaggaagcagaaaacagttaaaaatatcattcctttactgaaaaaaaaaaataagccaatagacaagtttccttat

SEQ ID NO: 759814 - DNA, 534 bp, Homo sapiens
cgttaggtctgttttaggaagtcaattttggtcattgacactatgttttgggctaacctgtgtgcttctacaattcaaattttgaagtcctcacgccagtagctaagaatatgactgtctggagacaggtctttaacgaggtaattaagttaaaatgaagtcaggccccaatccaatatgagtgtgtccttataagaagaggagatgtggacacagacagatgcagagtgaaccccatgagaaaacacaggaagaagatggacatytgcaagccaaggagagaggcctcggaagaaaccagccctgctgacaccttgattttggacttccagattacttggaaatgtggaagtctggaaatcttggatttccagatttattccaagacaacaaatttctgtttaaattacccagtctgtgttactttgctctggcagccctagcagactaatgtactgtaggaagcagaaaacagttaaaaatatcattcctttactgaaaaaaaaaaataagccaatagacaagtttccttat

SEQ ID NO: 759815 - DNA, 534 bp, Homo sapiens
cgttaggtctgttttaggaagtcaattttggtcattgacactatgttttgggctaacctgtgtgcttctacaattcaaattttgaagtcctcacgccagtagctaagaatatgactgtctggagacaggtctttaacgaggtaattaagttaaaatgaagtcaggccccaatccaatatgagtgtgtccttataagaagaggagatgtggacacagacagatgcagagtgaaccccatgagaaaacacaggaagaagatggacatttgcaagccaaggagagaggcctcggaagaaaccagccctgctgacaccttgatyttggacttccagattacttggaaatgtggaagtctggaaatcttggatttccagatttattccaagacaacaaatttctgtttaaattacccagtctgtgttactttgctctggcagccctagcagactaatgtactgtaggaagcagaaaacagttaaaaatatcattcctttactgaaaaaaaaaaataagccaatagacaagtttccttat

SEQ ID NO: 759816 - DNA, 601 bp, Homo sapiens
tctggaaatccaagatttccagacttccacatttccaagtaatctggaagtccaagatcaaggtgtcagcagggctggtttcttccgaggcctctctccttggcttgcagatgtccatcttcttcctgtgttttctcatggtgttcactctgcatctgtctgtgtccacatctcctcttcttataaggacacactcatattggattggggcctgacttcattttaacttaattacctcgttaaagacctgtctccagacagtcatattcttagctactggcgtgaggacttcaaaatttgaattgtagaagcacacaggttagcccaaaacatagtgtcaatgaccaaaattgacttcctaaaacagacctaacgaggtagtaacagtggggtgtgtraggatgcatcagcacacatgatgggaaaacagtgcttatgacgaaggcacggagtgagtggtgatgaagtgtatgccaatgaacattaactgaggggctcaacttggccattctgattctgtgtctattgcattctgagagctactttaggagttcctgtattacttatgtgaatggatccttgtgtcacagaaaactaaaag

SEQ ID NO: 759817 - DNA, 507 bp, Homo sapiens
gtctatgaattaggctctgttcattgattttaactgatacttggtggatcatttcaaatttgtgttcaattagaaactttaaagccaaaatttgtgttcattgtctttgatctgttctgatgtctgtttgaggaagtgcaactatcggaaggtgaaatttcctctttttctgtcaatttttcccattttatttttacattgttttatcatttccacaactttggaagaacatgcctgagctaatgtcctcatcaatcctatgtgtgcagctaatgttttacactgtgatttttgaacattggccaatatgattttaattttttcttgagctttcctaatctccctgagttagtttaartctaatgccatggatatatcattatttttaatgtttattttgagaacataattcaccttttttccaaattgtttttcctatttttttagtacatttatttcagacgaagccatttttatatttaagcttatttcttgagtcaatattgc

SEQ ID NO: 759818 - DNA, 616 bp, Homo sapiens
gcattccgtagacaatccccttccctttccaggtcttttcccccatccaggagagaattaatgaagagtctggcacctttataggtctgataagagctctgaagcgtgctactggaggcttcatctgcatgacaaaactatggtctccacaaccycttatcttaacccagacattcctttctattgattccaggtctttatatgatagctctttcaagcaattgtcaatcagaacatctttgaatacacctatgaccaggaagtggcccccaactccaccctcagtttttagttgtcccacctttcaggaccaaaccaatatatacattacatgtattgattgatgtcttatgttaccctaaaatgtataaagccaagctgtgtcccaatcaccttgggcacacattctcagactctcctgggactgtgtcatggaccatggttactcatatttggctcagaataaatctctttaaatattttacagagtttgactctttttgttgacagactcttgtttattaaaatccttaatatactctcctatttttatcccactgttatgtaatttaaaaattacaatgcaaatgtcattcctagtaattaatatatattt

SEQ ID NO: 759819 - DNA, 637 bp, Homo sapiens
tataaatgtggacccttaaaaattcctaaagtaagctttcttcatcttaagtgatttttagcttaaggaggggattattcagataacaattagaattaatacatgatggcctggcacgatggctcacacctctaatcccagcactttgggaggctgaggtgggtagattatgaggtcaggagttcaagaccagcctggccaagatggtgaaaccccatctctactaaaaatacaaaaattagccaggtgcagtggcaggtgcctataatccaagctacttgggaggcygaggcaggagaattgcttgatcctggggagaggaggttgcagtgagccgagatcgcgccactgcactccaacctgggcgacagagtgatactccatctcaaaaaaaaaaaaaaaaattaatatatgctatgttgctattttttcctgcttcaaatatttagttatgatgtaaagttactgctcttgtaataggtaagttctttttgaataaaaaccatgtaaaagtggtaagttataaaaatttaactaaaatgtaaatttggatttttacaacagattttaattactgaaattttttaaagccttcctcctataagcagcattcctaataaatcaatcaagttgtgag

SEQ ID NO: 759820 - DNA, 601 bp, Homo sapiens
ggcggatggcttgactcaggagttaaagactagactaggcaacatggcaagaccccttctctacacaaaatacaaaatttatctgggcatggtggtgcacacctgtagtcccagctacttgggaggctgaggcaggaggatcgcttgagcccaggaggtggaggttgcagtgagctgagatcatgccatgcactccagcctgtgtgacagagtgagatcttgtctcaaaaaagaaaagaaaagaaaaaaagggagagagaatcaacaaagccaaatttggtgctttgtaaagatcaayaaaactgacaaatctttagctggagtggcgaagataaaaagagagaagatacaaattactaaaatcaggaatgaaagtgggagctcacagaaatagaaaggattgtaaaggattgctatgaacaaatgtactccaacaaattagataaactacgtgaaatggacaaattcctagaaacacacaaactacctaagctgactcacaaagaagaaaaataacaaaacacctataacaagtgaagatattgaatcagtaatccaaaacctcccaacaaataaaagttcaggaccagatggtttcact

SEQ ID NO: 759821 - DNA, 624 bp, Homo sapiens
agatggtttcactggtgaattatttcagacatataacaaacaattagcacaaatccttctcaaactcttccatataatagaagagggaggaatacatcctacctcactgtaagaggccagcattaccttgataccaaagccagattgakacatcacaagaaaagtataggtaaatatctctaatgagacagataaaaaacatcctcagtgaaacagtagcaaagtgaatacaacagcatattaaaaggattatacatcatgaccaaatgggatttattccttgaatgtaagggtgattcaacctacaaaaattaatggacataatacaacacattaacagaatgaagaatgaaaaaaaaaaaaactcatggtcatctcaattgatgcagataaagcattcaacaaaatccaatgatctattataatgaaaaaaaaaacacatcaaagtaggaagagaagggaacttcctcatcataaagtcttttatgaaaaacctacagctaacattttactcaatggtgaaataatgaaagctttccccctaaaataggaacaagacaaggatttccaatttcaccactgctattcaacatttattggaagttctagccagaacaactaggc

SEQ ID NO: 759822 - DNA, 624 bp, Homo sapiens
agatggtttcactggtgaattatttcagacatataacaaacaattagcacaaatccttctcaaactcttccatataatagaagagggaggaatacatcctacctcactgtaagaggccagcattaccttgataccaaagccagattgatacatcacaagaaaagtataggtaaatatctctaatgagacagataaaaaacatcctcagtgaaacagtagcaaagtgaatacaacagcatattaaaaggattatacatcatgaccaaatgggatttattccttgaatgtaagggtgattcaacctacaaaaattaatggacataatacaacacattaacagaatgaagaatgaaaaaaaaaaaaactcatggtcatctcaattgatgcagataaagcattyaacaaaatccaatgatctattataatgaaaaaaaaaacacatcaaagtaggaagagaagggaacttcctcatcataaagtcttttatgaaaaacctacagctaacattttactcaatggtgaaataatgaaagctttccccctaaaataggaacaagacaaggatttccaatttcaccactgctattcaacatttattggaagttctagccagaacaactaggc

SEQ ID NO: 759823 - DNA, 543 bp, Homo sapiens
agagcaagaaagaaaactcccaaggaagccttcccaaattttaatccaatattctttccctgcttataatgaccactgaatctatcttccattgtgttaatagttaaaacaaaacaaaaacacctaaaggaatctgttttttccttgatattttccctttattcttttttaaatgatcatccatactttgtgaagtgttatttgaggttgaaatatagtttctcatctttgcattagatttgcattgaaaggcaaaaagcaatataaaacacttattggaacaaatgggtaggtcttcatgcatgtatatttatgtagaagtgaagygtaaaatctaatctcttaggattttaacacttggcattatttgctctagttaacagatcctgtattttgcaacttaaaatttaagaaatttgagggaattcttgatttcaataggcattagtggtgaaaacaatatttttcacaaaataaaattatcaaacatatctatcatattgcaatatttgattaaagttcttcactacaaatctctaaaaa

SEQ ID NO: 759824 - DNA, 566 bp, Homo sapiens
tgggcatgggagtgcgaggcatgtcagatacacacatgaacattccagacaaggtaaacagaatttcccccttatttacagtatgaaatgtgttattttaaagttagcctatagtaggccacacatggtggctcacgcctgtaatcccagcactctgggaggctaaaggctggggggatcacttgaggccaggagttcaaaaccagcctggccaacatggcaaaaccccatctctactaaaaatacaaaaaaaaattagccaagcatrgtggctttaatcccagctactcaggtggctgagatatagaatcgttcaaaccagggagggagaggttgcagtgagccaggattgccccactgcactccagcctgggcgacagaatgagactctgtctcaaaaaaaaaaaaaagttagaccgtagtaatcaataattctttttttaaaaataatatgttaggtgctagagatagatgaatcaatgatctcagaattcaaagtctagcagaggaaaatgaacgagatgcacaaattgctctagtccagagaaaggagcatgtgaagagtg

SEQ ID NO: 759825 - DNA, 573 bp, Homo sapiens
gtattcatcccttcctcccccaacccctggcagccactgctctttttactgtctccaaagttttgtctttttcagaatgtcatatagttggaatcatacattgtgtatcttcctcagagcgtcttcttttgcttagctatatacatttaagttccctccgtgtattttcatggcctgataactaatttttctttttttttttcttttttgagacagagtctcgctctgttgcccaggctggagkgcagtggcgcgatctcagctcactgcgagccccgtctcccgggttcaagcaattctctgcctcagcctcccgagtagctgggattacaggtgcccaccacaatgcccggctaatttttgtttgtttgtttgttttagtagagacggggtttcaccatcttggccaggctggtcttgaactcatgatctcatgatccacccacctcggcctcccaaagtgctgggttacagtcatgagccaccgcgcccagcggtggttttttttttttttttttagtgctgaatagtattatgttgtctggatataccatactttatccactcacttat

SEQ ID NO: 759826 - DNA, 653 bp, Homo sapiens
gtgtcatgcaaaatggcttcactgccataaaaatcatctgtgcttcatgtattcatcccttcctcccccaacccctggcagccactgctctttttactgtctccaaagttttgtctttttcagaatgtcatatagttggaatcatacattgtgtatcttcctcagagcgtcttcttttgcttagctatatacatttaagttccctccgtgtattttcatggcctgataactaatttttctttttttttttcttttttgagacagagtctcgctctgttgcccaggctggagggcrgtggcgcgatctcagctcactgcgagccccgtctcccgggttcaagcaattctctgcctcagcctcccgagtagctgggattacaggtgcccaccacaatgcccggctaatttttgtttgtttgtttgttttagtagagacggggtttcaccatcttggccaggctggtcttgaactcatgatctcatgatccacccacctcggcctcccaaagtgctgggttacagtcatgagccaccgcgcccagcggtggttttttttttttttttttagtgctgaatagtattatgttgtctggatataccatactttatccactcacttattgaaggacatctgattgcttccaagttttggc

SEQ ID NO: 759827 - DNA, 653 bp, Homo sapiens
gtgtcatgcaaaatggcttcactgccataaaaatcatctgtgcttcatgtattcatcccttcctcccccaacccctggcagccactgctctttttactgtctccaaagttttgtctttttcagaatgtcatatagttggaatcatacattgtgtatcttcctcagagcgtcttcttttgcttagctatatacatttaagttccctccgtgtattttcatggcctgataactaatttttctttttttttttcttttttgagacagagtctcgctctgttgcccaggctggagggcagtggcgcgatctcagctcactgcragccccgtctcccgggttcaagcaattctctgcctcagcctcccgagtagctgggattacaggtgcccaccacaatgcccggctaatttttgtttgtttgtttgttttagtagagacggggtttcaccatcttggccaggctggtcttgaactcatgatctcatgatccacccacctcggcctcccaaagtgctgggttacagtcatgagccaccgcgcccagcggtggttttttttttttttttttagtgctgaatagtattatgttgtctggatataccatactttatccactcacttattgaaggacatctgattgcttccaagttttggc

SEQ ID NO: 759828 - DNA, 681 bp, Homo sapiens
tttaataaaagaaatactagttctaacatttcagagtggtcttttagttaaaaatgcaacattttttattatccttgtctcatcctgacaaaggagggtaaaagctagtctaaacttattgagagaactctgtcagagtatgtgattcattattggaatgtgtcacatctaaacttttttttttaatttgctgggatataggttcaactgattatagagtagtaaagaagctttaattagcaatattcaagaatgaatctttatctccgggatgacgtattctttaatgtgtttgtaatggcaaccttgtttaaatgccaggagtgctcttgttaggagatagccatgccacccacttatcatatttcacaagcagcctatttcataacytacaggaagctagatgtatcctaagagtaggaattttgcttagtcaaaactctgacactttttaaagaccttagaaataccaacatttaccaaaaacaaccatcccataaatttatcaatctaaattgagggaagcaaagatgttatgctggcaatttatttcatttattttcccagtgtatgtttaatcctcacttatgattaatctgagattggccaagggagtaatgtcaggaaaatggtggggtaagagacaccactctttattccctcacacacaaaaaacaatta

SEQ ID NO: 759829 - DNA, 681 bp, Homo sapiens
tttaataaaagaaatactagttctaacatttcagagtggtcttttagttaaaaatgcaacattttttattatccttgtctcatcctgacaaaggagggtaaaagctagtctaaacttattgagagaactctgtcagagtatgtgattcattattggaatgtgtcacatctaaacttttttttttaatttgctgggatataggttcaactgattatagagtagtaaagaagctttaattagcaatattcaagaatgaatctttatctccgggatgacgtattctttaatgtgtttgtaatggcaaccttgtttaaatgccaggagtgctcttgttaggagatagccatgccacccacttatcatatttcacaagcagcctatttcataacctacaggaagctagatgtatcytaagagtaggaattttgcttagtcaaaactctgacactttttaaagaccttagaaataccaacatttaccaaaaacaaccatcccataaatttatcaatctaaattgagggaagcaaagatgttatgctggcaatttatttcatttattttcccagtgtatgtttaatcctcacttatgattaatctgagattggccaagggagtaatgtcaggaaaatggtggggtaagagacaccactctttattccctcacacacaaaaaacaatta

SEQ ID NO: 759830 - DNA, 541 bp, Homo sapiens
aacagaaggtggtttcctgggtcttcaataccagaacaagtgtgtattttgtgaactgataggagaccacagatattcaaagattcaagatgatgcaaagcagattttatgtgcagggattttttatgtctttaaagagaatactattgacactcagttttactttcagagaagactaggatttaaatggcaatggtatacttcccctctttatatcattttggggcaaaaattatctttgtccaaatattcagctagcaatgtcaaaggataaaagtaaagaatgcctaatatccaaaaataaaaatatagtgaatactgtaggttaagtggaggaaagctattaraaagaaactcagagggttgcagccagggagtgacagtaagaaggcaagtataccagcctctgtcattttgacagcaattgactaatttgctccaggttttcttgaggtttctttcagtgtatttataaccataaaagcatttcttttggtcccaagataaaaaagctttttacgcaatagtgcatatttctaat

SEQ ID NO: 759831 - DNA, 569 bp, Homo sapiens
aatgtaagaacacaatatactaaatatgagaaagcaaaataggaaaaagcaaggaaaatgacacttccaaatgaacacaataattctcccatartagagcccaagaaaaggaaatctatgaagtgcctggaaatgattttaaaacaataatgtcaaagaaactcagtgacatacaagagaacataagtaagcaatacaaataaatgagacaaaaattgtgatctcaatgagacattcagtagggacagatatcgtaaaaagaaccaagtagaaaatttagtactgaagaatttaataaatgaaataaaacaataccattgagcactccaacaatagactagatcaaacaaaagaaatgatttctgaacttgaagacagatcttttgaaataacccagtcagacaaatcaaaatcacagtgagatatcccctcattccagttagaatggctataataaaaagacaaaaaatatttttgatgaggatgtgtagaaaggagaatgcttacacactgttagagcaattgtaagttaggacagctgctgtgaaaaactgcatgcatggtactca

SEQ ID NO: 759832 - DNA, 637 bp, Homo sapiens
taaaccaactgcagttccctaaatgcatgctgattttcgacacttgtatgtctttcctcctaatgttttcactacttgaagtattcttttcttggctgtcttgttcccactttccaagatttagttctgcaatactcatcttcgcaagtttttttcagatttcctgcaagcccytcttccaggttctagagaactctgtgcttaattcaagaaaagtacttgttacaccttattttaattggcttgtgcctgtttttttcacctttgcttaggggggctaattaaaagcaggtgttgcctttgtaatacgctcagaatctcacacagattctgacaacacatgacttcaaaatgaacaaatacatcgatgaatgaatgaacaaaaatcaatatagtttatcttttccaaagtaaactgaaatataaattttactttttcacttatttaaggagttgtgtcacttcatttggacttccattcagcaaatgttgataatttattgtgtcctagacattgtgacagaccctggaaggctcacaggagtgaggtattattctgtacttcaaagcattcaccaagtgaaatgcaaaccaaatatttaagcaaatcctgcatcacacaacatataatacaatc

SEQ ID NO: 759833 - DNA, 637 bp, Homo sapiens
taaaccaactgcagttccctaaatgcatgctgattttcgacacttgtatgtctttcctcctaatgttttcactacttgaagtattcttttcttggctgtcttgttcccactttccaagatttagttctgcaatactcatcttcgcaagtttttttcagatttcctgcaagcccttcttccaggttctagagaactctgtgcttaattcaagaaaagtacttgttacaccttattttaattggcttgtgcctgtttttttcacctttgcttaggggggctaattaaaagcaggtgttgcctttgtaatacgctcagaatctcacacagattctgacaacacatgacttcaaaatgaacaaatacatcgatgaatgaatgaacaaaaatcaatatagtttatcttttccaaagtaaactgaaatataaattttactttttcacttatttaaggagttgygtcacttcatttggacttccattcagcaaatgttgataatttattgtgtcctagacattgtgacagaccctggaaggctcacaggagtgaggtattattctgtacttcaaagcattcaccaagtgaaatgcaaaccaaatatttaagcaaatcctgcatcacacaacatataatacaatc

SEQ ID NO: 759834 - DNA, 627 bp, Homo sapiens
aaaagaaatgacataggcgatacagcaggtcttctaaggacaactcataacaaattatatcatatataacctacaattttgtatagatctttccaaaagcaaggacaaacatcactagctagagctacagtcctctgatgaatatggtacactgaaaatttgatcttaagcaatggcatttgcaaattatagacagttagtaaaaatgccatgacattattaaaaaatctaccatttayggatatatgatatggaattgcctactgaagagagatcaaatttaactccagaaccatgctgtctgtatgttatctgaagtttgtatatattttcttacctttattagctgttggtatttctaattctattgtgtgttttctcatattctccattaactcttgtgacttttatgaagtattttattaaaccatccctacagatgatccataattgtgatcaattcttttgcccaaaagggacacctcagattagtaacattacatttataatgatgcctttaatgagactcttttctttgcagggatcctttacattacatacacatttacacctttaccacttcctaaacagggatgagatcaggtttctacgagaaatcacatcgtc

SEQ ID NO: 759835 - DNA, 627 bp, Homo sapiens
aaaagaaatgacataggcgatacagcaggtcttctaaggacaactcataacaaattatatcatatataacctacaattttgtatagatctttccaaaagcaaggacaaacatcactagctagagctacagtcctctgatgaatatggtacactgaaaatttgatcttaagcaatggcatttgcaaattatagacagttagtaaaaatgccatgacattattaaaaaatctaccatttacggatatatgatatggaattgcctactgaagagagatcaaatttaactccagaaccatgctgtctgtatgttatctgaagtttgtrtatattttcttacctttattagctgttggtatttctaattctattgtgtgttttctcatattctccattaactcttgtgacttttatgaagtattttattaaaccatccctacagatgatccataattgtgatcaattcttttgcccaaaagggacacctcagattagtaacattacatttataatgatgcctttaatgagactcttttctttgcagggatcctttacattacatacacatttacacctttaccacttcctaaacagggatgagatcaggtttctacgagaaatcacatcgtc

SEQ ID NO: 759836 - DNA, 614 bp, Homo sapiens
aagggttttcttccccttttttcgtaattttttctttacttttcccacctttcttctaataagatctttctgatcaattatattattaagcatctagaagacattcagatattaagatgtgcagcatttgcaacccagttatcctcatttaggccaaatcgtacttaagtgactattttaataacaacagcatttattttggcaaataaagggaaagaaccaycacacataaattacagaaatatactgtatatccaaaaatttcaatattctatttgcactatgtgagaaagccaaaatctaatgaattttagttaagtaacaaaaataaataagcttacatagaaagtatgaatatttgttataatatttgttttaatcaaaactaaaactccaaatacaaatagtaagcaatcactaccaaaaagtatgtaaaaacttattcttccttactgtgtgctaaattattaattcttataatttattaactattaaaatataatcaaaccaaaaatgattactgaactacaagaagatgtaaaaccatggctgttataaaataacaggaaacaaagatcattaatcttttctggaattcattattgtactcagac

SEQ ID NO: 759837 - DNA, 611 bp, Homo sapiens
aattaataaatttccatcattaatgtaagggggagccatcattaaaatcatttatcccactagatgtttgtactggttatacattctttgcaggagcatgatgatagcatttagaaaccctaaatacagtggtactcggaatttgttgtttccatgcttcatgaccttatacacgttgctcaggctctttaagcacaagttttctcaagtctttgataccagtaaactccctcttgcctatttcataggaaggctttgaagctcaaaataaacttttaaaatagaaacactttttaaatcacaattttaagaaataaagacattttgaaaattatcaaagaytaaaaatataaagttacattattatttgcaaaggaaaaaagttctggtgccgaaatgtctcaaataaatatatgtatggcctccctgcagggaaggacaagaatgtataactcttgccacaccctctagttctccaaaagactaatgacaggattaatacatgtttttcgactaaatttttctttgggaagggctagtgatatcagttactgccataaacttgtaattttgaaaatattttatcaacatttgctttatttttcatccta

SEQ ID NO: 759838 - DNA, 595 bp, Homo sapiens
caccactgtttcaatagtatatgatcctgtgcacatgcccacgcattacaccattgatcccatcccaatgaatccccacaggcctcttatatgcccttggtacatttctgcccttctcgagcactggaatgatagttttgcataccgtgaggctttgatgtccttaaagcaggtattggtgcggagactgattcatagcatgtacaggggatatattttagaataaacaagacaagcgggctccaagtctstttgtgagtaacttcaaaagcatcccccacttttattcatgggcattagtgtaattaacccaaatgtttaaaatacaagctgatcctctaacaatgtagaagacagggagaaaatatcttctttattaagggcatcacctacagtgtgcatagaagcattattgcattgcttctcccttaaaatctatacaccaattactacagaaagcaagagttctccctagtgtttccaagaagcaagtctgtaagaatgatatgtgtcgataccctgaagcctcagaggagcaaataactgttttaactctcccaggacccacttccttgtctgtgctgccatggaaacc

SEQ ID NO: 759839 - DNA, 649 bp, Homo sapiens
caatgtagaagacagggagaaaatatcttctttattaagggcatcacctacagtgtgcatagaagcattattgcattgctkctcccttaaaatctatacaccaattactacagaaagcaagagttctccctagtgtttccaagaagcaagtctgtaagaatgatatgtgtcgataccctgaagcctcagaggagcaaataactgttttaactctcccaggacccacttccttgtctgtgctgccatggaaaccattctcttgtccaaggcgagttctctgataattagttttaaaagaacattcttgatttgtaaatgaacaaatcaatcctctgcatcaaggttattacataccttaaactctatgtattatcatgtttaacaaaatgctctctattcactcatttattcaaaagtacgtactgagcaagacagaaaagcagtatgggaggtactggtggaggcacctttatgacactgtttgatgaaagcctgtgacacgcagctgacgaatcatacctgtccctgccagagtccaggggaatacttccgttagctgccctaccccagctcccaactatatgaggacacaaaggactcctcagcttactttcctgactgggttacaaatttagctactgcattaatt

SEQ ID NO: 759840 - DNA, 627 bp, Homo sapiens
aatacaacagttctcttagaaatgtaaatgagaatattttctcaaatcaacaaagaggatgaaaaacaatgttgaaggcatcatccaaaaagtaaaccaaaagtttataatagaaagtaatcaactgaggaaagttatcaccccaagaaaactgtttctcatttctgtatctgtcaaatcgggataataatattaacaccaacgacaataatgtcctattaaacatggtacagtgaatacccagctcatgtagttktcattaggattaacttagtgaagagagttagtaaagggacttagaaccatgactggaataaagaaaacactcagtaagtatcagaatttggtatcaacaacaatattattatggtgaaaaatacatattccaacaacaggagaaaaagtaaaagggatagagagcagattaaaaagaaattacgtataaagtatgtctccaaactaagagtgtgtatctcaagatctgaactatccacccagcattcaacacaattattgaaaatagatgcaggccaaaagcaatttcacaacactaggagtaatgggaagatcttaaagttttcggagaggagaaggaggaaaggagtgaagagataaatatatacaatg

SEQ ID NO: 759841 - DNA, 602 bp, Homo sapiens
ctggggcttgacctcttgtgccactggaaacccagagctcgccaggaaggagccaaggctagactccaaggatgaaagatcaaaagatcatgtaagggaatggggccacaaccatctcagccatccagctgaagtcccaaatatgtgaatgaggccatcctagattctctcatcccagccaagctagccagagcacaagaaccacaacagctgactccacagaattgaactaacagttgttttaagtcattaagtgttggagtggactgctacacagcaaaagtggactgctataccctcatcttttctcaggaagcctctggagaatgtacacctccaggcagaaaaaagaagatatagttggttccaggaagcagttgatccaatgctaggaagtggcaaagagaatgccttgacatactttgaagttagacacgagacagtagytaagcagcaaaaatgagcaacaagtcagactggagcagaaaagagactataggaaggcactgtcgaagaaaaaacacaagtagaaatgaagtcattttagacttgtgaaaaaaaaaacaggcaaagaaacacaaagaggcaattactaactccag

SEQ ID NO: 759842 - DNA, 633 bp, Homo sapiens
actgagcatgaccactagtatcactgtcttcagccccttttccaggggaatgaactgttctgtcttgctggtgttccaggtgccactgggatacaaacaaaaactctggcatctggttcggtgtctgtccaaacggccacccagtttagtgcttgaaactcggggcccatgtggtgtaggcacacragggaatctcctggtctgtgggttgtgaagaccctgggaaaagcctagtatctgggccaaatagctccatccctcatggcgtggtccctcacagattcccttgtcgaggggagggagttccctcaccccttgaacttcccaagtgaggcaatgccccaccctgcttctgctcatcctccatgggctgcacccactgtctaaccaatcccaatgacatgaaccaggtacctcagttggaaatgcagaaatcacccgccttctgcgttggcctggctgggagctgcagatgggagctgttcctatttggccatcttgcccgggaatcattttatgtcttaacatatctattctgaagaatgttccaagtactgattagagggaatgtgtatactgtagctgttgggtgaaatgttctgtaaattaatgttagatccattagtctaaagt

SEQ ID NO: 759843 - DNA, 559 bp, Homo sapiens
tttgggtggtttgttacacaacaattgtaactggaacatagaaccatatttttaatttgggagggagagtagaaagcatggatgagccaggcatggtggctcatgcctataatcccagtactttgagaggccgaggcaggaggatcactttagcccaggaatttgagtccaatttgggcaacatggtgaaaccccmccttcacaaaaaattagctgggcatggtgacatgcacctgtattcctggctagaatcccttgagcctccagccaaaaaaaaaaaaaaaaaaaaaaaaaaagaaagaaagaaaacatggttggcttatataccttttgcatggtacacaggacattctggataggaagctagaagcccagaatggtctcattttctgtactgccacatttgggagaatttttagggcctttgagtgatgggaaatttctagatatcccccaaatatcaaaacaaagcatcaattgaaaacttagatgtcaatgaatcaaatgatactaatagtaatcagattctaggataatgatacaactgagatatgtcaga

SEQ ID NO: 759844 - DNA, 645 bp, Homo sapiens
aatgctacccattattactatcatctggaagaagaggcagatcattcttgattgtgcatagccaagaacaactaactcccagagacacagtcccagccattcaattctcctctgtccatagacaggatcctggagagaaggacacttccttctccccattctttcccacacaaaagttaccaggagtttgggagtttgcccagtgatcgtgatgaaataagaataattattattatatgtatagatttggaggttatagcataagtatcaaacctggttcttctattcaaggaactcatgatctggtaaggggaagcagtggggaataaggaactgtttattccataattcaagcattgtgacgtgttgttctgtgaaatgctgataataatagtatgaggtttcgragaaagaaggtctcaatattctcaatatttacctaactctttcatcaaagatttattgggagtcttgaactaaatatttaaaataaacaaagaagagaataagaatggaacagagtcaagtgtaccttagaagagttctgataggatgtgaatgccctcaggataggaatattattttattcatttgaaaaccctaatagaaatacagttcctggcatatagaataaagtttcctagt

SEQ ID NO: 759845 - DNA, 645 bp, Homo sapiens
aatgctacccattattactatcatctggaagaagaggcagatcattcttgattgtgcatagccaagaacaactaactcccagagacacagtcccagccattcaattctcctctgtccatagacaggatcctggagagaaggacacttccttctccccattctttcccacacaaaagttaccaggagtttgggagtttgcccagtgatcgtgatgaaataagaataattattattatatgtatagatttggaggttatagcataagtatcaaacctggttcttctattcaaggaactcatgatctggtaaggggaagcagtggggaataaggaactgtttattccataattcaagcattgtgacgtgttgttctgtgaaatgctgataataatagtatgaggtttcgaagaaagaaggtctcaatattctcaatatttacctaactctttcatcaaagatttattgggagtcttgaactaamtatttaaaataaacaaagaagagaataagaatggaacagagtcaagtgtaccttagaagagttctgataggatgtgaatgccctcaggataggaatattattttattcatttgaaaaccctaatagaaatacagttcctggcatatagaataaagtttcctagt

SEQ ID NO: 759846 - DNA, 559 bp, Homo sapiens
tttcttcttgattaagtctaagtagattgcatgtgtctaggaatttatatatttcccctgggttttccagtttatttgtgtatagttgttcataatagtctctgatgaccttctccatttctgtggtatcagttgtaatataatgggcattctggaacatgctgtttcatttacatatatttgtacaatttccaaagtttctctagttactgagttttagtggtctgagcagatacttgttatgattttgatttttaaaagtctgttgagatttgttttatgtctttttttaaattatactttaagttctgggatacatgtgcagaacatgcagttttgttacrtaggtatacatggaaccatgttggtttgctgcacccatcaccccatcatccacattagctatttctcctaatgctatgcctccccttccctgccacaacccccggacaggcccgggtgtgatgttcccctccctgtgcccgtattttctcattgttcaactcctacctatgaatgagaacatgcagtgtttggttttctgtttcagtgttagttt

SEQ ID NO: 759847 - DNA, 519 bp, Homo sapiens
  misc_feature 496, 497, 498, 499, 500, 501, 502, 503, 504, 505, 506, 507,508, 509, 510, 511, 512, 513, 514, 515, 516, 517, 518, 519: n = A,T,C or G
actcacaagggttaagagactccacagtggctaagactgcaggagtctgtggtgggaatctgtagcaattgggtgttgttcacttacccttttcccacagttgggaacctctacaggcttccagttgatcccagcagagcatgttaccttgcttttctcccyttcattgccttaggtgtttcctgttacttctctactgaaagtgttctctgttaggtgttccattgtctgcttgctgtttaggttcttttttgtggaggagtgagtaccacattcctctattcagccaccttgaatatgcattcttgactggcttctttaacatatgtcaatatattcaaggtcatccatattgtagcatgcattactacttcattcattttattataatattatattttatagatatagaatgttatatgtatccattctttacaagatgggcatttggattgtttctactttttggcttttatgaataatgctgctataaatnnnnnnnnnnnnnnnnnnnnnnnn

SEQ ID NO: 759848 - DNA, 505 bp, Homo sapiens
caaaagtgagaggtcattgccatcattctaagagaggacagagcttcccaaggacttaaacttttgattttggccttattaatactatcctgtgagcagccaaaaggaatgatctggagtaaaacaagggctttggaatcaggagactcagatgggtaaatgtgacttagagattyacttgtgagacctacagccagctacataaccactctgcgtggccagttgctcatccgaaaagggaagagacagtgtcgctcctccgtgttcttacaatgtccagtgacaaagagttgggttggtttccacagctttcattttaccctccccttctatttggaggagttgaaaatataaacactacatttaccaggctgtcttccttgagatttggaaggtggaagtgaagcagaagccatcgggtatccaaggcttacgagaaagcttccaaagatgtgggtggtggtggtggtgagcagtcccagtgggtgcactgacaaacacatca

SEQ ID NO: 759849 - DNA, 641 bp, Homo sapiens
gttctctgtgatctgaataagctactgaacctctttatgtcttagtttcttcatctacaaaaacatagacagcaatagtggtctatgtggttagtttataatgaagattaaataacacttgcaaagtgttaagaacattgattagcacatagtatgcagtcagtaaatagtagctattattattattaacacatcagatgtcaatgtcttcagtgtatcagagaaatggatgtaattataatagccaactatttttactcctgactctagaaaacgtaaaagaagtattaagaactgtagtcgatgtgctcctttcaaaagttatcttcagttacgggtggtataaaatataaaatatttatctcttacatcatgagcacagagagtgacactaaagaaaaatactttgctactactactaaaatactactttaattattttaaagaactacaatatacaaaataggaaacatgaggatgatctggctgcaacatgtcaacccaytgatcaccagagttgattcagctgatctggctgacaaggtgggtgtccccttcctccctcactgctccatgtgtgtcccacctagatctgtatacttagtcaaagacgacaattttccctgaaagaagaggaccat

SEQ ID NO: 759850 - DNA, 629 bp, Homo sapiens
aaattcaacagcctttcatgctaaaaactctcaataaactaggtatctaagggacgtacctcaaaataatacaagctatttacaacaaacccacagccagtatcatatggaatgggcaaaaactgtaagcattccctttgaaaaccagcacaagacaaggatgccctctgtcaccactcctattcaacacagtattggaagttctggccagggtaatcaggcaggagaaagaaacaaagggtattcaaacagaaagagaggaagtcatgttgtctcygtttgcagatgacatgagcgtatatttagaaaatcccatcatctcagcccaaaatctccttaaactgataagcaacttcagcaaagtctcaggatacaaaatcaatgtgcaaaaatcacaagcacttctatacaccaataacagacaaacagagagccaaatattgagtgaactcccattcacaattgctactaagagaataaaatacctaggaatacaacttagaagggaagtgaagcacctcttccaaggagaaatacaaaccactgctcaaggaaacaagagaggacacaaacaaatagaaaaacattccatgctcatgaataggaagaatcaatatcgtaaaaatggc

SEQ ID NO: 759851 - DNA, 630 bp, Homo sapiens
ttattttacacatcgatgaattggcaaaaatcttccactatgcattacatcaatttgaaaattttaagaagttcaacataatttaaccaaagaattttttccaaggcaaaaccataaactacttccttgtcatgggatcaatacctagccttgctgtaactatagatttaaactaaaagtagattaaataaaacaatttagatacaattacccttattctgagacaagaaagtcccaatcaatatttaaagaaaaatcatcatcattagcaatattctgaaaaatgtgagtgattataatttacatgattatttttaatgtatcatgattatgcccttgtagatgtactgacaatcaagaaagtttccacaggggaaaaaaaatctattactaccagtcaagtgtaacacagaaascaaaaagtggcagacaaatggaatttatgaaactagaagggaaacccatcatatgtcctgagttaatacgtgattggagccatcaactctcatttttacaattctaatattcattgttcatcacatgtaatagtgacatctaggcctcatgagccaaccagcaccacaattgaaaagggagccaattagtttactccttcttctaggtcactaa

SEQ ID NO: 759852 - DNA, 621 bp, Homo sapiens
caaaaatcattaatgcgtctttgttcccataactgttctctgactttccccttcctaaggcatcaaaggaacatctggctttatgctaccagcttctttccctatcatccactgcaaggaaggtcctatgttgtcaaaataggaaccgttacatcaacgtaaatagtacagagcaaagtacaaaagaagaaggatgaattagaataaaactagcctggatgagagtagaggggtagcttcttcagtagtttttgaaaaaagaatggaacaccagctacatttgatgaaaacaaaagatgagaaagggaacaagagcaatactagagagtactgctgggaattaagagtcccttcatggttttgagaaatgcataaagaacttgcttcgtttttaaataattgttgytttaatgtactgtgttcttttgactataagactcctcaaggactgtatcacatgggttatgacttaataagaattaaatctggtaaatctttgtctcatgctcagacattacctctgagctccaaaacagactcttgaaaccctattctggctgtctgaaaagtatctaaaaacatgtccaaaaaaatgtgatcttctattaaggaaaaaaaaaa

SEQ ID NO: 759853 - DNA, 635 bp, Homo sapiens
ctttgaaagagtagttgttagagtggggggccgggggtagtgataccatttatcagagtaaagaacataggagtaagagtagatttgtggtaacattcccaggttttaaggataagactataattttggatttgtagggtttaaagatactgttcaggatatccagatggaactatccactagatagtagatataatagagttatatttcataacaaagagttttgatccctttcttaaaaactcagtacttgcctatggtgccactggtgctgggaagacccacactatgctaggatcagctgatgaacctggagtgatgtatctaacaatgttacacctttacaaatgcatggatgagattaaagaagagaaaatatgtagtactgcagtttcatatctggaggtaagttgggaatttakattaatcaatagttttgggaaatcattgacatgattcatacaaatgattttattatataagagttttccggtgaatatataaaatcattaaaattccttgtcttgaatatttgttatgcatctttttctgttaattttttttttttttactttggcaaaatttcagacttatagagaagttgcaacaatagtacaaagaacttccagataccc

SEQ ID NO: 759854 - DNA, 645 bp, Homo sapiens
ctatctctatagattgtccctattctggactttcatatgaatggaatcatgtagtttgtggtcttttgtgactggcttctttcagttagcaaaatgttttcaaggttcaccatgttgttgtatctatcagtacattattcctgtttatggttgaataatattctcttctacgaatakataccatattttgttatccattcatctattggtaaatgttttataaatttatttctaatttttaatttttgtggatacatagtaagtatatatgtttatgggatacatgagatattatgatgcaggcatacaatgcataataatcacatcagaatacatggggtatccatcatctcaagcctttatcctttctttgtattacaaacaacacaattatactcttttagttgttttaaaatgtacaataaattatagttgactatagtcaccctgttgtgctgtcaaacactagatcttattcattctctttaactatagttttgtatctattaaccattctcattccctctcaccattacccttcccagcctctgctaaccatcattctactttctatctctatgagcaattgttttaatttttaactcccacagaagtgtaagaacatgcaaagtctgtctttctgta

SEQ ID NO: 759855 - DNA, 663 bp, Homo sapiens
ctactttcatttctgagggaaatctccacactgttttccacagaggttatactaatttacatgcccaccagcaatgtaaaagcattccctttcaccacatccatgccaatatctattgttttttgactttttaataatggccattatgtctgggggaaggtggtatctcattgtggtttcaatttgcatttccctgatgattactgatgatttgttggccatttgaatatcttcttttgagatatgtctattcatatcatttgcccactttttaatggcattatttgttttttccttgctgatttgagttccttgtagaatttagatatcagtcttttgttagatgcataatttgcaaatattttctcccaatctgtaggttttctatttactttgatgtttttttattttgctgtacagaagctttttagtttaattaggtcctatttatttatttttgttattgttgcatttgcttttggggtcttggtcataaatcctttgcttaggccatgtccagaaaagttmttcctaggttttcttctagaatttttgtggtttcaggtcttagatttaagtctttaatccatcctgagttaatttttgtattggtgagaaatagggatccaatttcattcttctacatgtagctatcaaaatttc

SEQ ID NO: 759856 - DNA, 664 bp, Homo sapiens
ataaaagagcatgcattatgacctacaaagtctggtgtcagagactgcttttaaccaagatgatatataatttatcatccaaactgagataatctgggatgttaaaggaggccctattcataattatgatggactacaggtggaagttgagatcattccaggcaaatcaggatatatggttactttactcttaatcttcattctgtgctgccccaagtttattgccatatttactatgttgccagataaggcrtatatgtaggttaactgcagccctgtagtcaatataggcttttcatcatttacaaaagcagtatatagtcaataaatgttttcatcggtaatgaaccaatttcttagtttccactataatgcagaatatgagctgctattaagcatgccagcttaactacatatttttaagtgtccccagcatctctgttagaggaaattaacttcattccagttaacttagtagagatctactgctggggaaatgaagtccaacttcataaattcctatggcatagttgcccatcacaatataaagctaatggtgacaagtcaaaacaaattaggcagcgtgagcattgttacccttctgtaacacaacattgtttccagaatgcagatcaggctaaatgatctttaaggtaacatcaca

SEQ ID NO: 759857 - DNA, 593 bp, Homo sapiens
ctgaagttgcttatcagcttaaggagtttttgaccagaaacgatggggttttctaaatatagtcatattttctgcaaacagagacaatttgatttcctctcctcctatttgaatacgctttatttctttgtcttgccttattgccctggccagaacttccaatactatgttgaataggagtgatgagaaagggcatccttgtcttgtgctggttttcaaagggaatgcttccagcttttggccattcagtatgatattgtctatagatktgtcataaacagctcttattattttgatatatgttccgtcaatacctagtttattgagagttttttagcatgaagggaggttgaatttttcaaaggccttttctgcatctattgagataatcatgtggtttttgtcattggttctatttatgtgatggattatatttattgatttgtgtatgtggaaccagtgttgcatcccagggatgaagctgaattgatcatggtggataagctttttgatgtactgctagattcagtttcccagtattttattgaggatttttgcatcaacattcatcagggatattggcctgaaatttt

SEQ ID NO: 759858 - DNA, 584 bp, Homo sapiens
ttgaaaaaaggtcctataaagaaatggctatctgggaagtatgacagaccaaacttcactacctaccattaaaacttttccaatattagtttaccatatcaattactagccacctgtcaaggctcttaaaaagtgtggtatcaaaaagctcctgatgggtttctgataaagcaaagatgtcagaatcatagagtgggrggaagaatatttgccaaacagatatttaacaaaggattgatatacagcataaataataattctcacatttttaaaaaaggcaagtgagacaatttaatgaaacagacaatatactcaaaaagacacttttcaaacaatcaaatatcaaataaacataaaatgtgttcaacatcacttatcatcaagatgatgcaaattaaaaccataatgagatacatttacatactcaccagaagagacacattttaaaatgtccacacagctaaatgttgataagaatgaggcaccactggaaattccatataatgctggtggaaataaatacatttgctcaatttgtttagaaaatttgtagttgtacctactgatggtaaaaatatatgcat

SEQ ID NO: 759859 - DNA, 618 bp, Homo sapiens
aaacaattgcaacaatagcaaaaattgacatatgggatctaattaaactaaggagcttctgcacagcaaaagaaactattatcagagtcaacagacaacctacagaatgggagaaaatttttgtaatctatccatctgacaaaggtctaatatccaaaaactacaaggaacttaaacaaatttataataaaaaacaatcccattaaaaagtgggcagaggacatgaacaaacacttctcaaaagaagacattcatgtgaccaacaaacatatgaaaaaaagctcaacatcaccggccattagagaaatgaagatcaaaaccacaatgaggtaccatctcatgccagtcagaatgaagattattaaaaagtcaagaaacaacrgatactggtgaggctgtggagaaataggaacacttttacactgttggtgggaatgtaagttagtgcaaccattgtggaagacagtgtggtgattcctcaaagacctagaaccattaatagatttgacccagtaatcccattactgggtatatacccaaaggaatataaatcattctattataaagatacatgcaccagtatgtttactgcagcactattcacaatagcaaagacat

SEQ ID NO: 759860 - DNA, 618 bp, Homo sapiens
aaacaattgcaacaatagcaaaaattgacatatgggatctaattaaactaaggagcttctgcacagcaaaagaaactattatcagagtcaacagacaacctacagaatgggagaaaatttttgtaatctatccatctgacaaaggtctaatatccaaaaactacaaggaacttaaacaaatttataataaaaaacaatcccattaaaaagtgggcagaggacatgaacaaacacttctcaaaagaagacattcatgtgaccaacaaacatatgaaaaaaagctcaacatcaccggccattagagaaatgaagatcaaaaccacaatgaggtaccatctcatgccagtcagaatgaagattattaaaaagtcaagaaacaacagatactggtgaggctgtggagaaataggaacacttttacactgttggtgggaatgtaagttagtkcaaccattgtggaagacagtgtggtgattcctcaaagacctagaaccattaatagatttgacccagtaatcccattactgggtatatacccaaaggaatataaatcattctattataaagatacatgcaccagtatgtttactgcagcactattcacaatagcaaagacat

SEQ ID NO: 759861 - DNA, 567 bp, Homo sapiens
atttcttagaaatcaattgttgcctttatgaatatatttagacttctctcctaaaattgtaaaggtcatatttttaaaacaagatatattacttcatttatttgtgtatttatgcacttaagctaataaataaatattgtatatatttatggtgtataatttgatatatgtatatattgtgaaatggctaaatcatgctaattaacatatatgttacctcacatattttttggtgagaatataaaatttactttcttatcattttcaagtatgaagtatattgttattaactatagtcatcatcattgtaattaactgtagtcaatatattgttattaacatagtcatgtgcagtrgatctcttgaagtttttttctaacaaaaatttcatatcccttcaccaaaatctccttgccccagtgccctaaatcctcagcataaggtaaataccattagactttctgtttctatgagttcaactttttaagattacaaaaataaatgagatcttatttatatttctgaacctgccgtatttcactgaatataatgtcctccaagttcatc

SEQ ID NO: 759862 - DNA, 591 bp, Homo sapiens
ttaatatttaaatctccacccttctcttcaccccagagtggtgatctctttccaaacaatatttttgagagatgttactgataaaaatataggtttatttaaacagattaagtatttattaaataataattcttgttcatgtgaacccagtttatatcttatcataagcagcaagaaataatcatctggggaatgtaagcttcagatactaagcagaaactaatgtgaataattactgagaatgctaaatagtggctaagaatamgattttcctttcaattgcttcaactgagggagagaagggaattgaacaaataagataggggaggatatgtgtgtttattgggtagaatatacaccaaatattcaaaaggatttgtttgtgtcatcttgttccttgtatttcaccaagttcacgttgtcttttctaggtctaattgctaccatgcaatgcatcattaatttttttttgaaaaaatacgattgtcacattatggggaaatctatatttttgtatgatgtaggaacaaaagttgataatttctccatagatttattggcaccaagtgtcgtttaccagtaaaggacaga

SEQ ID NO: 759863 - DNA, 597 bp, Homo sapiens
acagtgctatgattgggttcaccctagcttgattacagggaaattttacattgaaagaggcaggtgaagaggattagaggctattgcccacctagcactctgcctgtagagcagatatgtttctttgagagaaatgggctgctgtccttgcctccagctctggagctgcaacatagagcttccaccctggggagaggtaggccatgaaaacatatggcactttagctctccctaaggggactcactttactgggacaaatatgtaaaaaagagtgctgccagttttagtcaaacaatacaattttaaataatggatattttggcaataaraaattaagaggaggctgatagcttcttgagaacaacagctaaatttcaaaccagctaataatttatcagagagaataagggaaagagtcagaaataagaagagccctgctggggtcagagcaagcctcaaagactggcctccatgacaatctatccaaaggggtctacattttattgtttgaaatgtggatcagtttataccttagtgtattgttaagaatagtagagaaataagattgcacttagtagatgctaagagctggatat

SEQ ID NO: 759864 - DNA, 631 bp, Homo sapiens
tagggactctgtgttggagctctggacccacattttccttctacactgccctagcagaggttctccatgagggcttcacccctgcagaaaacttttgcctgggcatttaggcatttccataatcttctgacctctaagcagaggttcccaaacctcaattcttgacttctgtacacctgcaggctcaataccatgtggaagctgccaagtctcagggcttccacactctgaagccacagcctgagctctatgttggctccttttagccatagctggtacagctgggacatagaaaaccaagtccctggactgcacacagcgtaggggcctgggcccagcccatgaaaccactttttccttctgggcttcagkcttgtaatgggaggggctgttgtgaagtcctctgacagggcctggagacattttcctcatggtcttggggattaactttaggcttcttgatacttatacgcaaatttctgcagctggcttgagtttcccctcgtaaatggggtttttcttttctactgcatcatcaggctgcaaattttctgaacttttatgcactgtttcccttttaaaactgaatgcctttaacaacaccaaagtcacttcttgaatgaatgctttg

SEQ ID NO: 759865 - DNA, 613 bp, Homo sapiens
taaaataatggtggtagtcaggcagtgtgctgtgtgtctataatcccagctactcagaaggctgaggcaggaagatcccttgagcccaggagtttgaggccagcccgggcaacatagtgagacccatctcttaaaaaaataaaaaataaaaaaaaaataagtccccactccttatttttaactttaatcaattgtacatttcaaaataactagaagagaataatttgaatgtttctagcacgaagaaaagataacggttgggcaccatggctcatgcctstaatcccaacattttgggaggctgaagtgagaggatcacttgagcccaggagttcaagaccagtctgagcaacatagtgagaccccatctctacaaaaaatttaaaaatcagccaggtatagcgtcatgaacctgtggttctctctgctcaagacgttgaggcaggaggatcacttgagcccaggagttcaatgctgcagtgagccataattgtcccactgcacttcagcctaagtgacagagggagacctcctctaaaaaattaattaattaaaatatttaaagcattggctatcccaataaccctgctttgattatatgaatgtgtcacat

SEQ ID NO: 759866 - DNA, 613 bp, Homo sapiens
taaaataatggtggtagtcaggcagtgtgctgtgtgtctataatcccagctactcagaaggctgaggcaggaagatcccttgagcccaggagtttgaggccagcccgggcaacatagtgagacccatctcttaaaaaaataaaaaataaaaaaaaaataagtccccactccttatttttaactttaatcaattgtacatttcaaaataactagaagagaataatttgaatgtttctagcacgaagaaaagataacggttgggcaccatggctcatgcctgtaatcccaacattttgggaggctgaagtgagaggatcacttgagcccaggagttcaagaccagtctgagcaacatagtgagaccccatctctacaaaaaatttaaaaatcagccaggtatagygtcatgaacctgtggttctctctgctcaagacgttgaggcaggaggatcacttgagcccaggagttcaatgctgcagtgagccataattgtcccactgcacttcagcctaagtgacagagggagacctcctctaaaaaattaattaattaaaatatttaaagcattggctatcccaataaccctgctttgattatatgaatgtgtcacat

SEQ ID NO: 759867 - DNA, 613 bp, Homo sapiens
taaaataatggtggtagtcaggcagtgtgctgtgtgtctataatcccagctactcagaaggctgaggcaggaagatcccttgagcccaggagtttgaggccagcccgggcaacatagtgagacccatctcttaaaaaaataaaaaataaaaaaaaaataagtccccactccttatttttaactttaatcaattgtacatttcaaaataactagaagagaataatttgaatgtttctagcacgaagaaaagataacggttgggcaccatggctcatgcctgtaatcccaacattttgggaggctgaagtgagaggatcacttgagcccaggagttcaagaccagtctgagcaacatagtgagaccccatctctacaaaaaatttaaaaatcagccaggtatagcgtcatgaacctgtggttctctctgctcaagacgttgaggcaggaggatcacttgakcccaggagttcaatgctgcagtgagccataattgtcccactgcacttcagcctaagtgacagagggagacctcctctaaaaaattaattaattaaaatatttaaagcattggctatcccaataaccctgctttgattatatgaatgtgtcacat

SEQ ID NO: 759868 - DNA, 482 bp, Homo sapiens
tagaaataccactggcagccgtgaggcggatagacttgggaagtattgcatagggaagcagtaaggcaagggaagctcagaggctgttgtagtgatgtcagtgtatcagtcagcataaatggggttagccatggcaacaaacagccccaggatcctggtggcttaaagcaataattttctctacttttgctcatactatctattcaatcactggttggctggaagcttggttgattactgtcattcaggcccacagaatgttcctaaacattgccaggtgccctgatagaaggtgaagagctcttcagagtctggtyctagcagttaaatgcttggcctctaagtggctcatgtcacttctcagtcattggcagaactggtcacatacccacccaaccaaaggggccaggcaaaccaattctgccttgccacagaacagcgtgaatgctgacacagatttggttccttaggtagcagactct

SEQ ID NO: 759869 - DNA, 622 bp, Homo sapiens
aggagtgaaaaggaatataatcttatccaaatgcagtcctgtgacctggattctcagagtgacattatggtgacctaaggcctcattataaatgatcctgttctgaagattcaggccatagaacatcctgagaagtaagactatcttgttatgcagctctttcaggggtcagaaactacagctcttagcagagggcctaawatattcccagatataccaagtcccactccagagcatactctgtgtgttccactgtgtttgatcctacatttgaagtatgcagggaagttgttactactagaatggaggttgctgcagacaggtactatgtctcacccatggagagaattcccagtaactatcaggaggcagggtgatgggtggtggacaaatattattggctgagcagaattgttagatatatttatgccatggaacatttaaaccagaagaaaccttgtaagtcactttgtccaatctcctcattctgttactgaagagattaaaatccagagaagaggaggaatttttctaagacttcctatcccgttaggggcagggcacagcctggattctggatctcctgagttccgaatctatgctctgtccaccctttgccttt

SEQ ID NO: 759870 - DNA, 638 bp, Homo sapiens
caagctgaagtggctcagctaaggttatagtggataagtgatcaagcggggatttgaacacaggtctgttggactccccataaggtgctctcactgctgtgtcatgccttcttgcccagcccttggtgcttaaggctgggagtgcctgagtctagctctttctctccctagcmtaggatccctccagagggctgggctctgcactgagccttagcagaatcccagcatccttggacccggggaggtgcgccagtcagcaaagtgcccaaagcaagctccagaatccaccttgccccctcctccagggcccatccgggaaggcagccagttaagcgcaaatcaattaaacaaactccatgctgcctgccgccctcatattctgacctcagccaagaggctcgcattccagcctggcggacttgggtccaagcaaatgcacttgtgggaggatctgagaaggggctgcaggatcaggaatccatacaaagaactccagcctggccccctgggagcctgtgatacttagtttgtataatctgatcccccttggggaacatggtggggaggtactgtgtgagcaaatgcggggaggggggaacctgtggaaacaagagcctgttctgcagaagatgagctgc

SEQ ID NO: 759871 - DNA, 573 bp, Homo sapiens
tccttcctgcactaacgcctccttcctcccctttcagtctcagtttgtgttttttgtttttgtttttgttgagacagggtctcactctgtcacccaggttggagtgcagtggtgcaatcatagctcactgcagctttgagctcctgggctcaggtgatcctcccgtctcagcctcctgagtagctgggactataggtgtgcaccaccataccccgctaatttttgtatttttttggagagatggagtttcactatgttgcccaggctggtctcgaactcctagactcaagcgatttgctaacctcagactcccgaagtgctgggagtgcaggcgtgagccactgtgcccggccctgagtctcggttctsatgtttcctccgtgatctccctgatcatccgccaagctctctccatctcatgacccccttgtgttttagccccaggatttatctcgtgctgacatctccctgctcatttatttaattatatactttgtatctatcccccaccctggaatagcagtccctggagagcagggactttcccctgttttgttcactgctgtgtctgtg

SEQ ID NO: 759872 - DNA, 609 bp, Homo sapiens
agtcttggtgtggatgtaggcatcgtttctcttgggtaaataaatacctaggagaggcgtggctgggtcataggggaagcgtgtgtttgactttttcagcaattaggagctgtgcactttaaacacaatgataggccgggcgcgatggtccaggcctgtaatcccagcactccggraggcggaggtggacggatcacctgaggtcaggagtttgagatcagcctggccaacatggtgaaaccccgcctctactaaaaatacaaaaattctctgggtgcagtggcgggcacctgtaatcccagctactctggaggctgaggcaggagaatcgcttgaacctgggaggtggaggttgcagtgagccaagatggcgtcactgcactccagcctgggcaacagagcgagactccatctcaatcaatgaataaataaataataaacacaatgacagcacatctggagggctggggtgggctatcttgttttatgctttagacagctcagtgactatgggcatttcacttttcagaaggggaaactgaggacagatcatgtggctgatgagcagggacttgaacccaggactgtccaagtccagagaggtaaaca

SEQ ID NO: 759873 - DNA, 554 bp, Homo sapiens
tcttagaaagtgaaaagtagacatatcaaatgatccaataaacccactcataggtatttacccaaagtaaatgaaaacttatatgcatgtaaaactctgaaagcaagtgtttacagtggtttattcatagcctccccaagctgaaaacaacccaaataagtacatccaacaatggaatactagccagcaatacaaagataggaactactgctacacacaacatggaagactctcagatacttatactaaatgaaaggagccaggctcaagaggcttcatactatattgttccatgtaaatgacattctggaaaaggcaaaactatagggacagaaaaacagaccggtagttgccagttattgggagtggaggakgggatgactatttaggataatggaactgttgtatatcttgattgtggtggtgattatgcaactgtattcttcaaaagtcagaattttgtgcccaaaagacagaaatcatgaagagaagttgtgtaacttccttttgcacatcacaggtccctataactcatgtggaaagggtagccccag

SEQ ID NO: 759874 - DNA, 511 bp, Homo sapiens
ggaaaccatttccacagtccccaaagttggctttccctcaagttcccttggccagcatggatctcacatccctgtcgcagctgtagtggaagctgggaaattacgtaaatacgacttttgggcaggcaaacagcatgcctgccgcatagtatgcccttcaattatttcttcttagcagagtctcctgatcgtcttgggaaayatagtgctgattatggatttgcttatcctgtagaaatactcatatgaaaggaatggtgatagaaaaagcaggaggtgggtcaaaaatgggggttgcatctatttcatgaggatagttactgctgtgtttatctaaaatgtgtagatgtgcttttcctcatgaagtcttgcttacgcagtttagggtcaatataccattgcttagaatgaatgcgtatagcaagtaattgttgaaggttgagtccatttattaaaataacagcatctttttaattttacttttgcctccctttctgtcctgtgcctccaa

SEQ ID NO: 759875 - DNA, 511 bp, Homo sapiens
ggaaaccatttccacagtccccaaagttggctttccctcaagttcccttggccagcatggatctcacatccctgtcgcagctgtagtggaagctgggaaattacgtaaatacgacttttgggcaggcaaacagcatgcctgccgcatagtatgcccttcaattatttcttcttagcagagtctcctgatcgtcttgggaaatayagtgctgattatggatttgcttatcctgtagaaatactcatatgaaaggaatggtgatagaaaaagcaggaggtgggtcaaaaatgggggttgcatctatttcatgaggatagttactgctgtgtttatctaaaatgtgtagatgtgcttttcctcatgaagtcttgcttacgcagtttagggtcaatataccattgcttagaatgaatgcgtatagcaagtaattgttgaaggttgagtccatttattaaaataacagcatctttttaattttacttttgcctccctttctgtcctgtgcctccaa

SEQ ID NO: 759876 - DNA, 565 bp, Homo sapiens
gcatattatgttttaggcatgtagtcttccttttagaagccctaatcacttatgttacaagggacaatgtgtaaagacatatactacatgttgtgatttaaaagtgaagaattaaaagagaatggggctggacacggtgactcatgcctgtaatcctaacacttcgggagactgaagcaggaagatcgcttgagcccaggagtttaagaccagcctgggcaacatatggaaaccacatctctacaaagaaaaaaaaaatagccaggtgtggtggcacgtgcctgtggtcctakctactcaggaggctaaggcgagaggattgcttgagcacaggaggtcaaggttgcagtgaaccatgattccattactgcattccaacctgagtgacagagtgagaccctgtcttaaaaaaaagagagaatgggtagctgagttgcctagaatgctctagtttatgagctgagtggatatcacagggggataggtggaaaatgagagggggtttagtttgcataagctatctttaaagccaagtcaaactaatggggaagtgagaaagagaatc

SEQ ID NO: 759877 - DNA, 565 bp, Homo sapiens
gcatattatgttttaggcatgtagtcttccttttagaagccctaatcacttatgttacaagggacaatgtgtaaagacatatactacatgttgtgatttaaaagtgaagaattaaaagagaatggggctggacacggtgactcatgcctgtaatcctaacacttcgggagactgaagcaggaagatcgcttgagcccaggagtttaagaccagcctgggcaacatatggaaaccacatctctacaaagaaaaaaaaaatagccaggtgtggtggcacgtgcctgtggtcctagctactcakgaggctaaggcgagaggattgcttgagcacaggaggtcaaggttgcagtgaaccatgattccattactgcattccaacctgagtgacagagtgagaccctgtcttaaaaaaaagagagaatgggtagctgagttgcctagaatgctctagtttatgagctgagtggatatcacagggggataggtggaaaatgagagggggtttagtttgcataagctatctttaaagccaagtcaaactaatggggaagtgagaaagagaatc

SEQ ID NO: 759878 - DNA, 550 bp, Homo sapiens
agcttactgtaccttttttactttataaagtttttaaaaactttttgactcttgtgtaataacacagcttaaaacatatactgtactacctccatacaaatttatttatttatttattctgtaacctttcttgtagtttataaatggaatttttaacgttataaattcttttgttaaaaactaaagcacaaacacacagattagcctaggcttattcagggtcaagattatcaatgtgattgtcttccacttccacgtattgacttacttgaagatcctaagsggcagtaacatgcatggagctgtcatctcctatgataacaactccttctggaatagctcctgaagggactgcctgaggatgttatacagttagcttttgttgttgataagacgaaggagtacgctgtaaaataacaataaaggcttagtatactaaacatacatcagtatatagtgattatcaagtattatgcagtttacataattgcattgctatacttttatatgactggcaatgtagtaggtttctttacaccaaaatcaccac

SEQ ID NO: 759879 - DNA, 613 bp, Homo sapiens
ctcgctctgtagcccaggctggagtgcagtggtgctatctcagctcactgcaagctctgctattgggggaacccaccccggataatgcacgtaggttttcttctattttccctaagtgtcagctggtctgagaaataaacagaaagagtacaaaagagaaaaattttaaagctgggtgtccagggaagacatcacatgtgtcagcaggttccrtgatgccccgcaagcctcaaaaccagcaagtttttattagtgattttcaaaaggggagggagtgtacaaatagggtatgggtcacagagatcacatgcttcacaaggtaataaaatatcacaaggcaaatggaggcagggcgagatcacaggaccagggcaaaactaaaattgctaatgaagttttgggcacgcattgtcattgataacatcaggagaggagacagggtttgagagcagacaaccagtctgaccaaaatttatgaggtgggaatttcctcgtcctaataagcctgggagtgctatgggaaactggggcttatttcattccttatctactataaaagacagacgtccccaaagcggccatttcagaggcctccccttaggaatgcattctc

SEQ ID NO: 759880 - DNA, 602 bp, Homo sapiens
tgtatattttcccagagagcacaagccagtgagaaggtaaatgaaggcatgctaatcacacagaagaaaacaatccagtgaagcacataaagtgcctctcagaattcatttagcattaataggctgtttctactttaaattcacagcatctgtgcaggagacagaatatcgttttagagagctaaagcaaaytgctagggggaatccatctgaggatgatgtgctaagatctttaatagcgaatgaaagtttttgatatatttgcttgagtcagctgcataggactgtttggcaatacctgttcatatatggaacaggaatgaaaaaaagattttaacccccttgaatcaaatcctgcttgttgggtcaaaatgtcatgtctaaacatattacccagaatgagccagaatacatttattttccctctgaccactaagttctgctggggcacaaggtttaccaacaatctccaaaattgccacaggagggttctgattgctactgaggatctatgtcaatatctaaaacttgtaaaggaaatgcatagaggatgcacagaactacacaaggcccagtgaggatgggcataaaaggccatcaca

SEQ ID NO: 759881 - DNA, 627 bp, Homo sapiens
tattttaactaagtagaacttattacaggtataaaatgtcttaacattttaaaataaattaatgtattttaccaatttaacaaaaatatgaaaaaaataataggattatcctattcaatacaaaagagacaaaattcaatacccatttatggtttttaaaaatcactttaggaaactggaatagaagaaattttttcttaatgtgataacaatatctacaaaaaaaaccccaacagcaaacatcataatcaacagtaaaacgttgactgagtatgttagcagaaaggggtttcaatccagaccccaacagagggttcttggacctcacacaagaaagaattcagggagagtccatagagtaaagtgaaaacaagtgtattaagaaagtaaagaaataaaggatgactactccataggcatgggctgctcaactgaatatacttacagttatttcttgattatatgctgctcacatggtgkattactcatgagtttttcaggaaagggatgggcaattcctggaaatgaggtttcctccccattttagagcatgtagcataacttctcaacgtcgccacggcatttgtaaattgtcatggcactggtgagagtgtatcttagcatgtt

SEQ ID NO: 759882 - DNA, 606 bp, Homo sapiens
attataagtagcatacaatgagcagtgaggaggaccagcggtcaccacttttctcaccatcttggttttggtcagttttggctggcttctttatgacatcctgttttatcagcaagatctttgtgacctgtatcttgtgtgaacctcctatctcatcctgtcacataacctcctgagaatgcagcccagtaggtctcagccttattttacccaacccctatccaagatggaatcactctggttcaaacacctctgacaaatactttcttcttcttctttttttaaaaattatattttaagttctgggatacatgtrcagaacatgcaggtttgttacataggtatacacatgccatggtggtttgctgcacccatcaacccatcatctacattaggtatttctcctaatgctatccttttcctagcccccaccccctgacaggccccggtgtgtgatgttcccctccctgtgtccatgtgttctcattgttcagctcccacttatgagtgagaatatgcagtgtttggttttctgttcctgtgttagtttgctgagaatgatggtttccaactttatctgtgtccctgcaaaggacatgaactcat

SEQ ID NO: 759883 - DNA, 627 bp, Homo sapiens
gactaggtgtactttccaaaggcgcagccaaaattaatatgtcctacaatcatatgtgtaaaatgcaatagcccttgcttctcctcccagggaaatgcatctcccacaacagtcctcttgagactaggctttaactgcaatgtacaatgtttatgatgaacttgttagactccacagaacattcacaagagatttttggggtagcaagaaactctcagtgcccgtctcgtrtttttatacaagtatctagcctatggcagatcttgtgcaatccattcttcaatgataatacttcagtatttgccatcttcttttaaaagacagtcaaaataaatatcaaaaatagacaatgctgaaatacttgtatattaaaaacaaataagcaaatttgaagaacaattgtccagaatcaaatagcgaaatgttagccaccctcgtttaatttcccaaagcacaaaaatttacctttatttgcctaattttatagactctatcttttgtgaagctaattacttgaaaatttattctattcgattatattttttgttttatttttctaatatggtctagaaatgcctagcttattggtatgttctgacctttgaaattaataactgtttaattgat

SEQ ID NO: 759884 - DNA, 566 bp, Homo sapiens
gagttattctaaagataaaatgagttgtctttgtctctccagttaccctgaaaagctccttgagaataagaatcctttcttctgcttcttttttctgtacactgtgccaccaaggctcaccaggttcacaaaattgttttcaaccaattaaaactatactacaagtgtcttcctttctaagcatttcartcctagaggttttagttggataaagcgaggtagatgtccagagcaaaagtgaagaggggttgcctcaatgaacagagcctaagcagagtgagaataacaacactgcagaagaaacatcatggtttggggagttcaaacagtgtggcaaggggcgttggagtgcacgaaggctgaggagacagcccatgcaattgtgaaggaaaacgtccaggaagggagcatcggcgtctgagcagggagaggacagcctccatgcagaagagaaagtcgaagcaggggaaggagattggatatatacaaggtgattgattggatttaaaaaaaaaaaaaagccagagctccttggagaaatggattatttctagtttgagtcaggg

SEQ ID NO: 759885 - DNA, 614 bp, Homo sapiens
cctttcacatcccacctggaaatgctcctgcaaagatggagtgagagcctctcccttttctgcccaccttcctctcaatatggaggaacccacctccccgcaaaatgctgctctacagtcctttggcaattttccttttgaaaagctgaccaataaagtccacatatcatatacttccattcaaatgaaagtccagactaggaaaatctacacagacagaaagtaggttactggctgyttagggtcagggggagagagatgtaggaggaaaatagtttaaagggtatgaggtttctttggggagtgacaaaaatatctaaaattggctggtgatggttgcacagctccgttaatacactacaaaccattaaattgtacacctcaaatgggtgactctgtgctatgtgaattatatttcaataaagctgtttaaatgaaagaaagctgattgttggacagtccttccttagctgccccacctcgctttatttccaaggagccctggaagaacgtgtgccgtggatccttctgcacctggcctgtaccagggccactcttgggaatgttgttgctcgtgctgggcgccactctgtggggctgggcacctcgttgtg

SEQ ID NO: 759886 - DNA, 614 bp, Homo sapiens
cctttcacatcccacctggaaatgctcctgcaaagatggagtgagagcctctcccttttctgcccaccttcctctcaatatggaggaacccacctccccgcaaaatgctgctctacagtcctttggcaattttccttttgaaaagctgaccaataaagtccacatatcatatacttccattcaaatgaaagtccagactaggaaaatctacacagacagaaagtaggttactggctgcttagggtcagggggagagagatgtaggaggaaaatagtttaaagggtatgaggtttctttggggagtgacaaaaatatctaaaattggctggtgatgrttgcacagctccgttaatacactacaaaccattaaattgtacacctcaaatgggtgactctgtgctatgtgaattatatttcaataaagctgtttaaatgaaagaaagctgattgttggacagtccttccttagctgccccacctcgctttatttccaaggagccctggaagaacgtgtgccgtggatccttctgcacctggcctgtaccagggccactcttgggaatgttgttgctcgtgctgggcgccactctgtggggctgggcacctcgttgtg

SEQ ID NO: 759887 - DNA, 698 bp, Homo sapiens
ataaccattgccaaagtaaggcgaatataaccaatgaaaattgggatgtgggagaacaagaaaataaacgtcttcttccattgtgggtagtccattgacagtgtctacatagattttccaagaaaaaggaaaggaaagggaaaggtgggggaggggaggtaaaaagggggggaagagaaaaagaaaataatttctccaattgcataattttttaatgttgtttgtttgttcgtttgtttgttttgagacggagtctcgctctgtcgcccaggctggagtgcaatggcactatctcggctcaccgcaacctcagcctcccaggttcaagtgatgctcctgcctcagcttcctgagtagctgggattacaggcatgcaccaccacgcccagctattttttgtatttttagtagagatggggtttctccatgttggtcgagctggtctggaactcccratcccagatgatccacccgtctcggcctcccaaagtgctgggattacaggatttatgattttttttaaccccagggccttacaaaactagtagaccttatggggaagaaacatttacatcaagttcagtagtttctttattttctaactagttcctttttgtatatcttaaattcaagtaaagccaaatctgacactttttgttaaaaaattagcatgactgacatgatccccttgttataaa

SEQ ID NO: 759888 - DNA, 620 bp, Homo sapiens
cttgccaacacttgttattttttaaatcctactgggtgttaggtgatatctcactgtggctttaatttgcatgttcctaatgactaatgatgttgaggtttttttttttttttttttttgagacagggtctcactctgttgcccagactggagtgcactgcagcctcaacatcctgggctcaagtgatcatcctgccgcagcctcttgagtagctgggactacaggtacatgtcaccatttaggaagctgaggcaggagaataactttttacaattttttaaacaaaaaatttaaaaaaagtgatccttctaattctgtgtgtgtgtgtgtgtgtgtgtgtgtgtagatagggtctctattgcctaggctggtctcaaactcctgggctcaagtgatcctcctgccttagcctcccaaagtgctgggatcataggcttaagcyactatacctggccccctgagcatctttttatgcacttgttggctaggactgttgactccattttactggtaaggaaatcaaggctcagagaagataagtgacttgttccacattacacagtccaacactcctttttccttctaatacacctcggctacctccctggaaggcaggagc

SEQ ID NO: 759889 - DNA, 584 bp, Homo sapiens
gccaagcaaattagccagtgccaaatgaatgcccattgtcgttccagctgccaggcagtttcaggatgctgagatgtggctccccagcccgcccagcctgggacccatctgggcgactctgcctgcagcagagtgtggccctggggagaaggggaggatacatggcagraggcctctgctgcctgcaaaaggactagaatcttctctgaaccatactcaagctctatgtcttcctcctatcccctttctctgctcaccctcctgcaagcttctttctgctgggggtgggaggtttctgctttatgaaatgccctccctgtcctgcccctcccacacacatacatacacaagatttctgtcttttcccccttttcctgtgttcgagggcctcaagaggcccggggacaggggctgggggcctctgagctcctccggagaattctaatcacactggagcagccggagcttgattccttcctcagtgatgccttctgacatttaatgagttaaggcgctaaatccccttcatcccagagcagctgagctagctgcagtgctggctgccacatgaacagtgagctggg

SEQ ID NO: 759890 - DNA, 526 bp, Homo sapiens
agtgatgacagcagacatcttacctttttcctgatgttggagggaaggcttccagtctttcaccattgggtatgatgctcactgtaggcttttcatatatggcctttattcttttgggataatttccttctatttctagtttgttgagtgtattacctcttgaccagaccattggaatcgttaagaagcaggtccttctgcctctaaatgctctcttatgtctccaagctgcagcaagtatagaaagagcctggaggattagagccraccaccatgagagaagccgggctgaaaggggtgggcaagcagcagaaggcctaatgcttttccctctatgggacaatgaagaaaagggctgtgggggcagaggtgcttctttcctctggtcccacagactcctctcctttggccatgcctctcagtcagttccctagccccgcccacagcccgttagaccacgccccaggcctctctagtccggtcccacagccccgcacgccgcaccctcttccccgcacccccagcc

SEQ ID NO: 759891 - DNA, 526 bp, Homo sapiens
agtgatgacagcagacatcttacctttttcctgatgttggagggaaggcttccagtctttcaccattgggtatgatgctcactgtaggcttttcatatatggcctttattcttttgggataatttccttctatttctagtttgttgagtgtattacctcttgaccagaccattggaatcgttaagaagcaggtccttctgcctctaaatgctctcttatgtctccaagctgcagcaagtatagaaagagcctggaggattagagccaaccaccatgagagaagcygggctgaaaggggtgggcaagcagcagaaggcctaatgcttttccctctatgggacaatgaagaaaagggctgtgggggcagaggtgcttctttcctctggtcccacagactcctctcctttggccatgcctctcagtcagttccctagccccgcccacagcccgttagaccacgccccaggcctctctagtccggtcccacagccccgcacgccgcaccctcttccccgcacccccagcc

SEQ ID NO: 759892 - DNA, 526 bp, Homo sapiens
agtgatgacagcagacatcttacctttttcctgatgttggagggaaggcttccagtctttcaccattgggtatgatgctcactgtaggcttttcatatatggcctttattcttttgggataatttccttctatttctagtttgttgagtgtattacctcttgaccagaccattggaatcgttaagaagcaggtccttctgcctctaaatgctctcttatgtctccaagctgcagcaagtatagaaagagcctggaggattagagccaaccaccatgagagaagccgggctgwaaggggtgggcaagcagcagaaggcctaatgcttttccctctatgggacaatgaagaaaagggctgtgggggcagaggtgcttctttcctctggtcccacagactcctctcctttggccatgcctctcagtcagttccctagccccgcccacagcccgttagaccacgccccaggcctctctagtccggtcccacagccccgcacgccgcaccctcttccccgcacccccagcc

SEQ ID NO: 759893 - DNA, 631 bp, Homo sapiens
tccgccatgtgccaatgagtgtgcttaatgaggctgggtgccaaccatgggcccaggtttactggacctttggattaaatgagcagatcagtggtggggctaacacagaaggaaagacacagtgaatgtttatcaagtaagtagaatgggaaagcattggctgtcaaaggaaaataccaagatccaagcgagaaaggtggagcattatctctgatgagagctggtgggtggcaggcaagcaagtctaaggggaaaagaaatagcgtgaaggcttcccagcaccaggaataaarggccatcccacccctgcgggttctctctccacaggagattaagggtgcctcccaccatgtctatgctgaccagccacacatcttcaatgctgtggtggaggagatctgcgactcagttgattgagctgctctctgaagaggaagaggagaaagccagagagtcactcttacctccctgtctgcttactcacccactctgtcctttcctcaccaactaacatgtgccagccaggcagagtcttgtgctgttcccagaacaggacgacagtgaaaagaacactcttgaccctacactgaaggctgaaggcagaagccacaagaggccttgagtgccaccc

SEQ ID NO: 759894 - DNA, 574 bp, Homo sapiens
gacatttgcacagcatttctggataaattagatccaaataatcaaatcaaagactctcagctcagaaagtaattaaagatctcctcacccacctctttaattttgcaaatgaagacagtgaaactcagagaggttatgaacttgctcaaggtcacacaactgatcctgatatcaaggtccagggcaaagccaagacagctcatagttctcaccagcccagacccaagggagaaaaaaacatcatagtccttggccacggcagcatcatttgcatcccaaacattctttacccaagacttaatgaactcaaaaagaaatcctgagttccaaagggaaataaaatcattctgcgyctgttgaaaaaaaaagcaagctaaagtggaacaataattgaacttgatattaggggaaaggtgcagccatctgcagactgagagaagggtgaaaaaaacaaaatgaaaatgctagtcttgtgttcagacaatgattatgaccatagaacactacctataagttctgtagagctaatttctttcccagtggggttgatattctatgatagattgcatcagcg

SEQ ID NO: 759895 - DNA, 590 bp, Homo sapiens
caacagcgagaactggaagtatggaacctttctgtcttaaccactcagttgcctagaagaatcttttttctattttgctgcattagaaattaaaggcatgagtattgaggatttgggtaggtcagacttttatagtgacaatcacattacaaagcacctcttagctaggttggataaagcacctttaaacatcaaagtctttttcttctttctggatgagatagaaaaatggtctctcctcactctgtatctarggacagggggctcagagagttccagacttacaaagtgagactgcagcagagctgagccatgggacctggagggacccagtgacggttagtctgctccctcccacgggtgctatagtagccacaaccgttcaggaaaccgtccccaggtgagaacgtaacacacgcagggaaaatcccactgctactaagagcaactcagcataagaatgcattacccagcaagggacagtcagaggggctctaaaccagagccccaaatatttgaaaactttatgtggaagccagctataacaagttcgttttccaagccgtgcttccagaagctgttagtggttg

SEQ ID NO: 759896 - DNA, 494 bp, Homo sapiens
gtgatagagacagaaacaaggccatgaaaagggaagctaccaaagcaatggcatagccaaggaagtgtgtcctcaacagataagtggcaaggaccctgttgagttgatgcttgtgttgtctggtagaattaaaaaataagatgagtgggctgggcgcagtggctcatgcctgtaattctatcactttgggaggctgaggcaggtggatagcttgaggtcaagagttcaagaccagcctgatcaacataatgaaaccccatctctactaaaaatacaaaaattagccgggcgtggtggcgggcacctgtaattccagctacttgggaagctaaggcaagagaatckcttgaacccgggaggcagagattgcagtgagcctagatcgtggcactgcattccagcctgggtgatagagcgagactccgtctcaaaaacaaaaagaaagaaaaacagaaaaataaggcgagtggactgaggactccagtgaagggagg

SEQ ID NO: 759897 - DNA, 553 bp, Homo sapiens
tgcttaacctgtaccagctttaataggtgacctagagcacatccctcccctctacaggcttatgtgttgccacttacgaaatgtcgggtaggactggaggctacctcccactccctgcacctctgattctgtgacccctgcagaattaagaaccagtgtcccttctcctggtcagccctactgacgggagtcacagaatccccagttctttctaagctgccccatctctcacctaaatacaatycccttaaataacaccaaagggaaagggctcagacctccatcacagcagggtcactctcgcacgtggtaggaccataccaccttcacaaaggcggggtttgccacctttggggagctctggggggcctctacctcctcaccagtctgacacaatgccagagattccaccactgggaatttcttataattaaagcattctcttccctgtattaaatgaaaatgcccctgggagagttaatagagcaagcctttatcaaccattaaaaactgagggccagttagtttctctttcttttccccctgaagtggt

SEQ ID NO: 759898 - DNA, 585 bp, Homo sapiens
gtgtgaagttgagagcttacagtaaatggtctctgaagtttcccaccattccaaagagtgcgtgagcttaaaatttttcgtgagtttagctaaatatgtgcttagtgttagattaggtttcaaccaagcaaaagaaccctgggagaagtactctgcttggaaatgaagcatcctttggtttttgtggtacaatagatcactgtgggttttcagatggccagaagctgctctttgcaagggggaccatgttaaaggtggatcttagtaagtattattactaatgaattcttaattgattagtttttgagacaagtaataagcttttttggaaatctaagtggactgccaaatgttctcgatttatccatattkcatggggagcagagcattcttcatgccttctccatcctcacttctgccaggtagcagtttgcattgttaacagggaagcagaagggaagcttaacagagaagcagtatggaagacgtctccttagcccagtggtcagttgcatcagagaagtctgctctgaaatgcgaacactttctctttcagctggcagccccctgcaacctcagtgccct

SEQ ID NO: 759899 - DNA, 302 bp, Homo sapiens
ccacaagtggtttcaaatagtctaacccatttttatgaacgtgagttgcctcctcaagaaacctctatttcccagagacctatccactcacacactgacatacgatctgctgagtcacagttggtttccagacactagggcccagctcacatccaatagtcagacyctattctctgtgaggtcatctgtctaccggaaaatctcatgtatcgggcaatgcttgtgacaaacctgtccctcaccaaagattaaaatgtaaaaatgcctttagatagccaactttacaaatactgttcatgctt

SEQ ID NO: 759900 - DNA, 534 bp, Homo sapiens
ttgatcattacacattatatgcttctatcaaaatatcacaagatctccataaatgtgtacaactattatgtacccgtgaaaattaaaaataaaatttttaagaaaaatttaaatttcagagtgtgtatcatttcaccttaggaacacccaaacatgtttataaaccattttaacattgtaaatctcaaccagtcttctgagatccaatcaattggaatttctttagcttcaggtaatagctcagctccattggttattaaagagacatattagaataaatgggttccctcttctttaaggaaaaatgagcttatatttcttcattaggatttgcatttatttctgctcaagcctaagagggctgctagtttmattgcactttaaatacaaaaatctaagttttttggactataaatatagtatgaaatccagctccaaacccatatgaaaataagctagaggccatgaattcatttgggagacttactcttcctccaccaagaaccaaggtgaggtagacaaatttctatgctg

SEQ ID NO: 759901 - DNA, 578 bp, Homo sapiens
aaatcatggcattatgtgttagatttatattacaatatatatctctggtaacgtggatttatggtgtatgtgtgagtttttaaaatttgttggccagacatggtggctcacatctgtaatcccagcactttgggaggctgaggtgggtagatcatgagatcaagagatcgagaccatcctggacagcatggtaaaaccctgtctctactaaaaatacaaaaattagctgggtgtggtggtgtgtgcctgtagtcccagctacttgggaggctgaggcaggagaatcgcttgaacccaggaggcggaggttgcagtgagctgagattgtgctacygtactccagcctgagtgacagagtgagactctgtctcaaaaaaaaaaaaaaaaaaaaagttgtcatggatcaggccaatcattctcttcccaaggtctcctgctaagcaaaatagccctagatgattgcataagtctaagtggctactgtgatatctcatgaccatgttcccttggccatagcagagataagggatgggtggacaccctacccaagtttccctaatgtatagacttgtcaaggg

SEQ ID NO: 759902 - DNA, 578 bp, Homo sapiens
aaatcatggcattatgtgttagatttatattacaatatatatctctggtaacgtggatttatggtgtatgtgtgagtttttaaaatttgttggccagacatggtggctcacatctgtaatcccagcactttgggaggctgaggtgggtagatcatgagatcaagagatcgagaccatcctggacagcatggtaaaaccctgtctctactaaaaatacaaaaattagctgggtgtggtggtgtgtgcctgtagtcccagctacttgggaggctgaggcaggagaatcgcttgaacccaggaggcggaggttgcagtgagctgagattgtgctactgtactccagcctgagygacagagtgagactctgtctcaaaaaaaaaaaaaaaaaaaaagttgtcatggatcaggccaatcattctcttcccaaggtctcctgctaagcaaaatagccctagatgattgcataagtctaagtggctactgtgatatctcatgaccatgttcccttggccatagcagagataagggatgggtggacaccctacccaagtttccctaatgtatagacttgtcaaggg

SEQ ID NO: 759903 - DNA, 543 bp, Homo sapiens
gctgggtgtggtggcttatgcctatattccagtgcttttggaggccaaggcaggaggatttcttgagccaaagagtttgaggccagccttagcaacatgccaaaaccagtctctaccaaaaaaaaaaaaaaaaaattagccagacgtggtggcatatgcctgtagtcccagctaagactggaggaccacttgagctcaggagttcaaagttgcagtgaactatgatggtgccattatactccagcccgggtgacagagtgagaccctgtstctaaaaaaaataagtaacgggacagtgatcaagtacttatttgctttttaagactttgctcacaagaacacacacaattaagctctgtagtatttacctcaaatatgcagtctcaggagaatctaacttttctagcatatatgtccttgattccacttgtagtttttcaatggaaacttcaaaacaagggtggaaatctttagtgttatcccattgtgtctctgaatggttaaataaaattgaacattaaacctaagcctgcttcctgaatg

SEQ ID NO: 759904 - DNA, 621 bp, Homo sapiens
tcttgtaggagagagtcatgctgccaatgacttacattatctgttttattttcatctctattgaggggcattcaaatctctcttcctctgtgcaaatgtaggggatccaaaactatcctctgtgatcatttggattgttaatctctccagggtttcttcaacattctcaaggcagtttctggcaccaaagggaaaatggagaagttgagatgcaattttatttcccaattgaacttgattaaatggggactgttctaatcaaaagtttgaatcctgggggagtgcgatgttgttaacaggtttgagaatattgcagaagaacagggaggaagtatactaaagtcaaggcagagaacgaatcaggsaagaaaataattgtagtaaagcttattaaggcataaaattaggtgaacaaattgcttcacagatagtgttaagctcattgctagaccggcaaaggaagtggaagaaagctctttgaaaacattatttttattattttaataatttgtgtgggaatcatagtagctgctatatgttagggagaaacaattgccagctggtgtcatcatggagtaactatagtagactgaatgcaagtatgttttgcctttttacctg

SEQ ID NO: 759905 - DNA, 599 bp, Homo sapiens
gagagttgcatgggattgatttatggccattcatcagctgctctctactgatacacatttatgttctttcagtcttttgctaatttaagcaatggcataacgattaatcttgtacatatgctgttttgcacgtgtatatttgtagtttaaattcctaggagtagaaatactgagtcaaaaggcacagacatttaaatttttgatagacagttgtcaagttgcttcccacagaggctgtacaaatttatttatcaatttatactctacttaraaagtatgtgaggctctctttccctacacccttgctgacattatcaatttttttaattgttgacaatctgacagataaaaatatctcattgtaatttaaaaattaggtacatccctccctaaactgtcaaattctggagagatttgttcttggggtcctcatagcccccattctttgagaggaccagctgtgtgccaggcactacgtcacatgctgtgaaaacaaacagtattctgagagagccagattctagtgcgaggacacatgtaaacattattataatatagtatgtaatatatactatagtataatatagtatgtaaatgct

SEQ ID NO: 759906 - DNA, 528 bp, Homo sapiens
taaacaagacttacttcttcagtaatgttttgaaaattatgccttttggagaagtcatctacaggttaattataaaaatgtaactcattcatattaataaattaccacacagttgtaagtagtactttgaattgttgggtagaaaaagatcacctggaggctattcctcatgggaaatattaactaggtctagaagtccccttgccataaactttctatctcatactggagaagaatggattgttctcagaagaatgggttgtcctcagtgggaagacctgcatgcagaagtccccargtcccctgctgtagtctccgtgttaccagataatacttaagaggactgtgccttggatacagggaggcaggtagtatggggaaccttgggcccagagaagcaggtgacccccgccaaaggagccctgagggctgggtgggaggggttttttatgacaaggagttgttgatgaaaaatgtgtgatggacactggacttccagtcactaccctttcagagtcgaaaatgaat

SEQ ID NO: 759907 - DNA, 604 bp, Homo sapiens
ttctgtagaaatccagggaaagttcacctctttaaatttgcaaccgtcaactccaaactttcttgggcagagaaggttatttcctaagcctgtgtccaatatacacagcttcagggtatatataaaaatgcctagctgtaacaatgaaattcaaactatcgcaagagaaaaagcccccattccagaaagctaaatgcctataacaaaagctatttcctatgacacctgcccacaatgatttcctttctgtstacccataccatacatggtatagactgaactaccttgaatcattagctcaatcataaattccttaaggccacatgtctcacataatgccttacagaataaaatgctcagtaaatgcatatgagaaatgaagggtagaaatgcataattgtgtagtcagtatcagtttgtgagtgtttgtgagtgtggaacagcaaatataaatacttatcctctccatttccaatggaaattgggggtggggcagggaggagagaaagaacacaaagaataagagcaaggaaaacagataaggacacataccctcatttaacttttgctcatcatcctaactcttgctttgcccaaaggctag

SEQ ID NO: 759908 - DNA, 391 bp, Homo sapiens
tggtaaaggatcatgaccttggcaatgtggttgtctttccaggatgattcctgtaaaggctgacagctaagggccttctgttggcagcactgacagtagctgggagtgactcttccattcctgaagggaggtcagggtgggkcatcacagcatccaatacaatcactagtcatgatttttaaaccaatacaatcactagtcatgatctttaaaaatcttgaatgtgacatctcctgacctcatccaccttggttgatgaaatagatatgattgtcttggtagtcaagagtactagttaaccaaaagactatatgctctttaagtttaggcaagctagtaaggaagtgagaaaagcaagacctgaactttgatctggagcaaatcactttac

SEQ ID NO: 759909 - DNA, 611 bp, Homo sapiens
ggcatcaaaatctcataaaattaaatgtcttcctgggtaaaattgcatgagaaatacgatatggttatttttgtttgaaatcttctagtagcataagctgccaacattacttcttaaaagagctacctctagttttgaaaagtcatttgttaatgtttttttgacctctcagatacttctttgtttttgttctcttaagagtatgttaaagcacatgtatttgtgtaatawttaatactggaaaatagtctaatgtaatatttaatactggaaaatagtctaagtgagactgtttggtgatagatgtaacttagttttaagggatgttgggaggaaattggggcttttaaattgtaaatacctacaaattgtgtgtttcttaagtattggtgacttaaatggatgttttcctatagaaaggtttttgttttcttatctagtgacccctttcctattattgttttccacggatggcctctcattcttcaataatgaaacacaggagaacgtacacaatttcaaactttccatttatctgtttttgagctagattgatgtctagtttagcaaaggtaatgcaagtacgattgctcaggtgaaacattaccata

SEQ ID NO: 759910 - DNA, 739 bp, Homo sapiens
cccagggatccaactttcagatagcccaccttaagacttcaaaattccctttccatttttcctttttgtaggtccccactgaaatctaaagtcaagggccccaatgttgttctccatagaaacacaacagtctcttccctccctctttcttccattcttcattttcaatttcccaatacctaagtaataggtattcttccttttcaatttcccaatacctaaatgataaaccagcacatctgagaaatactaacactgttcaggaagactaaatataagttgtatttttttttctttatgttggtccagttttggtctccaggtacaagtggataccatctcactgccataagattttcacaagtgaagcagaacagagcaatagasaaatagatgggtctgatcctaacaattccttctgataaggagaacatccctcactcctccagggggcaggacactctgtcatgcctgtctgtaaaaacaaatgacccttgacccttgctctcccactgcggatggggccttgacagagctgcccggggtggaaaggatttctatagcctgctccctgaattagaaggaaactgtcattaaaaaaagagaaaaaaaaatcatatattgcttaagggtctatctattttacaaactgtcccatttgtaaacaggcttctccctgaattggcagccacgtcccctaattcctgtacacatgtgtctggcaactggaaaagggaga

SEQ ID NO: 759911 - DNA, 530 bp, Homo sapiens
ggatccgaggcagcctgcagacctactatcatcttctttttcttttttataattggcaatcatccttggctacccagtagcatcttttttttttttttttgagatagagtttcactcttgttgcccaggctggagtgccatggcgcgatctctgctcactgcaacctctgcctcctgggttcaaacgattcccctgcctcagcctcccgagtagctgggattacaggcatgcgccactacacccagctcattttgtatttttagtagagacagggtttttccatgttggtcaggtggtcttgaactcccgacctcaggtgatccgcccaccttascctcccaaagtgctgggattataggcgtgagccactgtgcccagccccctggtagcatcttaaatcaagctttccttccctctgggtatcatggacatgaacaccttttatgtctctgcctcaagaggggaggaggcacagaggaacaaaaatccttgtgaattatgataattacatagtgtttaaatgaagggt

SEQ ID NO: 759912 - DNA, 612 bp, Homo sapiens
tacaagatagaatctaaatcacgcaggcatcctccaagtccagccccagcctaccttgccgcaaacaccctgcatttgcccagcaagacctctcactgtaccccaaatgagtcttcccccctgcaggcctgggctgctaacattcactgccacagcagcaacagttactcacttggcctgattcttgtctcaagtcctggctgttcctttgaggcctgcactgcctatgacttgaaactctgaccagcccatctatctccccaactaagctggagcctcctttaaggaaagacacctggaccagcctgttttcctcctctcctgtccccactcctcaggacaacagtaacaacagctgtcaccatgacttccygtatgcaaaatccttgacaaaacgatgtccttaattctgacagcagcccactatcaacccaatttacaagtaaagaaactaaggtgtgaagttgaagaaagggtagggaggacgcaggggaggaatctgatcaaggtattggtgcaaggggcaaaactaggatttgaactcaacattctcttcccaaggtgctagcacacactgccttcctaagatataaccaggaatgtatagccagc

SEQ ID NO: 759913 - DNA, 625 bp, Homo sapiens
aactggatcctcatctctcactttatacaaaaaacaactcaagatggattaaggacttaaatctaagacctgaaactgtaaaaattctagaagataacattggaaaaacccttctagacattggcttaggcaaggatttcatgagcaaagacccaaaagcaaatgcaataaaaacaaagataaatagctgggacttaattaaactaaagagcttttgcagggcaaaaggaacagttagtaaacagacaacccacagagtgggagaaaaatcttctcaatytatacatctgacatgggactaatatccagaatctacagcgaactcaaacaaatcagtaagaaaaaaacaatcccatcgaaaagtgggctaaggacatgaatagacaattctcaaaagaagatatacaaatggccaacaaacatattaaaaaatgctcaacatcactaatgatcagggaaatgcaaatcaaaaccacaatgtgataccaccttactcctccaagaatggccataataaaaaaaatcaaaaaacagtagatgttggtgtggatgtggtgatcagggaacacttacactgctggtgggaatgtaaactggtacagccactatggaaaacactgtggag

SEQ ID NO: 759914 - DNA, 682 bp, Homo sapiens
ttatctgtattcctggtaagttctgctaaaagtggaggtaccagtgggagaatggaatcttggaagaagacagagccagtccatttttttttacaatctactctctcaggcagtggtgcagccgcagtggagatttcatacatgaaaatgctgagactgaaactcaggtgttctcactacaaattttgcagtgtttccccaatatcccatgtattcattttctatgactgctgtaacaaattaccacaaatttattggcttaaaataacccaaatacatactgttctatagttcagaaacccaaatggctcacactgggctaaaatcaagaccagacttatttactcttgctaaatatgtcaaagccaactaattgacgaaatataatttaagcttggccttttattatattctgtagctgaaaatccaaggctgkactgaaaaatcagcagagctgtatttctttctccagtccctaggggagagtccatttccttgctgtttccacttccagaggctgcccacattcctgtctctatgttcgtagttaccaaagttgagttgagtccttctcacactgccatctttctggttctccctctgtctactacctctgtcttaacttttaaaggatcctttatttaccttaggcctacctggataatccaagataatctgccta

SEQ ID NO: 759915 - DNA, 606 bp, Homo sapiens
gtcagcctgtgctcttttctggctcttttccttgttgatctttttattggcaaatatttcatagtgggaagggattaataatagaaaggaacattcaagtatttaagaatctgatcattcgaaacaatgatattgtttggatcatacmcacacacttcgttttagacagtaaaggatttagaggaatggccatataaaaccttctaatcatattttaaagtttttcttttttacttctaataaatcattgtaagactatgaatttgatgttcttcccagtccaccactctaccttcattcttagttgtgtgagtctgtgagaatacttttggcatgcatgaggtggggtgatgtagatcctggtccagagcaatcactgtcagttgttgaactttggatataaggcccccatacaacattagtgtcacacagtggaagggtttcataggcctttagtggcactcacaagtaggcaaaactgacaagttttgaagcagagaatgtcttcattctcttctgtacctgggatttaaacatgaaatactttaacaacaattaaataccgtatctagattatataattaaagaaatgtttttctctggcag

SEQ ID NO: 759916 - DNA, 654 bp, Homo sapiens
gtttatgtttcatttttaacatagccagttactattatgcttggatatacacaatgagggagtttgtggctttgttttccctttccacagacgtctctaatctcctttattaaatgctttgtatttctactaattagtatacatagctaaactttttgtttttgttttttgagacatagtagtcttactctgttgcccagactggagtgcagtggtgcaatcacggctcactgcagcctcggcctccccagctcaagcagtcctcctgcctcagccttccaagtagctgggactataggcatggaccactacacctggctaattttttattttttagaaatgaggtcccactgtcttgcccaggctggtctcaaacacctgggctcaaacagttctcctgcctttgctaccaaagcgctgagtcacacctggccacacagctcmactttaactctcctgtttttcccctttaagttttttctttaaattagggttgacaaactttcactaaaggacttgaaagtattttagacattgtaggccataagatctcagttgccactaatcagctctgcccttgtagtgaaaaagcagccataggtaatatgcaacttcatgcatttgtctgggtttcaataaaactcttatttatgg

SEQ ID NO: 759917 - DNA, 554 bp, Homo sapiens
gaatccaaaaaagtccggaacaaaagataactatccaactcacatgataatggcattaatccattcataagagcagaaccatcatgacctcatcacctcttaaaagctccacctctttatactgttacagtggcaattaggtttgcaacacataaattttagggaacattcaaaccatcactttagggaaatggtaatcaaaactacaatgatatgtcacttcacacccatcaggatggctattatttaaaaaagaaaaaaacagaaaaataacaaatattggcaaagacgtggaaaaactcgaactcttctgcattgctggtagaaatgtaaaatggtgcagtgactgtggaaaacactatgtcaattcctcaaaaaattaaatatagaattaygatatgatctagcaatttcacttgtgtgcatatacccaaaagaaatgaaagcagggccttgaacagatatttgtatatccatgttcataccagcattattaacaacagccaaaaggtggaagcaattaaagtgtccattaatgtgtggacagataaaca

SEQ ID NO: 759918 - DNA, 620 bp, Homo sapiens
tcagggattaccctagtactttagagttagggtgtaattaaatgagattatattagagaggcttagacaacaattttaatgttaatagttatataattattaatagtgttaaatacatatttaaatagtatttataaattataaaagataaattatattataatgtataaacactttaaatacatattatataagcaccatttatatgtttkatatttaaagttaaatataaaatgctatttatatagcatttatatagtatgtatttaaagaataattagcacatcatgatttcatgagtattatagcccaggataaagctaaagtagttagaactttaaggtcaatataaagacaaacattaagttaacaactacatagatggtatgtagatttggcaaaattcatgaaggtagtaatcaaataactaaagtttgaaagctactgcaaaaaggaaggtaatgtgcttaacatagtgtctggcacatcgcagatgttcaagattcattcaaaactatcattaattttcttaggggcttttgaaattacgttgtagatcttttcttgataaccaaggaactgcctaacaatggaacccagaaagaatgagaactgaggta

SEQ ID NO: 759919 - DNA, 628 bp, Homo sapiens
acattacctgacttcaaattatactacaaggttatagtaagcaaaacagcatagtactggtataaaaaccatatagatccatggaacagaatacagagcccagaaataaatccacatacctacaaccaattgatctttgataaaacacacagttgggaaaaaaacatcctattcaagaaatgatgctggaaaaattgacaagccatatgcagaagaatgaaactggacttgtatttctcatcatacactaaaaattaactcaagattaaataaagayttaaatgtaagaccctaaactataaaaatcctagaagaaaccctgtaaacactcctcaggtcattggcctaggcaaataatttataactacaacatcaaaaagcaaatgcaacaaaaacaaaaatagacaaatgggactatattaaattaaaaagcttctgcagagtaaaaacaataatcaacagagtcaacagacaacctatagagtgggagaaaatatttccaaactgtgcatgtatcaaaggactaatattgagaatcgtcaaggaactcaaccatatcaacaagaaaaacacaatcccattaaaaagtgggtaaaggacatgaacagatatttctcaaaggaagatg

SEQ ID NO: 759920 - DNA, 500 bp, Homo sapiens
tcattccaggatccaggggaaatctacacggcgggggtagaaagacaagtggcagtggcaagttgctctattatctttggagatataaagactttttcaagggccccctggcaggacatccagacaagaggatgggaactctggaatgctgtcacttgaacaagtgcaataaagcagagaagcaaaagggaagatattgttctcttaagaccatcttctgggctgtsccagggtagcagttgtggggatccaagccactcacatgtaggcaccccaactcactctcagcagggccagagaacaaaatgggtcccactaggcacattcgagttatgcaaactcacacagctgtggggatgttacagaaggacatttctcaggccattattttttatcgtgaactgctgttcctgggctttgggagaattgggaataaaatgaaataaaacaaaatccaaatgaaaactgaccagcatgctttactctttttaaatcgtgtc

SEQ ID NO: 759921 - DNA, 634 bp, Homo sapiens
atttctctgtgcaaaacctactaagatgcacaatagatttgagcaaagtatagattaaatgcagactttgaactgtgtgtagaaacttaaattggatttctttatgatttaagacatgttaggtcattcataattcatcacaagcacatcttcagttaatgtagtaaaaccagcccctcccagccttttctataacgcrccagaaagatgtgtttcatgtttgctaagtggaggagcagcagtagtaaagaggaactatgtatgggtttgtgtgtgtacatttacacacacatgcctatgtggacagataagcaaataagcacagggccatgacctccaaaccctctccaaatcaagatgagctgaaatgaatcagaatcaagggaatgcataatcttatattaatctcagtaaatattcaaacctagagaggcaagcaatactttgccttcttaggacaaggaatggagtgtttttgggtggatcatagctctgagcctggaattaacgaggcttactccgcagacaggaaatccaaatgtcagaaagggaagtgggtttaccctggtacaccttgacatgaacagacatgtcaccacaaaggactctcaaaggaccctgtctacatttctta

SEQ ID NO: 759922 - DNA, 634 bp, Homo sapiens
atttctctgtgcaaaacctactaagatgcacaatagatttgagcaaagtatagattaaatgcagactttgaactgtgtgtagaaacttaaattggatttctttatgatttaagacatgttaggtcattcataattcatcacaagcacatcttcagttaatgtagtaaaaccagcccctcccagccttttctataacgcaccagaaagatgtgtttcatgtttgctaagtggaggagcagcagyagtaaagaggaactatgtatgggtttgtgtgtgtacatttacacacacatgcctatgtggacagataagcaaataagcacagggccatgacctccaaaccctctccaaatcaagatgagctgaaatgaatcagaatcaagggaatgcataatcttatattaatctcagtaaatattcaaacctagagaggcaagcaatactttgccttcttaggacaaggaatggagtgtttttgggtggatcatagctctgagcctggaattaacgaggcttactccgcagacaggaaatccaaatgtcagaaagggaagtgggtttaccctggtacaccttgacatgaacagacatgtcaccacaaaggactctcaaaggaccctgtctacatttctta

SEQ ID NO: 759923 - DNA, 591 bp, Homo sapiens
tacaggagagctacccctattagcattcccactttataggccagaaactcgggtgtcaggagagacgaagaggtttgctcaatttttataactagaaagataataaggagatcagaatccaagcccacccagctgcaatctccatgcacgccttccactccaactcgctcctgttggaggggaccacagmgcaccagactatgatgactgcaaggccacggagcaggactgggcctctccagccactgtactttctcatggccctgctacctgtgtgaccggttagcacagatgtgcttcgtggacgccgctggcatttcaataatgctgggatattatgtgctgtaaaaacaggacatcattgcttaccaggggcttataaaaataattgcaatccaggctggcctctgtcactagtaatttatcgcattgctcctctttttgttaatgcagtttacacgagtcaaacgaattatatgtaaattggggagcatgttagacttcaagtcgagaagtgatatacataggtgtgaataagatattttcgaatttttcaaatcccaaatggaggtgggtgatatgttagtaatc

SEQ ID NO: 759924 - DNA, 591 bp, Homo sapiens
tacaggagagctacccctattagcattcccactttataggccagaaactcgggtgtcaggagagacgaagaggtttgctcaatttttataactagaaagataataaggagatcagaatccaagcccacccagctgcaatctccatgcacgccttccactccaactcgctcctgttggaggggaccacagagcaccagactatgatgactgcaaggccacggagcaggactgggcctctccagccactgtactttctcatggccctgctacctgtgtgaccggttagcacagatgtgcttcgtggacgcygctggcatttcaataatgctgggatattatgtgctgtaaaaacaggacatcattgcttaccaggggcttataaaaataattgcaatccaggctggcctctgtcactagtaatttatcgcattgctcctctttttgttaatgcagtttacacgagtcaaacgaattatatgtaaattggggagcatgttagacttcaagtcgagaagtgatatacataggtgtgaataagatattttcgaatttttcaaatcccaaatggaggtgggtgatatgttagtaatc

SEQ ID NO: 759925 - DNA, 606 bp, Homo sapiens
tcagccttgcagttggaagctcagctctgcctcccaatagctctgggactcaacttaaacttccaaatctcaaaaaagaagacagtaaaagcacccacttctaagggttgtcaagaagaagaatgagaaacacattgttagtgactgaattttgtcctacttccaaaattaatatgttgaagctctggcccccggtgtgattgtatttggagataaagccaataagaaagtaataaaggctaaggaaggtcataaatgtgagaccttaatctgataggactggtggtcttccaagaaaagaaagagacagcagaaagcctgctcactctctctcgctctctctctctctctttctccctccagaaccayatagaggaaggacccggtaacacagcagaaaggtgtcagtctacatgccaataagagaggcctcaccagaaatataatttgctggcatcttgatctcatactgctagcctccagaactgtaaaaaaataactacctgttgtttaagctacctggtggtattttgttacagcagcctgagctgactgatatacacctcaagtgagagttttcatgggcttctagactggaagcttgct

SEQ ID NO: 759926 - DNA, 588 bp, Homo sapiens
aaaattacattagggacaatatttgtaggacacattcaacccctgagctgctatttaatgactcccaagagagagacatgccttcctaagcccagcctggcctctgtgcagacccagggcaggcaggcaatgattttccagtttcacttcagaacactgttgttccacttttgctcgctgcatagcaaagcacacaaacttaatgctctaaacaaccaccattttcttatgctcctggattccgtgggtcaggaacttggaaggacaaaagttagtagatgcctctactccacaatggctggggcctcagccaggaagtcttggaggagctggcagatccctgaagcttgggatcctgtgaaggcccactccaaacatgtgcaatggttgaggytggctcttgcctgggacccccgttggggtttcagactggttcatggcactactttgtggtggggcttcctcacaatatggtggccttgagcttcttaagtggtggctttgagctccaagtatcacaagaggatggtggaggctgatcttcctctcataacagaactcacagcctcatagtgtgacttctatctc

SEQ ID NO: 759927 - DNA, 618 bp, Homo sapiens
tcatggtaattaacactagctaccctcagtttgcatgcggattctgtcatttgggaagaattcccttatctgtaaatgtccacagctcttggcattttgaaaggttcttccttttgctgtgatcctccttgtctacaactgaaatgggggttgtggatatttttcccagttacttccttactcatggaagcttgggggcccaaggcatattttaagtgtaagtagcttagcacaacaaactttttcacttaraagtccaatggacgttgactggggctctcctccatccagtgacttaaggatccaggctccctctaccttgtaatgccaccatctcaacacagggcttccaggttcactccatcatgggaggacaggaatggaggaggcaccctgatactgaagtgccttgaactagagataattcatcattgatgctcacatttccatccgctacaatgtcatcttgtggcctcagcccaattgtagggaaagtctggagatgtaggggagcacagggctattggatgagcataaaccctcagcaaagactgtcttccagccccttcccacacattgaggaatacacttaacagctcccattctgttcccactaag

SEQ ID NO: 759928 - DNA, 523 bp, Homo sapiens
acaccatcagctgaaagcatccgtttaggtgtagagagtaagtgtggtttcttgctgtctttacaacttctgagacttcttacacaagttcccatcttacagtgaagtgggaacaaaactaaatgttcattcaatagggtagttccactctggtgagaacacttggtttaactcttcaggtaaaaccgtctctcggagctgtctctcttctctccagcaagaggaccaggaatatgaggaggaacatggtctacatgggaatcatagcagaaggagggacatgtccaggtgcctcttggacatctgcactgtctgttctcaggttgtctgagctagcgtggggttygatcatcacaggtgcaatggggcactctgttagcatcttctgcagaagccagtggctggggtcccctggggtttcatttgtgttatgggatcctcaaagtctggttaagacttccactggcctgactgtcccctgtcctgatgcccaggtactctgccctgcaatcataaccaagaa

SEQ ID NO: 759929 - DNA, 678 bp, Homo sapiens
tgttccctcaggcagtccaaggactaaaatatcattcccctaagtgaaacatgaaagaaatccctttaaaaacaaaaatgtatagtcagggaaccaaaacattgtattcacactctcacctgcgtttcaaccataacatagcatttagaaagtgtaggtacattggttgaagtgttctcttcacatcatcaaatgccccaaaggtaggattttcccatccgccttggactagctgtggagctcagacaatcacagaatttcctaccgagttcagactgggtcctatatttagaagggctttattggcggggggtggatggggtgatgggtacattcaaacaggagtttaaaaaaaacaccatttgaatgaggtcagaagcataagaattcaatcaaaagcagtgagtagggaaatagaagaagaaattctaaagtaggaacccagccatgacatacttgcaaaamcaacaacaacaacaacaaaaaactacaaaggaattcaactacaaatataaattgtacacatttggaaggtgtagaattctagcacactataagccggatttcctggacagattcttataaaattcagaagtgttttcacacattacatcttccatgaggaaaaggcatcctataaaatgctccttatttttttatgagctattgagaagcaca

SEQ ID NO: 759930 - DNA, 678 bp, Homo sapiens
tgttccctcaggcagtccaaggactaaaatatcattcccctaagtgaaacatgaaagaaatccctttaaaaacaaaaatgtatagtcagggaaccaaaacattgtattcacactctcacctgcgtttcaaccataacatagcatttagaaagtgtaggtacattggttgaagtgttctcttcacatcatcaaatgccccaaaggtaggattttcccatccgccttggactagctgtggagctcagacaatcacagaatttcctaccgagttcagactgggtcctatatttagaagggctttattggcggggggtggatggggtgatgggtacattcaaacaggagtttaaaaaaaacaccatttgaatgaggtcagaagcataagaattcaatcaaaagcagtgagtagggaaatagaagaagaaattctaaagtaggaacccagccatgacatacttgcaaaaacaacaacaacaacamcaaaaaactacaaaggaattcaactacaaatataaattgtacacatttggaaggtgtagaattctagcacactataagccggatttcctggacagattcttataaaattcagaagtgttttcacacattacatcttccatgaggaaaaggcatcctataaaatgctccttatttttttatgagctattgagaagcaca

SEQ ID NO: 759931 - DNA, 629 bp, Homo sapiens
tatatacctttttattctattatatagaacagtatattctataggttgttttttacatatatatgaatatatttctataccctattgtatgtttaaaatattttgcaaatgtaagaaaagaatttaaataagtcagtaacttatgagagttaagaatttactggagatgaragaaaaatatttatagttatcataattattttgcaaagatggtagagtggtggggagtatcaggttcccaatcaaatgattacaaaatttctgtctcatttcatgccgtattttaccctgtgtgggggtgctttcttgaggttacatctgtatttaactttacttggtggcttgtggaggcattttatattaaagcaattccaagtttttctgtaccatcttccaagctggagatgggtaccaaggagaaagtgaaggaatatggaattcaattcctgatgacaccttgttcgtctctgttgtcagaaccctgtacctgactggagtaaacaaactattgttgaataagaaatgagagatctgagtgtgaatcctgactttatcatttatggagtgacttgagcgaagtttcttatcccctctaaatattggtttcttcatttgagaacatggggtca

SEQ ID NO: 759932 - DNA, 474 bp, Homo sapiens
aggttttgtggtcaccctgcggtaagaatgggattaaattcctgttcaacagtgtccatccagggacgggaaagaggacaacttccctttggctacattcaaatggaatagaattacctctaacgtatggctacattcagatggcatagaattatctctaacgtagtctaattacagcaaacatgattgatttmtgacccatcagcccctcccccttccttggtgacttcacagccacccttggcttctgcattcgtcctgtccctggctatgtgctgggggaacatgatctcccagccacagcagacgagtcattgtttactaagcccgtctcagggatctcctcgttcatgtcagtgattggtccagtttcatgtgacctgagcaacttctggggatgttttcttatttcataatatgaatgctacagccaccagtaacaacaataattgaatatttcagaaataaatacga

SEQ ID NO: 759933 - DNA, 442 bp, Homo sapiens
ttcaacaacacattaaaaagatcattcgtcatgaccaagtgggatttaagggatgcaaggatgattcaacatatgcaaattaatcaacaagatacatcacatcaacagcatggaggacaaaaacatatgatcatttcaactgatgctaaaaagcatttgataaatttcaatatctcttcgtaataaaaagactcaaaaactgaggatagaagggacatacctcaayacaatgaaagtcatatatgatatacctacagttagtgtcattctgaaaaactaaaagcctttcctctaagatctggaatatggcaaggatgcccaccgtcaccactgttactcaacatagtactggaagtcctaactagaccaatcagacaaaagaaagaaagaaagtgcatccaaattggaaaggaaaaagtcaaattatccttgtttgtagata

SEQ ID NO: 759934 - DNA, 572 bp, Homo sapiens
tatataaacacctttatgcaaataaactagaaaatctagaagaaacggataaattcctggatgcatacaccctaccaagactaaactaggaagaagttgaatccctgaatagaccaataacaagctctgaaattgagacagtaattaatagcctgccaaccaaaaaaagtccaggactggatggattcacagctgaattctaccagaaatacaaagtgaagctgataccattccttctgaaatgattccaaacaattgaaaaggaggggctcctccctaactaattttatgaatccagcatcatcctgatacccaaatcaggaagagrcaccaaagaaaaagaaaacttcaggccaatatccctgatgaacatcgatgtgaaaatcctcaataaaatactggcaaaccgaatccagcagcacatcaaaaaacttacccactaggatcaagtcaactttatccctgggatgcaaggctggttcaacatatgcaaatcaataaatgtaatccatcacataaacagaaccaaagacaaaaaccatatgattatctcaatagatgcagaaaaggcc

SEQ ID NO: 759935 - DNA, 552 bp, Homo sapiens
gtaattgtctcagaaatgcttcctctagattttacttgaaaactgaacagattttttttctttttttctatgtcttttcctgaatattaaaatgcacaactaaaagaaatccgctgacatttttaagacagactttactaatagtctccttaacctactttcagcttccaccctcaactggtcctaaagggaatgcggtgtgtgtgtgtgtgtgtgtgtgtgtgtgtgtgtgtgtgtgtgtgtgtacattatcccacttccaaattgactggactcagctggacagctgtcatgaatttgcagttgcagttagatagtgtttgggctggagatacaaaataagttytttcacatgtctggtaccttgtctggaatgtctggaagagcacagtgctgtctgggctctctctctctctttctttctctgtctctcgtcacataactagcctgaacttcctcacatcacagtggtctcacagtagtcatccttcttacatggtgtttagcttcccctagaatgagcattccatgagatccatttgaaaaatgcaa

SEQ ID NO: 759936 - DNA, 552 bp, Homo sapiens
gtaattgtctcagaaatgcttcctctagattttacttgaaaactgaacagattttttttctttttttctatgtcttttcctgaatattaaaatgcacaactaaaagaaatccgctgacatttttaagacagactttactaatagtctccttaacctactttcagcttccaccctcaactggtcctaaagggaatgcggtgtgtgtgtgtgtgtgtgtgtgtgtgtgtgtgtgtgtgtgtgtgtgtacattatcccacttccaaattgactggactcagctggacagctgtcatgaatttgcagttgcagttagatagtgtttgggctggagatacaaaataagttctttcacatgtctggtaccttgtytggaatgtctggaagagcacagtgctgtctgggctctctctctctctttctttctctgtctctcgtcacataactagcctgaacttcctcacatcacagtggtctcacagtagtcatccttcttacatggtgtttagcttcccctagaatgagcattccatgagatccatttgaaaaatgcaa

SEQ ID NO: 759937 - DNA, 613 bp, Homo sapiens
agatttttttgcttttatttcttatctttctgtttatctgattcagttgtcttgtcatctcaatttgatctttgtaacttagactgtttttcacacgtaccatgtctatgttctcccgagaacaccaaatgtgttcctgaaatgtcctcaatcttgaaatagcttttagagactatctcatcctttgaattacctttcacaacaaaaaacagggtgttactaaaaggttaatcagcatttttttgttgtttatatttatcattctctgatgaaacttgcttctcagactcagtatttgtcaacaatcagcaaatagattcccctttgactacatacacaggtatgatggtttgacttcaggcacagtattcttggctattctttcmctattcctgggatccttctctgacagaatgtgggtgggcaccatccaattggctgcaagcagagctagggcaaagcaggcagaaaaaggtgggataaccttgcttctggttttcatctttctcgcatgatggatgcttccttccatttctcctgcccttggacatcaaactccagcttctttggccttttgactcttagacttataccaggaatttgttggggtctc

SEQ ID NO: 759938 - DNA, 613 bp, Homo sapiens
agatttttttgcttttatttcttatctttctgtttatctgattcagttgtcttgtcatctcaatttgatctttgtaacttagactgtttttcacacgtaccatgtctatgttctcccgagaacaccaaatgtgttcctgaaatgtcctcaatcttgaaatagcttttagagactatctcatcctttgaattacctttcacaacaaaaaacagggtgttactaaaaggttaatcagcatttttttgttgtttatatttatcattctctgatgaaacttgcttctcagactcagtatttgtcaacaatcagcaaatagattcccctttgactacatacacaggtatgatggtttgacttcaggcacagtattcttggctattctttccctattcctgggatccttctctgacagaatgtgggtgggcaccatccaattggctgcaagcagagctagggcaaagcaggmagaaaaaggtgggataaccttgcttctggttttcatctttctcgcatgatggatgcttccttccatttctcctgcccttggacatcaaactccagcttctttggccttttgactcttagacttataccaggaatttgttggggtctc

SEQ ID NO: 759939 - DNA, 288 bp, Homo sapiens
ttatgaagcttagtttggctggatatgaaattctggattgaaaattcttctctttaagaatgttgagtattggcccccattctcttctggcttgtagggtttctgctgagagatccgccattagtctgatgggcttccctttgtacataaccygaccgttgtctctggctgcccttaacattttttccttcatttcaaccttggtgaatctgacaattatgtgccttggggttgttcttcttgaagagtatctttgtggtgttctctgtatttcctgaatttgaatgt

SEQ ID NO: 759940 - DNA, 487 bp, Homo sapiens
accaaatgtttaaaagtctcatgtcacactgactctatgcgtagacattatatgcttttctccttacatgaagcacagtggagatggtgacatgcctgaatattttctgttggacagaaaggaaaagagaccgagaggcagggttataatgatgtcttaraacctccaggtatgaactaactcaggtttagtcttagcgctatgtctagtctagtcttagtgctatggtccttgtaaactcaaacttcctgacagctgcttttgacttttgggcaaactagagagaaaagccaagtgagagactagaatcaaagcatatcagtattggcaagaaaatgagacttacctagataaataaactgtggaccatacgtggacttaattatcttggctttggaaaaagagaatgttttatttgttgcttagcttccagactccgctggaagcgggtgtttctttactaaggctctttagagtccttgtctca

SEQ ID NO: 759941 - DNA, 450 bp, Homo sapiens
atagatatagatatccttattataaatattatatgccttgcaagaaaagtcatcagcaaacaatttaaaaacatgtatgtaagtgggccaggtgcagtggcgcatgcctgtaatcccagcactttgggaggccaaggctggagaattgcttgaggccaggagttcaagaccagcctgggaaacatggagagacccagtctcyataaaaatgaaattaaaaaaattagctgtttatggtggtgtgcacctgtagtcctagctgctcgagaggctgaggcaaaaaggtcttctgagcccgggaagttgaggctgcaatgaactgtgattgtaccgctgcactccagcctgagtgacagagtaagactctgtctcaaaaataaataaataaaattttaaaagttaaatttgtttccaaaaaacccatgtaagcataatcttttgaattcagag

SEQ ID NO: 759942 - DNA, 626 bp, Homo sapiens
acaaggtcttagaaacactacagaataaaagcccagacttcttcagtcctttggtgattaaatgcacattagcaaatctatgttttgttctgattcactgtcaaaaagtatgagcagaggctagaagtatcgtctggactgttgggaaacgtttaaaagcagtggcccctctctgcttttattcatttccccaagcctggtttaagtgtaaagcactgtgaatgaaggtagttgtcaggttagctccaggggcgtgggtgtttttatttattttattttattttattttattttatttttttcaggggggaggtagttttattttaatttatgagctcctttcccacctttttttggtgatctaattgcattgattaaaagcagctaacccgttctktttttttttttttttttttgagacggagtctcgctctgtcgcccaggccggactgcggactgcagtggcgcaatctcggctcactgcaagctccgcttcccgggttcacgccattctcctgcctcagcctcccaagtagctgggactacaggcgcccgccaccgtgcccggctaattttttgtattgttagtagagacggggtttcaccttgttagccaggatggtctc

SEQ ID NO: 759943 - DNA, 617 bp, Homo sapiens
tcaaatttctcttactgccataatttttgcaaaggcagtttcattattacactcccaaggtttcagaaatctcgaaattggaagagaggcagccagcatgtatggagcaagcacaatggtgccaagcctttcccaaattctctcatttatgccttacaactctcccaccaggaaggtactgatgagaaaaccaaggtactgatgagaaaaccaagatgtcagaaaagggaagtgacctgaccctagcttcatagtcctcgtttttgctcgtgcccaagtcttccctggttcaaactccagactctttcgcgcaccctcttgtgatgtacctggaacttggagtctggcttgggttgtttcattccatgccctgacacaaaaattagccagaaaaggacaaaatcccccagaatacttgtatcctggagtcccaactcaccaactcagacagacctraagggaaaatgtttgcaagagtgatacaaggacccaaggagaaaggaaggggccaggaacagacttggaaatagaggccaagcttctaatatagaataaactagcaattttctgtgagctgctgattaaatacctacctccctcagagcctcagtatcccc

SEQ ID NO: 759944 - DNA, 603 bp, Homo sapiens
tactataagaaaacattggggaaactctctaggacattttactgggcaaagattttctcgagtaacatcccacaagcacaagcaacaaagcaaaaatgaacaaatgagatcacgtcaagttaaaaagcttttgcacagcaaaggatacaatcaacagagtgaagagacaactaacataatgggagaaagtatttgcaaacttcccaactgacaagagatkaataaccagaatatgtaaggagctcaaacaactctataggaaaataaatccaataatctgattttaaaatgggcaaaagatccgaatagacatttctcaaaagaagataaacaaatggtaaaccgatctatgaaaaggtgctcagcatcacgatcatcagagaaatgcaaatcaaaactacaatgagatatcatttcacccatgtaaaatacgcgtttatccaaaagacaggcaatgataaatgctggtgagattatgaagaaaaaagaacccttgtatactgttggtgggaatgtaaattagtacaactactatggagaagcacagcagggtgatgaaagtcaataataattcaattgtacaatttattttattttattttt

SEQ ID NO: 759945 - DNA, 640 bp, Homo sapiens
caaggtgataacagtgggccaccatgcggatgtttgggatttccaaccaataagaagtccaatatcagtggccctcctctgaagctgaatgcccagcatggattctccagagcccccagtgatcacgagaaagtaggtttcttactggacctgaagatactaggcccaatgcacagctgcttgayaaaaatgagctcttccctgccttttctatactcggcactttaaaaaatcttcctttgctggtgatcatgattgctgaggtgagaagtaaatgaaatggtttccattcataaggctagaatggcagaatgatgagggggacaacttaaagaccagaggtaatgtttaaaaaaaaatagcaaaatcagcctaagcaaactaaaaagcaaatgacaaacaggggcaaatatttgcaacctatatcacaacaaagttaataacccaaagatgtaaaagactcctataaataaagaaaagcacaatgattttatagcaaaaggaacaagagatacaggagttcacagaaaaaccataatggttcttaaatgtgtaaaaagtcattcatctttgctaaaaaaaaaaaaagtaaaactacagctaaacagaatttctcacctattatattggaaaagaaaac

SEQ ID NO: 759946 - DNA, 640 bp, Homo sapiens
caaggtgataacagtgggccaccatgcggatgtttgggatttccaaccaataagaagtccaatatcagtggccctcctctgaagctgaatgcccagcatggattctccagagcccccagtgatcacgagaaagtaggtttcttactggacctgaagatactaggcccaatgcacagctgcttgataaaaatgagctcwtccctgccttttctatactcggcactttaaaaaatcttcctttgctggtgatcatgattgctgaggtgagaagtaaatgaaatggtttccattcataaggctagaatggcagaatgatgagggggacaacttaaagaccagaggtaatgtttaaaaaaaaatagcaaaatcagcctaagcaaactaaaaagcaaatgacaaacaggggcaaatatttgcaacctatatcacaacaaagttaataacccaaagatgtaaaagactcctataaataaagaaaagcacaatgattttatagcaaaaggaacaagagatacaggagttcacagaaaaaccataatggttcttaaatgtgtaaaaagtcattcatctttgctaaaaaaaaaaaaagtaaaactacagctaaacagaatttctcacctattatattggaaaagaaaac

SEQ ID NO: 759947 - DNA, 640 bp, Homo sapiens
caaggtgataacagtgggccaccatgcggatgtttgggatttccaaccaataagaagtccaatatcagtggccctcctctgaagctgaatgcccagcatggattctccagagcccccagtgatcacgagaaagtaggtttcttactggacctgaagatactaggcccaatgcacagctgcttgataaaaatgagctcttccctgccttytctatactcggcactttaaaaaatcttcctttgctggtgatcatgattgctgaggtgagaagtaaatgaaatggtttccattcataaggctagaatggcagaatgatgagggggacaacttaaagaccagaggtaatgtttaaaaaaaaatagcaaaatcagcctaagcaaactaaaaagcaaatgacaaacaggggcaaatatttgcaacctatatcacaacaaagttaataacccaaagatgtaaaagactcctataaataaagaaaagcacaatgattttatagcaaaaggaacaagagatacaggagttcacagaaaaaccataatggttcttaaatgtgtaaaaagtcattcatctttgctaaaaaaaaaaaaagtaaaactacagctaaacagaatttctcacctattatattggaaaagaaaac

SEQ ID NO: 759948 - DNA, 541 bp, Homo sapiens
aataacattacaaattggtgattacagatcaccataagagacagaataataatggaaaagtttgaaatactgggcaaattactaaaatgtgacacagagacacaaagtgagcacatgctgttggaaaaatggcacctatagacttgctcatttttaaactgtcaatttgtaaaaaatgtggtgtctatgaagtgcaataaggcaaagtgcaataaaatcaagtgtgcctgtatctatccagctgtctaaacacacaaacaccattagaagtttcctagcagaaggaattttaaatagtgccytttcaattcagttcaagtaatctgctagttaatactaagtttatgacagctcaattttctacattatgaagtcaaacaaactggctttttaaaaaaaatcatttgtccttcagccactcaggaatctcaaataagctgctgttttatggaccgaaataaaaatatttgtgagatgtccaaacatctgcatatttatttatacacctttaattcaaagtcacaaaaacatctgcatattt

SEQ ID NO: 759949 - DNA, 637 bp, Homo sapiens
attttccagacctgatactttgtgcatgtttcatgtgagagtttctcttttttgcttactgttaccagaagagacaactggaatgatgccccagcttctattctagggtgtgatgattaggtactttgtgatgccaaatggccagctgccatgaggatgccatagatagggagggccaagagacatcttcacagtccagtaggtaggctgggcaaggtggcccatgcctataatcctggcactgggggaggcggaggtgggatgatcgtttgagctcaggagttcgagaccagcctgggcaacatagtgagaccttgtctctacaaaaaataaaaaaattagctgggcctggtagcacatacytgtagtcccagctgttcaggaggctgaggcgggaggattgcttgagcccaggaattggagggtgcagtgagctatgatctgccctctagcctgggtgacagagtgagaccttgtctcaagaaatcaaaatagtccagtaaagcacagtttctcaggtgacatggaggtgcactgctacaatacagcagcaggtggcacagtgagaaaaagtgtggcttcttttggacagtgcagagtaagttataggtgtcagagaagcagaaatgatccaagt

SEQ ID NO: 759950 - DNA, 519 bp, Homo sapiens
gctacatccccaagccctggctacacacctcaccacactgagggcctacacaccactttctttttttctttacagcaattaccaccagccaatgttatcccaaatactctttcttgtcactctgcagagggcagggctgtgtgtccccagcaccccagcacggagtttgagcttgacaaatatttattgaacaaattaatggatgaaattaatccttacaacatctctttggggtaggtgctcttattaaacccattctacagaggggaaagcagagacctgcctccatctgggctaggtgccatccactagggtcatgaaccccaagctgctctccatcaaagcaaatatcatgctctaggccatgaccagactctargttggtctcccagttggactgtgactccctgagagcagtactgtatatccccgccactgccccacttcactgtgttccccagcgccaagcacagtgcccaacacatagtaggtgttacatacagatctgttgcttgagtg

SEQ ID NO: 759951 - DNA, 639 bp, Homo sapiens
gtgaaaagttaaacgcttttcctttaagatcaggaacaagacaaggacgcccacactcactgcttctattcagcatagtagtggaagtccttgccagggcaattaggcaagagaaagaaactaaaggcatctaaatgagaaaaagataaaattatctctrtttgcggatgacatgatcttatgtgtagacaacccaaactttcttatcttcacagaatattttgcaagagttgagctcctagaaaatgagcttagatcatttctcccctctggccagtaacaagatgctcctacactgagcttcatttagcacagccctggacacaccaccaggcactcagcaaacatcagacaatttccagttcaatggaaaattctcagttatccatggcagaatcatggccctgtcatgcactggctgagtttccttgaggaagctgcttaagctttctgactcttggttttgttatctgcaaaaggggaatagcagtgtctataccacagggataatatgaaggctaaatgagatcctgtaaagcaatctttccaagtcctgagcttgacacaataataaaaactaacctttatttaattattgaggtagaggaaggaggataaagaacaggaccaaagaacaga

SEQ ID NO: 759952 - DNA, 658 bp, Homo sapiens
tcaacctgttcccatagaaagtaaagactggagaagagaggccttttggatgctggaggatcttggggagtcctagggtcagcattttgggggtgcccctcccgtgaccagaaatggagaagaattaagaatgaggagtgaatttgccctgggaccaagctgagcttagaatttggttttcttttaaaaaatttgtattaccctatgttttagaattgttctctaaattcacyttctgataaaagagacaggtcttgactaattgaggtatctgattaaacaaacatttggcttgattaaaaactaagcaaagaagaattcaagaaagatagatcagaaatgacataaggagaaacaactactctataaaggtagattggtcaaatatgtaaaagagggttgagatgaagggatatttatatcttgaacacacactgagaaaataatttttgagcatttattaaagaccaaatactttaggctttgttttattggggaaagtaaactgtttgcttgttcaatgactttctgggagaattagaaaatttaatcacaaatgaactgctgcaaatcaaatgtagtaaaagccattgtgcagtaatcaaggacagaacataaatggttcctttccttgaacaaggggtgtattcaaaagagg

SEQ ID NO: 759953 - DNA, 435 bp, Homo sapiens
cccttcacagccctccctccccaagaatgtcacagctccagaagcaggtttgcacccacagtgacacgccatggctttgcatttcccccagcactaaggagctgcttcatggagcacctctgattgacaaatctaaaatagagaatgaaagaaagtgtcaacctggaggagtttaataacgctgtaattaaaagaaggaagaagggkccacatcccagtgaggaagcagctcctttaaactattgaagaatatattgttctgggggtgccaacagcagaagaaattttaataacaaaaataaattgacaaaaaaaaaggcaggagaggtattagttggaacaaaaccaagtatcttaaaactgctcattttaaactgagtgttttatggtaggataaggaagctccaatattttcaaacacaatttatgtttaga

SEQ ID NO: 759954 - DNA, 435 bp, Homo sapiens
cccttcacagccctccctccccaagaatgtcacagctccagaagcaggtttgcacccacagtgacacgccatggctttgcatttcccccagcactaaggagctgcttcatggagcacctctgattgacaaatctaaaatagagaatgaaagaaagtgtcaacctggaggagtttaataacgctgtaattaaaagaaggaagaaggggccacatcccagtgaggaagcagctcctttaaactattgaagaatatattgttctgggggtgccaacrgcagaagaaattttaataacaaaaataaattgacaaaaaaaaaggcaggagaggtattagttggaacaaaaccaagtatcttaaaactgctcattttaaactgagtgttttatggtaggataaggaagctccaatattttcaaacacaatttatgtttaga

SEQ ID NO: 759955 - DNA, 654 bp, Homo sapiens
atccactccacggctgctggtatgaggaagtaaggcgggcctgatggtcagagggaggaggaggatgggcagagggaggagagtctgatgccagagggaagaggttgatggtcaaagggcgcacagtgatgatcagagggaggaggatgatggccagagggggaagggtctgataattcgagggaggggtctcgaggctccatgtgaagtaggtctgatgaccagcgctcaaagttcataagtcagtctaataacctaaagaactatggacagtagaaagaatacagcgacatacaagagggctattacatamtggacattataatctgtgcttcaagatattgttgccaattattacagcaaattgctaaagtgagtattattatgacttctattacccacatgaagaaacacaagctcacagagactaggaaacaggctcaaagtcactcagctagtaagtgatagggaatttaactcccatctctttctagtaacttaggtttattttatataatagatgggaggtatgcttgttaaaataagtcatttcaagatcatatcacaggtttgtaggccacttcttctttccttgactatatttggttctctttccagtgtgatttttaactggatcctcagtacccgaaattc

SEQ ID NO: 759956 - DNA, 654 bp, Homo sapiens
atccactccacggctgctggtatgaggaagtaaggcgggcctgatggtcagagggaggaggaggatgggcagagggaggagagtctgatgccagagggaagaggttgatggtcaaagggcgcacagtgatgatcagagggaggaggatgatggccagagggggaagggtctgataattcgagggaggggtctcgaggctccatgtgaagtaggtctgatgaccagcgctcaaagttcataagtcagtctaataacctaaagaactatggacagtagaaagaatacagcgacatacaagagggctattacatactggacattataatctgtgcttcaagatattgttgccaattattacagcaaattgctaaagtgagtattattatgacttctattacccacatgaagaaacacaagctcacagagactaggaaacaggctcaaagtcactcagctagtaagtgatagggaatttaacycccatctctttctagtaacttaggtttattttatataatagatgggaggtatgcttgttaaaataagtcatttcaagatcatatcacaggtttgtaggccacttcttctttccttgactatatttggttctctttccagtgtgatttttaactggatcctcagtacccgaaattc

SEQ ID NO: 759957 - DNA, 629 bp, Homo sapiens
atcagggatcctgcagaggagcaaggaagtccagactctgattgtcagagcagtcttccacggtcacctgtctcctaaccccagcccaatttcattttccagcctctgcccacaacacttccccagcacaccctcccaaccctggcccaccagtctgttttccacctcaaaggggccatgcttgttcctttcacccgttatcccccatctctacgtccccagaatcactcactctagaatccttccagtgaaaaccgcaggctccaccttgcctctcgtttgaccattcttgggttttcagggtgaatctcttcccttcaatagctcccacccttcatttgcrcagtacgcagtatttaacttttctccacaggttccaaaggctgatttcttgcaagcaaaggccacctgatgtgtctttttttacaaatctctgctgaacaggtaacaggtgcccaataaaactttgtgagttggcagtctaagggcatctaccctcaaaacagctaacgtagcattttatgggagtggaaacggagtcgtgtggaaagacgaccaggcactttcgtttttgagatggagtctagctctgtcccccaggatggagtacagtgctgcgatctcagctc

SEQ ID NO: 759958 - DNA, 659 bp, Homo sapiens
caccttggtacgcatcctgtatttcaaatggagtgtgtccccattttcttttcattttcaaaataaaactaatctattattacttaatctcaggctttattctaaggttcttctgtattatctgctcttcccttttcctatattttttatatggaactatttctggtctgctttttaaaaatttattatttatttttgtgatggagttttgccctcgtcacccaggctggagtgcattgccacgatctcggctcactgcaacctccgcctcccaggttcaagagattctcctgcctcagcctcccgagtagctgagattacaggcacccgccaccgtgcatggctaatttttgtatttttagtagggacagggtttcaccgttttggcgaggctggtcttgaactcctgacctcaggcgatccacctgccttggcctcccaaagcgctgggattataggtgtgaggcactgcacccagcctttttttttwaaaaaaaatattttaaacccagttttactctttacacataggaagaagcttctgacttcatcacagatgtcagtgccctagctgcagaccacctggcaagcaggacctgagcagtgacatgctgaaggacagataactggattataagttcattcctttatttagccta

SEQ ID NO: 759959 - DNA, 588 bp, Homo sapiens
tccaggggcccaccccatccctcctcccagccttctgctacctgtctctccacttcttctacaagcaccctctccaaaactgccacatgttctcctgactttgtgtctctgtgggattgcctctatgatgtatcaggaggacgtgtggttcaggggccaactgaaacaccatgtcctttggtttttcgtgaagccatcccccatttcctggaaccaaaatagatcccacagcacttcctgtgtaccctgatacctaacaaaatgttttaaagattgctttagctggagattcttacatatgtgtgtcctcctgggacagtgagtctggcaaccamccctcgctgattctttccctccctccccccgtctcgcagcagctggccaactgccccttctccagcaggtgctccctgcaggcttgtgaaatacactggagggcaattgtctggctcagactcatgttgccatcagcaaatgaccacgtttaagaatgttatgtcacctctatatttggcctgcattattcatataaatatgcttggtagacaagggacagaaggcacttgtgtcggagaaagacagtttaaa

SEQ ID NO: 759960 - DNA, 637 bp, Homo sapiens
gttctgaatggtattgcctaggttgtcttccagggtttttatagttttaggttttacatttaagtctttaattcatattgagttaacttttgtatatggtgtaaggaaggggtccaatttcagtcttctgcatatggctagccagtatcccagcaccatttattgaatagggaatgctttccccattgcttgtttttgtaaggtttgttgaagatcagagagttgtaggtatgyggtcttatttctgggttctctattccattccattggtctacgtgtctgttcttgtaccagcaccatcctgttgtagtcactgtaacactgtagtatagtttgaagtcgagtagtgtgatgccttcagttttgttcttttgcttagggtttccttggctatttgggctcttttttggttccatatgaattttaaaatagctttatttagttctgtgaagaatgtcaatgttagtttaatgggaatagcattgaatctataaatcaacttgggcagtatggccattttaatgatattgattgttcctattcatgagcatgaaaggttattccatttgtttgtgtcatctcttatttctttgagcagtcatttatagttctccttgtagagatttttcacctcccc

SEQ ID NO: 759961 - DNA, 442 bp, Homo sapiens
gtactatctagcttcctgaggctcttctttttaagtcctctagccagaaatgttgtactttggctttcatactatgttagttcgtccattttgcatcattataaaaggaatacctgagactgggtaatttatttttttttaaaraagggtttatttggctcatggttctgcaggctgaacaggcagggcaccagcatctgctcaccttccggtgaggcctccagaagcttttgctcatagcggaaggtgaagtgggagccagcatgtcacatgatgagagagggagcaaaagagagaggcaggaggtgccaggctgtttaaacaaccagctgtcccgtgaactcattgctgcaggaagggcagcaagacattcatgaagggtccacccgcatgacacaaacacctccattaggccccaccttcaatactggggaatcacatt

SEQ ID NO: 759962 - DNA, 420 bp, Homo sapiens
ttcctgaggctcttctttttaagtcctctagccagaaatgttgtactttggctttcatactatgttagttcgtccattttgcatcattataaaaggaatacctgagactgggtaatttatttttttttaaagaagggtttatttggctcatggttctgcaggctsaacaggcagggcaccagcatctgctcaccttccggtgaggcctccagaagcttttgctcatagcggaaggtgaagtgggagccagcatgtcacatgatgagagagggagcaaaagagagaggcaggaggtgccaggctgtttaaacaaccagctgtcccgtgaactcattgctgcaggaagggcagcaagacattcatgaagggtccacccgcatgacacaaacacctccattaggccccaccttcaatactggg

SEQ ID NO: 759963 - DNA, 363 bp, Homo sapiens
tccagcccacctccttaggctcagcctgggccccagtgctattttcctactgtttatccacgtagttcctgggataggatcctcagctctgcctggaagttagtgctgtgtgcacacacatgaaccaggagccatacaccctctcacaactggctgtgcccaaaaggatgatcaagcccagaccytggccagcagcggtgacctgcttctccaggaagcactgctcaggccaccatcaggagagtgcagcagcaacaaaggcaagccagacagcccagaggcatcaccctacgttttgccacatttctgagactcaaactgggttgctgtgaagatcggatgagatgagccatgttaggtgtt

SEQ ID NO: 759964 - DNA, 432 bp, Homo sapiens; identical to SEQ ID NO: 757732

SEQ ID NO: 759965 - DNA, 602 bp, Homo sapiens
tgcctccaaagaaagaagaagtaaaaatgaaaaggcagaaatgaaatccacaagcagacagcccggcgccacaccctgggcctggtagttaaagatcgagccccggcctactcgattatgttatctgtagattccagacattgtatggaaaagcactgtgaaaacccttgtcctgttctgttccaatctgattacsggtgcatgcagcccccagtcgtgtacccgctggttgcacaatcgatcacgaccctctcacgtggacccccttagagttgtgagcccttaaaagggacaagaattgctcactaggggagctcagctcttcagacaggagtcttgccaatgctcctggctgaataaaccccttccttctttaactcggtgtctgaggagttttgtctgcagctggtcctgctacactactatcctagaagtaggaaaaaactcaaacttgctttccctgttggaagtgggctgaaattccacaaaggagttgcctgcaccccattatcatggaagcaggaaaactctccctccttgctgaaagtgaataaaactccagaaaaagagtttcacagccgaataatccttaaacctcaacc

SEQ ID NO: 759966 - DNA, 602 bp, Homo sapiens
tgcctccaaagaaagaagaagtaaaaatgaaaaggcagaaatgaaatccacaagcagacagcccggcgccacaccctgggcctggtagttaaagatcgagccccggcctactcgattatgttatctgtagattccagacattgtatggaaaagcactgtgaaaacccttgtcctgttctgttccaatctgattaccggtgcatgcagcccccagtcgtgtacccgctggttgcacaatcgatcacgaccctctcacgtggacccccttagagttgtgagcccttaaaagggacaagaattgctcactaggggagctcrgctcttcagacaggagtcttgccaatgctcctggctgaataaaccccttccttctttaactcggtgtctgaggagttttgtctgcagctggtcctgctacactactatcctagaagtaggaaaaaactcaaacttgctttccctgttggaagtgggctgaaattccacaaaggagttgcctgcaccccattatcatggaagcaggaaaactctccctccttgctgaaagtgaataaaactccagaaaaagagtttcacagccgaataatccttaaacctcaacc

SEQ ID NO: 759967 - DNA, 602 bp, Homo sapiens
tgcctccaaagaaagaagaagtaaaaatgaaaaggcagaaatgaaatccacaagcagacagcccggcgccacaccctgggcctggtagttaaagatcgagccccggcctactcgattatgttatctgtagattccagacattgtatggaaaagcactgtgaaaacccttgtcctgttctgttccaatctgattaccggtgcatgcagcccccagtcgtgtacccgctggttgcacaatcgatcacgaccctctcacgtggacccccttagagttgtgagcccttaaaagggacaagaattgctcactaggggagctcagctcttcagacaggagtcttgccaatgctcctggctgaataaaccccttccttctttaactcggtgtctgaggagttttgtctgcrgctggtcctgctacactactatcctagaagtaggaaaaaactcaaacttgctttccctgttggaagtgggctgaaattccacaaaggagttgcctgcaccccattatcatggaagcaggaaaactctccctccttgctgaaagtgaataaaactccagaaaaagagtttcacagccgaataatccttaaacctcaacc

SEQ ID NO: 759968 - DNA, 663 bp, Homo sapiens
gaccacttaccagggcctgtccctcattcacccgacccaactttgctggggggtgtgaggtggggtaatttattcagttctaaccaggaaaggtgaaattataacaggattaataacacaagtgtcatggccttccaagggccccaagacgatcccatcccccttccctgctcagaacctgcctgtcctgcaccctggcctgtcctctggaggttatctgatgagggcctattctgagggtaaggcctgtgctgattctctatgggatgggaccctggtgccaggmtagtggggggagtagagtcggggggtggagggtggcatgtggcaagctggtggaagttctggaccaagggaatgagcctccttcttgtgcagggagaactcatgggcccgcaccccatggttgactgcagtcaaagcacctgcatttcaccgacctcctgttggaggtgtggaccaccctagtgtgggcaaccactcccggctgacagcataggcccacctcccaatgtttggtccatggaatgttctacctgcagaggcacctcccagtgcacccccttcccccactacccccactggctgccctctgagaccccagcagtctgggcagagcaggtctcaagttctaggaaaggatcctaagcaaatgctgccaag

SEQ ID NO: 759969 - DNA, 663 bp, Homo sapiens
gaccacttaccagggcctgtccctcattcacccgacccaactttgctggggggtgtgaggtggggtaatttattcagttctaaccaggaaaggtgaaattataacaggattaataacacaagtgtcatggccttccaagggccccaagacgatcccatcccccttccctgctcagaacctgcctgtcctgcaccctggcctgtcctctggaggttatctgatgagggcctattctgagggtaaggcctgtgctgattctctatgggatgggaccctggtgccaggatagtggggggagtagagtcggggggtggagggtggcatgtggcaagctggtggaagttctggaccaagggaatgagcctccttcttgtgcagggagaactcatgggcccgcaccccatggttgactgcagtcaaagcacctgcatttcaccgacctcctgttggaggtgtggaccaccctagtgtggscaaccactcccggctgacagcataggcccacctcccaatgtttggtccatggaatgttctacctgcagaggcacctcccagtgcacccccttcccccactacccccactggctgccctctgagaccccagcagtctgggcagagcaggtctcaagttctaggaaaggatcctaagcaaatgctgccaag

SEQ ID NO: 759970 - DNA, 532 bp, Homo sapiens
ggttcttccctgtggaaagcccatcctgagacatcttgctggaaccaaggcaatcctggatgtcctggtactgacccacccgtctgtgaatgtgtccactctcttctgcccccagccatatttggggaggatggacaactacaataggtaagaaaatgcagccggagcctcagtccccagcagagcctgtgtctcaccccctcacaggacagagctgtatctgcatagagctggtctcactgtggcgcaggccccggggggagtgcctgtgctgtcaggaagagggggtgctggtttgagggccrccactgcagttctgctaggtctgcttcctgcccaggaaggtgcctgcacatgagaggagagaaatacacgtctgataagacttcatgaaataataattatagcaaagaacagtttggtggtcttttctcttccactgatttttctgtaatgacattatacctttattacctctttattttattacctctataataaaatgatacctttcatgtacagagccctcaat

SEQ ID NO: 759971 - DNA, 492 bp, Homo sapiens
ctggggactcattaaggagtggaggagacagggagcagcctctcctctcatctcccctgggtccccttgggaaatgggagctaggagacaaaggccagttagactgcctgcagggtgactgccctggccactgtcaggcgagggctctggggagggtggcasaggtgcatcagccatgagagatgtgtaaacaagaaatgccaactccaaatcgcaagtggagaatacccacggagagagagctgtggactactcctggggtcagtgtcttgagatgaggaaactagtagtcagagaagtcagggctggttctcccaggaagaaggtacagtgagtgcaaaggcaccaaggcatgactgggaggcacgtgttcctgacacacagaactgaagagggcttgctctgtgcagtggggcagggcaattgaatcggggtaggggccagtgagctggcagagtctgacctggggcggaggtgtccgggttctagtcc

SEQ ID NO: 759972 - DNA, 625 bp, Homo sapiens
cctccagcttcacgcttccctagagagggctgtgcctctcccatcagactctcctgggccgggctatgcctcccaaatcagactcaaaggcagaactaagcttctcccaccagactactcaggaaaaggcctgcctcccccstcagactcaccagattcccgaaggtaggagaaggtcttggctatgcacagcagatcctcctctgggtccagcacctttggctcactctctgtctgggctggggtaccctctgccacctcctcgaggaaggccccagcaggcaagggctgcatgactggcttgggcagttccagggacggggcccacaggggccgctgcccagtccgctccacagccagcaaaggacgaggtctagaaggcagtggatgagcagtgagtggaggacccatgcttcccccatctccagagacccccctatgccccagactagtttcatgacctctggctggcccatctcactatgagcctcagcttcccctctacccagccatgggctcagttagtccagtatctcgttccccacttgtcatcacaaaagccaccttgattgtttccatgtggggatcctcttttgaaagattcttttccactgccctgcattta

SEQ ID NO: 759973 - DNA, 624 bp, Homo sapiens
agcagagagggcacagcatggctctgggaatggtcttgctgatttgggtgtggggagtgtggataggaaagggcgggcctctcttaagctttaagtgcccagcctggggtggaaaaagaaatgccaggctgagtatggacaccactctggaggcaacagggagccattagggacccttggactgaagagaagtgacaagcgagtggtttggggcagcttctcctgggaattggcaatgatgaagccagagtggaggaactctcctcacaatttctcccacattcaagtagcacgggctcagggcagacgttcctctccaagggtgactgggactgtggctggatgctcacagacagcccaggatgattcccatgcgaatcaccatcaacccctggctcatgcccacccttggttagagtcttccttgacaagctctccctggggcattcttaagccagcaccagttgtgttttccaggtgagcagagcagttctcatgttgccagacctgaggttcctcactgyctgggacctcctgtccaatggaaggaaaaaggaaaacttgcattattgacagatggatcctgaacccctcagctcatgtaacccttgcagcagtcacagg

SEQ ID NO: 759974 - DNA, 509 bp, Homo sapiens
agaaacttgtacatgaatgtccatagcataattattcatagcgatgaaaaatgaaaaagtagacacaatccaactatccattgtggtaaatggacaaatatagtatatccatataatagaatattattcagccataaaaaggaatgacgtattgatatatgctaaaacatggataagccttaaaaacatactcagtgaaagcagccamacacaaaaggtcacataatacatgattccatttatatgaaatgcatagaataggcaaatcttagagacaaaaagccaattagggggtgcccgggtgggggagagagaatgagtagtgactgctaatgggtataggatttcttttgggggtaatgaagctgttctggaattagatactggtgatggaggcacaactcctacaaatatactaaaaataatgggatagtacactttaaagacttaactatatggtatgtgaattatacctcgacacccctgctatttttaaaagataaaaaaag

SEQ ID NO: 759975 - DNA, 619 bp, Homo sapiens
acagtatgatcttatacacagaaaaagctggaaactacaggaaaaaaaaaaaagtcttagaacagataaatgcatttggcaaagttacaggatacaaaacgaacatacaacaatcagactgggcacagtggctcacatctgtaatcccagccatttgggaggacaagacaggcagatagcttgaggtcaggagatcgagaccagcctgaccaacatggtgaaaccccatctctactaaaaataccaaaaaaaaattagctgggtgtggtgatgtacacctataatccaagctactcgggaggctgaggcaggagaatcgcttgaactcagcaggcggaggttgcagtgtgccgagattgcgccactgcactccagcstgggtgacagagcaagactctatctaaaaaaaaagaaaaaatcagtagcatttctatatgccactaatgacccagctaaaacacatacagaaaaataaaacacctaggaataaatttaatcaaagagatgaaagacctctacgacaaaaatgacaaaacactgaagggagatttgaagaggacacaaagaaacggaaagaaatcccatgctcatggatccaaagaactaacagtgttaaaat

SEQ ID NO: 759976 - DNA, 600 bp, Homo sapiens
gtataaatttagattgtttttgtgagttgaagcaaaagggcatagcacacattggccttcagcaggaccatgcacctgctctcttatccccctagcatctgctctgatcctttccttcctcaggctcccagtccactcaacacaccacacacacactctctcagcatatgagctgccttccagcttgcctctgaaaatcgagaccctcagcacagtaacctcccctcctctccaactgctcttctttgtgttctcgccaccaccaggctcactgcctgctacttctcaggatccccaactatcattgccctgtctcccattttcaccctgacctgctccacagactcctgcggtcccaggaagacctgccctgttggtaccctcatccccccattccctctctcttcctcctctctccatctgactacaraggagaatcatccattccaaatccttttatttcaatgtaattcatttgattctcaccacctgaaggtctgcgttctgaccctgtcacctcctggaaactactttcccagaattccccagggccatcccaacttcagaccattgccttgttctggctgggtttttgcatag

SEQ ID NO: 759977 - DNA, 593 bp, Homo sapiens
cacctttgttgccaactagcaccacagctgcagaactattcaagtctttgaatgattacatatcaggaaaactaaactggtcattttgtgtcagtatatgcatagatggaatggctgccatgactggacagctttctaatttcactactcaggtcaaagaggtcacttcagaatgtaagtctatgcacggtgtcaaaaaatgacaaaaaatgtcgcctgaacttaacaacattttacaggatgtgattaaaattatcaaccacattaaagtacatgcccttagctcattctatttgcacagctctgtgaggaaatggacgcasagcatacatgtcttctcttacacacagaagtgagatgactttctaaaggtagatcactggccagagtttttgagttatgaaagcagctccagtgatttcttttataaaaacagtcagtcactactggcagcacatttcagtgacgcagaatgggtcacaaactgcttacttgtgtgacatattcaacctgctcaatctgtcacttcaagggagaacaacaactgtgttcaaatcaccagataaagtggctgcattcgaagccaaactgga

SEQ ID NO: 759978 - DNA, 601 bp, Homo sapiens
cacagctaaattataccagacatataaagaagagctgatgccaatcacactaaaattattccaaaaaatttaggagtagaggctcctcactaacacattctatcaggccagcatcattctgatatcgaaacctggcagagataaaatgagaaaaagaaaacttagccaatatccctgatgaatgtaactgcaaaaatcctcaacaaaacactagaaaactgtattcagcagcacatcaaaaagttaatttgccatgatctagtaggatttattactaggatgcaagattggttcaacayacgcagatcaataaatgtgcttcatgacataaacagagttaaaaacaaataccatgtaattatctcaatagacatagaaaaggcctttgataaaactcaacattattactgaatcattcactatattaaagaaatattacattattacattgatctttctcttttgatagccttgctaacctttcaaattcagtctcttcagaataatggtctaaaccctctgctatgggctgagttgtgttccccctcaaatttattgaagttctaactcccagtatcttacaatgtgactgtatttgaag

SEQ ID NO: 759979 - DNA, 598 bp, Homo sapiens
ccagatcagtgctctgatagctgtgaggtgaggtaatctaggaccctatcattaagagatgttctcagggtaaatgagtaaactaagttaagtgttggcaataaacctctttgttaatattttttacaaaatgcaggtgatattcagaagagcattttagcaaaaaaaattcatatgaagattaagatatagtcacacacaatcattatgtaccccaaatatccataaataaatctagagcaaaaggcatcttgacaagaactctgcatatggctttgacttgaagttaactggattttcagacattaaaaaataataatgaaatatatttatattggcatcacctgaatgtgaaaaataattatacgctattggwgattaaaagaggcctctgtgaccctaccttgttaaaagaaggcagaaggactttgccagttgtcaagcaaggtattttcttctgtgagccaagaggatagtggggaaaaaaagaatggataaagataagatctatgggaaaagtttgaattggggagcccctcacaggcagcaaaaccggatctattccttacctacggtacatgaaatattttcctagcag

SEQ ID NO: 759980 - DNA, 605 bp, Homo sapiens
ttaaatctagtttagcctaaacccacctccttacatatttgagttcagcttaaagacttttctgtacattgtgaactataacaagtggatgtgtaaaccatagctcacacctgtgccactctctgagttttggccaatcaaatgctgccaactcttcaaattatgttcaaatgtggcaaatgccaagctgtaaccaatccagttgttgctgtacctcacttgtgttttctgtatgtcactttccttttgctgtccataaatcttctccaccacatgactatgctggagtctttctgaatctgctgtgattctgggagctgcccaatttgcaaattgtttattgctcaattaaagtcctttaaatttaattcagctaaagtttttcttttttttttattatactttaagttttatggtacatgtgcacaacgtgcaggtttgttacatatgtatatatgtgycatgtaggtgtgctgcacccattaactcgtcatttaacattaggtatatctcctaatgctctccctccctcctccacccaccccacaacaggctccagtgtgtgatgttccccttcctgtgtccatgtgttctcattgttcaat

SEQ ID NO: 759981 - DNA, 556 bp, Homo sapiens
gcatataaacttttgcctagtttagagggttgaagaattgttttaaactagataagataaagctgaaagtttaaacaagctgtgaattttttgtaaaaacttaatcttgtaaaagaaattctttgtgtgaccataatgtctaaatttcaaagggtattattctgtttttccataaattgaacatcggaataaaagtacaatagggttttgttaaagcactgatctgctctttaataaaatttgtaaagggtataaaaggtttatgagaatctcaccttatggtcaaactgattaaagttgaatcaatttttctataaggttttattaaaaattggagtttacattaataatagactaatgcaagggtgaaatttggctttcwctcttgaacaagattatcatgtaacattaaaagataaggaaagatttttgtttgccttttgattaaaatacagggaaaaatgggggaaagacaagagacaaattgtttacaatgctaagtcctccctctatcaatgagtaaaggtttttgcctttttacaatttttgagttggc

SEQ ID NO: 759982 - DNA, 558 bp, Homo sapiens
ataattgatttcttggacaagttcaatgttgctataattgagacaagtataaaatagagaacctcacagtccgacaaaagtgaagctatacctgcatgattgcaccgttgagaattcactatgacctagacaaagggtaggtataaccactgctacatgtaacttatctctgtgcagaactgttatgaaatcatttcaaatcaaaagttgggtacatatctatatagagaaaacagatatcttattaattgagtgaaaggtgcactcttgacaaaattaagggagaacaaataataagttaaaatattaatttcctaatttttcaaagagaaataaacaaggttaaacatattgagggagaaaagyagttttctataaatacatatttatggataaatgttttatgtaatttggtaagaaatcatgcctagaaatatacaatttcaggataatgtttgtttttttaatatatattttttattatactttaagttctagggtacatgtgcacaatgtgcaggtttgttacatatgtatacatgtgccatgttggtgtgc

SEQ ID NO: 759983 - DNA, 604 bp, Homo sapiens
tgtgatggccttttatgcccatcctcactgggccttgtgtagttctgtgcatcctctatgcatttcctttacaagttttagatattgacatagatcctcagtagcaatcagaaccctcctgtggcaattttggagattgttggtaaaccttgtgccccagcagaacttagtggtcagagggaaaataaatgtattctggctcattctgggtaatatgtttagacatgacattttgacccaacaagcaggatttgattcaagggggttaaaatctttttttcattcctgttccatatatgaacaggtattgccaaacagtcctatgcagctgactcaagcaaatatatcaaaaactttcattcgctattaaagatcttagcacatcatcctcagatggattccccctagcartttgctttagctctctaaaacgatattctgtctcctgcacagatgctgtgaatttaaagtagaaacagcctattaatgctaaatgaattctgagaggcactttatgtgcttcactggattgttttcttctgtgtgattagcatgccttcatttaccttctcactggcttgtgctctctgggaaaatatacaac

SEQ ID NO: 759984 - DNA, 614 bp, Homo sapiens
acacaggagcagaaaatcaaacaccacatggtctcactaataagtgggagttgaacaatgagaaaacatggacacagagagggatacatcacacaccagggcctgtcagggggtaggggactaggggagggatagcattaggagaaatacctaatgtaaataaccggttgatgsgtacagcaaaccatcatggcaagtgtatacctacgtaacaaacctgcacgttctgcacatgtctcccagaacttaaagtacaataaaaaaaaaataaaaataaagttcattatcttcatacagaaaagtgcatcagttgtaactatttagctcaatgaattatcctaaaaatgtgaacagaattgtaacctctagccaggttggaaaatagaatgaaaacatgccatgctactctaaagcactacccactccacctcaaaatttaacacaatgtacattttaatattatatatttgatttaccttgttttgaactttatataataaaatcataaagcatattcttgaataaaaatttggctttttttcatccttataactctttcctctgttaaggtcattctctctacccaccttaccatgtaaagacactattttcag

SEQ ID NO: 759985 - DNA, 614 bp, Homo sapiens
acacaggagcagaaaatcaaacaccacatggtctcactaataagtgggagttgaacaatgagaaaacatggacacagagagggatacatcacacaccagggcctgtcagggggtaggggactaggggagggatagcattaggagaaatacctaatgtaaataaccggttgatgggtacagcaaaccatcatggcaagtgtatacctacgtaacaaacctgcacgttctgcacatgtctcccagaacttaaagtacaataaaaaaaaaataaaaataaagttcattatcttcatacagaaaagtgcatcagttgtaactatttagctcaatgaattatcctaaaaatgtgaacagaattgtaacctctagccaggttggaaaatagaatgaaaacatgccatgctactctaaagcactacccactccacctcaaaatttaacacaatrtacattttaatattatatatttgatttaccttgttttgaactttatataataaaatcataaagcatattcttgaataaaaatttggctttttttcatccttataactctttcctctgttaaggtcattctctctacccaccttaccatgtaaagacactattttcag

SEQ ID NO: 759986 - DNA, 614 bp, Homo sapiens
acacaggagcagaaaatcaaacaccacatggtctcactaataagtgggagttgaacaatgagaaaacatggacacagagagggatacatcacacaccagggcctgtcagggggtaggggactaggggagggatagcattaggagaaatacctaatgtaaataaccggttgatgggtacagcaaaccatcatggcaagtgtatacctacgtaacaaacctgcacgttctgcacatgtctcccagaacttaaagtacaataaaaaaaaaataaaaataaagttcattatcttcatacagaaaagtgcatcagttgtaactatttagctcaatgaattatcctaaaaatgtgaacagaattgtaacctctagccaggttggaaaatagaatgaaaacatgccatgctactctaaagcactacccactccacctcaaaatttaacacaatgtacattttaatatyatatatttgatttaccttgttttgaactttatataataaaatcataaagcatattcttgaataaaaatttggctttttttcatccttataactctttcctctgttaaggtcattctctctacccaccttaccatgtaaagacactattttcag

SEQ ID NO: 759987 - DNA, 616 bp, Homo sapiens
attctcgctctgtagcccaggctggagtgcagtggtgctatctcagctcactgcaagctctgctattgggggaacccaccccggataatgcacgtaggttttcttctattttccctaagtgtcagctggtctgagaaataaacagaaagagtacaaaagagaaaaattttaaagctgggtgtccagggaagacatcacatgtgtcagcaggttccrtgatgccccgcaagcctcaaaaccagcaagtttttattagtgattttcaaaaggggagggagtgtacaaatagggtatgggtcacagagatcacatgcttcacaaggtaataaaatatcacaaggcaaatggaggcagggcgagatcacaggaccagggcaaaactaaaattgctaatgaagttttgggcacgcattgtcattgataacatcaggagaggagacagggtttgagagcagacaaccagtctgaccaaaatttatgaggtgggaatttcctcgtcctaataagcctgggagtgctatgggaaactggggcttatttcattccttatctactataaaagacagacgtccccaaagcggccatttcagaggcctccccttaggaatgcattctc

SEQ ID NO: 759988 - DNA, 494 bp, Homo sapiens
cagaaaatgctttgtgatgtgtgcattcaaaccacggagttgaatctttcttttgttagagcagttttgaaacactgtttctgtggaatctgccagcggacacttggagcgctttgagggctgtggtggagaaggaaatatcttcccataaaaactagaaagaagcattctcagaaacatttatgtgaagcgtgcattcaactcacagagttgaaccttccttttgatasaacagttttgaaacacccttttgaacaattgcaggtgaatctttggagcgctttgaagcctttgttggaaatgggaatatcttcacacacaaactagccagaagcattctcagaaacttctttgtgatgtgtgcgttgaacccagagagatgaacctttcctttgatagagcagttttgaaacatgtttttgtaagatcggcaagcggataactggcttcgctttgtgtcctttggtggaaacgggaatatcttctaataaaaa

SEQ ID NO: 759989 - DNA, 538 bp, Homo sapiens
gtccaaatatccacttgcggatcccacaaacagagtgtttcaaaactgctctacggaaaggtatgttcaactctgtgagtttactgcaaacatcctaaagaggtttctgagaatgctcctctctagtttaaagtgaatatattttcttttccgccatagccctcaaagagctccaaatatccactttcagattctacagagtgtttcaaaactgctctatcmaaaaaaagtttcaactcggtgagtcgaatgcacatatcacaaagcagtttctgagaatgctttcgtctatttttcccaggaagatatttcctttttgaccgtaggcctcaaaccgctccagatatccacatgcagattctacaaaaagagtgtttccaaactgccctatcaaaaggaaggttcaactctgctagttgaatgcaaacatcacaaagaagtttctcggaatgcttctgtctggtttttaggggcagatatttctttttctaccataggcctcaaagcgctccaaatatccacttgcagattctccaaa

SEQ ID NO: 759990 - DNA, 430 bp, Homo sapiens
aacatacctttccgtagagcagttttgaaacactctgtttgtgggatccgcaagtggatatttggaccgctttgagacctttgctggaaatgggaatatctgcacatataaactagacagaagcattctcagaaacttcttcgtgatgtgtgcattctactcccraatttgaatcttccttttcatgaagcagttttgaaacactctctttgtgcaatccacaattggataattggaacgctttgatgcccatggtagaaaaggaaatatcctcatataaaaactagacacaaggattcacagaaaatgctttgtgatgtgtgcattcaaatcacggagttgaatctttcttttgttagagcagttttgaaacactgtttctgtggaatctgccagcggacacttggagcgctttgagggctgtggtgga

SEQ ID NO: 759991 - DNA, 579 bp, Homo sapiens
gcaagtggatatttggaccgctttgagacctttgctggaaatgggaatatcttcacatataaactagacagaagcattctcagaaagtttttcgtgatgtgtgcattctcctcccgaatttgaatcttccttttcatgaagcagttttgaaacactctgtttgtgcaatccacaattggataattggaacgctttgagtgcccatggtagaaaaggaaatatcctcatataaaaactagacacaaggattcacagaaaatgctttgtgagtgtgtgcattcaaatcacggagttgaatctttcttttgttagagcagttttgaaacactgtttctgtggaatctgccagcggacacttggagcgctttgagggctgtggtggagaaggaaatatcttcccataaaaactagaaagaagcattctcagaaacatttrtgtgaagcgtgcattcaactcacagagttgaaccttccttttgatacaacagttttgaaacactcttttgaacaattgcaggtgaatctttggagcgctttgaagcctttgttggaaatgggaatatcttcacacacaaacta

SEQ ID NO: 759992 - DNA, 430 bp, Homo sapiens
tggaaatgggaatatcttcacacacaaactagccagaagcattctcagaaacttctttgtgatgtgtgcgttgaacccagagagatgaacctttcctttgatagagcagttttgaaacgtgtttttgtaagatctgcaagcggataattggcttcgctttgtgtcctttggtggaaacgggaatatcttctaataaaaactagacagaaatattctcagaatctcctttgtgatrtgggcattcaactaacacagttgaacgtttcttttcacagagcagttttgaaacactcttttggtagaatctgccagtggatatttggagcgcttggagggctattgtgccaatggaaatatctgcccctgaaaactagacagaagcattctcagaaactacttcgtgatgtttgcattcaactcacagagttga

SEQ ID NO: 759993 - DNA, 659 bp, Homo sapiens
actagacagaagcatcctcagaaacttctttgtcatctgtccattcaactcacagagttgaaccttcctttttctggagcagttttgaaacactctgtttggagaatctgcaagtggatatttggagcgctttgaggcttatggtagaaaaataactatctgcctctaaaaaccagacagaagcattccgagaaacttctttgtgatgtttgcattcaactagcagagktgaaccttccttttgatagggcagtttggaaacactctttttgtagaatctgcatgtggatatctggagcggtttgaggcctacggtcaaaaaggaaatatcttcctgggaaaaatagacgaaagcattctcagaaactgctttgtgatatgtgcattccactcaccgagttgaaacttttttttgatagagcagttttgaaacactctgtagaatctgaaagtggatatttggagctctttgagggctatggtggaaaagaaaatatattcacattaaagtagacagcagcattctcagaaacttctttaggatgtttgcagtaaactcacagagttgaacataccattccgtagagcagttttgaaacactctgtttgtgggatccgcaagtggatatttggactgctttgagacctttgctggaaat

SEQ ID NO: 759994 - DNA, 659 bp, Homo sapiens
actagacagaagcatcctcagaaacttctttgtcatctgtccattcaactcacagagttgaaccttcctttttctggagcagttttgaaacactctgtttggagaatctgcaagtggatatttggagcgctttgaggcttatggtagaaaaataactatctgcctctaaaaaccagacagaagcattccgagaaacttctttgtgatgtttgcattcaactagcagagttgaaccttccttttgatagggcagtttggaaacactctttttgtagaatctgcatgtggatatctggagcggtttgaggcctacggtcaaaaaggaaatatcttcctgggaaaaatagacgaaagcattctcagaaactgctttgtgatatgtgcattccactcaccgagttgaaacttttttttgatagagcagttttgaaacactctgtagaatctgaaagtggatatttggagctctttgagggctatggyggaaaagaaaatatattcacattaaagtagacagcagcattctcagaaacttctttaggatgtttgcagtaaactcacagagttgaacataccattccgtagagcagttttgaaacactctgtttgtgggatccgcaagtggatatttggactgctttgagacctttgctggaaat

SEQ ID NO: 759995 - DNA, 683 bp, Homo sapiens
tgagttgaatgcacacatcacaaagtactttttgagaatgcttctgtctagtttttaggtgaagatattcccgtttccaatgaaggcttcaaagcattccaattatccacttgctgatcctacaaaaatagtgtttcaaaactgctctatcaaaacaaaggttaaattcgttgagttgtaaccacacgtcacaaactggtttctgagaatgcttctgtcaagtttttatttgaagatattactttttctacaatcggccacaaagcgctccaaatatccaattgcagattctcctaaaagagtgtttcaaaactgctctatgaaaagaaaggaccaactctgtgagttgaatgcaaacatcacaraggagtttctgagaatgcttctgtctggtatttatgtgacgatattcccgtttccaatgaattcctcaaagcagtcaaaatatccacttgcagattctacaaaaagagtgtttcaaaactgctctatccaaagaaagtttaaaatctgtgcattgaatgcacacatcagaaactagattcggagaatgcttctttctagtttttataaaaagcaattgccttttctaccagaggacttaaagggatccaaatatcctcatgcatattctacaaaaagagtgttgcaaatctgctctatcaaaagaagatttcaactct

SEQ ID NO: 759996 - DNA, 606 bp, Homo sapiens
gaatccttctgtctactttttatgtgaaaatatttccgtttccaacgaaggcttcaaagcactccaaatatccacttgcatattctacaaaaagagtgtttcaaatctgctccatcaaaaggaaggttcaactctgtgagttgaatgcacacattacaaggaagtttctgagaatgcttccgtctattttttacgtggagatattcccttttccaacgaaggcttctctccactggaaatatccacttgcagattatacaaaaagtgtgtttccaaactgctctatcaaaaggaaggttcaaatctgtgagttgaatgcgcacatcagaaagargtttctgagaatgcttctgtctagtttttatgtgagtatattccagtttccaacgaaggcttcaaagcactccaaatatacacttgcagattctacaaaaagagtgtttcaaaactgctctatcaaaagtaaggttcaactctgtgagttgaatgcacacattacaagggagtttctgagaatgcttccatctagtttttaagtgaatatattcccttttccaacgaaggcttcaaagcactccatatatccacttgcatatacacaaaaag

SEQ ID NO: 759997 - DNA, 409 bp, Homo sapiens
cagtttggaaacactctttttgtagaatctgcatgtggatatctggagcggtttgaggcctacggtcaaaaaggaaatatcttcctgggaaaaatagacgaaagcattctcagaaactgctttgtgatatgtgcattcgactcaccgagttgaaacttttttttgatagagcagttttgaaacactctgtagaatctgaaagtggatatttggagctctttgagggctatggcggaaaagaaaatatattcacattaaactagagagyagcattctcagaaacttctttaggatgtttgcagtaaactcacagagttgaacatacctttccgtagagcagttttgaaacactctgtttgtgggatccgcaagtgaatatttggaccgctttgagacctttgctggaaat

SEQ ID NO: 759998 - DNA, 494 bp, Homo sapiens
agattgctttgatgtatatatcatatatctgtgtgtctctaccaggatcctagcatgaacctctccctgaacaaacactgaataaatattgctatgattttgcttatacttttgtcattgacttagagacagttttgtttcttgtttttaactctgtgttgaatatgagttcagttagttttctgttttttatgtttatggaagtacctcaattttactaatggtgaggcggggaatataggaaagtatgaaaaacaaccacacrtgcacaattgctttgtaatttcaaactctaatggacactctctggaggtgattgccatatctctcagtaggaacagaatttgaatctgggagcaagtaatcagtctgtaaatgtttgttatgatactggaattgccaaatatgctgtatctaattgaatttcattactggggcatgaaaggcagttggctgaatgttgtcactgaaaagaatatattgtggacagcaga

SEQ ID NO: 759999 - DNA, 494 bp, Homo sapiens
agattgctttgatgtatatatcatatatctgtgtgtctctaccaggatcctagcatgaacctctccctgaacaaacactgaataaatattgctatgattttgcttatacttttgtcattgacttagagacagttttgtttcttgtttttaactctgtgttgaatatgagttcagttagttttctgttttttatgtttatggaagtacctcaattttactaatggtgaggcggggaatataggaaagtatgaaaaacaaccacacatgcacaattgctttgtaatttcaaactctaatggacactctctggaggtgattgccatatctytcagtaggaacagaatttgaatctgggagcaagtaatcagtctgtaaatgtttgttatgatactggaattgccaaatatgctgtatctaattgaatttcattactggggcatgaaaggcagttggctgaatgttgtcactgaaaagaatatattgtggacagcaga

SEQ ID NO: 760000 - DNA, 670 bp, Homo sapiens
acaaattaccacaggctgggtgaatgaaaacaacagaaatttatttcctcacagttctggaggccagaagtctgaaatcaagcaggcttggtcctttctggagcccgtgaagaacccattccatgcctctcttgcagcttctggtggtggctagcagtccttgcgtaactcattgcctctgtcctcatgctgctatatctgtgtttcatatctcctcctctcttattgtaacgacactagtcactgggtttggagcccacccaaaatccagggtaattatatcctgagatcccctaatcacatctgtaaagactatttccaaatatggtcaccttcccaggtgtatcaagttaggacttagacttaccttctaggggacatgattcaacctactacaaatggtaagaagttctgcaggatccacactaagaagctgctaattcctaaggaatacagatagaggtcactgctaagtagttttgcactaagaagagacaaaaaaccttaaaattaaaccatatataagaatamgggtaagcacttttcaaattaaattggagaccataccaattttaatcattcatctttaataataaaataggttcctatgcagtacatacctcaaacataaacttaaggttctgtttaacaacaaccaaaaaaaaaaaaa

SEQ ID NO: 760001 - DNA, 640 bp, Homo sapiens
tttgagtcttgattttaattttaattatagatatatctttagaaatgagttgcacaattgagaaggcacttgccgacgctaaagctcttgttgaaagattaagagatcatgacgatgcagcagaatctctgattgagcaaaccacagctctcaacaagcgagtagaagccatgaaacaggtttgatttttctttcttgttcattccatttatcaaaagcartcattgacatttatgtattgctggctaattagtatctaatttttttcaacattctctaaaattttaaagtagcttgacttgtgtgtttcaggtttactttaattttgtcgtgttcaggtgatatacctagacatatatttctaaaccctagatttgatcacttattttgctgacagagttgcacatttgagtttagaaaataaatgaatttgttaggtctagaaacatttgacaaagaccagataataccttttactaatgttggtacacattttgttctgtcttgtataatgtagaaatgttcatatttttctttataaaagtacttaggtgatgctgtttaacaacaaaatagcttttgaaaatgatgcaaggtaatatgtgatttatactctgtgcagttattgtacccatacttg

SEQ ID NO: 760002 - DNA, 603 bp, Homo sapiens
gtagaagctgcttctttccaactctaactctgcctatttcttctatcatgtcatcagaattccttaaacatcttatttaacagaatatacaaatttaagccagttctacagtgaaaaacctgagagtgagtcacgacaaactttaactgtaatcttgtataatggaaatggagagagacaaatattggggaaagatcttaagaaaaytgatgaatccaataggtaggtcagataagtgtttcttggctttctgctttccatttgtaagcatgtctctgtgtgtgtatgtatgtgtatgtttatacccatgccccttatttagagctctaaatctcctaaggacgggaaccatctgccacctgacaagagagaagtaaactccatgcattcgttcttctacactcaagagggatcctcttcagcctaggatggtatgggcatagaatattttggaaacaaagggatagattctgtggctttctgtccccttttttccttttctctttccacattcctggctctaacttggttctttctgttgccatggtaaccaacagtctcagaacacagacttctgacagctggacttttagccacggagac

SEQ ID NO: 760003 - DNA, 583 bp, Homo sapiens
ttttaaaatcccacttaaaacagcatcaaaaataaaatacttagaaataaatttaacaagaactataaaacttatactctgaaaacaacaaaacattgttgaagaaattaaagatctaaaaaatgaaaaaacataccatgctcatggattggaagagttaatattgttaagatggccatattatccaaactgacctacagtgtcaacataatccccaacttctttgtagtaattgataacgtgattctaaaattcatatggaattgcaagggacccagactggccaaaacaatcttcaaaaagaacaaggtaagaagagtcacacttcctatttttaaaacttactacaaaacaatggtaaccaagatagtacggtaytggcacaagatagacatagagacacagaaaggtttaacatagggaaaaggtgtgacatggataaccaaagctaaacattaaatatagacaagattatacacaatttatacaaaatgtacattcttttatacattcttgaacaccagtgatttgctatatagctgctttcacaactggagattccccctccattcaaaatttaaaa

SEQ ID NO: 760004 - DNA, 643 bp, Homo sapiens
ttaaataatctcatttgtaacccaaagaatctcatacaggaaaccttttacaaccaacccccccatgctgaatgggttatttttttcattagaactcagcgtttactcactatagagtattatcactcataccctttataatcatatgtttgcctgaccttatgtcttaaataagttgcttgagcctaaagattggaggtttttttgtttttgtttttgtttttttggcaagcttgaaaagtatctggcactcctatttgttaaatatttgtagaaggaaggaagaagagaggaaggagagggatacrgaattgaaattgaggaaaggaaggaatttgaaactgaagagtcatatgctttgccacgtaaactctgaaggtcacacaggatggtagtgccagcagaagaagaaggacgttgagtgaacctgtggttgaatgaggaggatggtagagatgctggggaggtgagagtcaggacaagaaggctgagggcagccttcctcaaagaagttgacatttagtggaacgttcaatgacaattgcaaaggagtttcagagggcagaatggaatgggttgggagaggatttggttaagatttgctgaaaaccctgaacttttggtaaatactgctctgtgtggg

SEQ ID NO: 760005 - DNA, 634 bp, Homo sapiens
atttagcagaataatgttgccctgataggagctttttaaaactgatgtcttatctttcttagtccctcaaactagatcctgttcaggaatattataacaagttaatatgagttgatttttgtgcaaaaacattttgaaatccatgcataattttttcctaatatgcattttccatgaacttttggaagttccttcatattgatgtaaatttcaaataaatgtgaatcaagatcaatagtgaccatatacatgatttcttcagagactagaaatttgcattccttctaaccttcccatcaatatatcagtccctctcctctatcaaaataaaaaaaaatacaaacatgtacttgaacacttctagtgaaatgtataataatatgtcataaatgtgttcattcccttaggtccaaatcatctttactcctctccaaaatcttcaccttagtgattccctggcaacactaacagatggtcagtgargagaataataagagtctttatagctactaaaatccttaacaacttagataagagttggcacaaaacagacctcttccatccttctctgtgtgtggacattcaagaactaaggagggaagtggaattttctgtgagaaaaaaatacttataa

SEQ ID NO: 760006 - DNA, 623 bp, Homo sapiens
aaacatataaaaactatataccaatagattgaataatatcaatgaactccaagcacaataaaaatgaagaaaactagagaaaggcatattgtggtcaaatggcttagaaacaaagataaaggtaaatatttaaaaatatccagagaaggcagaaaaattatgtacagagaaacaaacataagaatgatagcagacttcttgcccaaaacaatgcaagccagaagaaggcaaagcgtcactaaagaactataaaaaacaaacaaaaacaatgaaagtctaattagaattctactacaacaaaagtawcttttaaaaaggattgtgaaatactgttttgaaacatacaatagctgtaaaagttcaaaaccagcaaacatatactacatgaattacaaaatcaagttctgcaggctaagtaggaaaatgataccagaaggaaatatggaagggcactggaaatagtaactgtgagtataaatacaattactttttctcttattgtttaaaactcctgaaaaaacacttgactgtttaaagcaaaaataataatactttttgagtttataacttatgtaaaaataaaagatgtaagagcacttcaataaatgcttagaagggagaaa

SEQ ID NO: 760007 - DNA, 608 bp, Homo sapiens
tatcattgaagcaactgaggcccactgatttacccagtagatttccttgactcaactgaaggtctagtcaagttttagtgaagatatggtcttgactgtgtctgaggtttgagctcaggaagggtagaaagaaaacgggaaaataaaaaattttcacaatgttagtgtggcagaaatatgtcaccagacaggaaaaaaaaaatgtaataatccaaaaaatcccacaacaaagaaaacaagtagtcagttaggaatcaacgtaaatgaatcaattttggggctagmccatgagaacccataggagaagagcctaatttaaaaaaaaaatcgccgggcgcggtggcacacgcctgtaatcgtagcactttgggaggctgaagcgggcagatcacgaagtcaggagatcgagaccatcctggctaacacggtgaaaccccgtccctactaaaaatacaaaaaattacccgggcgtggtggcgggcgcctgtagtcccagctactcaggctgaggcaggagaatggcgtgaacccgggaggcggtgcttgcagtgagcctagattgctccactgcactccagtctgggcgacagagtgagactccgtctcaa

SEQ ID NO: 760008 - DNA, 594 bp, Homo sapiens
acaccctatagagaaaaacagcagtcctaatttcttccctttgtcctgccttctagaggcaagtacaatgaaattcttacaatgtatcttttatactgtatatgtttaaatagctttatatccttcctattatatgttaatatttttctccaacttctaaaaaatattcttatatgtctttgtttatgatacctggcattacttgtggatatcctttcataaaggatgttttgagttccctaacccctcttcttccccaggtmtctctctctctctctctctctctctctctctctctctctctctctctctctccctctcctaccatctctttccaatacagttgtgccacaaaattgaatctcatgtaacacatgtattagcgttctgctctttgccttctctgtttgtttcaatttgtatttttttatgtttgtggttgttgtttcttcttagtctttgatgtctttattcaaaagtcaggccattcttgactgcatccatatgttaaaaagaacttgagagctaatggaaagctgaaggcttgggtggagcttgccaacttactaggctgagagggctgtggactgggct

SEQ ID NO: 760009 - DNA, 526 bp, Homo sapiens
ttttggtgatttcatcacgagatctttgcctgtgcttatgtcctgaatggtattgcctagattttcttttacggtttttgtagttttgggctttacctttaagtcttgaatccatcttgagttaatgtttgtataaggtgtaaggaagggatycagtttcaattttctgcatatggctagccagttttcccagtaccatttattaaatagggaatcctttccccattgcttgttttgtcaggtttgtcgaagatcagatagttgtagacgtgcagtcttatttctgagttctctattctgttccattggtctatgtgtctgtttttgtaccagtaccatgctgtgttggttactgaaggcttgtagtatagtttgaagtccaatagcgtgatgactccagctttgttctttttgcttaggattgtcctggttacatgagcttttttttggttccatatgaattttaaaatagtttcttctaattctgtgaagaatgtcaatagtagtttaatgggaatagcattga

SEQ ID NO: 760010 - DNA, 643 bp, Homo sapiens
gacgcagagctgggatccgtgtctctttcccgagtgacatggccccttggggtccccttcatgcccggccactgcacctgggatgctctatgtgtggcttcttgggtgccccttgttggggtgctaaactcatctccctggtaaccttcacccgatggggccagattccttcccaatgcaattgctctgcacctcaagggagcttggggtctgggagggttgtatgggtgccccgggaagggctgcaccttgtgggtctcctccacaggggtgagcaggtgcgcttgcagccatcgggctgcccaggagagccagcccccgccccctgcccacttyccttacccccacagctgctggggtggagaaacgctgtgacccagtcagtgtttcttttaatgagcggcgattaaaacagtgtaaccgtggcagtttggtagcttctttaggaggaagcagagagcccaaacagaacctgaaaaaaatacaaagataaaataaaacccagtgaatttttaatagtgattatctcctgacacatagcgcgttgccatctggcagacacgcggcccactgaagcttggtgctggtggggaggagggcgctgggggctcctactgccaccccagagcaggaggtgccaggc

SEQ ID NO: 760011 - DNA, 509 bp, Homo sapiens
ttgcagcgtgcatcaaaccccgcctgctggggtccacagcccatcccagggagagtactgaggacgccaccagcccagcccactcaccggcagctgcaggacgatagcctgggtccctctggggccttcgccaactactctgcctgagttaggccatgcctcagggcctgcggctctcacragcccattcgctccagaacaaggtgcgtgtgcagccccaaagtccaaaaaggggatccagctgcaagccaagcagagccaagatgctcagggcgcagggggttggcacccactctccggagagcccgagtgagcaagccacaggggccccgtggggcgttttcagtctctgccagtccagcatttggttaggacgcagcgaggacacgggaggcacaagggcagcggagaagagggcaggaacctgtgtggccgggcccaatggcagaggcatggctagtacctcccaggttgggccatccaaggggttccagcctctaccctggtca

SEQ ID NO: 760012 - DNA, 590 bp, Homo sapiens
agaagccaggcacaaaagttcccatagtgtaccattatatgttctatttatatgaaatttatatgaaatgtccagaacaggcaaatccagagagacagaaagcggatgaggggtggcccagggctgggggaggagggaatggggagtgactgctaacgggtgtgagttttcttaaggggatgatgaaaaatgtctyggaactagacatgatgaatgtactatgacatgacatgacatcgtccaccttaaaatggttggtggttaattttttgttgtgggaattttagctcaattaaaaatggtggccggcagtcacggtggctcacgcctgtaatcccagtactttgggaggccgaggcgggtggatcacaaggtcaggagttcaagaccagcctggccaagatgctgaaacaccgtctccactaaaactacaaaaatcagccgggcgtgtgtggggaaaagcaagagagatcagattgttactgtgtctgtgtagaaagaagtagacataggagactccattttgttatgtactaagaaaaattcttctgccttgagattctgttaatctataaccttacccccaaccc

SEQ ID NO: 760013 - DNA, 457 bp, Homo sapiens
gtctacatcaagtccaatattctgaaatccaggatctcaaaatataggggttagacgcactttctaatgagaagataaagctgaatggtggatgatgtgtgtgtgtctattaattacaaatggatcactctgcagaagtactgtgaagaaaacaaaggaattactacaaaaccaaaaaaawtatacaaggaatatttttacaatttgttcttgaatattcaaatttttaagaatcagatatgctcaaatggcaactgatgaggcaccttcaagagtaagtatgcaaaaagaaatgtatagccaggttctgaaaaaagaacaaaaactcaagactgaaaagatgacaatttgaaaacaacttcaaagcttatagtcaaggcaaagtgtattaaaaaaaagaaagggaaaacatcagatcttattaatggtgggaaagacacacaaccaacctaagatg

SEQ ID NO: 760014 - DNA, 551 bp, Homo sapiens
acaagtatgaaccccattaagtccccccaaaagccaagaatcttggatttccttcacaagtgaatgacccccccaaatcttgaaggaaaatcattctagcagcaaatcctagacaggagttactatcagccagatattgccatctgccttaactggtttaatcctgacagtgaaccccartgatgtagaaaatgttaccaccattttttttttttaatacagagtcttgctctgtcccccaggctggagtgcgctagtacaatcttggttcactgcaacctctgactcctgggttcaagtgattctcctgcttcagccttccaagtagctggcattacaggggcacgccaccacacctggctaatttttatatttttagtagagatggggttttgccatgttggccaggctggtctcgaagtcctgacctcaggtgatctgcccgcctcagcctcccaaagtgctgggattacaggcgtgagccaccgtgcccggctgttatcaccattttacaggtggagaaaccaagacacagaacaatgcagtggctc

SEQ ID NO: 760015 - DNA, 551 bp, Homo sapiens
acaagtatgaaccccattaagtccccccaaaagccaagaatcttggatttccttcacaagtgaatgacccccccaaatcttgaaggaaaatcattctagcagcaaatcctagacaggagttactatcagccagatattgccatctgccttaactggtttaatcctgacagtgaaccccaatgatgtagaaaatgttaccaccattttttttttttaatacagagtctygctctgtcccccaggctggagtgcgctagtacaatcttggttcactgcaacctctgactcctgggttcaagtgattctcctgcttcagccttccaagtagctggcattacaggggcacgccaccacacctggctaatttttatatttttagtagagatggggttttgccatgttggccaggctggtctcgaagtcctgacctcaggtgatctgcccgcctcagcctcccaaagtgctgggattacaggcgtgagccaccgtgcccggctgttatcaccattttacaggtggagaaaccaagacacagaacaatgcagtggctc

SEQ ID NO: 760016 - DNA, 551 bp, Homo sapiens
acaagtatgaaccccattaagtccccccaaaagccaagaatcttggatttccttcacaagtgaatgacccccccaaatcttgaaggaaaatcattctagcagcaaatcctagacaggagttactatcagccagatattgccatctgccttaactggtttaatcctgacagtgaaccccaatgatgtagaaaatgttaccaccattttttttttttaatacagagtcttgctctgtcccccaggctggagtgygctagtacaatcttggttcactgcaacctctgactcctgggttcaagtgattctcctgcttcagccttccaagtagctggcattacaggggcacgccaccacacctggctaatttttatatttttagtagagatggggttttgccatgttggccaggctggtctcgaagtcctgacctcaggtgatctgcccgcctcagcctcccaaagtgctgggattacaggcgtgagccaccgtgcccggctgttatcaccattttacaggtggagaaaccaagacacagaacaatgcagtggctc

SEQ ID NO: 760017 - DNA, 551 bp, Homo sapiens
acaagtatgaaccccattaagtccccccaaaagccaagaatcttggatttccttcacaagtgaatgacccccccaaatcttgaaggaaaatcattctagcagcaaatcctagacaggagttactatcagccagatattgccatctgccttaactggtttaatcctgacagtgaaccccaatgatgtagaaaatgttaccaccattttttttttttaatacagagtcttgctctgtcccccaggctggagtgcgstagtacaatcttggttcactgcaacctctgactcctgggttcaagtgattctcctgcttcagccttccaagtagctggcattacaggggcacgccaccacacctggctaatttttatatttttagtagagatggggttttgccatgttggccaggctggtctcgaagtcctgacctcaggtgatctgcccgcctcagcctcccaaagtgctgggattacaggcgtgagccaccgtgcccggctgttatcaccattttacaggtggagaaaccaagacacagaacaatgcagtggctc

SEQ ID NO: 760018 - DNA, 642 bp, Homo sapiens
cttccctggccgccggggagcccccttccctttggcctggtgacccgggcgcacttagcgcaatccgccctggagactgggaagagcttccgagcctctttagaagccggggcccggggagggtccgctttccccctccccatagtgaagggyaaactcgagtttggggcctcgttttcagccacttctaactttatgtttatgtcccacccgttcttgccttctctgacttactgctttattcatccgcccgcattcccgtccctcggtccccctcgctggtcgcccccagacgccgcaccaggctgcaggccagcccttcaagttcactatcccggagtccctggaccggattaaagaggaattccagttcctgcaggcgcagtatcacaggtgcgtgtccggccgcgccatgcgagtggtcgcgggcgtcccggtgccccttgcacccagccgggtggcggcggcgcctgtacttagttcttgcgtccaggcggtggcgtgtggagtctcagttaagacctgtcattcaagttaccccctttcctggttcttcccgggccgcctcttctcttgtctcctcctcctcccattgtttcccttttgccggtttgcactgttccagggagtcctttttcatgt

SEQ ID NO: 760019 - DNA, 564 bp, Homo sapiens
aacaataattttaaaaatttttcttcactttttttctttttttttcccctgtggaccctgctcaggaagaaacacaagcagcaaatctgaaatcattcctttgcaaacaattttagaaaccatacttttgttaaatcaggtgaatggcaatacatgaatatcttaatttatgttaaaatttcagtgcaaatttatttcacttttcagatcaaaccacacctcacggggaaaamaaatcagaaaacctctctcctcctgcccacacctgcgcatcctagttccacttaaaacatcacaccgtattcacagaacaatcctctggtgaggagtattttgaaggtacagatgcctattcttgtcaaataagcccaccgacagaaacagctgtctaaaatttacttaaaaaccactatactaaataccctgtagtaaaggtactagttgtgagaatttccatttttaaaaatcagaggcaacaataagcaatggggaggggagagggtaggaaacgaaatcaatcaaagctttgaggaaagccagtaagtttctcagtttcctcccctt

SEQ ID NO: 760020 - DNA, 605 bp, Homo sapiens
caattacggaacgaaagaccagtcatctttaaaatgctgcttcttggatagaattcagtgagactacctacggatgagtttgatgttcatcaattcagagcaggagggtaaagaaagaattatcactacacccaccaacccatttcccatcacaacactgataattttctaggaattctaatgccttttttattttttgggattaatccacatttttttttctttttcctttttctcttttgagacagggtctcactctgtcacccaggcgggggtgcagtggtgagatcatagctcactgcagcctcgatcttctgggctcaagtgatcctttcaccttagcctggaacttcaggctgcaccgtagctggaacttcaggcatrtgccaccgtactcagctaattaatccacatgttaatcaacattcgtttgtttacaagtatcactgattgtattttccaaagatggacacctaatataccttctggccacacgctcattttaaaatgtaatgctggccgggcgcagtggcttacgcctgtaatccctgcattttgggaggcccaggcaggcggatcacaaggtcaggagatcgagaccatcc

SEQ ID NO: 760021 - DNA, 558 bp, Homo sapiens
tttctctcttcttctaatgcctcaaagacagttagtgctttctttaggcatcactcagctcactggtgccactcaggagttttaaaagtttactgtgtactagaaagaacctcagcaacagaaacattgcaaggtgttatgtaggaaaaacatgcaatttcttcttctaaatgaaaccatctttataaaatggctttagaattcctgtttaaacagtaagataaaacaaaagacttcttgtgactcatttcaaactcagactttttttttttttttttttttttttttttgtctacaagttgcttgtccttcccacattcaaaacatgaaagaacgtttctgtttagcaragtgacgggtcaaggaggtcagatataaatcttataggaaggatgggctctcaagtgtgattctcagtggaggggacacaagaacctctagagagtttttattaaaaactacaccctccctccctcattcttcaagtgatcacctctatccgagaaattctactgatcagagcagactgcttatatgaatgtggagacaagagaaaaa

SEQ ID NO: 760022 - DNA, 596 bp, Homo sapiens
aagaacacacaaaaaaatttaatcagtcataagatacattagttttactctcttctagtatccttgcattggccttcaaaactgtacccatttctcgaataactcccagtaagtccttcctttgtaaatggtcctatataaggtaaayaaagtctgactatgtagttggagttactgcctgagttttacatatatcctagacttggtctcagtcacagattaatgagcattcactaagagttgatgtagaccatgatctctaagagcacaataattctaactgtcttttcttggtcagctctgcctagccatcactagcacaatgcccagcacaaagtcaccactcagtagatatttgtcaaatcaataaataatgacagaatccaaaatcgtaataatttatcccagtgctcagcctcgactatatgtttaataaatatttattgaatttcattgaatattgtgcttaaagagagaatcatgccatgcattccaaattaagtaggcattacatttgaattatcagctgtttgggattatctgtgtggctcctccccactgttagggtggtaaattgagatcttactccatcagca

SEQ ID NO: 760023 - DNA, 542 bp, Homo sapiens
atcctttaaaaattatatgactataccttggtacaaatagtatctgtgtttttttgctgcaattttccagtgctttttttttttgtcacaaaggccaagtttgtcttgttttaagacaattattgcagtaatcatttgctgaaatggaagacttagatcacggatgttgtgatgacttccaagtgtctgttmtagaacatatacaaaatatatcatccttgaaattagaattccatacttcatgcaaatcattatttattgctatacttgcttgtttgcaatttttgtatcaatctttgtagcctaagatacatcagtaaggtgtagtagatagaatgttgaactgttcagtaacgacatctaggatctatctgggttctctgcccatctagctggttatcttgtgaaggcaaatggcttctgaggctgttatcccatgagagtgttagtgctggactctacttacccattagaatatcttaaacctttcttccaatttaaagacaaataaaaaattttcattttgtgaaattcagtagccc

SEQ ID NO: 760024 - DNA, 542 bp, Homo sapiens
atcctttaaaaattatatgactataccttggtacaaatagtatctgtgtttttttgctgcaattttccagtgctttttttttttgtcacaaaggccaagtttgtcttgttttaagacaattattgcagtaatcatttgctgaaatggaagacttagatcacggatgttgtgatgacttccaagtgtctgttatagaacatatacaaaatatatcatccttgaaattagaattccatacttcatgcaaatcattatttattgctatacttgcttgtttgcaatttttgtakcaatctttgtagcctaagatacatcagtaaggtgtagtagatagaatgttgaactgttcagtaacgacatctaggatctatctgggttctctgcccatctagctggttatcttgtgaaggcaaatggcttctgaggctgttatcccatgagagtgttagtgctggactctacttacccattagaatatcttaaacctttcttccaatttaaagacaaataaaaaattttcattttgtgaaattcagtagccc

SEQ ID NO: 760025 - DNA, 605 bp, Homo sapiens
acagtttgttaccgggtctcacctgccttctttgttcatgaataggtttttactctttagcttcaacgtgggcaacagcagttaggcaagattcacacattatttgaaattggacaaaaaggatacaagaggccggctatggtggctcatacctgtaatcctggcactttgggaggctgaggcccagcctggccaacatggtgaaacctggtttytactaaaaatgtaaatattaggtaggcatgcctgtaatcctagctactcaggaggctgaagcaggagaattgcttgaacccggaggtggaggttgcagtgagccaagatggcaccactgcactgggcaagagagcaagactctttctcaaaaaaaaaaaaaaaaaacaaaaaaaacaaaaaaaagatagttaagagaaatttcctagaatgctgtgtatacaagcttttaatatagttctatcaaaatttagaaggaaactgagatttaattttttaattaaattggatatgcagcccaagaaagtatacgccaactttttacttgactacacatttcacatcttcagataacattcagtaactttttaataacaacttgaatacattac

SEQ ID NO: 760026 - DNA, 598 bp, Homo sapiens
actttaggtggacaaggtaaaagaaaagggaacagagaggtggtgaagaagaacactaattttcttcccaatttctttcaaggcaagtgtttcaggaacatcttcctgtacctgccgggtgatcaggattattgtgtgtgtgtgtgttgagggtagagggggagtgcagggaccctcctcacctagtctgataagagcactccactgaattctttggtgcaaaaaatatttccatgctattgcttataagcagataaataggaagaggggaaaagtttgtcatggacatctacagtatcattacaaagcagcttatgtatacgcaatagttcctgggrgctcccattttggtcttgcgggaaaagtgtatggctaaaattcaggagaattggggtgactgccagttcttacactactttctgtaatttttggaggacaatatattcaatcccttttggcctcagtttcctcaactgtaaaatgatatttgattaaatcccttctagcactaaaattctataactctaaatgctggcatcaaaagccatcatcttccaccaaatagttgcacgactttaggtgagtctgttaatactgt

SEQ ID NO: 760027 - DNA, 624 bp, Homo sapiens
gcataagatactattttccctcatgttgttgccagacaattctggctgcattcagagtaagagcttagtctgtaactttagaaacagtgttatttgctaacctccattcgtaaaggcatgttaacttcatattcaatccgaattttcaggtaatgcagcatccttgaatctaatctaatccccattccaaaagaaagtaaacctacaaattttagcgcacatgatgtagttactgctttcctcttaaacaattgagaaaaattgctttaatcaaacaaatacttaaacgttatccgtctccgagacagacacgtctttctctagttactactttagtctgtaactaaaaactgtgtatstatgacctgttttaacagaataatctcctaatggtatgacactctctagaatccattcctccaatccaactttcacactgcagcttaagaccatttctaaaatgcgaatccgataatattactcttctgctaaaaattctatccattgcctattatctactctgacataggaggtttgctctaatgtgaccttgctctctagtctcatctcctcttgctcagtgtcctatacccaaacacatgtagaacccagttttacagtcta

SEQ ID NO: 760028 - DNA, 632 bp, Homo sapiens
tagcaagaccctgtctctacaaaaaatacaaaagttaactgggcatggtggagtgtgcctgcagtgccaaatacctgggaggtggaggtgggcagatcactcgagccaaggagtttgagattgcagtgagccatgatcatgccactgcattccagcctatgcaacaaagaccctgtctcaaaaaaaaaaatttaaaaaaaawatatatatatatgtaaaaggcagaaaaagagtgaaagacaaaaataggaacaaagaataagtacaatgtataggaaacagtaatgaatatggtatacatcaatccaactatgtcaataatcactttatatgttaatggtctaaatatgtcatttaaaagacataatggatcaaaaaacaagacccaattatatattatctacaagaaacccactttaaatataaaaacacatatagattaaaagtaaatgggtaaagaaaaacataccacgttaatactaatcaaaagaaagaggaagtaaacatattaatttcagacagagcagacttcagaacaaggaaagttatcagtgataaagaggaccattacataatgataaaggggtcatttctccaagaagacataacaatccttaacacatatttcccta

SEQ ID NO: 760029 - DNA, 509 bp, Homo sapiens
ttgattatagtatgacttaatgtagtttgttcatatttattgtgctttggctgcactgagcttcttacttctgcagtgttaataattttcatagaattagaaaattttaggacattatgctttaaaatatatttttctttctctctttcagagtctccaattatacaactattaggttcttgaaaactgtgcctcaggttaatgatgctctgttaattatttctattctttttacatcactgtaygtttcaatgtaatttttttatcactttgtctttaaattcactaattccacattttacatatataatctgctattattcaatcccgggcattttgtttcacagaatatagtttcaacattttaagtttgacttgtatctttaaaataacttccatgttactatttaaatttttgaaagtaagcaataaagttataataacaagcttaatgtctttgctaattttaacatcctgtcaattctgggtagtttgtgatttttttaaat

SEQ ID NO: 760030 - DNA, 598 bp, Homo sapiens
tatatggtatatctttgttaataagttgtatgtttgaaaagtatatgaattctttatttgagtacaatgtcgtagtttcttacaaatattaagtctatttagatgacaatattgtccaaatattatttacttttactaaccttttccatttgttttatttattgttttaatttttgggagaagagtattaaaatccacagcaatactcytaaacttctctatatctgctttcctttcctatggttttgctcctgaaggtcaatattttgttgttagttgcatatttacaactgagattgtatgtctctttgataaattggctcttttacattacggaataattatctatcactggtgatccctttcttgtcagtcttctttgttagcttctcatgtatccattcttgttttcttattattaatgttgcatgataaaaaataagtcccattctttgcttttttatctttttttagaacaattatagattcaccagaacatgaaaatatccagctaagtcacatgagctttttacgagtttccccatattgtaacatcttgcataagaatagcataacaacaaactagaaattgacattg

SEQ ID NO: 760031 - DNA, 561 bp, Homo sapiens
tgccttttccttgtgtgcacatgtgctctgatggaacataagccacggtgctgaggctgcttgctcaagggcatgagttacgggaattgcactgtactcaaagccacccctcatggccatatgatggtagaatgaaaaataaagccagatccactttaaaatactcttgatgattcartaaaaatggttgtttttattaaattgcaactttgcatgcacacattttcagtgagacgagacaggaagttcacataagcacttctgctgcaacttgcagaatgatggaccattgccagaaaaagccatctggggatggtttgagttgtgagttgaattaatcgcttttttcatgaaacagcatttttccctggaaagaacgactgagcggcaaactagcattacatgagtttggttaattggcagacattttcacaaaaattggaaaaagtgagcttgttccttcaaggaaagtcactgacagctttgtttgtgttgccaaattcagcatctagtgagagtaaacttttagaaagctgtctgccaccatgagctatgcagctt

SEQ ID NO: 760032 - DNA, 550 bp, Homo sapiens
tttttactctggaaaagacaatccattttactataggtttcaaactctaataatttcctttttaagtctgattatgtaatgaaagtgaggaaataaatgagaatggccggacctcaggggacttctatagcctcatcacactagggaagaaaacagaatctgccagctgacactgctctcccctctggcctgataggcaaaaagccatctcagacacacagggattgcattttctaytccccacttctctaacatatgaaaaaatggtcattgcagtgttgcatgtaatagctgcaatttggttacaaatccatcaaaagagaacagataatacatattatgataaatttatccaatagaatgctatttgcaagaatgcggtagaagtcatttggaacaacatggaatgattttcaagatacattattaaggggataaaggcaagtgtaaaacaatggttgtaaaacactctaaggaggcagaaaggaaacacacacactcgtacttccataggtgcaggttattttatggaagtaaacctgaaaactgg

SEQ ID NO: 760033 - DNA, 449 bp, Homo sapiens
cttgatacacctccccaatacaacaaagaatgccttcctcatcttcacatctttctttccacctaacccagtgcctgatatgtggtaatttttcaattaaagcttgttggattgtgactatcccaaggtcaagtttaaaatttttgccgcatgcagcggtacacacatgtagtcccagctactctgcaggctgaggcacgagaaycgcttcaacccaggaggcagaggttgtagtgagccaaggtcatgccactgcactccagcctgggcgacagagtaagactctgtctcaaaaaaaaaaaagaaaaaagtaacaaattacttggtattttggtgttactaagttttaacctacaaggttaagagctaacaatattagaacataggagcatgctatctgtcttagtctgttttctgttgctgtaactaaataccacagactaagtaac

SEQ ID NO: 760034 - DNA, 566 bp, Homo sapiens
agactctgtctcaaaaaaaaaaaagaaaaaagtaacaaattacttggtattttggtgttactaagttttaacctacaaggttaagagctaacaatattagaacataggagcatgctatctgtcttagtctgttttctgttgctgtaactaaataccacagactaagtaacttacaaagaatagaggtttatttagctcatggttctggagactgggaagttcaagagcatggcactggcatctagtgagggccttcttgctcttcataacatggcagaaggcatcatatggagaagagggcaagagcatatgtgtcagctcaggtctctggtccttttcttataaagctaccagtcccaacatgggggaccaccatgatgaccttatctacctcccaraggccccaccttcaatcaacataatgaatttggggattacttttctaatgtgtgaaatttgggggacacatttaagccatagcaatatccaaattaattatgatatccacttgttctcagcatggtttttatttaatacaatccataagccagggctgcctttttttt

SEQ ID NO: 760035 - DNA, 591 bp, Homo sapiens
agggaacagatgacacattcaaattacaaaaatacaaggtatttataaagacatttacaaaagtgtgtgcaggatgttggaaaaaccataggagatagtagagtggcctgaaagggaggagagtgagtagttactggaaattgttaaggaaagtccggtggaaagggtgaccttagagtgattcaaccaatgaaatacggccatgcagagagtgacccaaggggatgaatatcccagcctcattctccttatctgctactgttctccagtgaccaagcccaaccagtaggcaaaagaacccattcacatagtacatagaggtcagcctcctggagcagagatcaagatagagaagagaggaggatggcaccagagagacatgtgaaaaatgtcaagcctgccctytgttaggactctacattctattaagatcagaggttgatctgttgaagattttaaacttcaataggttgtcattgtgcagtccttgtgggtagggactaggtttagttctttatgtcctcttgtattagctactgctaaatccaaaccacctcagaactcaagaactgaaaataataagcattaata

SEQ ID NO: 760036 - DNA, 603 bp, Homo sapiens
gagagagagagaggtcgacacttagtgaccacttacatgacagatgggattttagcttcagctgttctgttgaagaagagaatgagggcatctttctgctgctgtttctgttgaaagataagttaagaatgttaagtgccccagtctgagaactctgggatgagtggatctaattattgctcctatgcgctttacaaatctcaaccacccgtcaccagagtcaggagaccctggtgctgacartgattcccctttcactttggccaagtcagaagaactgcctgggtcgggttttgtcctcagagacggcattagagctactctgccattgtccaagaaccattgcaagaatccaagaggcaaggaacacaaaagctctttggagacgcatttcaggtagggcttcaccatacacaccagacccatgtgaaccactgaaatgtggccttggctaagcatacctatttactacagcctggtgacaacttacatgtgacatttccccaacttgctttttgcttccctcttttcttctgccaagctgtgactatacctgacttacagagcttacctctgtccaagatttactgaatcaattccaat

SEQ ID NO: 760037 - DNA, 598 bp, Homo sapiens
tttcttctccttgaactcccatatttttaagagaaggctagttcaaatacggcattttgcttctcccaagaaactctggaaaaaaaggaaagatcaggatgtaggtttatcttttttcttcctctaataagagcaccttgactttcttttggaraactgccacctcccactttcaatcccagtaatttaggtgggcaggccttaccctctggttctagggacaggcctatcaccaagtctaatcaacaagacctcaagcctccaaggccacaaagactggctccaacattggtaccagacttaagccattgcagtgttagccccattagaaaaatggtgcttctgtgtgttgctaagctgagaatgcaagctggaagcccctggcggcccgagctgccacacttgagtaacacctgcttgggaacagagcaaacaaacagaaagcagatctgagagaggagagcagcctgatgagatctttagagatgctggattttctcttacaggcactgagaaatctctttccttaagctaatttgaattgggtttctgcatagctgcaattcagagtcttgattaacccatggaatttgaaatc

SEQ ID NO: 760038 - DNA, 598 bp, Homo sapiens
tttcttctccttgaactcccatatttttaagagaaggctagttcaaatacggcattttgcttctcccaagaaactctggaaaaaaaggaaagatcaggatgtaggtttatcttttttcttcctctaataagagcaccttgactttcttttggagaactgccacctcccactttcaatcccagtaatttaggtgggcaggccttaccctctggttctagggacaggcctatcaccaagtctaatcaacaaracctcaagcctccaaggccacaaagactggctccaacattggtaccagacttaagccattgcagtgttagccccattagaaaaatggtgcttctgtgtgttgctaagctgagaatgcaagctggaagcccctggcggcccgagctgccacacttgagtaacacctgcttgggaacagagcaaacaaacagaaagcagatctgagagaggagagcagcctgatgagatctttagagatgctggattttctcttacaggcactgagaaatctctttccttaagctaatttgaattgggtttctgcatagctgcaattcagagtcttgattaacccatggaatttgaaatc

SEQ ID NO: 760039 - DNA, 598 bp, Homo sapiens
tttcttctccttgaactcccatatttttaagagaaggctagttcaaatacggcattttgcttctcccaagaaactctggaaaaaaaggaaagatcaggatgtaggtttatcttttttcttcctctaataagagcaccttgactttcttttggagaactgccacctcccactttcaatcccagtaatttaggtgggcaggccttaccctctggttctagggacaggcctatcaccaagtctaatcaacaagacctcaagcctccaaggccacaaagactggctccaacattggtaccagacttaagccattgcagtgttagccccattaraaaaatggtgcttctgtgtgttgctaagctgagaatgcaagctggaagcccctggcggcccgagctgccacacttgagtaacacctgcttgggaacagagcaaacaaacagaaagcagatctgagagaggagagcagcctgatgagatctttagagatgctggattttctcttacaggcactgagaaatctctttccttaagctaatttgaattgggtttctgcatagctgcaattcagagtcttgattaacccatggaatttgaaatc

SEQ ID NO: 760040 - DNA, 598 bp, Homo sapiens
tttcttctccttgaactcccatatttttaagagaaggctagttcaaatacggcattttgcttctcccaagaaactctggaaaaaaaggaaagatcaggatgtaggtttatcttttttcttcctctaataagagcaccttgactttcttttggagaactgccacctcccactttcaatcccagtaatttaggtgggcaggccttaccctctggttctagggacaggcctatcaccaagtctaatcaacaagacctcaagcctccaaggccacaaagactggctccaacattggtaccagacttaagccattgcagtgttagccccattagaaaaatggtgcttctgtgtgttgctaagctgaraatgcaagctggaagcccctggcggcccgagctgccacacttgagtaacacctgcttgggaacagagcaaacaaacagaaagcagatctgagagaggagagcagcctgatgagatctttagagatgctggattttctcttacaggcactgagaaatctctttccttaagctaatttgaattgggtttctgcatagctgcaattcagagtcttgattaacccatggaatttgaaatc

SEQ ID NO: 760041 - DNA, 648 bp, Homo sapiens
agctacttaaagttcttccacagttcactgatgctctcttaattttaaaaaaattatttttttcttttgtcactatgcttcattttttatagtttccataactatttcttcaagttcgttaaccttgacttctccctattcaatctgccaattgcctcatccaatatatttttcatctcaggcattgtagttttcaactcttgacgtttaatttggatcttttttatgtcttccttttctccttttaagtgtataaatagaacacagttataataacttcaatgtgtgcatttggtcattttaatatctgtgtcagttctggatcagtttcaattggtcagtactcctacttgttatggattgtattttcttgcrtcttttcaagcctcataatccttgactacctatcagacactgtgaattttaaccttgttaggataacaaggatatctctgtattcctatcaatacgctaggactttattctgggacagaattaagttgcttagaaacagtttgatcctcttagggctttcttttaaaaattgttaggtgaaaccaaagcagtattcagtctatggctaagtatttccactactgagaaaaggcccttctgtatactctgcccagtactctatgaatcatgggg

SEQ ID NO: 760042 - DNA, 634 bp, Homo sapiens
tagcatatagaatgataaaaaataatacaatttaaaacagtagaaaaaaaaacaaaaaagaaaaagaattttttttctttttttttttctgagacagagtctcactctgtcacccaggctagagtgcagtcatgcaatcttggctcactgcaatctccacctcctgggttcaagggattctcctgtgtcagcctcctgagtagctgggattacaggtgccagccaccacgccctgctaatttttgtattttgggtagagacagggtttcaccatgttggtcaggctggtcttgaactcctgatctcaagaaatccaccccctctcagcctcccaaagtgctgggattacaggtgtgagccaccgcacmcagccaagaaaaagcaattaaaaacaaaacttgacatatgaaaaagtgaattacaggaatagattatgggcaattgcatggatatagtccataagagttagccaactttcatgattattaactatattttgaagtctggcatcacaataaatagctgcttttttcttttaaggctctccttggagaatacatttacattcattttctatatggtgctgctccttgggaaattcttctgtgattctacatatacattgacatgaaca

SEQ ID NO: 760043 - DNA, 622 bp, Homo sapiens
caaacacactacttctgacacttttttataatttttaagtccctgctagctaatcatgccctgtacttgaagttgactatttaaagcctaattacacagttcacattgtatatagcccagttacttggtaaatttatatgatgtcttcttaatwatgtaaatgtctgcccatctatacagtttagtataaaaaagctgaatatgtttgatagaagtgataaggaacactatttagaaggtatttttctggtggaggaagagaacaacctggaatagaatcgaacattatcagatgcctcgtatttgacagcactgtgcttggcacaactgtggaagaaaaagacataatccttttctccaataaattcacaatcttagagagaaaatgaagaataaaacaagtaaagcaaagagacaaaataacaagttgaaataaatgctactatagaaataagaaggctattaagacagaaataatgagaagagggggtgcttactgtaacaatggaagatatctattgaatttctcttgtataaaatgaatgtctacagtctccatccacttttactgggttgttggttattttgtgccaatttgtagaagctctttataaattaagta

SEQ ID NO: 760044 - DNA, 584 bp, Homo sapiens
atgattaggaaccaaagacataattctgaaagtatgaaaaagtgttacaacaccccaaaggaccacactaactctctagtagtaggtcctaatcaaaataaaattcttgtaatatcagataaagaattcaaaatgttgattttcaaaaagctcaatgagatccaagagaaagttggaaaccaacacaaagaaatcaaaagaacaacttagaacatgaaggaaaaatatatcaatgagatagatagatatatttaaaaccccagaacttctagaaatgaaaaattcattgaaggaaatacaaaatacagttgaaagttttaacaatagactagamcaagcagaagaaagaatctcagagtctgaaggcaggtcttttgaattaacccagtcaaacaaatataaagaaaaaaagaatttgttaaaatgaacaaagacttcaagtagcatgggattatgtaaaatgttcaaatctaggagtcagaggtattcctgagggagaagaaaaactagagttcgtaaaacctatctgagaaaatagttgaggaaaacttcccaagtcttgctagagatttagacatccagat

SEQ ID NO: 760045 - DNA, 613 bp, Homo sapiens
ccggctattgctttctctattaaaattagaattccttgcttgggcagccctagccaacaccttaatgatggccttgagaaagaccctgagccagaggcatccagctaatctgtatccagattcctgagccatagaaacttcaagataattaatgtctattgtttaaaactgctaaaagtcaaacaatcaatcaatgaataaaagaaacagcagataaaaagcacaccaacatgtatagcaccaacagtggatacatggtaagatcttgatcacaaataccccaaatctgcaatgactttaaatctggstgttttaaatatacttctgcactgctaaccatttaagcagttaagattaaaaaatttttttttttgccagttaccacaatctcagccctctaagtagccagaactgacatgtgaaaagtgtctcttgaaaacactgattgtctctttttctctgattcattttccccttattgatgataagcaattttaaagacagtttgtgtgtcatttcttatcatgagaaggtgagaagagggagagttggttattattgttgaaccatctgctacaatctattgttagaatgcacactatttttaggttct

SEQ ID NO: 760046 - DNA, 613 bp, Homo sapiens
ccggctattgctttctctattaaaattagaattccttgcttgggcagccctagccaacaccttaatgatggccttgagaaagaccctgagccagaggcatccagctaatctgtatccagattcctgagccatagaaacttcaagataattaatgtctattgtttaaaactgctaaaagtcaaacaatcaatcaatgaataaaagaaacagcagataaaaagcacaccaacatgtatagcaccaacagtggatacatggtaagatcttgatcacaaataccccaaatctgcaatgactttaaatctgggtgttttaaatatacttctgcactgctaaccatttaagcagttaagattaaaaaawttttttttttgccagttaccacaatctcagccctctaagtagccagaactgacatgtgaaaagtgtctcttgaaaacactgattgtctctttttctctgattcattttccccttattgatgataagcaattttaaagacagtttgtgtgtcatttcttatcatgagaaggtgagaagagggagagttggttattattgttgaaccatctgctacaatctattgttagaatgcacactatttttaggttct

SEQ ID NO: 760047 - DNA, 596 bp, Homo sapiens
gaaaaagcattagattttcaaaagaaacaaaaagataatacaacacccttaggtttagataagactaagcttcaaataagatgcatccatatatatataatatatatttatttaattttttttgctttattttctacttcttcatcagtgaacattcattggtgcttatttctatgaggcacaattagaatgttccagaacgtaaacatgaactgatattttggctatatatggggaatgtaagtgtggtattattgccccagaaaagttgctttgggcatgacatcttgcgyttttttccttctttctttttttgaatcattttaactttcttgttcaataggctatttacatttattcccaaattctcttcttaatatttttatagatattgaactcaaagtgataactttagcttggaattactaattgacaacctttgatcttataatggagctgaaagagcagggatacaatacttaaatggcaaattgtcacctggaagctgccattttatactgataatagtagcagatatttattgagcaacttatgtttcggaagtttgataagcactttatatgaattactttatg

SEQ ID NO: 760048 - DNA, 596 bp, Homo sapiens
gaaaaagcattagattttcaaaagaaacaaaaagataatacaacacccttaggtttagataagactaagcttcaaataagatgcatccatatatatataatatatatttatttaattttttttgctttattttctacttcttcatcagtgaacattcattggtgcttatttctatgaggcacaattagaatgttccagaacgtaaacatgaactgatattttggctatatatggggaatgtaagtgtggtattattgccccagaaaagttgctttgggcatgacatcttgcgtttttttccttctttctttttttgaatcattttaactttcttgttcaataggctatttacatttattcccaaattctcttyttaatatttttatagatattgaactcaaagtgataactttagcttggaattactaattgacaacctttgatcttataatggagctgaaagagcagggatacaatacttaaatggcaaattgtcacctggaagctgccattttatactgataatagtagcagatatttattgagcaacttatgtttcggaagtttgataagcactttatatgaattactttatg

SEQ ID NO: 760049 - DNA, 569 bp, Homo sapiens
gcgagcttcccactgcgccgggcgctgggagcctcccggagttaggtgttcggccccgcctcaggactcttgctaaaactcaaattctacctggctaattccggtgattaattattgacaaaaggaaaacactcctacgcaaacttgtgtccaaccgcactgctcccarcgactccttccagaagagaatgcctgctgcaacactcccctcccccccttgctctatggtcccaacttctcatacgctgccactcttagtcctgggcgatcagactggtcctcggaggaatgcagcccaacgacttctacattttaaaatctggttttctgcagctcgttcgcagttctccagggaccagcctctcgagagggggcgctttcccggtgcaggggaagccggggctccgagagcaacagaggcggctgaggcgtcgctgtcactccggctgctgcagtaaaaccccgagccgaggcggggacggggaggaggggatagggaggcgccctcccccgctctggggctgggatccccgactctactgaaggggcacgtcctttggcggtggtag

SEQ ID NO: 760050 - DNA, 625 bp, Homo sapiens
gtattataaccacacacaggaacatctttatgaatatcttagcacctccaaacggagaatacatattaacatgttttccatacaactatagaacattctcgaaacttaactagatcacaaactataggtcaacacttttatttttatttttattttggagacagggtctcactctgtcgcccaggttggagcrgagaggcacagtcacagctcactgcagtctcagcctcctgggctcaagtgatcctcccgcctcagcctcctgtgtaggtgagactacaggcacgtgccagtacacccagctattttttaaattccttagagaaggggtctcattttgatgtccaggcttaggtcaacacattttaaaaggcagaagtcatacagaccacatcatccatcaaaatacaataaggataaaattaacaacaaacatttaccctgattgatatactattggaaatttaaagatgctttgaatctgtattaaaaagcacaaatgggaaaattacaaactctttaggaacagaagaaaaacaaaaaccctacataacaaaattgagagaatacagaaaagccaaacaatctatgaaattacacactaagtgtctttattgcaaaacaa

SEQ ID NO: 760051 - DNA, 590 bp, Homo sapiens
aagaggctaattgactcatggtttcacagactgtacaggaagcatggctaggaaggccttaggaaacttagaatcatggcagaaggcaaaaaggaaggaggcacattttacataactggagcaggaggaaaagagagaagggagaggtgttacacacttttaaacaaccagatctcatgagaactcactattatgagaatagcaagggagaagtttacatccatgacctaattaccttccaccagacccctcctccaacattggagattacaatttgacatgatatttgggcagggacacaaatccaaaccatattattcttcccctggtccctcccaaatttcatgtccttctcacattgcaaaatgcaattatttctcctcaacattcccccaagtctcattyatatgtgggagctaaaaaagttgagttctgaattagaaaagagaattgtggttattagagaatatgaagggtagaggggaagggagaacaaggagagtctgattaatggatataaagttatggctaaataggaggaataagttatagtgttctatagcactgtagggtgactacagttaataata

SEQ ID NO: 760052 - DNA, 556 bp, Homo sapiens
tggcctgacacatcaaatggacatatggattcttcatggctttgcagtaaatgttttatggctatcttgcagccaagggcagctgacatgaagaagcaagggacttgcaaatagcctgatgaaagaatttctgcacgtttttaaaagaagaggaatacatgttctgcttagaggagtttcacagctgcaatatgcttaacttctttaatgcacccacaaattgcattaggtgatagattatgcagttcagtagcatcccagggacctggtcatatgcttggatacaatccccaaaatggacaatgttcacagttcaataaactttatcacatagttttattgaccacaaaagaagacaaatattaaaacacattatagatattagggttaaaaagaccagtggtacctccttgcygatacaacattgacccatattgcatatttttcttccagactagtttaaagtgactcaggtatttggtctgtattattttttccatggagacaacttcagaatctaatacaactttctgtgttcctgctgcacctgaattta

SEQ ID NO: 760053 - DNA, 671 bp, Homo sapiens
ggggtggctcagagacaggaccctggttttaaatccctccacaagcctgctcctggcgatgaaccctagccccactccagggccacagtaccccagcctcacacatgcactccttctccccaaggccagggcagagggcctcactgtttccctggcctgctgtcagcttgcaaccaggagacagaggccagctgggatctgccccaccttcccccccatactgctcccctcaaccaggacagagaacatggcctcctctagggccctgcctcccaagccttaccctcacacaccaagtaccttttcagctttttaactgcccccagccaggcccacggaagcctgtgtcactctggcacaagctgccaccaccagccacctacacacccccccagcacacctcgcacgggaccacagccccagccgtgctgctaagggccaagcacaaaggctccagtgagcaaatgttcaagcccctggtagccaggcctccccttgccaagccgctgccamcccaccctgtgggaagtggcccccagccatctcctctagaccacggcaggcagcctacggtccccagacccctgtccaggccagcatgtctgcagccccgacatctgcttcctctgtcgcccaatccaaaatcgacgaaatggagggtcctctgggct

SEQ ID NO: 760054 - DNA, 528 bp, Homo sapiens
ctagttgggagacaaaattgttgggacagtatggacatatgcaaaatctctttagtttcttctgaatctggcacttgcaaaagtgctaacagacagcagcaggtaccagcagaatatcatggacttgttggccttgactgatgctgtttgcttgaratttcaataatcagatgtgcaactctgatgtctttcattgttctataaccactcactgaacttggccaaagtaatgatcctgcagaaaataataacaaaacattccaccccacctggcttatgaacctctcaaagatcattgcctccctctttcccctctccccagtccctcccttctctcagacggtgacttcccttgcaggtctaagccttctgtttatttccctctacctcttttatcctattaaagccgtatctccatccctctgccacccaccttccatctctggttctctattttctctcttcaaaacagatttgacctatgtaaacatctggctgctagaaactcctagactggtaaattcagct

SEQ ID NO: 760055 - DNA, 528 bp, Homo sapiens
ctagttgggagacaaaattgttgggacagtatggacatatgcaaaatctctttagtttcttctgaatctggcacttgcaaaagtgctaacagacagcagcaggtaccagcagaatatcatggacttgttggccttgactgatgctgtttgcttgagatttcaataatcagatgtgcaactctgatgtctttcattgttctataaccactcactgaacttggccaaagtaatgatcctgcaraaaataataacaaaacattccaccccacctggcttatgaacctctcaaagatcattgcctccctctttcccctctccccagtccctcccttctctcagacggtgacttcccttgcaggtctaagccttctgtttatttccctctacctcttttatcctattaaagccgtatctccatccctctgccacccaccttccatctctggttctctattttctctcttcaaaacagatttgacctatgtaaacatctggctgctagaaactcctagactggtaaattcagct

SEQ ID NO: 760056 - DNA, 700 bp, Homo sapiens
aaatctttgaagcaaatactgttatgagttcagtttcacagctgagaaaacagaggcacaaagtgttcgatattatgttcagaatttctccaggtagtatggagctgagtctggatttgaacccaggcagcttggagcaacatcctaactacagagcaattctatcattcttatcatctgagccagactgcagataaaaggagytccctgagcatgttttgactgatgcctatggtattagtccattctcatgctgctatgaagaaataactgagactgggtaatttataaagaaaggagatttcattgactctcagttctgcatggctggggatgcctcaagaaacttacaatcatggtggaaggcacctcttcaaagggcagcaggaaagagaatgagtgccagcaggggaaatgccagacgcttataaaaccatcagatctcgtgagaactcactcactaccacgagaacagcataggggaaactgccccgtgatccaatcacttcccaccaggtccccccaacagcacatggggattatgggaactacaattcaagatgagatttaggtggggacacagccaaaccatatcagctaaaaatgataagctgccactatgaagaaatatcctcccatccactccaacccccacaacacacaaacacactcatacaagtaatattcatgttcacttcaa

SEQ ID NO: 760057 - DNA, 620 bp, Homo sapiens
atgacaatgacgcgcttggggtggaggttgggaaagggaagaaaaacagatggctggaaagtagagaaaatggaggaaaggaggtgagtgacaggccctgggagatgcagggtgttaaaaaatatgagaggaagagaattttagcaacagttgcctttgaattttgtcttcttcaagaaatgtgaatatcaggtttgaattcctatcagactctcctttgaatgtgatccattttgaagggcccacgtggcccatagttataatgagtgatgcacacaacaggcatttgtgaaacgtgcctggtgatcccaaataytattatgcagcacagaagataaaagtaaataaatcacggtaacagagacacgtatagtttagctaagggataaaatgacaatatttgtacatcagtttatagctgaagaaagtgttcattattttaaattattttggtggagggctatgtaggactggttatttatacattatctccattttattttattttttcaataaagcatgcttacatttgccttattttattttattgagacagagtctcactctgtcacccaggttgaagtgcagtggcaggattgcggctcactgcaacctctgcc

SEQ ID NO: 760058 - DNA, 462 bp, Homo sapiens
tcaactctcctcctcgtcccaccttcccccttttggagtccctaatgtcaatttttttccctctatatgtccacgtgtacccattgtttagctcccacagaacatgtggtatttgattttctgtctctgagttatttcacttargataatggcctccagctccaaccatgttgctgcaaaatacatgattttgttctttttaaaggctgagtagtatttcatgttgtatacataccacattttctctatccagtcatctatcgatggacacttatgttggttccctgactttgctattgtgaaagtactgcaataaacatatgggtgcaggtgtctttttggtacagtaatttttctttcccttgagttatctctattttagaggtaagggatctgaaggtcagagaaggcttgaccgtggctttcatctagtaagtagcagagttagaactacagcccatt

SEQ ID NO: 760059 - DNA, 541 bp, Homo sapiens
atacttaatgttgtacccaatagataatttttcaactctcctcctcgtcccaccttcccccttttggagtccctaatgtcaatttttttccctctatatgtccacgtgtacccattgtttagctcccacagaacatgtggtatttgattttctgtctctgagttatttcacttaggataatggcctccagctccaaccatgttgctgcaaaatacatgattttgttctttttaaaggctgagtagtatttcatgttgtatacataccacattttctctatccagtcatctatcgatggacacttatgttggttccctgactttgctattgtgaaagtactgcaataaacatatgggtgcaggtgtctttttggtacagtaatttttctttcccttgrgttatctctattttagaggtaagggatctgaaggtcagagaaggcttgaccgtggctttcatctagtaagtagcagagttagaactacagcccatttggggagcaccaaagcttgtcctctttctgctttctcatactatctct

SEQ ID NO: 760060 - DNA, 638 bp, Homo sapiens
ggcaatatctacccttctattaacagctcaggggttgtatgtctttatattacagaatgtaagagaagtattgtgactctaattaagaagggtgatacaagttcaagcagtgcaagctatcgattctgtagttctcaaataaatagaatgaaaggtaacaygcgtatctcacttattgaaatgaaaatcacactagtcatatatagactgcataatttatcgtttttctgttgattttctgtttctaatgatctttgtgacacttccctctttcaaaacaaaatgatctgattcactatatgtttctaatgttgataccttcatattgcccataaattactacatttccacaaattactgaagaaaatattgaatctttcagaattttgtaagatattttaaacaatggcatggctcattaacactgaatagaaacccttaaagcaggtcatttctaaaacaaacaaaaaaaaagtataaacagcagtgataagcacagaaaaatgccagaactcattttgggcttctgtttaaagagacatactccaggaaataggggtggaatagggaggttttcctaaatgtaggttctaggaagcagattctcatgggctgatgaatgcaccagcccccactat

SEQ ID NO: 760061 - DNA, 406 bp, Homo sapiens
cttctccagttcaaagactttcagcaagaatcactaccacataaagtccaacaaatagaaatggagagtattttctcatctactttcagaatacaagctctttgcaaaaaccggtaaggtgactttggttcatctgtggttgagatgcttagktgggtgatccaactgattcactctccctcaggaagactcatgccaacccttaccctttacctttatttaaaatagaaaaatgatgcgaataagaatattgtcaataagcatgttgaacatttacaggtcatgcaaagttaacctaaggaaataaaaagaagaatcaaaataataattacatatttttaaaaagttggcacctaacaattttaaaaacagcatttaggtaccaataagtttataaattcagcca

SEQ ID NO: 760062 - DNA, 608 bp, Homo sapiens
tgtctgagagatgacttctgagcattacagatttcatctaacaagaagaataaacattgaacaatgaagcctaagggttaaaaatgttgtgaaagggagtgtatggggcatgtatgagtgcctaaaaaggggaacaaatctaatctgtgcatttgggcaagtacatcctcagttgtttaatacgtgaaatgatgaagtgccattcatctaataagtaaacattaaatctctgctcagattgtttccaaataccattttccattaaagaatatcaggactccctatagggaatggctgattccagtctgtggcaaggaatgttaagaggagcctgraatatatttgcataatagatagcaaagaaactaccaatgatcactgagatcacgtaaaaaggcaactgagccagagagtgggccatttgccctatgagagtctctctcatcctcctacccctgcccttttccctaagcaaccagggaagtgcaactgtatctacccatgggccacactcacagggcagccaggggaaatctttcctcccccacctagcagcaccaggtgtagaacacacacttgagacacacaggtggcacttacagtgatga

SEQ ID NO: 760063 - DNA, 628 bp, Homo sapiens
gtaagtagaaaatagttattttacatgtttcttaatgtctttaaatgacatatttaaaaggttgtttaaaacaaacactaaaacactgttttctaacatggagtttataacatatgtagatgtatggtatatgacagcaatgaaaaaaaaacatgagkggtaaaatactacactgttgtaagtgtttaattaatactatttctgttttacatggcataaataatagtgattaaaggtcaactgtaataggttaaatatgtgtattgtaatacttacgacaatctctcaaaatttaaagcaaagaaatacagctaaaaatccaatagaagacataaaatggaatgttaaaaactacccaaatgattctaaagaaggcagaaaaatgaatgaagaatgcataaatatgaaacaaataaaaggaaaatggtagacataagacaaaacagatttaaattatgtcaaatgcaaatggactaaatgcactatttaaaaagcagtgattatcagattggaaaagaaagaatcaactatatgctgtttaaaaatatataccttaaataaaagatgcagatgtatcagaagtgaagggatgaaaagtatgacatgcaaacactaatcataaaactgt

SEQ ID NO: 760064 - DNA, 628 bp, Homo sapiens
gtaagtagaaaatagttattttacatgtttcttaatgtctttaaatgacatatttaaaaggttgtttaaaacaaacactaaaacactgttttctaacatggagtttataacatatgtagatgtatggtatatgacagcaatgaaaaaaaaacatgagtggtaaaatactacactgttgtaagtgtttaattaatactatttctgttttacatggcataaataatagtgattaaaggtcaactgtaataggttaaatatgtgtattgtaatacttacgacartctctcaaaatttaaagcaaagaaatacagctaaaaatccaatagaagacataaaatggaatgttaaaaactacccaaatgattctaaagaaggcagaaaaatgaatgaagaatgcataaatatgaaacaaataaaaggaaaatggtagacataagacaaaacagatttaaattatgtcaaatgcaaatggactaaatgcactatttaaaaagcagtgattatcagattggaaaagaaagaatcaactatatgctgtttaaaaatatataccttaaataaaagatgcagatgtatcagaagtgaagggatgaaaagtatgacatgcaaacactaatcataaaactgt

SEQ ID NO: 760065 - DNA, 380 bp, Homo sapiens
attaatataaatcgaagtacacagtgctttattttttaatatggatgatagattatcattattgtggatgtatattacatgtttttatatgtgatacagctcttagtaaataaatacaaaaaccataaaaataaaacagtcatgtgtttatsagttgaaattttcaattgttaattatttttaataatgtttttcaaatttgcttcaataattcccactggtaatgaatgcactatgcacaaagcaactcacaacctcttagttttgtctgtaaaatgggatgctgtgaagattaataaaaacagtgctaggtacaaaggacattgcaaacagtaaagaatcattatgacaatgctgttgtattgcttctatattttttc

SEQ ID NO: 760066 - DNA, 581 bp, Homo sapiens
ttttgaataagcacagattcaataaaagccttttgagtgccccaaaaatgaggtaccttctgttatataatacttttgacctcttattcatttgacttgctaaaagaaacacaggtacatttcaagttgattcatttttaatgatatatccatacttgttttgaaagaaataaaacatgattatgttaagaaattcactgtgctgacagccacaggtccagaggattttaaatatattcctaaccaagagatcaaataatttaagcattagtgttctgctacttaccagtttctggtaaygactccttaaagatctctggggacatttttttacaatggttattcagagtgtttgacttgttattccacttgttatttatactcttgttctgtatactttactgagtgagtcactgagatttgcactttcacttacctaaaatcagactaagagaatatccaattggtgcctgagcccaagctaggccataacctggtacataaactgcttcagctgtgccattgatataccctcctccgacccaggtagctgaaacagaatgaaaagtgagggagtgata

SEQ ID NO: 760067 - DNA, 460 bp, Homo sapiens
ttcaatctataaattgtttggtcagtatggccatttaacaatattgattcttactattcctgggcatggaatgtttttccatttgtttctgtcatctcttatttctttggatagtgttttgtagttctccttgtagagatatttcacctgcctgrttagatatattccaaggtattttattattctgtggcaattttgaatgtgattgcattcctgattttgctcttgacttgactttcattgttgtttaagtgtgctagtaatgtttgcacattgattttgtatcctgggactttgttaaagttgtttctcagcttaaggagcttttgtggtgagactatgtagaattatgttgtttgcaaacagagacagtttgactgcctctcttcctatttggtttcccttctttctcttgcttaattgctttggccaggacttccaacactatgttgaatgggag

SEQ ID NO: 760068 - DNA, 611 bp, Homo sapiens
agtcttacgtatttacccagcagtgcagaatctccagtgcttttctttcctttgtgtggatatggttttctatttggcttaatttctcttcagccttgaaaacggtctttagcatttctggtagtgcagatcagctggtgaattctctcagcatgtatctaaacgtctttattttaccccagctaaagacccatgtgcattcccatgccagcttctgtgtcccccattatgtgtaaccacttgaacagcccagagctctgacctctgacttgttaacctgggcaagatcactgatccatttargctccacaacctcctgttacaatataaagtgtcccttggcaaaatactagtgtgattctgggtttctgtttgtgagttttcgttttctcaaggattactactctttgctgcctcttgttcagtgccttatacaggtttttaggcatttttggcaggagggaaagtctgctggttactctgccatatttagaactaaaagtcaattattggctttttaatgaaaatcacagaagtacaaataagttctcactgatggaattagagtatatgtatatttcaatttgccagaatattgaagagaattttcc

SEQ ID NO: 760069 - DNA, 545 bp, Homo sapiens
ctaaattacccatggatcaagtaagatataaaaagggaaagtagaagatattttaagctgactaaaaatgaaagcacatgtattgaaaagaaaaagaagtctcgaaacaatgatgtcaatgtccatcttattaaactataaaaaggagagccagctgaatccaaagcatgcaaaaggaaaaaaatgatcaaaatcagagtggaaatcagtgatgtaggtaacagaaaaacaatagagaaaatcaatgaagccaaaactcattcttagagcatattaataatattgacaaatctatagtaatactaggggaaaaaagagagaagacataaattgtartattcaagaatcagaggtatggcatccatacagattctacaaatgataaaaggataatcatggaataaggcaactttatgtcaatatttttaacaagtcacattaaatagacaaatttttttgaaagagaagcactaaaactcactacaggaaaataatataaccttaatagttctatattgatttttcaaatttaaatttataatatt

SEQ ID NO: 760070 - DNA, 544 bp, Homo sapiens
atttcttgatatcctctttaattttttaaaattatttatttttattttactttaaactccaggatacatgtgcagatcgtgcaggtttattacataggtgtatatgtgtcatggtggtctgctacacctattaacccatcatctaggttccaccccctcaccctccgaccccccaacaggccctggtgtgtgttattcccctcgctgtgtccatgtgttctcattgttcaactcccagttatgaatgagaacgtggtatttggttttctgttcatgtattagtttgttgcatyctttttaatttcattcatcagtgatttgtaattttcattatagagatctttcacctccttggttaaatttattcctaagtctttttttgataattattataaatgagattgcctttttgaaatcttttttagccaatttgttattagtatatagaaatactatttttgtatgttgatttcgtatcccacaatttttctcagttcatttatcagttctgaaaggtgttgttgttgtttttttttttggtaga

SEQ ID NO: 760071 - DNA, 619 bp, Homo sapiens
catttgacttattcttttccaatttggatgcactttattttattatcttgcctaattgctctggctaggactttcattactatgttgaataaaagtggtggaaataggcatttatgtcttgttcaggtttttaccttttctttgttcagtatgatgtcagctgtgggcttgtcatatatggcttttgttgtgctgatgtatgttcctaatgtgcctaattttctgagaatttttttaagatgaaagaatrttggattttatcaaatgctttttctgcatctattgagattatcatatgattttggtccttcattctgctgatgtatcacatttattgatttgtgtatgttgaaccacccttgtttccttgggataaatcccacttgatcatgttgtattatctttttgatgtgctgctggatttagtttgctagtattttattggagatttttgtgtttatgtttatcaggggtattagcctgtaattttcttttttattgtgtctttgtctggttttggtattagggtaatactggccttgtagaattaaaaaaaaattcctatctcttcattttttgggaatagtttgagaggaagtggcgttacttcttatttaaa

SEQ ID NO: 760072 - DNA, 545 bp, Homo sapiens
cacgtgctgcctaggaaacctgtctatgacctactgttgaatgaaaaaaacctagttgtatgagtagcatggtcttatattcattcactcatatctatttatttggttgtacatatctgtagaggagcctagaaggaaatcctccagacttaacagaatggctacatgcagcaatttagaggaggtagtggcttcttcgtattctcctctgtattctcatttgattgtttttaaaaacaaatagcattacttgcacagtaatttttaaataaaattttacttaaggatctctgcttccagttcccctgacaacagtcactgaacatatgcaataagaagcttgggagaattcacagtcggyttaacttttaatgagcatctactctaggtacaagtcggggttcctaccccaaacagatgagctgacagacacttgtgtacgtagttcactataacaggagacggcttggggcaagagctggatggatgctatgatgcacagcactgtcattttagatacattacaactcttctctcattaaatc

SEQ ID NO: 760073 - DNA, 628 bp, Homo sapiens
cctctccaaactttgttttaaatcatcctagcttctcctggctgtgagatttcaggaagggacttaacctttctgagcccatttcctcatcagtgaaatcagaataataaacgcaccccctgtactccaggtgggtggaggactaattaaaaggtayttaccacactgtttgcatacagttgacactagaaaatatagttgcattatttttctgaaaatctgtttaagatattgtaagctgcccagaactcagagcaggtactcagtatatggccggacttcaggaaagctctaatgatgaaagaatttagtgccctggcttggcaggaaatttcccatagaagaagacattttaaagctatagatcctgttcttaaggaagagtctcagtaggttaagagaaaaaaaatacggtcaaagtccaaaatacaatgccgttgaagccctgaaacatggcgatgtgtctgtttacaatgaaaacacttggcagctcagggggacctcgaagagcaagcaagtctgacacctgattggggcaatcaggtgtctggggcatgaagacgaggcttcgggagaaacagctgggtctctcactctaacctatgtctaagggaggcagcccaagttt

SEQ ID NO: 760074 - DNA, 594 bp, Homo sapiens
atatccctcccctgtctcaactccttggaattggctctggttaaagtaggtgggttaggaaaagaaagtggaagccctctgggctctgcttgccctcttccccaccaaatccccacagcctggtctcacctcctcttccagcttgatgaccctggcctgggcgttgctcaaagcctggtccaggatctcgatgtgtctccgatggtcctcacttgcagtccgcactgctgctaactccatttctaatttctccttttccttcaagaattctttgtctagaagggaaacacgaacaaaactacctctatcagaaattgcacaccctctgggctcacggccagtcgacatctggcaaggattaaaaataaaaaagcatgcaaataatggaggactgaattgctgttyctgctcccttttcatagtggtggtatggaaggtaatggttttctcaaaaaccacggtcaacggtggatacattcccaggccacacttgtgaacagtacacaaagaaccagtgaccctatattctcgataactcacttctctacaacattgactttcatacttcaaatcaatcttgtatctactattaca

SEQ ID NO: 760075 - DNA, 606 bp, Homo sapiens
acaacattgactttcatacttcaaatcaatcttgtatctactattacattttatgcttacaacattccctgcttccattttccaaatctgtgatgaaagggtgggtaatattaataataatattaatattctcattcatagaaaaataaaccaaggtccagagaggtaagctctttgcctgaggctagacagcagaggggagcttcaagctcaggcctccaatctccaggtagatcctctttccatatgacctggccccacaatttccccttttcctgctaaaaaggggaaagggacaaggctttagatttaggaaaactgcttttctctcattcaatggtgatgtaatgatggcgatcactgcctctctttgcatatgggaagccaaggctggtatgctcttagttacccatcgtcctatacagactgctctactgttgtagtttaagcaggcagcgtcgatagtgtcatggaatgarcatttcttattgaaaatacttttcatgttgcaaaagcaatatgctgttttttaaaaataagactatttagatacattgcttataatatggaaaattgaacaaacagtatgtaagagattggccaaat

SEQ ID NO: 760076 - DNA, 549 bp, Homo sapiens
tgtaggggggatactgaattcgatgggttctttttgtatatgtgtgtgagagagacaagatcttgctctgtccacccaggctgaagtgcagtggctcaatcatagctcgctgcaatttcaaactcctgggctcaagaaatcctcccacctcagcctcccgagtaagcaggaatacaggcatgtgccaccatgcccggcttcttttgttttttctagagacgagrtcttactttgttgcccaggctggtctcaaactcctgggctcaagtgatcctcccacctcggcctcccaaagtgctgggattacaggcatgagccactgtaccaggccagctgtttctttctctataatttatttttcataactgttctgctattctcttgcagtttccatgatgccattttctgaagcacagcattgtagatgtttagaaaaagccagtgatctcctagtccaagtcccttaatttacagctaaggtagctgaggcccagagaggtagagtgaattgtcgaaggtcatagagcttctgatggtagaactgactct

SEQ ID NO: 760077 - DNA, 541 bp, Homo sapiens
tcaaacaagtagaaggctttcaaattaacccaatccaacaaagacaaagaaaaaataattttttaaaatgtacaaagcctccaagagtttgtaatccctgacaagaagggattacattaaattaccaaatctaacaataattggtgttcccaaggaagaagagaaatctaaaagtttggaaaacatatctgagggaataattgaggaaaacatccccggccttgctagagatttagagatccaaatccaagacactcaaagaacacctggggaattcatcacaaaaaaaattaccgyctcagaacatagtcatcagattatctaaagttaagacaaagaaaagaaccttaagagctgtgaggcaaaagcatcaggtaacctacaaaggaaaatctatcagattaacagcagatctcttagcagaaaccctacaagctaggagggattggggtcttatctttagcctctttaaacaaaataattatcagccaataattctgtctccggtgaaactaagcttcataaatgagggaaagataca

SEQ ID NO: 760078 - DNA, 541 bp, Homo sapiens
tcaaacaagtagaaggctttcaaattaacccaatccaacaaagacaaagaaaaaataattttttaaaatgtacaaagcctccaagagtttgtaatccctgacaagaagggattacattaaattaccaaatctaacaataattggtgttcccaaggaagaagagaaatctaaaagtttggaaaacatatctgagggaataattgaggaaaacatccccggccttgctagagatttagagatccaaatccaagacactcaaagaacacctggggaattcatcacaaaaaaaattaccgcctcagaacatagtcatcagattatctaaagttaagacaaagaaaagaaccttaagagctgtgaggcaaaagcatcaggtaacctayaaaggaaaatctatcagattaacagcagatctcttagcagaaaccctacaagctaggagggattggggtcttatctttagcctctttaaacaaaataattatcagccaataattctgtctccggtgaaactaagcttcataaatgagggaaagataca

SEQ ID NO: 760079 - DNA, 497 bp, Homo sapiens
  misc_feature 1, 2, 3, 4, 5, 6: n = A,T,C or G
nnnnnnattgtgtgagaatttaataaatagatacatcatctagcagggggctggggcattgtatgcatcaataaatgttaattattctcttccccatcctgtcaactatagtacagtaaagttagagttaagatccaatatatgtgaatgcataattaagagagaaactccagtgtgcataagataactcaaaccaaaggakatgtaagtgattctctcaggttttcacaagaatcctcccttcttttcatagccacattttaataattaaaattcatggattatgtactcattaactactgagcacacattccatgacaagttctataataaatggtggggcacggggcacttgaggcacaagacagtagagatataaagattttaataccaaagacagggtctctttgagttcaaaaaacaagaaaagacatgtgaacaacttatcaccgcttgtatgtgataaggtggtgggcacactgagtcatgtagaggga

SEQ ID NO: 760080 - DNA, 497 bp, Homo sapiens
  misc_feature 1, 2, 3, 4, 5, 6: n = A,T,C or G
nnnnnnattgtgtgagaatttaataaatagatacatcatctagcagggggctggggcattgtatgcatcaataaatgttaattattctcttccccatcctgtcaactatagtacagtaaagttagagttaagatccaatatatgtgaatgcataattaagagagaaactccagtgtgcataagataactcaaaccaaaggagatgtaagtgattctctcaggttttcacaagaatcctcccttcttttcatagccacattttaataattaaaattcatggattatgtactcattaactactgagcacacattccatgacaagttctataataaatggtggggcasggggcacttgaggcacaagacagtagagatataaagattttaataccaaagacagggtctctttgagttcaaaaaacaagaaaagacatgtgaacaacttatcaccgcttgtatgtgataaggtggtgggcacactgagtcatgtagaggga

SEQ ID NO: 760081 - DNA, 691 bp, Homo sapiens
tgatttggctgttttaatgttgatgtatagaaatgctgatttttgtgcattgatttttgtgtcctgaaactttattgaagttgtttatcagttccaggagccttttggaggagtctttagggctttctaggtataaaatcatatagttagtgaagagagagagtttgacttcttttactatttggatatcttttagttcttactcttgcctgatttctctagctaggacttcctctattaacactttgatatttacctttccccccttctcctgtttgtgtacacacacacacatacacacacaaacmcaatacccacttttttctaatgaaaaacaggatttttctatatccacattgtttcacaattcattttgtgacttaacaatatatcctgatctcttttcagaccatgcagatctacctgctttttgaaaaggttgtgttatattccattgcatgaaccactgattttattcatgcctctactgatgggcattgaaatgatttatcaattgctttaattatttattgttgtgtcaaattacttagtttaaagctgtttgtacatgtgtatttacagacttgtatcgttattttcctaggtttcatttccaacatttagacggctctcttaagtggaatgaacattttcctcccaaatttatgtttctatttcaattcctgtcaac

SEQ ID NO: 760082 - DNA, 592 bp, Homo sapiens
ttaaattgtggtacatctgtactaaggaatactactcaacaataaaaaggaatgaacccttgatacatgcaacaacttggatggatcttcagggaattatactgagtggaaaaagccaatccccaaagtaacatactgtatgaattccatttatacaacatttctgaaatagcaaaattgtagaagtagaggacaaattagtggttggtaagggataggggtgagtttcaagaaggaagtagatatgggtacaaaactgcaacatgagagatccctggtgggggatacatgaatctacacaggtcatacacacacacacacacacacacacacacacacrcgcacacaggaatccaggtaatactggagaaatctgaataagctttgtacatcagatcaatgtcaatatcctgattacactattattctatagctttaaaaaattttgagatcacgccactgcactccagcctgggtgacagagtgagactccgtctcaaaaaaaaaaaaaaaatttttactatgggtagaagctgggcaaggtgttcaagaaaactccataatttcttacaactgcatgtgaatctctgat

SEQ ID NO: 760083 - DNA, 408 bp, Homo sapiens
attctttaagaaagaaaaatcaatgaaatttgtaagcttttagcaagactgatgagtacaagaagaaagaagaagataccaatgagatacatgatattatgacacaacttgcagcaattaaaaatataataagcaaatactaaaaacttgtgtttataaatttgacaagtgagaaggatgaaccagtccttcagaaaccataaataactaaaattcaactaaaataaaaatagactatctgggccaggtgtggcrgctcacccctgtaatcccagcactttgggaggctgaggtgggcagatcacttgaggtcaggtgttgataccagcctggccaacatggtgaaactccacctctattaaaaatacaaaaatttacctagcatggtgacaagtgcctggattccca

SEQ ID NO: 760084 - DNA, 613 bp, Homo sapiens
actgacttggagccctcagtttatgggattccaaatgctctggcatcacactcattggcccttgacttgttttccacagaggtgttgttagcacgctagcagtcactccccactgccccatctcagctctacacagacactaatctgctttctgtctgtatagatttgcctattttggacatttcatataaatggaatcatacaatatatgtgttttttgcaactgacatttttacttgggacaatgttttcaaggtccatccatgttgtgtagcacgtgtcaatacttcatttaattttatggcgtaaataacattccattatatggaaatgccacattttgttcatccgtttagcagttgatgaatattkcacctgtttctacttttgggctattatgaataatgcttttgtgaacagctgtatccacgtttttgtgtagagaagtacgctataatttacaattagtttttagaatacaaatggtaacctttccctatctgcatggcacacttgcttatccatgaatgttactgaagtccatttgaatcctttaaggtaaaatggatgaggatttctagtttaacccttatgcttttgagatttaaaaaac

SEQ ID NO: 760085 - DNA, 638 bp, Homo sapiens
agatataacttataccttgaattttgttataattaacttctagctttacttattttctctccaatgcatatataatggtgttaattatgacaaaattatatatattgtgtgtgttctgactgctctacctaccagctattcccccatctctccttctcctcagatcttcctatgccctgagacaatccctgaagaaaaataatgaaattaggccaacttataataacccgcccgtggcctccaagtrttcaagtgaaaggaagagctgaatgtttctcactttaaatcaaaagctagaaatgtgtatgcctagtgaggaaggcatgtcgaaagctgagataggctgacttgtgtcagttaacaaagtagtcaaggaaacttcacaaaggagagttcttgaaggaaattaaaagtgctactccattgaacacatgaatgataagaaagtaaagcaggcttattgctgatatggagaaagttttagtggtctagatcaaagatcaaatcagccacaacattccagtaaatcaaagcctaatccagagcaaggccctcactcttttcagttctatgaaggcggagagaagtgaggaagctgtagaagaaatgttcgaacctagcagaggttgattatgagg

SEQ ID NO: 760086 - DNA, 638 bp, Homo sapiens
agatataacttataccttgaattttgttataattaacttctagctttacttattttctctccaatgcatatataatggtgttaattatgacaaaattatatatattgtgtgtgttctgactgctctacctaccagctattcccccatctctccttctcctcagatcttcctatgccctgagacaatccctgaagaaaaataatgaaattaggccaacttataataacccgcccgtggcctccaagtgttcaagtgaaaggaagagytgaatgtttctcactttaaatcaaaagctagaaatgtgtatgcctagtgaggaaggcatgtcgaaagctgagataggctgacttgtgtcagttaacaaagtagtcaaggaaacttcacaaaggagagttcttgaaggaaattaaaagtgctactccattgaacacatgaatgataagaaagtaaagcaggcttattgctgatatggagaaagttttagtggtctagatcaaagatcaaatcagccacaacattccagtaaatcaaagcctaatccagagcaaggccctcactcttttcagttctatgaaggcggagagaagtgaggaagctgtagaagaaatgttcgaacctagcagaggttgattatgagg

SEQ ID NO: 760087 - DNA, 638 bp, Homo sapiens
agatataacttataccttgaattttgttataattaacttctagctttacttattttctctccaatgcatatataatggtgttaattatgacaaaattatatatattgtgtgtgttctgactgctctacctaccagctattcccccatctctccttctcctcagatcttcctatgccctgagacaatccctgaagaaaaataatgaaattaggccaacttataataacccgcccgtggcctccaagtgttcaagtgaaaggaagagctgaatgtttctcactttaaatcaaaagctagaaatgtgtatgcctagtgaggaaggcatgtcgaaagctgagataggctgacttgtgtcagttaacaaagtagtcaaggaaacttcacaaaggagagttcttgaaggaaattaaaagtgctactccattgaacacatgaatgataagaaagtraagcaggcttattgctgatatggagaaagttttagtggtctagatcaaagatcaaatcagccacaacattccagtaaatcaaagcctaatccagagcaaggccctcactcttttcagttctatgaaggcggagagaagtgaggaagctgtagaagaaatgttcgaacctagcagaggttgattatgagg

SEQ ID NO: 760088 - DNA, 638 bp, Homo sapiens
agatataacttataccttgaattttgttataattaacttctagctttacttattttctctccaatgcatatataatggtgttaattatgacaaaattatatatattgtgtgtgttctgactgctctacctaccagctattcccccatctctccttctcctcagatcttcctatgccctgagacaatccctgaagaaaaataatgaaattaggccaacttataataacccgcccgtggcctccaagtgttcaagtgaaaggaagagctgaatgtttctcactttaaatcaaaagctagaaatgtgtatgcctagtgaggaaggcatgtcgaaagctgagataggctgacttgtgtcagttaacaaagtagtcaaggaaacttcacaaaggagagttcttgaaggaaattaaaagtgctactccattgaacacatgaatgataagaaagtaaagcaggcttattgctgatatggagaaagttttagyggtctagatcaaagatcaaatcagccacaacattccagtaaatcaaagcctaatccagagcaaggccctcactcttttcagttctatgaaggcggagagaagtgaggaagctgtagaagaaatgttcgaacctagcagaggttgattatgagg

SEQ ID NO: 760089 - DNA, 511 bp, Homo sapiens
tgcagagttgcagtaagtgaggatcctctagattctggaaaatatttaattcccagcaactaggacttaccattgtcctctctctcctacttagatttgggaaaccaccagcttttgttataaaagcttaaagtgatcatgttttccaaattaactaggaataaacatattttaaaactcagtgatcctcaatttatgtgaagtgagttggaataatgtatgttaaacatccctgggccggaagagaggatggaatttaagtagttttattttcattattacaactatgtgaggtagttatgctaaaggtttgtgtacgttttcatactgactccttacaaaaatcattaatggtaggttcatataactcaggcacaaggacactagatgatggcctcagggtattagcttttcctgatccccgtatatacatgctactcatactgccatactctgcaccctttgcaagtcctgacgatcaaaacaggastaaaagccctaacaaaacttt

SEQ ID NO: 760090 - DNA, 594 bp, Homo sapiens
actcacatggctttccttctccccagattaataccctggcctgccaggagattcaattcaatgtttatcaggaacctagtctgtatagatgttagacactcatctgcatctattatttagctccctaaagagcttcactggtcttcactctcttctgtgtgcatggggctcagaagggcacttacagagaagagactaatgtatgggaattcattccatttttattggaaaaacagttmttctctaagaaaagatttttttaagcaaaagtgagaaaaatatgaatagaaatcataaaagtgtacagtctgtgaatgaacccctaataaaagttagctttaagtgtctaaaaggcttaaaaacacatttccctaaagaatactttttattgaatttttactttttcagtaaaaaccccagagccacattatcaaaagtacctgaaattaaattttatttctaccacactcaattataatgtataatataaaagtacaatttattttattttattaaaaaaattcaggaacacactgttcttgcgagtggagtcggctgggcagctgagaggcagcaaagctgtgccctgggagc

SEQ ID NO: 760091 - DNA, 611 bp, Homo sapiens
aaagtcacacagcctatacaaatcactgatctggcacgtgaggactatgttcttccaattcctaggccaggccagggctctcttatgacaccaaaagaaaaataatcccttttgcattcatcttgagaaatagttgaaagagcaaggaacttgaagtgaaagacctgaagatgatttcatcatatgttaactatgtgcccttgggcatatagattccttttctggaaaacagatgttttattcatgctttaactctttatctcatgkaatatttgagaagtccaaagaagcaaataaaatatatgaaggcacccgctacaacatggagggctaggaaggtattggcgctcatcaatggaatattattgtggctgtggtattttattggcctccatttggaaaagattaaaactctaaggtaatttttgggaattaattttatcgggctatcgttactatgttttgctaatggagttgtggcatgtgcttccagataggaaaataaggaagctggatgatttgaaattttgtaacttacattcattctctttggaaaacagcatacttcctagtataaaaaagtgaaaacttgaaatgatgaatactcttaa

SEQ ID NO: 760092 - DNA, 611 bp, Homo sapiens
aaagtcacacagcctatacaaatcactgatctggcacgtgaggactatgttcttccaattcctaggccaggccagggctctcttatgacaccaaaagaaaaataatcccttttgcattcatcttgagaaatagttgaaagagcaaggaacttgaagtgaaagacctgaagatgatttcatcatatgttaactatgtgcccttgggcatatagattccttttctggaaaacagatgttttattcatgctttaactctttatctcatgtaatatttgagaagtccaaagaagcaaataaaatatatgaaggcacccgctacaacatggagggctaggaaggtattrgcgctcatcaatggaatattattgtggctgtggtattttattggcctccatttggaaaagattaaaactctaaggtaatttttgggaattaattttatcgggctatcgttactatgttttgctaatggagttgtggcatgtgcttccagataggaaaataaggaagctggatgatttgaaattttgtaacttacattcattctctttggaaaacagcatacttcctagtataaaaaagtgaaaacttgaaatgatgaatactcttaa

SEQ ID NO: 760093 - DNA, 426 bp, Homo sapiens
cagtactaaatgattcttaaatgtggcagcatagtctttaaatatgaggacgctacgggggactgaaacaacacaacttccgtgaattgactagattaacagattttgggttataatattggcatttatagctaagacaaatttattctgtctttgctgaaaggggaataaaaatatttacctagccatcttagcattcttccttttacaaaaatgtttatacrtttcatagcaaaacaattttgataatgtatttattcacctcctgaccttgtcttctagttatttaaataaactttttgaaaaaaatgaatgaattttacattataaacctgaacgttctctctcaaaatatggaattatgtaagccagactgaacattctacttgtgaaaatgatgaatagaaaatgtatgattgtatgtgg

SEQ ID NO: 760094 - DNA, 510 bp, Homo sapiens
cataagataaaggaaatttttttatacatagaaaacaaaacattaaagaaatagcaatgttttatacaaaactatcatttgaaaaacccataattctttttcatcagtttactcagtaacatgtgattaatacttgttctgattgatgtttgattggcagctcaataaaccaattagtttcttcattagagttctgataattcttactcagtccaaaggtaggatgttaaagctataagaagactgtactactggccaagtgtggtggttcacacctatggtccaatgttttgagaggctgaggtggaaagattgcttgaggscaggcattcaaggtcagcctggaaaacatactgagatagggtctcttttaaaaaaattaccttgtactactcatagtcttttccatgaatctctttgaagacagagtagctactaaggcttttcaaaaagcataagagtaaagcaattaactgtctctggatgacaaaagatttaacatgaccattg

SEQ ID NO: 760095 - DNA, 494 bp, Homo sapiens
cggggctcctacagctgggcatccggccgcagtccctctctcaggatccctccaccctccgcctcccaacagttcgggcttttgtgtacgctgtggctgctgcttctgctgccgaagcttggcattggagacacctcgtcctcctctcagcacagatccatgaacccatckgcagcggcggtgagcgatgccttccctctgtcacaaggcgccgcctgcagagactgccgcgtccgccacgcccagagagtacccgcagctcagcgccgagttactcctgctggcggtggccacggagtgactggagtcgccggacacccctggggagcacgcgaaagaggagctgcagccaccacgtcctctctttccccacggatgtgcacaaataccatgaaattatgactcctcatcctaagaattaccaatgggaaaattggggtctataaaatgtggccatcattttagcccaccgggtccccaatagctgtgtgtag

SEQ ID NO: 760096 - DNA, 662 bp, Homo sapiens
ttatttcataatataaccacgttaattcatataaaaatataatgattgaaatgagaattttgaaaatctttattttcaggtaaaatcaactttggggtaagatgattcatgtatatgtctcacagttccccacctccttggcacaccatcccgtatacctcaatgcattcaggactctgtytgcaagccaggagcatagtaaaggcctaggacagcctccagaaaacttcatggggaaatcaatggttgtgccagcaagacagagcaaggtatttgatagctaccaagaggacaaagcctgaaaagaagagtttcagtccttgaaagttctagaaagagtagggcaggtccctaagactttgagcaacgggggtgccaagttcggtatcagggcagcgacagccataagaatcaggaaaccaaactgggagatgattacatcaatagcccccaatgagtcacacttcctaggactcacatctatggagtccctctccttgaaagtgagccacccttgtgacctggcagaagtgatgctgtgctagttccaagactagcctaaaaaaggcctgggacttctgcgtttgcactctggaggaaggcagccataatgtaaggaatacgactaccctggaccactttgctgtaaggaagcccacgct

SEQ ID NO: 760097 - DNA, 560 bp, Homo sapiens
ttttaaaaacttttagattcccaggcaagatggccaaataggaacagctctggtctgcagctcccagtgagaccaatgcagaagacgggtgatttctgcatttccgactgaagtacccaattcatctcattgggactggttatacagtgggtgcagcccacagaggccaagcagaagcagggtggggcatcgcctcacctggaaggtgaaaggggtgggggaactccctcccctagccaagggaagccttgagggatggtgctatccagcccasatactaggctttttcccacagtcttcacaacccgcagaccaggagattccctcgggtgcctacacaagggccctgggtttcaagcacaaaactggacagccatttgggcagacacggagttagctgcaggagttttttttcataccccagtggtgcctggaatgccagcgagacagaaccgttcactcccctagaaagggggctgaagccagggagccaagggggctgaagccagggagccaagtggtcttgctcagcagatcccacccccacggagcccagcaag

SEQ ID NO: 760098 - DNA, 540 bp, Homo sapiens
cacttatataacctcttttcagaggggtgggggagatggggaatataggtagttcagtagaggggcattaagtgatgatttaggtgaataaatggatgggggaacacagattgacttgcaaatagttttctttggaagttaaatgaacctgagagacagacattattttgcaaaaggattgggcctgctctggttaccttcctcaccttctttcctgcaatagataatgagataacagggaagggaagaaaaagcaattgttctcttgggggctctgggtctttatgtagattggggaaaaatctcttccaaggcctgataatctctaagagtttttattttatttatttatttattatttwatttatttatttatttatttatttatttatttatttatttattttcagacagggtctcactctgtttgttgcccaggatggagtgtactggctcccttgaggctcattgcagcctccacctcctggatcaaaggatcttcccacctcagcttcccgagcagctgggataacaggtaca

SEQ ID NO: 760099 - DNA, 540 bp, Homo sapiens
cacttatataacctcttttcagaggggtgggggagatggggaatataggtagttcagtagaggggcattaagtgatgatttaggtgaataaatggatgggggaacacagattgacttgcaaatagttttctttggaagttaaatgaacctgagagacagacattattttgcaaaaggattgggcctgctctggttaccttcctcaccttctttcctgcaatagataatgagataacagggaagggaagaaaaagcaattgttctcttgggggctctgggtctttatgtagattggggaaaaatctcttccaaggcctgataatctctaagagtttttattttatttatttatttattattttwtttatttatttatttatttatttatttatttatttatttattttcagacagggtctcactctgtttgttgcccaggatggagtgtactggctcccttgaggctcattgcagcctccacctcctggatcaaaggatcttcccacctcagcttcccgagcagctgggataacaggtaca

SEQ ID NO: 760100 - DNA, 533 bp, Homo sapiens
ttaatctgatagattagtctcagttggcctgaagaagtctagctcagaaggacatttttccagccctgaagaagaatatgcctgcttccccatcacccctaaggggatgattctaactctgttggctgtggcacctttgtgtacacgtatcatcacttgtttttttgtttttttgttttttttgagatggagttttgctcttgttgcccaggctggagtgcaatggcataatcttggttcacagcaacctccacctcccaggttcaagcgattctcctgcctcagcctccagagtacctgggattacaggcatgtgccaccacgcccggctaattttctatttttagtagagacggggtttctccatgttggtcaggctggtctcraactccagacctcaggtgatccgcccaccttggcctcccagagtgctgggattacaggtcctcacttgtttttaatttactcactgagtgaccgtaaacttcttgcattaatttcaatgctttctctttttttgctttaaaattgta

SEQ ID NO: 760101 - DNA, 647 bp, Homo sapiens
agttttccatgcaattctaatactttttgcattttgtcatatcaattctgttttttttttggagatggagcctcactgtgtcgcccaggctggagtgcagtggcgcgatctcggctcactgcaacctccgcctcccgggttcaagcaattctctgcctcagtctcccgagtagctgggattataggtgcccaccaccatgcctggctaattttttggtatttttagtagagatggggtttcactatcttggcaaggctggttttgaactcctgacctcgtgatccacctgcctcggcctcccaaagtgctrggattgcaggcgtgagccactgcgcccggccatatcaattctttttaatctttcagtgtaatggtagttcaaacagaaattcatgctttttgtgtcttaattattgttccacttaatacttttgccttgaattctattttgtcttgtgttcatattgtcactctctccttttatttttatcttcttgagatacaacatatctggttgttttgagaggtagtatctcattttttctcctcaatctgagagactttgtctttaatattggggaggtcaattcatttatgatgatcatcataaaagataagctcagttctacttgtgccttcttatttt

SEQ ID NO: 760102 - DNA, 561 bp, Homo sapiens
tatttactcgaggatccagtccagcctcatcgatttctagggttacatgctccccttttttccagcgaggatcaaaggggttggttattactagttctaagggtttacactgaccactggtacaggaaaggccacttttccctttctgaaggtggacaggatcctttttattatttatccaagtagcctaaatgacacaagactagtatctacattcatttccacacagtcctaattcatgaaaaatgtaattattttctgccatatagcctctttcctaattaagagaactacatcctattcctaacttattactattaatgacagcacaggcatcaaacttcaaggtgacttgtttgggcaccccttttacttttgttttggctaacactttactcgtatgatttatgagyccccaccattcctcagtccttaatcttatttcaaaaactgtggtcattggaggctcagatgggtcataacacacatcaggttggtgatttcctgggctacataccttgcatagaatagcattatacaaatatgtttctttttagagtc

SEQ ID NO: 760103 - DNA, 583 bp, Homo sapiens
caatcatttttttaaagtgtgactagaaaaaagtaacatgctaaaattttcctttataagtatttgggttcaaacagcttaataaacatgtcctagcaacttaatagagatttttaaaataaagataaaatactacaaatattttattttatattattcttaaataaccataatttcttattatgggatgattacacaatttcttaattatgcaattatattggaaatagtcacctacattgccacttctgtattttcctgtcgtacttcctttttttaaggaattttaattttaaaacagttttagatttatagagaactgtgagaagataagaaagtttcttataagcctaaamctagtttcctatattattaacatattcttccaagtgtggttcatttgctataattattattaatttaagactatactcggattttcttagtttttacctcatgttctgtttctatcccatgatcacattgacttgtcatgtctctctcggctcctcttgactctgaaaattcatcagatttttctttgtgtaatgactttgaccacctatgaggagtactgtacaag

SEQ ID NO: 760104 - DNA, 617 bp, Homo sapiens
gacctagaaggcttcaatcacttttatttttatcacttttatctgtttctctgtctcttggtcccaatcacaggtcttatctgaaaagtagaataattatcatagctggggtttcttctaataaaaacaatgataaatgtaagttctatttattgcccttttatgaagttgtctgtagaagacagaataataacaaacaattaatgtatttccattataacattaaaatggctttaaaatttggaaatttggtcagtacttatttcaactagttataatttgatatgcattatataaagatctgataactatttctaggaacatactttttctttatagcattctaattttgcagcatggaatatgtggcaaataggargtaggatatactttattaattattatttaacaattaattttgcacaaattggttgaaaaatacataaatataaatgttaaatacacaaattaaataattaaactagaatatagtggttctatcattgcagtgattcttgtttacttttctgtaactacttacagatgaacatacactgacactcacattcctatgtatatatggtcacttaatatttagcctacaaattaaattcaaa

SEQ ID NO: 760105 - DNA, 554 bp, Homo sapiens
tttggaaacataactttcaggatcctgcaggccctttaaattataattctgtgttcaaggcttgtcttctccaaaagcagatggaagttggccatgacttacaatcatcattgaaatcatgaacctaaatcttacactctccacactccttatgccccctccaaatgtcccataagagctctcagttcctacttcaggaaggagggagggagggaggaacaaaagaggaagggagagaggggaawggggaatgggagaaagaagcagtttaggttacttcaaaagcagggctgggtgcggtggctcatgcctgtaatcccagtactttgggaggccaaggccggcggatcaactgaaatcaggaggtcaagaccagcctggtcaacatagtgaaatcccatctctactaaaaatacaaaaattagttgggcgtggaggcagccgcctgcaatcccggctacttgggagactgaggcaagagaatctcttgaacccgggagatggagtctgcagtgagccaagatcgcgctgttgcactccaacctgggagacaa

SEQ ID NO: 760106 - DNA, 568 bp, Homo sapiens
tcccaaggcaccagagagtaaatatttaagcttttcaggctagtaagagctcaatccccaccaccctcagcaatgtctttgaaattcaaaagcagccatggacagtaagtaaaggaatgggtgtggccacgtgccaagaaaactttattgaagatgctgaaactttaatttcatgtaagtttcacatgtcttgaagcattcttcacttgattttccccccaattgtttaaaaaatgtgaacccattcttagctcacagggctgtaatcggccagctcctggtctgtkgtgatggcctcttcatttctgcagtgatctcactatagcttaggggtgtgtccagctcggggcacctgtgttaagaggaatattaaccagcgaactggtatgccatcagtctggtgccaggatgggaggaatgttgaaaaacttggggccgtagatcctgaggaaagaaaatttgggattagagggcaagagcaaagtggaatgaaacctgccatcaaataggtgatgggctgcgggagggggatcccggtctcagatgcagcatggccaggtaggacaag

SEQ ID NO: 760107 - DNA, 558 bp, Homo sapiens
ataatgtgtattctggtgttgttgagtattctataaatgccaattagttcctgttagttgaaggtattgttcagtcttctatatttttgcctattttttgtctagtaactctatcagttgctgagagtgtggtgttgaagtccccaacagtaattgtaaacttgtatatttctcccttcagctctatcagtttttctgtttgaattgctataatagaatacctggtacttgccaatttatgaagaacaggagtttatttctcacaattctggaagctgagaagtccaaaatcaaggcactagcatttgatgaggtcctttttgctgtgtcctcagatgatggaaggcacaagggcaagagaacaaacygacttgtgccagccctttttatagggacattaatccattcatgagaggggggccctcatgatttaaacacctccaaaaaggtcctacctctcaacactgttgcacaggggattaagttaccaacatgtcaattttgaggcatatattcagatgatagcaatgtgttttgaagctctgttgcttggtgcat

SEQ ID NO: 760108 - DNA, 631 bp, Homo sapiens
ttcagactcattcataataaaaattcttagcaaactaggaataaaaagaaacttcttgaatctaaattcctaaaggacacctgtgaaaaacatacagctagggctattcttaaacatttaacccttttccctaagattgtgacaaggaaataatgtatattattagcccctctattcaacattctaccagaattacactagctagtgtaataaagaaaaagcaataaaaaacatatatattggataggagaaagtaaatttgtttgcatttgtaggtaacatgattatgtacattcgaaaccccatggtgtctacaaaacaatatactatgacaagtgaatttagcaagattacaaaaatacacagtcaatakaaaaaaaaagcaattattagcaatttttatactatcagtgaacacttagaaaatgaaaagcatagtttatattagcatcagacatatcaaatgggtagaatgagtctgttgtaagaaattaaagaagaccttgataaatggagagatatatttatggattgaaacactaaaaattgtttaaagctgcccattttccccaaattgggctttattttaatgcagtgtaagtttggtctttgttgttgttgtcattgagga

SEQ ID NO: 760109 - DNA, 567 bp, Homo sapiens
catattctttggtagaaatatttgcttaaaagtgtatttctaaagtacttctgtagctttctataaactagtgtcaatattgaagtgtggatatatgccgatttttctttgtacaccttcactaacctataataaatccttataagctatcaaaaagagattactcttttaaaggtgccatctggagtaaaattccatgactacaatagtcattctcgctacgctttcttataatttctaaagtaaatctagtagttactcaaataacatttttcctctttgagttttttttttttttttttttttttgacaggggggcgctttgttgcccaggcaggtgtgcaggggkgtgatgatggctcactgtagcctccaatcctggggtcaagcaatccttttgactcagcctctcgagtagctgagactacaggggtacaccaccacatccagctgatttttttatttcttatagagaggggggggtcactatgctgcctaggcggggcttgaacttgggggatcaagggatcctccccctttggcttcccaaagggtggcaactacagt

SEQ ID NO: 760110 - DNA, 567 bp, Homo sapiens
catattctttggtagaaatatttgcttaaaagtgtatttctaaagtacttctgtagctttctataaactagtgtcaatattgaagtgtggatatatgccgatttttctttgtacaccttcactaacctataataaatccttataagctatcaaaaagagattactcttttaaaggtgccatctggagtaaaattccatgactacaatagtcattctcgctacgctttcttataatttctaaagtaaatctagtagttactcaaataacatttttcctctttgagttttttttttttttttttttttttgacaggggggcgctttgttgcccaggcaggtgtgcaggggggtgatgatggctcactgtagcctccaatcctgggstcaagcaatccttttgactcagcctctcgagtagctgagactacaggggtacaccaccacatccagctgatttttttatttcttatagagaggggggggtcactatgctgcctaggcggggcttgaacttgggggatcaagggatcctccccctttggcttcccaaagggtggcaactacagt

SEQ ID NO: 760111 - DNA, 567 bp, Homo sapiens
catattctttggtagaaatatttgcttaaaagtgtatttctaaagtacttctgtagctttctataaactagtgtcaatattgaagtgtggatatatgccgatttttctttgtacaccttcactaacctataataaatccttataagctatcaaaaagagattactcttttaaaggtgccatctggagtaaaattccatgactacaatagtcattctcgctacgctttcttataatttctaaagtaaatctagtagttactcaaataacatttttcctctttgagttttttttttttttttttttttttgacaggggggcgctttgttgcccaggcaggtgtgcaggggggtgatgatggctcactgtagcctccaatcctggggtcaagcaatccttytgactcagcctctcgagtagctgagactacaggggtacaccaccacatccagctgatttttttatttcttatagagaggggggggtcactatgctgcctaggcggggcttgaacttgggggatcaagggatcctccccctttggcttcccaaagggtggcaactacagt

SEQ ID NO: 760112 - DNA, 472 bp, Homo sapiens
ctcaagaatagatatgtacaaaaggaatcacatgaattattataaaaatgttacctgacagcatgcaactacgtgatacctttctttctttgttcccttttcaataaatgcaggctgaatatgtaaaatggaagtctgtttacttttaaatacatgaaatttatagccattttttaaacaaaggattaaatagataagggaaaatattagaaaagactgattcattttttktaaacatgtgattgagtgttctgtgtttgtgtgtgagaaagagaaaacaaaaagaaaagggaaagaaacagatcactcaacaatttttttcagtgataatattcatcaaagacaagtacaactatacgaatatatgaatataaattattaaattttgcaatacagatgtttttattgggcacaggcagactatatctttaaattaatgcagataaaataagcgatggcacatgaaattagc

SEQ ID NO: 760113 - DNA, 577 bp, Homo sapiens
tcaaaagtgtgccaaaagtgacagtgggtaaccaagagagagataaaagatgtccggaggtgttacagatacttggaaaagaagatacacaagtagtttcagaattctgtcagcagggagagaaggctcaggttttttagctgaatagcaggaaagatcagtcccaggggaagagaactggctctgaatgaaggaagtatatataggtactaggccttgtggataggaagagacaataagaagagctagataattacagaattttatctgtcacaatattgcgtgcttataacatcaataaactaaaagtaaaatcacaaaaccaccaactttacagtaagcttctttgcaaattgtatggctttgtgtttaattaaagcttactaamgggttgggctcagatagttgtactcagaatacattttgacttctttaagcctaagataagaatgttcatcttcatttggatggcatttattacacaaacccaagaattccatgatcatatcaataaaaattaggagaatttcattaggcactataaataaccccttctcctgagacaagtagagaagcc

SEQ ID NO: 760114 - DNA, 586 bp, Homo sapiens
taaaattcccttttgggactctgtttttctttaggtaaatgcagtggttagtcatttaggtgagaaaagaggtgccagatgagacaaaggcaggagcagaacaaatccaagagctgacttgcgctgcatcagaaaatatttgtgtattctgttgtcctcctgaagggaggggaaaagcaagctaattatccatattagaacctagaggtcaagtttattgaaatgagcaagggactttgaagcacagaactrgttgcattagtctattctcccactgctgtaaagaaatacctgagacagggtaatttctaaagaaaagaggtttaattgactcacagttttacaggccgtacaggaagcatggctggggaggcttcaggaaatacatgatcatggcagaaggcaaaggggaagcaacacatgttacatggtgggagctggaggaagagagagaatgaaggagctcttttgctgagcgcacactccatgtggctgtgtgtggcatggtgtccctctcccctggtctgtgagtatatgtgactaatacactgctgttgatctcacttgtccagtgtgaagtattagt

SEQ ID NO: 760115 - DNA, 586 bp, Homo sapiens
taaaattcccttttgggactctgtttttctttaggtaaatgcagtggttagtcatttaggtgagaaaagaggtgccagatgagacaaaggcaggagcagaacaaatccaagagctgacttgcgctgcatcagaaaatatttgtgtattctgttgtcctcctgaagggaggggaaaagcaagctaattatccatattagaacctagaggtcaagtttattgaaatgagcaagggactttgaagcacagaactagttgcattagtctattctcccactgctgtaaagaaatacctgagacagggtaatttctaaagaaaagaggtttaattgactcacagttttacaggccgtacaggaagcatggctggggaggcytcaggaaatacatgatcatggcagaaggcaaaggggaagcaacacatgttacatggtgggagctggaggaagagagagaatgaaggagctcttttgctgagcgcacactccatgtggctgtgtgtggcatggtgtccctctcccctggtctgtgagtatatgtgactaatacactgctgttgatctcacttgtccagtgtgaagtattagt

SEQ ID NO: 760116 - DNA, 539 bp, Homo sapiens
tagatacctcaaataacaatttacttccaaggagtttcatttagccttatgatggttcagttttttgttccccaaaaaattttctactaggagtataaattgaatagaaaaacagatttccaaagaatcttagacaatgattaagtatagtatactgcacttaaaaaaccaatatatgagcatgagataaacacacactgtagaaaagaacaatgacctgaatggtcrggtagttaatagttagaataatcagttactctttagtttttcagaaactgattagtgttttttttgttgttgtggatgttgttgttgtccgagaaagccatcagtttttgttgtttcttttgttttaagagcaaataaacagaactgagaaaaaagtaattaagcaatggtccttaaaaaataagacaatgaaatttctaccatttttttcttttctttaaaaaacattttctatgaaaaccctgaaattccaaggatatagcatcaaaactactagtaaaaggtgaaatttttacttattagagtatttt

SEQ ID NO: 760117 - DNA, 600 bp, Homo sapiens
gtgagttacagagatagggctggagtcattatgtactgagccataattccaggtattatgcatctgtaatttctgacttaatatcttaattaatcctccttgtactgctgtgaggttcacagtcacccccatgaaaacagatgcaatcatttcctacatagaactgggttccattgccatgtctgggatggggcccacctttcccagtgtcctgtctgcaggatctccagacccaactcagaacattcctttccatcttcaaacagtctctctgatcctttttagaggaaagcattccagaaaagacttctgcatttgaggttatcatttcctcacctctcattattcttcaccccacagcagcctggctagtccggccagttgctgatacagttatgataaagtcaccasggacccatatgttgctcagataactgaagatacaattgctttttcagcagacctcaatctaggtgaccgctgcctccctcatggaagctctgctgctactcctgtctgtgcattcacagccttctttgtgcttctttctccactggacagcatataactattctatatccccacagcttgactagaggc

SEQ ID NO: 760118 - DNA, 599 bp, Homo sapiens
ggagcagattgaagatttaatccagcctggcttcagaacctagtcttagtgggtggctaaagaccattgtctctaggaactgccagatctcttttcccctgctagaaatccatttgcaaggaacacttatatatctgtcttcttccattcaggtgtcaaataatgccattggcttttttaatcactgggattttgaaacatttgcagtcctttccatggtgtggccctttctgtaattttttttcacaaggaataaaatctaatcacattgatagatgaaatacatatgttgttaataatgattatcgtagctaaaattaaaattcctctgaaagagggmaccatctttgttggataaaattttgtgatgagctcaacagggtagaatgaggtatagtgctcaaccccataaaagttgatgataaaatgccctgagtgagatagtaagaggaattttgttgtgtgcccagaaggaaagtagagcgaaatctaggaaaggagaaggagtatttatagagagaccccaaaagagggcataaatatctgaaggaatcccacacactagccctgtgtagggttttatacacagggatgtccaa

SEQ ID NO: 760119 - DNA, 599 bp, Homo sapiens
ggagcagattgaagatttaatccagcctggcttcagaacctagtcttagtgggtggctaaagaccattgtctctaggaactgccagatctcttttcccctgctagaaatccatttgcaaggaacacttatatatctgtcttcttccattcaggtgtcaaataatgccattggcttttttaatcactgggattttgaaacatttgcagtcctttccatggtgtggccctttctgtaattttttttcacaaggaataaaatctaatcacattgatagatgaaatacatatgttgttaataatgattatcgtagctaaaattaaaattcctctgaaagagggcaccatctttgttggataaaattttgtgatgagctcaacagggtagaatgaggtatagtgctcaamcccataaaagttgatgataaaatgccctgagtgagatagtaagaggaattttgttgtgtgcccagaaggaaagtagagcgaaatctaggaaaggagaaggagtatttatagagagaccccaaaagagggcataaatatctgaaggaatcccacacactagccctgtgtagggttttatacacagggatgtccaa

SEQ ID NO: 760120 - DNA, 599 bp, Homo sapiens
ggagcagattgaagatttaatccagcctggcttcagaacctagtcttagtgggtggctaaagaccattgtctctaggaactgccagatctcttttcccctgctagaaatccatttgcaaggaacacttatatatctgtcttcttccattcaggtgtcaaataatgccattggcttttttaatcactgggattttgaaacatttgcagtcctttccatggtgtggccctttctgtaattttttttcacaaggaataaaatctaatcacattgatagatgaaatacatatgttgttaataatgattatcgtagctaaaattaaaattcctctgaaagagggcaccatctttgttggataaaattttgtgatgagctcaacagggtagaatgaggtatagtgctcaacmccataaaagttgatgataaaatgccctgagtgagatagtaagaggaattttgttgtgtgcccagaaggaaagtagagcgaaatctaggaaaggagaaggagtatttatagagagaccccaaaagagggcataaatatctgaaggaatcccacacactagccctgtgtagggttttatacacagggatgtccaa

SEQ ID NO: 760121 - DNA, 599 bp, Homo sapiens
ggagcagattgaagatttaatccagcctggcttcagaacctagtcttagtgggtggctaaagaccattgtctctaggaactgccagatctcttttcccctgctagaaatccatttgcaaggaacacttatatatctgtcttcttccattcaggtgtcaaataatgccattggcttttttaatcactgggattttgaaacatttgcagtcctttccatggtgtggccctttctgtaattttttttcacaaggaataaaatctaatcacattgatagatgaaatacatatgttgttaataatgattatcgtagctaaaattaaaattcctctgaaagagggcaccatctttgttggataaaattttgtgatgagctcaacagggtagaatgaggtatagtgctcaaccccataaaagttgatgataaaatgccctgagtgagatagtaagaggaattttgttktgtgcccagaaggaaagtagagcgaaatctaggaaaggagaaggagtatttatagagagaccccaaaagagggcataaatatctgaaggaatcccacacactagccctgtgtagggttttatacacagggatgtccaa

SEQ ID NO: 760122 - DNA, 524 bp, Homo sapiens
tgtagtttagagcagaagggcacgggatcccactcctaagtcctgcagtaaagtggctgtgtgtggcctggtcaagctgcccactgtggctgggactagggttcctcctttaaaatacaaggggacttaaactagaagcggcgtggagaatgactagcaccccagctcagcaccctgrtggcttcccatgatttactcctccaacttctcggcagctccgagacacaggcaagtggactgagcagcttaactttacagatggcggcaagagcgtggctctcatgggagggggtgacctatctttgagctcagatctcttgacctgtggggtctaaaaaattaccaagacaagcctgggggagtgggccccagagaaggagggtgacccacaagtaaacaggagaagtggggtgtctttctaactaaccctcttatcaacgttcagagtatttgccctcaaatggttaaccaaagtgacacccaaggcagaaacgggcctggaaaggtccctgatgcacagaggc

SEQ ID NO: 760123 - DNA, 524 bp, Homo sapiens
tgtagtttagagcagaagggcacgggatcccactcctaagtcctgcagtaaagtggctgtgtgtggcctggtcaagctgcccactgtggctgggactagggttcctcctttaaaatacaaggggacttaaactagaagcggcgtggagaatgactagcaccccagctcagcaccctggtggcttcccatgatttactcctccaacttctcggcagctccgagacacaggcaagtggactgagcagcttaactttacagatggcggcaagagcgtggctctcatgggagggggtgacctatctttgagctcagatctcttgacctstggggtctaaaaaattaccaagacaagcctgggggagtgggccccagagaaggagggtgacccacaagtaaacaggagaagtggggtgtctttctaactaaccctcttatcaacgttcagagtatttgccctcaaatggttaaccaaagtgacacccaaggcagaaacgggcctggaaaggtccctgatgcacagaggc

SEQ ID NO: 760124 - DNA, 608 bp, Homo sapiens
ggtgagaaaggactctcttaacccaaggaaatatagcatgtgcaaagttcaagaggactgacacagtcttctgggctcaggtatgaattctgctcagtcacttgccttcagagattttctattttgcttggatttagtactctagactttgggatcggattattctcgcaacggctagacttgcctgactagctggattcgtatctcctgtaggacacagagcatggtatgggacacaaagaaagtgtttggtagcagagcaactggaaacttttggattttcactttcaaatataaaaatcagcacagtcaayaccaccttcttattgggtacttaccaccttcttattgggtactaaatgaagcactgtaaagttaacgtttattagacataggacccttttcatttcaaatggagtaagatgacactcatttgggagaatttagggaaacaccagtctgaatagtagaggaattgaatgagctacagtaacaaaactaagatagaaatgtcgcctattaggagtccttagggagctacaattacgaatatttaacgatgacttatttcctgtaacaattatttgtgagtgagtgctttggatgtg

SEQ ID NO: 760125 - DNA, 554 bp, Homo sapiens
aacacaagtggaatcaatgtggattttgtgttcctactaaagttaaaaaaattgatagacaaaaactactatataaatagaagaaacagaagacaattaaatggggatattaaagaaaacttacatcatgttctcattcacaaggattaaatttttaatcccctaatcaagtggtataacactgtcaatawagctgactgacatagcattgatccaaataaatcacatataacttaagttccataatgggaaatactatttatacaatcacaagttgtgttaaaaaaaaaaaaaagataaagagagagagttctctttatggacattatatagtattattggccttattttctaagactttggcaaattaatgagtaacttgatagcatgcaatagatttttctttaaataaatcagttaatgtgaacaactaagtttttgtttataaagttgaatatttaataaatggttgtaaatattcctctttaggataagaataactattcatattaattcatccaaagttcagcaaattattatagttcctatcttgt

SEQ ID NO: 760126 - DNA, 633 bp, Homo sapiens
acgcaggttgtttaacctttagcatgtattgcactttgaaataacttgtcaacattgaaatattagaatatttcatttaaaaatgaggattctttagtttcccttaaacactggaaaagtacaatgctgggcacatgtaattttatgagacttctaggctactggatggtatccttacctctggagtttgggcagggaaaggaagacccattgtaaagtggagtcccacagagtaaaacctatttgaaatgtcataaatwaattaaagtcatcatattttatcttttattccattttatacctttattatagaacttaatcagtagaattaatatgttattttgtggctttaggtgctgctagcatattctatgctgaataaccatgaggatagacacagcccaggtaagaaagaaaatactaaattaatagttttttaagcaaacaattatgattggaaatatggacgaggagacaggaccattgctttaaactatcagaaattttcttgcctctcaacaattacctgttgctctaacactgtttctaaactatcactggtacccaaggaaattataaaacccaatgttcagcaaagtattcaaagtggaaaaaacaatgcctccataataa

SEQ ID NO: 760127 - DNA, 646 bp, Homo sapiens
aggatatacaggaattgaactcagctctccaccaagcggacctaatagacatctacagaactctccaccccaaatcaacagaatatacattcttcccagcaccgcaccatacctattccaaaattgaccacatagttggaagtaaagcactcctctgcaaatgtaaaagaacagaaattataacaaactgtctctcagaccacagtgcaatcaaactagaactcaggattaagaaactcactcaaaactgctcaactacatggaaactgaacaacctgctcctgaatgactactgggtaaatartgaaatgaaggcagaaataaagatgttctttgaaacccacgagaacaaagacccaaattccactttttaaatgagaataatagtaatacctatctcaaaatcgtgagagttaaataaattttctaattaatatttcattgtgttcttgcattaatatcttatttcatacagcaagaataagcaggaagaacacatagcagggatagattctcttaaaattttatgtaatatataaatagctattatttaatgagtgtgtactgtgtatcacagcatatcctcagttttcacctgtgctaacatttagttctcaaaagattgcaaacagatattgataacttc

SEQ ID NO: 760128 - DNA, 643 bp, Homo sapiens
tcctttcttcttctatcagttaatttttgggattttcccatgaagctatatatgtggcattgttgctaaagaggttggaaatatgaaagtatgggacaattactcgtgattatgaggcaactatttacatatgtcttctgcagcagatcaggctagtgtttgactgtaccactaccaacacgcaagagactgttgctatgtctgcttatccttaagccttttgaaattagatgacatatggctacccacagttgtctagtcaattagtgtgttatcaggggatcaccctctacatagataccaataactttttagagaagagaaagtagttcttctgagatagatatcacctcctttcaagacccaggggtctatgctgcaacgttcctgacttcagatgtcatcattatttatcatagatacckctagcaggattgaatctatttggtcttaagacgcaggtgattttttattttattttattttttttgagacggagtctcactctgtcacccaggctggagtgcagtggctctatctcggctcactacaagctccgcctcccgggttcacgccattctcctgcctcagcctctcgagtagctgggactacaggcgccagccactatgcccggctaatttt

SEQ ID NO: 760129 - DNA, 528 bp, Homo sapiens
aataagggtagtatctggcatataagtacttagttattaaaactactatcctaggtcatttaatttgaagaatggtaaataattgtcagagatgtatagagctgttggtagaattgaggctaacatcatttaagccattctgggatcattaaagcctcagggatggggaacacaggaatgggatgagaaacctcttagctaaatgttaagtctacctttccccttcccaactcgtctgaaaaatttgatgctgaactgaaagggtgtgtgaaagggcctatgtaatattgaggaagaactaacasatattgtgagaaaggccatcttagctcatacatattctgtaggtgaactctgtgcctttctcttccttgattcctctctccttcctattttaaaaatttactcaagtgattcatgaatactcgaattaattttttttttttttttttttgagacagagtttctactctgccactcaggctggagtacagtgttatgatcttggctcactgcaacctcagcctc

SEQ ID NO: 760130 - DNA, 528 bp, Homo sapiens
aataagggtagtatctggcatataagtacttagttattaaaactactatcctaggtcatttaatttgaagaatggtaaataattgtcagagatgtatagagctgttggtagaattgaggctaacatcatttaagccattctgggatcattaaagcctcagggatggggaacacaggaatgggatgagaaacctcttagctaaatgttaagtctacctttccccttcccaactcgtctgaaaaatttgatgctgaactgaaagggtgtgtgaaagggcctatgtaatattgaggaagaactaacacatattgtgagaaaggccatcttagctcatmcatattctgtaggtgaactctgtgcctttctcttccttgattcctctctccttcctattttaaaaatttactcaagtgattcatgaatactcgaattaattttttttttttttttttttgagacagagtttctactctgccactcaggctggagtacagtgttatgatcttggctcactgcaacctcagcctc

SEQ ID NO: 760131 - DNA, 528 bp, Homo sapiens
atcttagctcatacatattctgtaggtgaactctgtgcctttctcttccttgattcctctctccttcctattttaaaaatttactcaagtgattcatgaatactcgaattaattttttttttttttttttttgagacagagtttctactctgccactcaggctggagtacagtgttatgatcttggctcactgcaacctcagcctcccaggttctggcgattccctakcctcagcctcccgagtaactgggactgcaggtgtgcgccaccatgcctggctaattttttttacttttagtagaggagggggttcatgttggccaggctggtctcaaactcccagcttcaagtgatctgcccaccttggcctcccaaagtgcagggattacaggcgtgagtcaccatgcccggcttgaatttttaaaaatttttaaagaatattatcagcttacgtaatcttccagacttttaatatctgtttacatattttttgttttgccacttgatttttcacgtaacagtttctaa

SEQ ID NO: 760132 - DNA, 511 bp, Homo sapiens
gcataggacaaccccctccataacacaacgaaaaattatcctgtccaaaatgtcaatagtctaaaatctatctggagatagagcaatatccatgggcaaagtcccatgccaggcacaaaaatctatagtgaaccaccttcttactacacactgtatggaatgaaatgagaatatggcttaaagtaaaaagactgggtttgaatatgggcctgtcccttactgtgtgttcatgggcctctcgtctacctccaatccatatactgagtatgtcccagcacacaaagtgtgattccttggaagctgctcacatamtttccatgagcagcccagctcatgggaaaggaagatgtgtgtctcagtttccccactactggctgggtcacagcacatcgatcccgctgctggcagagggaaaacctggcagccagtgagctgcacacatgcctattcacaggacagaggtcccaggcacctctaaaagtctgcacttaccccataagtattcatgtgt

SEQ ID NO: 760133 - DNA, 506 bp, Homo sapiens
atgagccaccacgcctggccagataataattttttatataaaattttccgccgggtgtgatggctcacgcctgtaatcccagcactttgggaggccaaggcaggtgatcacctgaggtcaggagtttcagaccagcctggccaacrtggtgaaaccccgtctctactaaaaatacaaaaattagccaggtgtggtggtgggcacctgtaatcccagctactcaggaggctgaggcaggagaatcagttgaacctgggagttggaggttacagtgagccaagatcgcgccactgcactccagcctggacgacagagtgaaactcagtctccaaaaaaataaataaataaataaataattttccttgttcgagttactagtgttgtttccatgtcctgtctggaccctgatggatacatagttcctgcttatggtctggtgggacgcagcagtaaaggatccaaagcacattataatctatgaagctctgcaaaacttcaggaattat

SEQ ID NO: 760134 - DNA, 506 bp, Homo sapiens
atgagccaccacgcctggccagataataattttttatataaaattttccgccgggtgtgatggctcacgcctgtaatcccagcactttgggaggccaaggcaggtgatcacctgaggtcaggagtttcagaccagcctggccaacatggtgaaaccccgtctctactaaaaatacaaaaattagccaggtgtggtggtgggcacctgtaatcccagctactcaggaggctgaggcaggagaatcagttgaacctgggagttggaggttacagtgagccaagatcgcgccactgcactccagcctggacgacagagtgaractcagtctccaaaaaaataaataaataaataaataattttccttgttcgagttactagtgttgtttccatgtcctgtctggaccctgatggatacatagttcctgcttatggtctggtgggacgcagcagtaaaggatccaaagcacattataatctatgaagctctgcaaaacttcaggaattat

SEQ ID NO: 760135 - DNA, 561 bp, Homo sapiens
aattccattaccatgagataatcactttttgtgaatcacttttcagtttctcatgtgtgtatttatagacatatatatagacatatatttacatatagacatctatatttataataaactcaatcatactgaaaatacaattttgaatagtattccctgggttttattatggggttttcatagtttttaggcttccatcttgagttgatttttgtatatagtgtaaagaagggatccagtttcaattttctgcatatggctatccagttatcccagcaccatttattagatagggaatcctttccccattacttatgtcaggtttattgaagatcasacagttgtaggtgtgcagtcttatttctgggtcctctgttctgttccactggtctatgtgtctgttcttgtaccagtatcctgctgttttggttactttagccctgtagtgtagtttgaagtcaggtagcgtgatgccttcagttttgttctttttgcttaggattgcctaggctatttgggctcttttttggttccatacgaattttaaaatagttttctcta

SEQ ID NO: 760136 - DNA, 616 bp, Homo sapiens
catttccccaacagctaatgatgatcttttcacatgcctatttgccacccatctttctctgaagaattgcttcttttccccattgttttgttttcttattgttgtagtgaaaatctttatatattctgaacacaaatcctttgttggtatgttttgcaagtacagtatttttccccagtatgtagcttgtctttcccttctattaagtgtcttttgcagagcaaaatttttaaatttaagatttttttttttttttttttgagatggagtctctctgtcgtcacccaggccggagtgcagtggtgatctcggctcactgcaacctgctgcctcaccagagtcaagtgattctattatatcagcctcccaagtagctgggattacaggcgcacgccaccaagcccgactaatttttgtatttttagtagagagggggtttcaccttgcaggccaggctgrtctcaaactcctgacctcgtgatctgcccgtctcggcctcccaaagtgctgggataatagacatgattcattcttatggattgtgcttttcatatgtctaagaactatggcctaacccaagatcatgaaaattttctcctgttttctattagtttta

SEQ ID NO: 760137 - DNA, 500 bp, Homo sapiens
atcactactgagaaaattacaaattataatcatgtgggatcctcacaccagaatagaaaacatgagaatagattataagaaataataagaaaaacaattgggatttttcccccagaaatctgggggcaagtgttgcaatgagaaaacataaagttactgattattgtattttattatcaamtatcatcttaagtcatattgaaaatgtggccatctgttctccagtgtcttcaaaatctaatagcccaatcccaatcctttcaaaaacattctaaaaacaaaggatgaaaattatttatattggtagagatagatactttaattgaaatcagtttataaatatgtaacatttgataaacaaatctgaacacataaaccatttttaactattataaaattattgatttctgcctccaaaattccagcgaaattgtccctaagccactaatcccatggttctattggtttatggcctgtttgagacatttttcttctctttt

SEQ ID NO: 760138 - DNA, 621 bp, Homo sapiens
ttttaacttggattattgctttcatttctgaaattatgctttttttgagaagcaagtacaagacatgagcatgtggcttttcaacttgaaaatgagaaactgggaatatgagagtagtctcagttactgaaaatctgtcatgggggtgaaagagttgatttttttttcctttgggatcccaataggcagaaagttttaggaaaatacatttttatttaacccaataaagacatttctaacaatgagaccagtctagaaattacaaagagctatctcacagaagtgtttgcaaggattatcgcaatagatcaggatttttcaatcacgrcagcattgacatattagatcaggtaattcttcgataggatgtgttgttctgtgtattataggatgttttgcagcatctttagccttgacccactagaaggcaatagtatcccccactgtgactgtcaaaagtgtctccaaatgtagccagatgccttttgaggggcaaaatcacctacagttgacaaccaccacattagatcgttggttgtccaacatagcttccagtgctaaagggcttcagcactttagaggccactgtgagaaaggagaatttaagcacaatagagaatt

SEQ ID NO: 760139 - DNA, 644 bp, Homo sapiens
taatatgtctccataaatccatattcagtgacctcaccttgatagtttgaaattggccacagagtggatatatttataatacagaaaccagctaccagtacaaatcaggtctttttttatccttggaaaagcagctgttaaatatttaccagatatactggttaattctcgtacttcctttaggcctcatcttcatctcctcagaccagctttccatagcatccatttaaaatagactcyttcctctcattctctttctgaattcctttttctattcttcttgaaattcttttttgtaattgtgcagttatatatgcatttatttcatatctgtttctctcactaaattaagtttcttgagagcaggacccgtgatttttttatttctgtttatttctagcacagaaatacagcatttagcatatgacaggcacttaatacatatttgttaaatatttatgatgcatttgaggaataaatggaaaatcaaaattatgagatagtatgttaagtttggtgatcaggcaaagttaaagcatggccaaaaggcactgagtttccagttacctgctaagatgtgtaattaaatttaggtgaaaactgagagtgttaattccttggtatctatttttcctgcctctttg

SEQ ID NO: 760140 - DNA, 644 bp, Homo sapiens
cttattcagatctgagatctgaaaacattccttttcctgtgagctcagctaggacaaagctcgagctttttgataaaatttgaaaaacacattttttaaagataaaaatttttaaaaattgaaaaaaaatttatagaaagagacttctaatccaaatttaacttctcaaaatatgttttgactggttagcataatgtttcagtcyttccggagaatgccccttgaaacttttcttctacacaacttcctcctttcctttgactttcctgctctggaagggaagaactggaacaggacagatcaaattactcatgaggaaggacaagaaataatgaaccaaattatcaacaattggagaaagaaagctgatatcagtatcatttcatatatgattatgtcagagtcaggtggataagccaatcctgttgaatagcatacttttcctgctactcctgaagggtaaagaggtctttctcttacaaagctgtcctagctagtaatcttacaggctcaaagagcttgttttcatgttatttcttagtaactcaaaatacctctaaagttatacgtattatgaaagtactatagtcacagtgctgagaaaaggagtaaataaggcaatgtatataaaaccacttggctca

SEQ ID NO: 760141 - DNA, 565 bp, Homo sapiens
ggggaagggtcacaggtgccttatagaatcctgtgaaagccagatgtcccccagatgaaccccagaaaatgcacacaggcaggtggactcggaactttagccatgatttcaaagactcctgcactcgctatggccagcctggctaaggaccctgayctaggggctgccttcttcctttgaggcttggggcttggtgttgagagcttaacatcacatgctatttgccctcccaaaggccagcccatctgattttcttactgtccgtgtccttcagtgggtcttatggaagtgatgtttccatatgtaaatggtttttttggaatggctgaaatcccccaagcttcggcacaggagctagactgcctcccagggtggcaggcccggtgttctggtctgtgtattgggcagagtggagccctctgggaacctcccttagcaggagaatgctgcttccttcccagccccctgctggacgaggactggtctcttcctatgcatttggccagggaacactgtgttcacagaactgggaacatgctgagttttatttctggcgtcttaacac

SEQ ID NO: 760142 - DNA, 628 bp, Homo sapiens
tgtcagccagctcttcctgcgccgagcacctcctgaacgtcaccgataaggcggggacgccagcatctaatgggactgctgggaggattgagtcccatatctgaagtcccttgagataccggcatccctgccttatggttgaaggcactgagcctggtgaagggatgtgctcaaggctgtggagctcgcacgtggctgkctgtgctgcacgagctggcagtgcctggcaggtactgcacacctcaaataccctgggaagataagagatgagtgaatgtgtggcccctgcccttgggagctgatggcctcataggagtgagatgctgaaaggagtcactggagtgaagtgacagtgccactgcggcgagtacctgtagctggtgtggcaggagcagggctggatagctttgaggagagagaaccgagtgcacagcggaggctgggcccagagctggaaggtctctgtgtgggttgggcccaggccctggagctcatcctggagctcccaggctggcagtgatgggtcggggtggtgacccagtcagtgtagcaataacagtgtgggaggggaggctgtggcagaggagacaggaagcccaaatagcagcagaggcagtccaggcaagca

SEQ ID NO: 760143 - DNA, 593 bp, Homo sapiens
gagaaaactttagaaaaatgggtgagaatagacagccctactgaatttgcactatgatttagttaggcatagttaataattataaaattaacatcatccatgtgtgtatgtgtaaaatctgattaatactcaaagttaatgagtatatggggaattgcataatctcatatgccactgatggggctgttaaaaacaaatttttgttttccaacaaaaagtccctaagcagcaaagggactaagatggatttgctcaccccacctctccctaggctagcatcctggttccctgcttctacgtgtggactggccctgagtgagtgaggctgaaccaggcagcatgggtcaggaaaactgctcaatgtaagagtacaaaacgcctgtgggatagtgtgaaaagcctggactccccggtatggactccccaggcccctggtttgaatcagagttctacagtcatctcaggacckcagcaagtcgctttaaactctgtgaacctcaggttcctcatttgtgaaatgggataacagcaccttccataacaagatctttgtgagaatgactgagctgtgaagcacctgccttgggctttca

SEQ ID NO: 760144 - DNA, 563 bp, Homo sapiens
tcctgttcaggcttttagctggcattaggggtttgagaccttggaatgttgtcaaagaaaaacacactttaaaagcccgtttccaaaagggtgacaaacgggactggatgatgtgtttaacctcatgaaatattgaactcttggatgtaaatctgcccatatcactagagatgaaagagttattcctgtttttatgtctaaytgtggaactggtgaaatttgcatttccctagaatcactgcccctgttgatagttgaaacacacagttttgaagaacagcaaatcatactctaagaggcagtagtcccctatgtcctgtcgttttccctgtttctgccttctatagacacccttgccaccactcagaaatgtttgagactttgtggagaaagtagactggtgagaatttcctcgtacttggaagggttaagcactgagtcgatctacagcaagtggcacacccagtttgaggtccacgagggtgaagtaatttatctgtgagtcatatcactgaatacactgttctatagaatgttggttagcaactcacttccaaacatcg

SEQ ID NO: 760145 - DNA, 563 bp, Homo sapiens
tcctgttcaggcttttagctggcattaggggtttgagaccttggaatgttgtcaaagaaaaacacactttaaaagcccgtttccaaaagggtgacaaacgggactggatgatgtgtttaacctcatgaaatattgaactcttggatgtaaatctgcccatatcactagagatgaaagagttattcctgtttttatgtctaattgtggaactggtgaaatttgcatttccctagaatcactgcccctgttgatagttgaaacacacagttttgaagaacagcaaatcatactctaagaggcagtagtcccctatgtcctgtcgttttccctgtttctgccttctrtagacacccttgccaccactcagaaatgtttgagactttgtggagaaagtagactggtgagaatttcctcgtacttggaagggttaagcactgagtcgatctacagcaagtggcacacccagtttgaggtccacgagggtgaagtaatttatctgtgagtcatatcactgaatacactgttctatagaatgttggttagcaactcacttccaaacatcg

SEQ ID NO: 760146 - DNA, 557 bp, Homo sapiens
gaattgctcaaatttgtctcttgtaccacacctgatgccaacaaagagctgcttaagtgtgttcggttgaaaaattgatccagaccttggcattttattattatgtccttagttctcaggttgggtcttgagttattgctgcagagcagtagtggttaaaataagatcttggaatttatcaaaagggaggtgagctggatgtggtcatccacgaggtcatggatgtggtgtgtatgcytgtggtcccagttactcatggaatgcccaagcgggaggatcacataagcccaggagtttgaggccagcctggccaacatagtgagacctcgtctctgaaacaacttaaaaaggttttttgttgttgttgttgttgtcattcagcatttcagataaggacttaagatgtaaagatattgttacaggatgatgcattgtattttctgcattgcatgaaagaatttttattgaaaatgaagtgacatttcaaaggaagttctattctaattatgtttctgcctaaagtaaacttcccagattttagaaaatgtaatctttta

SEQ ID NO: 760147 - DNA, 635 bp, Homo sapiens
gcttctcccctagcttgcccctgagtgaccctctcatgctgcccctaccctgactggccaccaggctgcagctccccttcctgcctcccatcccaacaagcccttcccctgcatccctaggtcagaccttcttggcctcatatggaatcttgtccctgagggtctcctaaatggccctggtggcctggggaagcccctcctgtccactccccatgctgctgagacccaccttctgtccacagctctgagcctcccgcacttgcctctttacctyctcaccccctctgcctccctccccggggagctccacacccccgtccttccacgctctgtactctctcaccctgggggtttgcacatgctgtccttctgcctgcaacacttttccctgccccaacctggaaaatgcctagttatccagcaagagtgactcaggcatccccttcggaactctccaaacaggtgaggctctgcaggaacacccatagcccctcatgcagtcattcattcattcaacaaatacctaccaagcactactgagtgccaagctgtgccttaggccctggggagttggtgggggggtggacaaaccctgccttcttgtaactattaagagcaaaccgccctgcccagct

SEQ ID NO: 760148 - DNA, 548 bp, Homo sapiens
cctcccctcctcccagcctctccgattcctcactctctcccactcctgatcctgccgtcctccagcccgaagctgggtatgtgcacacgtggcccatgtgtccccatgggtgggtgcaagtcggtgggtgcatgtgtgtgtgcacgtgtttgtgtggtcactgcttcacctgtgtgcacrtgctcacatatacatgcgaacaggtgcacactgcatgtgttttcagtgacatattttaatcaagtacataaaaaccaaaccatatatacttttatttttcaaactttttattctaaaaattttaatgatttattaaaatttgtggcaaaatacaacctataataaatgttgacattttaaatcaaaattactttagtaaagctgactttaatttaaatttgtgaaaattaaatcactacttggaaatgacattttgtttggcaagaatcacttccactcatggtctctgagagggaggttggcccggttaatatatctgtttttttacctaagcacttgggccaccaaatcctctcagctccctgaaa

SEQ ID NO: 760149 - DNA, 587 bp, Homo sapiens
cagcttaagatttcagcggtaggggagagggcaaagctcaggatcctggcaagggggctgactcgcttacctggaaacattctcattacaaaggacctaggagtgctgcctaaaaggctgcgttttgaagaacacatggctgagtatatacaagcaagtaagggaactccgtaaagacgagaaatctcctaaactgatgccttaggaaaaagcccttcctgatacctctaactcaggggctgaggcgtttgaattctagatccttagtgaaaggacagactagaaaaaaatctggccagtggaacacagagacaatgaggaagagcatctgtttccaccttggttctgggtggggaaaaggcttcttgcaaatttgtagcagggcctaccctcacttgggtttgatacatgctacccgcacaatccaggractctcaggccccaaaagtaacatgaaaagtagtccaggtgtaggatactctcagaacttctggcagaagcaaacagtggcaatgagggtaacaccctcaacctaggttacacgggattcccaggaatagagcctcacgcaaaatgacctcacgacc

SEQ ID NO: 760150 - DNA, 569 bp, Homo sapiens
atagtatctccggaacaaatttgtccctctgcgcgatccggaactccgaggtcgttcctacgcgccgtcgttcgcctcttcacatcggattggatctcacgcaaggatgaggcggggtttcgccgtggcgcgcatgcgtgcagcaaagaatggaggagtcggaacccgaacggaaggtaggagagaggcgagaccccgcgcgtgtgggagcgggcgtgaagaggggagcaggccgtgcctgactggcgtgtgcttgcagcgggctcgcaccgacgaggtgcctgccggaggaagccgctccgaggcggaagatgaggacgacgaggactacgtgccctatgtgccgttacggcagcgccggcagctactggtgaggggcacgcgtccggggagggatggggccgtgaccgcggggtcgcakggggcgggcgtggcctcggcctccgtggggaggagggcagtctgaggagtgagcttcagtacaccagggcgcggcccccagacaaacgagggaccgacggcttgatctgaggggtagggcagctttgcgcctcgggcacaggatcctc

SEQ ID NO: 760151 - DNA, 615 bp, Homo sapiens
agggttaataggtgcagtaaaccaccatgggacatgtttacctatgtaacaaacctgcataatcctgcatatgtatcccagaacttaagtttaaaaaaaaatgccagcaaggtggctcacacctgtaatcccagcactttgagaggccaaggtgggctgatcacttgaggtcaagagttcaagaccagcctggccaatatggagaaaccctgtctccaccaaaaaatacaaaaattagtcgggcatggtagctacttgggagactgagacaggagaatggcttgaacctgggaggtggagggtgcagtgagctgagctcatgccagtgcactccagcctggagaaagagcgagaccctrtctccaaaaaaaaaaaaaaaaaaaaaattaagttaaaattaaactaaaaaaaaaaaaccagatcatgtgcttggatgttataccaatgtcaaatgtctataaaaatttcctaaacaaggccgggcatggtggctcacgcctataatcccagcactttgggaggccgaggagagcggatcacgaggtcaggagattgagaccatcctggctaacacggtcaaaccccgtctctattaaaaatacaaaaaattagccg

SEQ ID NO: 760152 - DNA, 630 bp, Homo sapiens
tgttaagagctttaaggtgagtttaaccctagccaagaagttccctggatgcctccctagcccaagggggagctggccagggtgtcctgatccaggtgcaggcagagtgcctcagggtcctgcacatccacctggcacgcgctctcttgcatacctgcccagggctgggctttggtatgacatgctaacacctacctaaaaatcccccactcccacctcataacaractggggcagaggggcaaacccaccccaggctcctttctcatgatacatgggtaggatccagctttcccatcattacctggtttcctccccaccctgcaatggccacttaaccagttggaagaccttgagcaggtccccactccccttacttcccttaggttggtgggaagcagcaggcactccacatgtcatgagtggggccacaaaaggccccttctgccaggctgctggcttggcaccttctggctgtgcttaagccaggtggttagtttggtactcagcaccactccccagcaggtgggagtcctgcggtggcttgggaactcaaggggctggctggctgctttggtggattctcacagctgcccagaaaggtgatgggtcttacacctacctttccata

SEQ ID NO: 760153 - DNA, 630 bp, Homo sapiens
tgttaagagctttaaggtgagtttaaccctagccaagaagttccctggatgcctccctagcccaagggggagctggccagggtgtcctgatccaggtgcaggcagagtgcctcagggtcctgcacatccacctggcacgcgctctcttgcatacctgcccagggctgggctttggtatgacatgctaacacctacctaaaaatcccccactcccacctcataacaamctggggcagaggggcaaacccaccccaggctcctttctcatgatacatgggtaggatccagctttcccatcattacctggtttcctccccaccctgcaatggccacttaaccagttggaagaccttgagcaggtccccactccccttacttcccttaggttggtgggaagcagcaggcactccacatgtcatgagtggggccacaaaaggccccttctgccaggctgctggcttggcaccttctggctgtgcttaagccaggtggttagtttggtactcagcaccactccccagcaggtgggagtcctgcggtggcttgggaactcaaggggctggctggctgctttggtggattctcacagctgcccagaaaggtgatgggtcttacacctacctttccata

SEQ ID NO: 760154 - DNA, 512 bp, Homo sapiens
tgtgtgtctaattctcttgctttgcatgttctgtgcagtgatttgctttatatatttaggaagtctgatgtttagtgcatatatatttgtaattgttatacctccttggtgaattgacccttttattatataatgtccttctttgccacttgtaacagtttttatgtctttttgtcttatattagtatagccacccttgctctctttggattaccakttgtgaggaatatcttttctcatccttttactttcagcaagtctttatttctttttttttttttagagacagggtcttgctctgtcacccaactggagtgcagtggcactatgatagcctactgcagcctagaattcctgggctcacgtagatcctcccacctcaacctccacagtagctgggacaacaggtgtgtgttactatgcctactaattaaaaaacttttttagagacaagagtctttctatgttgtctaggctggtcctgaactcctgacttcaagcaatccttctac

SEQ ID NO: 760155 - DNA, 512 bp, Homo sapiens
tgtgtgtctaattctcttgctttgcatgttctgtgcagtgatttgctttatatatttaggaagtctgatgtttagtgcatatatatttgtaattgttatacctccttggtgaattgacccttttattatataatgtccttctttgccacttgtaacagtttttatgtctttttgtcttatattagtatagccacccttgctctctttggattaccatttgtgaggaatatcttttctcatcctttyactttcagcaagtctttatttctttttttttttttagagacagggtcttgctctgtcacccaactggagtgcagtggcactatgatagcctactgcagcctagaattcctgggctcacgtagatcctcccacctcaacctccacagtagctgggacaacaggtgtgtgttactatgcctactaattaaaaaacttttttagagacaagagtctttctatgttgtctaggctggtcctgaactcctgacttcaagcaatccttctac

SEQ ID NO: 760156 - DNA, 512 bp, Homo sapiens
tgtgtgtctaattctcttgctttgcatgttctgtgcagtgatttgctttatatatttaggaagtctgatgtttagtgcatatatatttgtaattgttatacctccttggtgaattgacccttttattatataatgtccttctttgccacttgtaacagtttttatgtctttttgtcttatattagtatagccacccttgctctctttggattaccatttgtgaggaatatcttttctcatccttttactttcagcaartctttatttctttttttttttttagagacagggtcttgctctgtcacccaactggagtgcagtggcactatgatagcctactgcagcctagaattcctgggctcacgtagatcctcccacctcaacctccacagtagctgggacaacaggtgtgtgttactatgcctactaattaaaaaacttttttagagacaagagtctttctatgttgtctaggctggtcctgaactcctgacttcaagcaatccttctac

SEQ ID NO: 760157 - DNA, 512 bp, Homo sapiens
tgtgtgtctaattctcttgctttgcatgttctgtgcagtgatttgctttatatatttaggaagtctgatgtttagtgcatatatatttgtaattgttatacctccttggtgaattgacccttttattatataatgtccttctttgccacttgtaacagtttttatgtctttttgtcttatattagtatagccacccttgctctctttggattaccatttgtgaggaatatcttttctcatccttttactttcagcaagtctttatttctttttttttttttagagacagggtcttgctctgtcacccaactggagtgcagtggcactatgatagcctactgcagcctagaaytcctgggctcacgtagatcctcccacctcaacctccacagtagctgggacaacaggtgtgtgttactatgcctactaattaaaaaacttttttagagacaagagtctttctatgttgtctaggctggtcctgaactcctgacttcaagcaatccttctac

SEQ ID NO: 760158 - DNA, 663 bp, Homo sapiens
ggaaactttccatagctacgaagtgccacagtaactctagatagagtcccttttcctgccatgatgatgaccacaaggcgagcaccaagacatgtaattttactacaacggtttcatttgcatgctaggttcgaaagtcagtacatacaattaaaatcttgtatagttattctcgaaattcttttttttttcttcttttgagayggaatctcgctctgtcgcccaggctggagtgcagtggtacgatctcggctcactgcaagctccgcctcccaggttcacgccattctcctgcctcagcctcccgagtagccgggactacaggtgcccgccaccacgcccggctaatttttttgtatttttagtggagacggggtttcacggtgttagccaggatggtctcaatctcctgacctcgtgatccgcccgcctcggcctcccaaagtactaggattacaggcgtgagccactgtgcccagcctgaaattctttatgtggcctataaagcacaatatacagtcatcccttagtactcatgggggatcagttccaggacaccccccagataccaaaatctgcagatgctccaatctctgatataaaatggtgtcatatttgtatataaccaatgcacaccctcccacaatctccagattacttata

SEQ ID NO: 760159 - DNA, 663 bp, Homo sapiens
ggaaactttccatagctacgaagtgccacagtaactctagatagagtcccttttcctgccatgatgatgaccacaaggcgagcaccaagacatgtaattttactacaacggtttcatttgcatgctaggttcgaaagtcagtacatacaattaaaatcttgtatagttattctcgaaattcttttttttttcttcttttgagatggartctcgctctgtcgcccaggctggagtgcagtggtacgatctcggctcactgcaagctccgcctcccaggttcacgccattctcctgcctcagcctcccgagtagccgggactacaggtgcccgccaccacgcccggctaatttttttgtatttttagtggagacggggtttcacggtgttagccaggatggtctcaatctcctgacctcgtgatccgcccgcctcggcctcccaaagtactaggattacaggcgtgagccactgtgcccagcctgaaattctttatgtggcctataaagcacaatatacagtcatcccttagtactcatgggggatcagttccaggacaccccccagataccaaaatctgcagatgctccaatctctgatataaaatggtgtcatatttgtatataaccaatgcacaccctcccacaatctccagattacttata

SEQ ID NO: 760160 - DNA, 643 bp, Homo sapiens
cttccttgaaattctttattctttctttctttctttttttttttttttattgatcattcttgggtgtttctcacagagggggatttggcagggtcataggacaatagtggagggaaggtcagcagataaacatgtgaacaagcgtctctgsttttcctaggcagaggaccctgcggccttccgcagcgtttgtgtccctgggtacttgagattagggagtggtgatgactcttaatgagaatgctgccttcaagcatctgtttaacaaagcacgtcttgcaccgcccttaatccatttaaccctgagttgacacagcacatgtttcagagagcacggggttgggggtaaggttatagattaacagcatcccaaggcagaagaatttttcttagtacagcacaaaatgaaaagtctcccatgtctacttctttttacacagacacggcaaccatccaatttctcaatcttttccccacctttcccccctttctattccacaaagccgccattgtcatcctggcccgttctcaatgagctgttgggcacacctcccagatggggtggtggccgggcagaggggctcctcacttccctgtaggggcggccgggcagaggcacccctcacctcccggatggggcggc

SEQ ID NO: 760161 - DNA, 643 bp, Homo sapiens
cttccttgaaattctttattctttctttctttctttttttttttttttattgatcattcttgggtgtttctcacagagggggatttggcagggtcataggacaatagtggagggaaggtcagcagataaacatgtgaacaagcgtctctggttttcctaggcagaggaccctgcggccttccgcagcgtttgtgtccctgggtacttgagattagggagtggtgatgactcttaatgagaatgctgccttcaagcatctgtttaacaaagcacgtcttgcaccgcccttaatccatttaaccctgagttgacacagcacatgtttcagagagcacggggttgggggtaaggttatagattaacagcatcccaaggcagaagaatttttcttagtacagmacaaaatgaaaagtctcccatgtctacttctttttacacagacacggcaaccatccaatttctcaatcttttccccacctttcccccctttctattccacaaagccgccattgtcatcctggcccgttctcaatgagctgttgggcacacctcccagatggggtggtggccgggcagaggggctcctcacttccctgtaggggcggccgggcagaggcacccctcacctcccggatggggcggc

SEQ ID NO: 760162 - DNA, 516 bp, Homo sapiens
tacatagagaatacctgtgtgttcctctctagctactgagtggaatgtgaatacttttgctgcccaaacacccactgaggtcactgtggaaaatgcaaacacccaggccctctctgacttctgaacttggcttgcctcaggaccaggcacagtggtgtagaaggaagaactgacttgcttctttcccacacgcaagtgatcagcattttagtgcaggaatgctaatactgtgttatcttagaactggaacagatcctagaggctatctagtcccactctccttgttttgtttaagagawagctgagaaatagaaaggtaatgtaacttctgagtgtcacaacaaaagctccaagatacatctcatttgcaggctgcctaattcccgtgagaaactgcagacaggactatcctgtgggagtaatctgagagtctccagcaatcagtctcacctcctttcttcccttggaaaaaaaaaatgtcattgtctctgatagagcacaggctctggagccagg

SEQ ID NO: 760163 - DNA, 637 bp, Homo sapiens
aggctacaaaaataaataatactaaatatcagcactcaagaaaaccacgtctaattggggctggtaaattaaacagttgagatttatgcactgtgaagtatgtgtaacttgaagaagaaattaatatttccctgaccctatctctcttcctactagaaaaagaccccaaaaagagggtggatcttatccattccttagaagcccttacaaatggcacttttacaacttttrttatgtttattttaggtcaggagcaatggctgacgcctgtaatcccagcattttgggggcctaatcgggcagattgcttgatgccaggagttcgagaccagcctggccaacacggtaaagccgcgtctctactaaaaatacaaaaattagccaggtatggtggcacacgtgcctgtaatcccagctactcgggaggctgagacacgagaatcatgagattaacttgaacccaggaggcggaggttgcagtgagcctagattgcaccactgcactctggcctgcgtgacagagtgagactccgtctgaaaaaaacccagaatttttgttacgtttttgtatcaatgaggaattgttcagtgtatgtctcagcagtgaacccatttcttatttccgcatacctgaggg

SEQ ID NO: 760164 - DNA, 350 bp, Homo sapiens
caatatttcaggcattttcagggttgatgtatggagcagggatttggccttgctccctctggcttcagaagacagcatcagttctcctgggaggcagtcacaggtgtagtctccaagccctacaacagtggctatctgccrcgtgccctgagctctggggagctgagaatgtcccagcagagataacatgactgaggattaaagaagcagttgctactcgttggggattagatttgcagacctctgagatccgttccaacattgagatcaaatgttattaaaagaaacaaccacacacacacaaatctccttcagcagggctgaaatgggacctgggtaggggtgaggtg

SEQ ID NO: 760165 - DNA, 809 bp, Homo sapiens
gcgtgtgtagagaatgctagaaatcttttttaatattgctggtcataaaataattagtattttatttatgtaatgattctggaataagtatattttggagagtgttttgtgcccagtctctaaatcacttagtcacttacactcccacccccaaaatatgcaagcagtttagtccttggagagatgaagaaagtgatccctggcccaaaatgactgaaagattgggaatattagagtttcacaggaggctggaacyccctctttgagatgtaaactcaccaaacagattctaaatggcctaaaaatgactgctcagcattgtagacaggtgggtctcagaagccacaatcccattagcaacaggtggctctccaggagatgacagggaaacaggatgtcatctgtctgtccctctgggccacaccacatcctgcccttctccagggctctgtacctgaagctgacctgcagcactgcatcaacagattcccttgccctctcttgttggcatatggatggttttagccaagtaggggacagcagcaggagaatggaatgaggaagaaaataaggtcaagcatttgtgcccctggctcccaccctctcagtttgcagcagacacactgacttctctacttgtggctgaagctccttgggcaaccctctccttagagttccctgttccattttcagccatcactccccgccactgcccttcaagttcagagatagaaatgggcaccccacaattcctagcctgaggggactgcagaggttgtttccctaaaacttgcccacactgttattag

SEQ ID NO: 760166 - DNA, 615 bp, Homo sapiens
taaggactcaggaagcttttagtcatgacagaaaggaaagggagccagcatgtcacatagtgagagagtgagcaagagaatgagaggagggaggtaccggactctttttaacaactggatatcatgtgaacaaataaagcaagaactcactcattattgcaaggagggcatcaagccattcataagatctgccccccatgactcaaacacctcccactattgccccacctccaatattggggatcacattttgtactagtcagagttctctcraggaacagaattaataggatagatgtatatataaaggggagtttattaaggaatattgactcacaaaatttcaagtgaggtcccacaataggctgtctgcaagctgaggagcaaggaagccagtctgagtcccaaaacctcagaagtagggaagctgacagtgcagccttcagtctgtggctgaaggcccaagagttctaaagctgaagagcttggagtctgatgtttgagggcagaaaacatcagcccaggagaaggatgtcagccagaagactaagacagtctagtccttccccattcctctgcctgcttttatcctagtcatattggcagcagattaga

SEQ ID NO: 760167 - DNA, 574 bp, Homo sapiens
ttcccaacaagttcctcatttccatctgagaccatctcagccaggacttcattgtccatatctctatcagtattttggtcaaagccattcaacaagtctctaggaagttccaaactttcccacatcttcctatcttctgagccctccatgtctctaggaagtaccaaactttctcacattttcctgtctttttctgagccctccaaactgtttcaacccctgcctgttacccagttccaaagttccacaagatgtgacttgctcctcaccttcctccatgattgcgaggcctccrcagccatgtggaactttaaatccaataaacttctttttcttttgtaaatttcccagtcttgtgtatgtgtttatcagcagcatgaaaatggactaatacacctcctcagccctgaggaactgtgagtcagttaagcctctttcctttataaattactcagtctcaagtatgcctttattaacagcatgagaacggactaatacagcaaattggtactgggtagtggggcactgctgtaaagacatcttatgtggatggcagaaggcagagagattgtgc

SEQ ID NO: 760168 - DNA, 625 bp, Homo sapiens
ttgtagtccaatagtaataaagacagtatggtattggcaaacatagatcaatgagatggaatagagagcttagaaccagtgttaagcataaatgaatgtttgatttattatgatgctactgtacagaagtatagaaaacacaaacctttcagtaaaccatgctagaataattgactatcaattttttttamgtgaactcctatcaccatattaaaaataaatccatttgtgaggatgtaaattgatctttaagatctaacagttaatggtaaaaagctataaagcttttaaaaagaatatagagaaatatatttagacctttcggtagaaaagcatttcttaaacaagatccaaaacacagagccataaagacttacaaagaggaatagactaaatgaataattaccaataatcaaaagatactttattaaagagacaacatcagttacagagtaggaaaagatatttaaattatccataatgaacaaagaaccggtatccagaatatataacaaacttttcaaaatcaaagtgaaaagagacagatatttcaacacaaaaattggctaagaattaggaagaggctcaagacagaatatctaagtgaccagtaagtaagtttaaa

SEQ ID NO: 760169 - DNA, 565 bp, Homo sapiens
caataaatacctagtaagttccaaattttcccacatcttcctgtcttctgaactttccaagtctctaaggagtttcaaactttcccacatttttctgtctcttctgagccctccaaacagttccaaccttggactgttacccagttccaaagctgcttgcacattttcaggtttctttatatcagcaccctacttctggtaccaacttactgtattggtccattctcacattgctaataaagacattcccaaacctaggtaatttgtaaaggaaagaggtttaattgactcacagttcakcatggctggggaggcctcaggaaacttacaataatggagaaagtagaagcaaacatgtctttctttacatggcagcaggaaggaaaagtgccaaacaaaagcagggaaaagcccctcataaaaccgtcagatctcatgagaagttgctcactatcatgataacagcatgagggtaactgtccccatgattaaattacctcccatcaggttcttcccatgacacatagggattatgggaattacaattcaggatgagatttgggtg

SEQ ID NO: 760170 - DNA, 520 bp, Homo sapiens
agcaggcatttgtgagcatatatgcgtgagtgtgcactgtgttagggtgtgtgtgtgtgtgtgtgtgtgtgtgtgagagagagagagagagagagagagacagagagagagaggcaggcttccccctgggccaggctgctgtcccctgaacggtggtgaacaaatctctaacaacaatcataataacaataaataatgaataataataataaaacagtagttaacagtccctccataacagaataacaataaaatgcaagaggaaatattttgaggtggagacagaagaaggagtcaggatcacagcatctgagggggagataggaaaggaagggaggaagaaagcttcttaatatgctcttggyggggctggggttgggaacccctttcccagacaagggacagaagaggggaaggagggccaggaggccactctttattgctttttttctcaggcttctgctttgtgtgatcagggaagggatcccacatatggggatggttaatggcttttgggact

SEQ ID NO: 760171 - DNA, 627 bp, Homo sapiens
atgctctaatttttagtggcataaatcttaatgtagactatattatctggttaaaactataatgcaaaaatgatccaaaatattttaaaagatcttatgccacaaaaaaagtatggcttccctttgtaatgatgtggattwttgaggcaattacttagatcattgaaatatacaattacatatatattttaaataaaactatttgaaggcttgattttccttctctcatatgttgatacaaattaaaaattatgagtatctaaaactacgtgcataagcaggctggaactaagaatgtcacagttgaactccagagactaaattttaaaagcaatgacaaaattcttgatttagggagcagaaaatcgaacttcaggctataaagtaatatttagggtacattaggagatacataacgtatctccagtatactggagaagcgttgtgtcagtaattcaatcaaaaaaatttaaaataagtaaaagcagcactgaaatgtatctgagtatttatcaaagctgaatttttattggcagtgacaatacactacatgtctttgtttctgccagatgaacaactataaaattttcctttccaggcatgatttgactatgacatgaataaata

SEQ ID NO: 760172 - DNA, 562 bp, Homo sapiens
agattgaggttggtgtaatctgaaatattttcattcttctgacatgaggtaatcacgaattccagtattgtctggattgtaactatctgctaagtttacatttgggattctcctcatcaaaactaaagaaaagctaatattagaattttaaattcacccattcaaaatctaagtccattatatcgacctctattcccccaactgacaagtcagcaacgccttattctcctgttcccatcaataatactatatatgtttgtcaactacatttagaattttagaattrtgttttacatcagtcttcaattaaaataatgtggctgttataaacccatagatgtcatctctttaacactggccctactacccagcttcatgtgctgtggagaaatgaaaactcataaatgtgaaatctgaaggctccacattctgaagctgtcatctaggcaaacttcggcaagaagctgaacttctattcatttatcaacaaaagcagaacaaccataagttatgcatgcctatcaggattttgcaaagatcaaatggaaaaggatgtaaaaaa

SEQ ID NO: 760173 - DNA, 562 bp, Homo sapiens
agattgaggttggtgtaatctgaaatattttcattcttctgacatgaggtaatcacgaattccagtattgtctggattgtaactatctgctaagtttacatttgggattctcctcatcaaaactaaagaaaagctaatattagaattttaaattcacccattcaaaatctaagtccattatatcgacctctattcccccaactgacaagtcagcaacgccttattctcctgttcccatcaataatactatatatgtttgtcaactacatttagaattttagaattatgttttacatcagtcttcaattaaaataatgtggctgttataaacccatagatgtcatctctttaacactggccctackacccagcttcatgtgctgtggagaaatgaaaactcataaatgtgaaatctgaaggctccacattctgaagctgtcatctaggcaaacttcggcaagaagctgaacttctattcatttatcaacaaaagcagaacaaccataagttatgcatgcctatcaggattttgcaaagatcaaatggaaaaggatgtaaaaaa

SEQ ID NO: 760174 - DNA, 562 bp, Homo sapiens
agattgaggttggtgtaatctgaaatattttcattcttctgacatgaggtaatcacgaattccagtattgtctggattgtaactatctgctaagtttacatttgggattctcctcatcaaaactaaagaaaagctaatattagaattttaaattcacccattcaaaatctaagtccattatatcgacctctattcccccaactgacaagtcagcaacgccttattctcctgttcccatcaataatactatatatgtttgtcaactacatttagaattttagaattatgttttacatcagtcttcaattaaaataatgtggctgttataaacccatagatgtcatctctttaacactggccctactacccagcttcatgtgctgtggagaaakgaaaactcataaatgtgaaatctgaaggctccacattctgaagctgtcatctaggcaaacttcggcaagaagctgaacttctattcatttatcaacaaaagcagaacaaccataagttatgcatgcctatcaggattttgcaaagatcaaatggaaaaggatgtaaaaaa

SEQ ID NO: 760175 - DNA, 600 bp, Homo sapiens
ggaattaaaaggggctttaaaaaaaaacatgaaaaatgagaaacataaaatttcaaatgcagcatatttaacttctcaagagaccacattgactttgaagctgaaatgatgatgtgtttaaaaaaataaagactttttttacttcacgagctatacctcacaaatacatggcaaatacatatacaagggtttttaaatacatggatatgttgcayagaaggacaagacactgagtgtgatggaaaataaaaagacatgtcacagagaaaatcatcactttcctctgatcagtcagaaattactttatcaaaaggcaggatttcagaggtgatttgaatgacggcaggaaagagctcagtgagctgagaagagtactattagcctatgttttggcctagaagccagagaggcacagcagcatgtgcaggcttgagaataattctgcctaggcaaggcagatgagaggcagaagaaataagataattggaaaagacagaagaacatttttcctaaagcaagacaattttttttttaatttgaagagtagcctgttttcttttttaaaaaactactgccagttgttttgaaagaagtttaaat

SEQ ID NO: 760176 - DNA, 617 bp, Homo sapiens
tttctttaaagcctagtgtcacagagataaattgagaatattcaaggacttgtgattttttaaattgaattctcatgaccctatgtccaaaaaagatgggtatgcaaaaaatgcctcaacagctaatgatgaaccaagtacaaatacatcttaagcagtcaaggttttattacaaagaagtttgagaaaaacgctccttaaatatggtccaaaagggaagaatactcattctcttttcatatgaagaaaaaaatatcataatggttagaaagacttcctttgcccaataaagctcatgaagtttaagctccagggtccttccttcacatagtttctttctatccaaaaatctgagagtgggtaaagaaatatgtgccatgagggttttttwtaaataagatattaagtatatatattttggtttagaaagctatcttggcagggcatggtagctcacacctgtaatcccaacattttgggagaccaaggcaggaggattgctggagtctgggagtttgagaccagcctgagcaatatggcaaaatcccgcctctaccaaaaaaataaataaataaatacaaaaatacaaaaatacaaaaactagctgggcgtgatgg

SEQ ID NO: 760177 - DNA, 617 bp, Homo sapiens
tttctttaaagcctagtgtcacagagataaattgagaatattcaaggacttgtgattttttaaattgaattctcatgaccctatgtccaaaaaagatgggtatgcaaaaaatgcctcaacagctaatgatgaaccaagtacaaatacatcttaagcagtcaaggttttattacaaagaagtttgagaaaaacgctccttaaatatggtccaaaagggaagaatactcattctcttttcatatgaagaaaaaaatatcataatggttagaaagacttcctttgcccaataaagctcatgaagtttaagctccagggtccttccttcacatagtttctttctatccaaaaatctgagagtgggtaaagaaatatgtgccatgagggtttttttwaaataagatattaagtatatatattttggtttagaaagctatcttggcagggcatggtagctcacacctgtaatcccaacattttgggagaccaaggcaggaggattgctggagtctgggagtttgagaccagcctgagcaatatggcaaaatcccgcctctaccaaaaaaataaataaataaatacaaaaatacaaaaatacaaaaactagctgggcgtgatgg

SEQ ID NO: 760178 - DNA, 645 bp, Homo sapiens
ggcaggtcctgttaggctttgccatctcaggccccacattcagtagcgttagcggcaggtcctgttgggctttgcccttgctatgaccccaccgttccctcctgcactgcgcccagcctagtgtcgtggatgtctctcaggttgccttgaagccttccgggcaagtcccatcagccaacgcaacatcagaccagactctcctgatttcctctccccatcaacaaaacccttctctggggtcctgctgtttcctaatgtgaacactagctaattagacaaatgcatctatctgtggctggtgcactgacggcttctcttgagttaatgsgtcacctctggtatccatcagtgttcttagtctcatgcaactgaagacggttctgtctgatttaagtagcttacgcatttagtaagagaatattagtaagctctggactctcgggaaggctgaggaacaggcttggaaaatgggcaggaacagaagatgctgtgtagcaattgggaccagctggtctcgaactcctgacctcagcccaaaccatgccatgagcagtaactgtgggagcatggctgcagccacccctgccaccttctgctgaaataaatgctccccaaattctgctgcatcgccagctcctgaccgtg

SEQ ID NO: 760179 - DNA, 645 bp, Homo sapiens
ggcaggtcctgttaggctttgccatctcaggccccacattcagtagcgttagcggcaggtcctgttgggctttgcccttgctatgaccccaccgttccctcctgcactgcgcccagcctagtgtcgtggatgtctctcaggttgccttgaagccttccgggcaagtcccatcagccaacgcaacatcagaccagactctcctgatttcctctccccatcaacaaaacccttctctggggtcctgctgtttcctaatgtgaacactagctaattagacaaatgcatctatctgtggctggtgcactgacggcttctcttgagttaatgcgtcacctctggtatccatcagtgttcttagtctcatgcaactgaagacggttctgtctgatttaagtagcttacgcatttagtaagagaatattagtaagctctggactctygggaaggctgaggaacaggcttggaaaatgggcaggaacagaagatgctgtgtagcaattgggaccagctggtctcgaactcctgacctcagcccaaaccatgccatgagcagtaactgtgggagcatggctgcagccacccctgccaccttctgctgaaataaatgctccccaaattctgctgcatcgccagctcctgaccgtg

SEQ ID NO: 760180 - DNA, 529 bp, Homo sapiens
tttttgagacggagtctccctgtgtcacccaggctggagtgcagtggtgccgatggctcactgcaacttccgcctcccgagttcaggcctgaatagctgggattacaggcacccaccaccacgcctggctaatttttgtatttttagtagagacgaggtttcatcatgtgggccaggatggtctcgatctcctgacctcgtgatccgcccgcctcrgcctcccaaagtgctgggattgcaggtgtgagccaccgcgccgggcctgagaaaaaaatcttataatcttcagatataagaaggttgcccagtttggagtgcagtggtgcaacctcagcttgctgcagtctttcaggcagtcctcccatctcagccgcctgagtagctgggactacaggcacatgccaccacacccgcctaatttctgggctcacgtgatcctatcttcctgccccagcctccctaagtgctgggattgcaggtgagagccaccacacctggcctaattatttcttttatctcgctaattaca

SEQ ID NO: 760181 - DNA, 682 bp, Homo sapiens
aaaaaaaaaaaaaaaaaagacattttaggatcttgaaacatttaaatgttttcactataaaagaaaaattttccttatcccagacgaactgttcataaaggttcacctgcttaatatgcctagaattcctccactgaggctggtatgggtggcagtgcagtacagggacagcagccccagctctaaagggaaatgggacctgggtttgaaaccttgttgtgccatttacaagttgtgcaaacctgagccaacaccttcatccctctgggtctcaratcttcacaggcatatctggggatctggtcctctctgtaaaaattggtaaaaagatggaatgctatgtacaagggataaccacataatttgttgtccaaagggtggcactttgagaagtgaatgttattactcttctgggacaatggatgtacacagtaaaacgtcttgggaaaacctggacataaagtcatcctagatcagaagttctctatcttggttgtacaatagaatcacctgaaaaactctggctcccaccctcagagatcttcatgtaattgatctagggtatgcctgggcattatgaatttcacaactctttgagtgactctgacattcagccatagtggagaaccaccatccttaacatacatgaagccaagctcatggtgagttctatcagtgttaa

SEQ ID NO: 760182 - DNA, 506 bp, Homo sapiens
agacactgaaagtgatgcccataatgtatcaaagggtttaaactgacttctgctagtatgagtctgtggctctgagcaatttgcatagcattgtccttcaggaacaagttccagagccaggagtagaggtgaccactttttaatagttcatccaacaatatttactgagcctgtggtgcagcagtgagtgcctcttaagatggaacatgacttcctcactttagtgcagtccccaatccagcccagcatacttattctccacttgcctgtctactataagcattttcaatgacttctgacctaagttgtattttcttcaatgyttttaaagaggtatgcttttccccaaatccttgaataatacacataaatgatgcttcatggttttatgtattcctggtattctatatacacccactgggagttcacatatctcagtttgaaggcgcagctaaaggcaattttctgtctgcacaattgactctgataagagatacatggtactc

SEQ ID NO: 760183 - DNA, 603 bp, Homo sapiens
cgcctcccgggttcacgccattctctcgcctcagcctccagagtagctgggactacaggcacccgccaccacgcccggctaatagtttgtatttttagtagagacagagtttcaccgtgttagccaggattgtctcaatcttctgaccccgtaatccacccaccttggcctcccaaagtgctgggattacaggcgtgagccactgcgcctggctactagtatcttaataataatagttataaccaatgtctctacaggaaccatggtttttaaagcagctttaccttccagatcccattttctataagattatttgggttgaaaatgacagagagtcaattcataaccaattcattaagcaaacatggaatgccttgggtggtgtgtctgttcaggtcctccaggaagcagaagccaaaatacaattagacagtcaagagacttattggaggagttgyctgtgaagaataaaggaagcaggaggaggctgggagagcattttgactatgacccaggtctgacacctgggaaaggagacagggacaaaaggaggattggaaagaagaagcctcagactatagcgcagattaaaaaaaaaaaaaa

SEQ ID NO: 760184 - DNA, 575 bp, Homo sapiens
aacaaggagaaagagagagagaaaaaaaaaatcccctttcaagaacttccttgcttcatgctgtttctcactcaaccacaacttccctcggttaaccagccttgcctatctggctggcctgaccagccaggacagtcgatgccagagatgaaaccttatgaattctgtattctagatactttagctgtgtttttccttaatctcataacaacctcawgagcccataaaatggtattgagagaatcacttatttttgcttctcatattttcaaggacaggaggagattcctattccattccccagcggggccaagtgtggaggaacatgtctatctagctttcattctccttttccccagagcaggaggaggatttctctgactgataactttctgagaaggtggggtgctgggttggaccgccctgtaccctggtaatgggctgtctgcagttgctgtgttagtgactgggggtaaagtattttcacttcaaccacatcctccagtctagctcttgtcagcaatgatgatgacattttgatctctacctgcttttcttccttagttctgaactca

SEQ ID NO: 760185 - DNA, 604 bp, Homo sapiens
caattcataaaagtagaactaccatttgatccagcaatcttactggttatctacccagaggaaaagaagtcattacacaaaaaagatacttgcacatgcacgtttataacagcacaattagcaattgcaaaaatgtggaaccagcctaaatgcccgtgaatcaatgagtgaataaactgtggtatatatttatgtgtgtgtgtgtgtgtgtgtgtgtgtgtgtgtgtgtgtgtgtgtatgtatatgtatatatatatgcatatgtatatatatatatatatgcataaatacatatatgtgatggaatactaytcagccataaaaaggaatgaattaatggcattcataataacctggatggaattggagactattattctaagtgaagtatctcaggaatggaaaaccaaacattgcatgttctcactcttaagtgggagctaagctatgaagatgcaaaggcataagaatgatacagtggactttggggactcaagggaaagagtgggaaaggcatgaggggtaaaagactacaaattgagttcagtgtatactgctcgggtgatgtgtgcaccaaaatctcacaaatcaccactaaagaact

SEQ ID NO: 760186 - DNA, 589 bp, Homo sapiens
ttacccagtctcaggtattctgttacggttaacacaaatgactaagacaacaggataattctgtttaactttttgagaactgccaaacttttccaccgcagctgcaccatttgacattccttccagcaatgcacaaatgttccagtttctccacatccttgccagcactcattttctgggttttttataatagccctccaaatgggtgtgacgtattttgattctatgtccctaatgactagtgatgttgagcattttctagcattgatttttaagatgttacccaaagaccccttgtatcaaaataagctggatttttttattgaaaattattaactctagaaattttagtttaaactagacttagggatatgtgtattttaccggtattccacgttttatgcatgggtttttaaaacttctcargtattaaaactaaaagctttaggtgctttgcttatcaagaaatcctacactgtccactggagacatccatgtttttacttggctctgcccctttagtggtccctgtgaaccttacctcaaaccatgcatctggggcagagatccttacttgcttggtggttac

SEQ ID NO: 760187 - DNA, 564 bp, Homo sapiens
aacactgtctctattaaaaatacaaaaattagctgggtgtggtgatacatgcctgtaatcccagctactcggagcctgaggcaggagaactgcttgaacccaggaggcggaggttgcattgagccaagattgtgccattgcactccagcccaggcgacagagtgagactcatgtctcaaaaaaaaaaaaaaaaaaaagaggaaaagaagtgcccaatagcttcaatggatgccacataattttggaataatttttacaatcaggaatttcattgtccaagccccttaraaaaagaagcaacccagccccatacccagaaagtcaagctgtatagtgctgttccttagtgagacggtcaactctcagtagaaaaatctcctgtttggattagtgcttagttgacctattgtgttcagttcctctaacatgagtaacttctattggataggaaattttgaagctcaaagggtgtaatgagagttaacattactgattttccactgttactttttagtgttttcataacttggatgtgttaacctatggcccatcaactatgctcct

SEQ ID NO: 760188 - DNA, 549 bp, Homo sapiens
ccactcccccaatagcaatattagtccattcatgagcatggagataaacttcttacagtttccacctcccagtaccatcacaatgacagatttcaacatgagtttcagtgggacctcaaacactcaaactccagcagaggcccattactgaaagaggggttagagtcataccaaaattagcctgtggctgggcttctgcactcagctcctctactcaattgcgatttgacctagtgatgctcacccaatctctctgaacgtcagaacatgctgtttaaaaaaggaaaatgattcttatttaaacactctgccagaatgtttgcactgttcagatgggatggtgagagtcaggatgctttgtcactctacagcagtrgttctcaactggggttaatgttgcccaccccacccttccccaagggatatttggaaatatctggaaacatgttttggttgtcacaactagaggaagtctctactggcatctagtgagtagaggccagggatgctgcttaaatgtcctgcaatgcatcggacagccgctccctc

SEQ ID NO: 760189 - DNA, 615 bp, Homo sapiens
cgtggacacggggcttcctcatcgaggattactgggcttattcacacccactgtccaggctcgttctgagagagatggggcgaagtcactttggaagaggtcacaacagatgtcagccaggacagccagctctgtgcagagcagaaccaaggccccagagccttcggagcagcccatttgcaggcgttccagcagtttgctgctgcttgcctctcctctccccacctttcccctgcagcctcagtttcttggtcctctgggctttccaaagcagcagggctrgcaggctcctcactgcccccagcaggagaagtggcctggaaaaggcaacagtatgaacggccatactgagtcgatcatatttgccaagcccctgaccccccaaagtcctcgccttggtcagctctcaggtcagtgtcctctgccagtccttctaacctggctcccctcttcttcacccctcggccttctcctgacacactgaccttcctctttgccaaacctttcaagttctcctcctctcagggattttatacttaaacttctttctgctcgaccccaagccccctagccatccttcacgtggctctctctgcttttatatcacctcctcca

SEQ ID NO: 760190 - DNA, 560 bp, Homo sapiens
cgcagccaaccacccagtcttcggaagactcgccagtgttactgctgatcccagtgccgaaggcgggtttgcatttcaagtcccatgtccactgaggagggaaagtggtctgggctctctggccaacttaagggagatcagaagttctcttatttttaaaagatcctatccctacttgcctcaaaaggtgctgccacatccgcagtggcacagggctacttaggctcagggattggccctggggtttaataatgtccttcttttcctcttaggcacagcccagrcccaggaggcaggatacctgggtcctgccctgccacctgccatcaccatctcaggaaacttgcagagacgcatctaactgccctgcccctcaatctctggtactgcaaaactgggactcattgttcagaggcgaggtgggttgaggaaaggagaaggtgctggtgatgaagagggccttggaatgagagttggggtcacactggccacaacttctcccattctctgcttgaagttcctttatgattggagaggctggcaagtgagggaggcaaggc

SEQ ID NO: 760191 - DNA, 549 bp, Homo sapiens
caaggaacctctccccagagtctaaccagagcctggctgctccaatttctccattttctcctgctcaggacttggagatggagggcagcaggttcccagacctaaagaataaaatgcaatccccagacagcccctcasagccaagagattctgtgctgacactgagctactgcttttctcctctctcggccaccatttattccactcttgcttccacctggttccattctccttgccggcccagacttggcacagcactggaagaggacttgttcctgagggcatcagtactgcaggggatgtgtcccttacggggaaaaccctcagtgtcccaaaatagatcacaggcccacctgcccccatcaccacctccctgctctcaaaatgcagtcccttagacaggttcagtggcactcagagggggtccaggcatgttctgacatccctaggaatcctccccccaattctcaaagcactgttgttggttttactttgctttaacttctgaaaagagccatgagcataaaaatgagtcacatagaccttttc

SEQ ID NO: 760192 - DNA, 549 bp, Homo sapiens
caaggaacctctccccagagtctaaccagagcctggctgctccaatttctccattttctcctgctcaggacttggagatggagggcagcaggttcccagacctaaagaataaaatgcaatccccagacagcccctcagagccaagagattctgtgctgacactgagctactgcttttctcctctctcggccaccatttattccactcttgcttccacctggttccattctccttgcyggcccagacttggcacagcactggaagaggacttgttcctgagggcatcagtactgcaggggatgtgtcccttacggggaaaaccctcagtgtcccaaaatagatcacaggcccacctgcccccatcaccacctccctgctctcaaaatgcagtcccttagacaggttcagtggcactcagagggggtccaggcatgttctgacatccctaggaatcctccccccaattctcaaagcactgttgttggttttactttgctttaacttctgaaaagagccatgagcataaaaatgagtcacatagaccttttc

SEQ ID NO: 760193 - DNA, 549 bp, Homo sapiens
caaggaacctctccccagagtctaaccagagcctggctgctccaatttctccattttctcctgctcaggacttggagatggagggcagcaggttcccagacctaaagaataaaatgcaatccccagacagcccctcagagccaagagattctgtgctgacactgagctactgcttttctcctctctcggccaccatttattccactcttgcttccacctggttccattctccttgccggcccagacttggcacagcactggaagaggacttgttcctgagggcatcagtactgcaggggatgtgtcccttayggggaaaaccctcagtgtcccaaaatagatcacaggcccacctgcccccatcaccacctccctgctctcaaaatgcagtcccttagacaggttcagtggcactcagagggggtccaggcatgttctgacatccctaggaatcctccccccaattctcaaagcactgttgttggttttactttgctttaacttctgaaaagagccatgagcataaaaatgagtcacatagaccttttc

SEQ ID NO: 760194 - DNA, 623 bp, Homo sapiens
tgccatgggactatgcatgccataataaactactgttcagggaggtcaaagaagactaaggcttttagacgaaaaatgaggaggattacatgtttcaaggatcaataaacaagggtaacactggcttgaggttggacaggcagttgtgtttttcgcagagtcttctgtgatagtttttgttatcaggcatttatatatcataatgctctcttcctggccttttctgggcttatttcttcttttttttttttttaggttttttaagacagagtcttacccttgttgcctaggctggagtgcagtggtgtgatctccgctcactgcaaccttcgccttcccggattcaagtgattgtcctgccttagactcccgagtagctgggactacaggcacgcaccaccatgcccagctaattttttgtatttttagtagagacagagtttcactgtgttagccatgatgttctcgatctcctgacatcatgatcygcccacctcagccagtggctccgttttgattctgacaccttgcacaattcttatatctagggtaactgctgggagagggttcagcaaagccaatcgtgtgaaacccatagcagcacggctcccacacacaaggat

SEQ ID NO: 760195 - DNA, 597 bp, Homo sapiens
  misc_feature 51: n = A,T,C or G
actcaagaattgcttatagtcatttcaatttaataacacaggtattgattntttttttttttttttttttgagacagagtcttcctctgtcaccaaggctggagtgcagtggcacgatctcggctcactgcaacctctgcctcccgggttcaagcaattctcctacctcagcctcccgagtagctgggattacaggcatgcgccaccatgcctggctaatttttttttttttttgtatttttagtagagatggggtttcaccatattgactaggctggtctcaaactcctgaycttgtgatccacccgcctcggcctcccaaagtgctggggttacaggcgtgaaccaccgcatccagccatagttattgattttactgaatacatctaccttgcatttcaatctagtacaacaatgaaaggatggattttaagtaaacaaaaagaccacgcaacacttccattgttatttagagatgcatggagttttagcaaggagaatgaaaactgtcagtttgaaatactaatttcttgagttttcaagtaagaaggccaaaattatgcttgatttctttgaagttctatgatttgatacttt

SEQ ID NO: 760196 - DNA, 626 bp, Homo sapiens
gcagctatgaataggaggaacctgggttcaagtcctggttccaggtgcccctgagcaaagctcctaatctccatttcctgttctgtaaggggggcaggtgataccacccacatcgtggggttgcaatgaggacttaatgaaatgaagcatgtatgtcacttaccagtgtctgccttgggatgtaactggtagttgtagcccttcccaaaatgaacgagatgagcccaacataggtggtccctaacctcttccaccatcactgcgtggccacagaragaaggggaaaataaaagtcaccctttctccatttccctagattcatcaagctctgccacagtagaagctgaggacaggttcagaccaggtcagtggctgtggctcacaggcctctaacagtggccgaggtcagcctgcaggcagcaccaagacagacagcagtgaaaataacaggccaggcctgggtctgacctccttccagatgctctgggctgtgagacatccttggattcagcgcttaaggtgccaagaaggttgccagctacctggaatgcccaggtctggtggagggaaaaagacagcttgggagttcagacagagatgcacatcctagccctggcactatatga

SEQ ID NO: 760197 - DNA, 585 bp, Homo sapiens
atttattacgttaaaaacctcagtagtgcactttaaatggctggtgacaccctcttaggtgacttattgctctgtgaaatcagttttgcagaaactctttcacatatgccaaaaataaaaaccacacacacaaaaaatacacatgcacacaaaacagcagtcctgtgtgtgtgcattacaatgtatcggtaccagtccatggagtatctgctcacttctgtgcccagcatatcagcggcaggaagcccccacagsgggcaaggagcctccctagagctgacatgactcaaagtgaaaccaaccaacgtggcccttgctagtggcctgataaatctggaggaagcatcaaggccacctgcccaattttgaggtctgtccctggcgaagaaggactagtatatatgatcacgtgtcccccataggcaaacacacatccacactccacatacctcctacgtgtaccacctggacaagtctttttagatctccgctttatagcaaacaacagagaatagggataatgatcattgaaactacctagtctggggtagatttagatttccccaaactagcctgacattttct

SEQ ID NO: 760198 - DNA, 605 bp, Homo sapiens; identical to SEQ ID NO: 756165

SEQ ID NO: 760199 - DNA, 633 bp, Homo sapiens
atgacctcaaggaaattgggggaagcatgagcaaatgcaattccattgataccagtgctgtgagggcagggccagaagggtgaacctccctgggattatacagaaattttatacaggatagacatttcaaggttgctttggagaaatgcagatagaactaactttcataggtgacagyatgcaaaagttaagcttcctaacagtcacgagttcacaagtccctcttactaaatttggcagtgtgtggtgatgtccaaatggccataatacacatacatcaaataattaatagcattcattttgtgttagaaattgtgcatttcagccaaaagtttttaatacatcatggatagtttcccatattgcttgaggattggaaaagagagcactttatgaaatgtccttttggacacattttcattgaagtttccatataccaacaggcaatgagacgagtgataattcagcagcctcattgtctggggtgacacttgaacttcttggtctcacaactgaggaaatcaagaatgcagacatgccaagggtgaggttagatcagaagtttaataggtgaaagagaatagctctctgctgcagagagggatcctgaaaaagagttgccattctgcagtg

SEQ ID NO: 760200 - DNA, 560 bp, Homo sapiens
gtgcctagaagtccactctgcaaatagaagctggtgttgacccagcctctgcctgctgcctgcctttccagtccctgcatgtgggtgtacttggctgcctgccacctgtctgtggactggagttccccaaaggttctgggtaacccctcagcccagrtccccagaccccactcctccaccccttcctttgctttttcaggcctgaagcgcccacatcagagctgtgggtcctcaccccgccggaagcagtgcaagaagcagcagctaggtgggtaccagtgtggggaggaacataaacagagagatggggttgcctgggggccaagacccggaccctggaccttgtcccctgccaataagcctccagaggcccagtgactcttgtctcgcaagtttccaggagaaaaggactggaggtcttgcacaggcagaggagaggcctgggctggcagcgaaggggctccccacccatctggctgcatggggacttctctgaagagggctccgctgaaggagctggaagcaccatacaggtctcagcttcgctgtccaggcttttc

SEQ ID NO: 760201 - DNA, 594 bp, Homo sapiens
tccagaactctccccaagggagtgcagaaatgagccataagatcatctttgcagctgaagaacataggtcctcgtgcctaacctccttttgctcatccccttactatacagatgagaaaactgtgggtgtcacaggagtgacctgggtttgattcctggtgccaccagttaccagctttgtacctttggraaagttaggaaaagtctctggagttagtgtccctctctggggagggagggtcatgggatcctcaggacaaaataaggggtgcaggtgcaggtgcaaaggcttgcccagcctctccaagagacggcatactccagaccagtgggtctccactgcggctgcacactagaatcactcagggagctttctaaatactctttttttcccccaagacagggtcttgctctgtcctccaggctggagtgcagtggcatgatcttggctcaccgcagcctccaccttctagactcaagggatcctcctacttcagcaccccaccccacccctaccccccgccccgagtagctgggactacaggtgcatgctaccacgcccggctaatttttgtgtttttttgtagagacgag

SEQ ID NO: 760202 - DNA, 569 bp, Homo sapiens
aacagacagaaatattgtcacttgcaacaacgtggatggaatcagacagtattaagctaagtaaaataagctagacactgagacagataccgcatgttctcacttctttgtggactctaaaacaataaaaagactcaaagaagcaaagagtagaatggtctttagtagaggctgagggaaaggatggtcagagttacaaagcatcagtcagacaggaggaatatgttttgttttttggtttttactttgaaatatattgagatatactgcacagagtggcaaatatactaartaatgacatattgtgcatttcaaaaattgctaagattttcaaatgctctcaccacaaaaaataagtatttgcagtgagagacatgttaagtaggttaaattatcccacactgtattcacaaatcatatcactttttactccataaatacatacaactgtaatttgtccacttacaattttaaaataaaaattttaaaaatatctaatatttaagcacctactatgtgcccagcattttccctagtgttttatatggaataactcattgaaatcctca

SEQ ID NO: 760203 - DNA, 584 bp, Homo sapiens
gtcttttttttttttttcctttttgagataggatcccatgttgttgcccagggcagaatgcagtggtgcaatcatggtccactgcagcttcaaactcctggacttaagtgatcctctcacctcagtctcccgagtagctgggactacaggcatgtatcaccacacccagctaattttttcaaaaacattcttttgtaaagatggggtcttgctatgttgtccaggctggtcccaaacttctggggtcaggtgatcctttcacctcagcctcccaaaagtactaggattacaagtgtgagctaccatrtctggcattttagttgcggggagtgaatgggggtaatgtaccttgctaaaaattaggaatctgttacttaggaaaataagataaagttgggggaagcacacgcgcacgcgcgcgcgcgcacacacacacacacacacaaacacacaacgtaaagccttacaatttttcaaaagtgcctcagttaagtgattttcttgttttgagtaggaaggctctaactatattagtttaaaatgccccaacgggtaggatcagcagtatttctccctgtacagca

SEQ ID NO: 760204 - DNA, 532 bp, Homo sapiens
tttacctatgtagttgcctttaccagtgttctttatttcttcttatggctttgagttaatagctagtgtccttttgtttcagactgaaggacttattttggtaattcttgtagggaagatccactggtaatgaacttcctcaggttttgtttatatggaaatgtcttaattttcccttcattcattcattcttcttttttttttttagacagaatctcactctgttgcccaggctggagtgcagtggcatgatctcatctcactgcaaccttcacctcctgggttcaagtgcttcttgtgcctcagcctccagagtggctgtgattacaggtgtgcacaaccacacccragtaatttttgtattttttagtagagatggggtttcaccatgttgggccaggctgaaagatagttttgctggatacagaactcttggttgacagtttctttcagcatgttaaatatcatcccactgccttctggcctccataatttctgatgagaaatcagctattaatcttattgaagatct

SEQ ID NO: 760205 - DNA, 557 bp, Homo sapiens
ggtgttcagggtgccattgtttttgtccccaccaaaactcatgttggaactttaattcccagtgtggcaatgttaagaggtggaacctttaagagatggggtccagtgagaagcacttaggtcaggggggctccaccattgtgagtaggttggtgctgttcttctggtgagttcttttcctggcaagagtggattagctttcactggttmccacagaaccaggctgttacaaagtgaaattgcctctcatggttggtcccttgtgtcatatccacatattctgtttctctgccatgttataatgtagcatgaggccttcaccagacacagagcagattttagtgctatgcttcttagacttcccagtctcaagaatcatgagccaagtaaaccttttttttttaataaattacccaatttcaggtattctgttatagcaacacaaaacagactaagataagggattggagggatagagaaatgaataggtggagtccagaggatctttaggatcctatcatactatctatcatattctgtatgatactataaaggta

SEQ ID NO: 760206 - DNA, 569 bp, Homo sapiens
ggatgtgttctcatattcctagttttatataaatttttattatcgatgggtgtgttagtcaccttgggctgccataacaaaaaaaaatgtagactgggtagcttaaacaacagaaatttattttctcacagttttgaaagctacaagtcccagatcaagtgccagctgatgcagtttctagtgaggtctctcctcctggctartatatggctgccttcttgatgaatcctcacagggaaagagagaaagggagaaagagcattcttccttttggagggtcactaatcccatcataaaggccccaccctcatgatctaatcaaccatatttacctcccaaagacttcctgaccaataatcatcatattgggtgttagggctcaaaaatactaattttagagggatacaattcagtccatagcaatgtgtattgaatttttactaaatgctttttctctacctattgaggtgattattatacttttctctttttctctgtcaatgtgataaattaaactaaaggctttatatgtcaaatcttccttatattcctgaaataaagtctactta

SEQ ID NO: 760207 - DNA, 507 bp, Homo sapiens
agaaagacgtttaccttccagacattgcaaatttcctaaaacattcattaactaatattttctttgctcaaacccgcatcccatttcttctttgacattcatattcattcccttagtttccctgcttctgattccaataccaagagtagattctctctccaaggaaataaacagcaataatgccagagagggagaagatttagaccatcttgtcatcctcatcaccgctggctcccactayccttattcctaccttacctcaaagaccttacagaaaaaaagaatctacctgtaggataatagattcactacctggcttattcagatgcaataccctgcctacgtcatagttattttacagttacaatgcctacatgtcatacaataccctgatctagaattatcaacatagaaaatacttattcataaccttgcttataccattatctttatactaacttggtgcaaaagtgactgcaatctttgccattacctttaaaagcaaaa

SEQ ID NO: 760208 - DNA, 585 bp, Homo sapiens
tttgcagcagaaggtaattgctttagacttaacaggctgcatttgaccgttgactcaccattatggtgtattatgaaatgaagcctcagccttggtctcccagagtagggggcgggggagggcggcagggagaaagggtggtgcctgaactatcaacacggcacagtttaaatgtcaggctctgcaatttacaagtgatctgagattcatgggaaatgcaatggaaaagtcactgcmgagtccctctccctcatgttataagattgagtgtgtcataaattttgtgcattgctaagttcatggtgcttctgtaagaagacattaaaaatagaactccttacgtcctcgattcttacctacagggcatgcaggccaaaagtctacacacagaagttaagctggtttttaatcctgtttttcgttctggggctgtactcttaaaagccaaacactttttcagagacattctgtgcccgatatagcttcattttgttaataccagaagtgaataggggcaaaaccaacccaaccaaacaaccaaacaaacaaacaaacaccctgaaaatacaagcgaatgcctggata

SEQ ID NO: 760209 - DNA, 563 bp, Homo sapiens
tttgttttttgagttagggtcttgctctgtcacccaggctggaggacagtggtgcgatcatagctcactgcagcctcgatctcctggcctcaagtgatcctcccacctctgcctcccagtcttgccttttaagagccttaggactcttaacctgggaaatctataaaattttttgttatgtataaggaagaacacaacttttcttctgtgagtactgcttcaaagacacagagtccaatgtacataggcaggtggatagacaagctcgctgtcaaacttgttasatagatgaaatgggacagatggggtcattcatctaaagggttcttggtaaaggtacaaaaagcaaaaccatgaggccaaaaacgggagcagaaacagttggcactcagtgagtaggctccaaagctctggctcaaggtgggaacatggaagccaatggtcaagtttgttgcacagtgcacttaataagatgaacagcagtgctagaatctggaggatcatcatccctggagcttgacagccaatatctagcctgcttgagagtgcagatgaagcgctcg

SEQ ID NO: 760210 - DNA, 582 bp, Homo sapiens
caaagcaaaattataaaagaagatattctattataacaaaattataatagacagatattctgtctcaaaggcaagataatgccaaatgatcattggcattctgtcaaaactttgtttataaattttagagcattctatgaatgtacttagcccccaaatacttttcacatttcctcttaaaaagaatgaaatagttagaaacctgcctactgaagatacaagtcaattcaagcaaaccctgtataataaaatacagaggaagaatggtcatttatatgaaaagggtgggggaggagccaagatggctgaataggaatagctccggtctacagctmccagcgtgagcgacgcagaagacgggtgatttctgcatttccatctgaggtaccgggttcatctcactagggagtgccagacagtgggcgcaggatagtgggtgcagcgcaccatgcgcgagccgaagcagagcgaggcattgcctcccttgggaagcgcaaggggtcggagttccctttctgagtcaaagaaaggggtgacggacgcacctggaaaatcgggtcactcccacccgaatattgcgct

SEQ ID NO: 760211 - DNA, 579 bp, Homo sapiens
atcctcagattcactgcttgaaccgttggttattatttggggatcaggatccctccttcagatgaccagctaaccataggcttttctggatttctctaacctgattatgcaagaggaagaagtatctctgaaatattttagccagttgtcttgaataccactaattccaccaatgaaggcccacttctaatacccattatgctgattaagtatccactaattggctgggccttatggctaacacctgtaatcccagcactttgggaggccgrggtgggcagatcacttgaggtcaggagtttgagaccagcctgggcaacatggcaaaaacctgtctctactaaaaatacaaaaattagctgggcatggtggagagtgcctgtagtcccagctctcgggaggctgaggcaggagagtcgcttgaacctgggaggtaaaggttgcagtgagccagatggtgccactgcactccagcctgtgtgacagagtgagactctgtctcaaaaaaaaaaaaaaaaaaaaaaaaaaaaaaaaatccactaagtcagccaatgaaaatccttttctaacattctgaca

SEQ ID NO: 760212 - DNA, 530 bp, Homo sapiens
atctggacatgttttggtagagcagatgtgctgtgttgggggatcccttctatccctggtcaatttggactctccaaagcccagagactgaaatggctaagttgtccaaacaataaagatggaggcctgcccctccccccaggaactctatcctgtcccaggtaggtacaacaatgtcaccaggggctggctggaatttcaagccagtaggtcttatcccgtaggctactgtggaggtggggcctgcagaccgatgctgctctgccccctggattcagctcccttttcagggctatgtatggaggtccaacttttcaccttgcctgagtcactgtcacatttgccggggaccccagagcccacgtatataaagctcccaggactctgtgaatckgcaaagcttctctgccaggacttcacacagttctgtgtgtcagactgaaaaccctggtggagtgggttcgcaagggcatctcctgacccaagagttgcaaaaatccatgggagaagtgtggtttccgggggtcaca

SEQ ID NO: 760213 - DNA, 506 bp, Homo sapiens
actgcaaagctccttcctggatcctttgactccccagtgcactctccgcactgcagccacagtgagcttttctaaatgggaaatctaatataatttactttctaaaatccttttcccctttgcataaaatctaagtttatatcatgccaaatcattcgtgatctcaagaaacataattttacgtaacctcccaacctcaaaactcaccattcctctctttgaagactattctagccacctaaatctacttgcattctagatcacatctcctttcctcaacccacgcacttggccctgcaccctttcacatamcccttaaggttcagtcacctcctggaagaagccttcctgaggctgggttaggtacctctcccacatgctcccataacagcctgttctatgtggcacttcccatattcatagtccctggtcactctcaatagttaatacatttcttaaagacagagatatacctgacttgttatgttatcccttgaacacagaat

SEQ ID NO: 760214 - DNA, 506 bp, Homo sapiens
actgcaaagctccttcctggatcctttgactccccagtgcactctccgcactgcagccacagtgagcttttctaaatgggaaatctaatataatttactttctaaaatccttttcccctttgcataaaatctaagtttatatcatgccaaatcattcgtgatctcaagaaacataattttacgtaacctcccaacctcaaaactcaccattcctctctttgaagactattctagccacctaaatctacttgcattctagatcacatctcctttcctcaacccacgcacttggccctgcaccctttcacataacccttaaggttcagtcacctcctggaagaagccttcctgaggctgggttaggtacctctcccacatgctcccataacagcctgttctatgtggcacttcccatattcatagtccctggtcaytctcaatagttaatacatttcttaaagacagagatatacctgacttgttatgttatcccttgaacacagaat

SEQ ID NO: 760215 - DNA, 506 bp, Homo sapiens
actgcaaagctccttcctggatcctttgactccccagtgcactctccgcactgcagccacagtgagcttttctaaatgggaaatctaatataatttactttctaaaatccttttcccctttgcataaaatctaagtttatatcatgccaaatcattcgtgatctcaagaaacataattttacgtaacctcccaacctcaaaactcaccattcctctctttgaagactattctagccacctaaatctacttgcattctagatcacatctcctttcctcaacccacgcacttggccctgcaccctttcacataacccttaaggttcagtcacctcctggaagaagccttcctgaggctgggttaggtacctctcccacatgctcccataacagcctgttctatgtggcacttcccatattcatagtccctggtcactctcaatagttaatacrtttcttaaagacagagatatacctgacttgttatgttatcccttgaacacagaat

SEQ ID NO: 760216 - DNA, 676 bp, Homo sapiens
gccagagttcaaacacaattgcctaattaaaactgagttatgtattgactgatcgtgataagatacggcaaaaaaaaaatgcatttaggaaggccttcacaattgtatgtgaagagtggataattttggcacttctataaactgctggtgggtgtgcaccttagagaagccttgattgaggaattacatgtttgggaatctaccattcagaattcagaattacttgaacrtgagtgtgagaataatgtatatgagaatatttatttcaatcctgtttttcccatggaaggttggattcaaattgaaaatccattaaaaggaacttgattgaaaaaaattaaggttcatgagacactatgcagcctttaaataaaatgaaggaaaaggggatgcaactgcactaatcatatagtataatctcactgttggaaaaaacaacaacacgtacacatatatatcaatgtcaatatacacataataatgtctggaagaatatgttccaagtaaatagtagagctcagtattggggacgacaatgagtggcacagaagattgacatgttagcttatacgcctacataattctgttaaattttaaaaatagtagttatgtattactttcacaattaaaattacaaacacatttttttcaaaataaatattttaaattctaggtc

SEQ ID NO: 760217 - DNA, 638 bp, Homo sapiens
atttaaaatttacaaaaaataccatttacaacagtatcgaaatatctgaaacacttataaattttataaatgatgttcaaaagccctatgctggaaaatacaaagaatcaagggatatgtcatgttaatagatcataagatgtcaattcttcccatattaatctataaattcaatcaaaatgccaatagactttttgtagaaaatgacaagctcacttaaaatttatatgcaaatgcaaaagacctagaattgtaaagataaattttagaaacgaagttagtgacctttcacaacctggtttcaagacatcataaagctacagtagactataaagtgyaatattgacataaagatagacataaatcaacagatcataatagttttgaaataaattaatgcatgtatgatatactgatttttcaatgaacttttgcagttcaataataaaaggacaaacaacccaaataatagaaatagtcaaaaagatatgaacagacacgccatcaaaaaaaatttttttaaagaaagaaaaacggaaagaaaaacagatgtcaaagaagttcatggtaagatgccaaatctcactaaacattaggaaaatgttaatttaaatacaatgagataccactacttacac

SEQ ID NO: 760218 - DNA, 601 bp, Homo sapiens
gaatcaaagcttctgttttagtcatcttacacgtgatgatgctgacaatttctacaaatagctaacatgtattgagttcttaattggtgccaagcactgtgtaggttactttatgtgtatttccatatttaatcttataatagccccagagttagctggtaccacgattgtcaccattttacatatgagaagacagagtcatgacaaggttactaaatttcccagagttatgcaattagtaagttgctatagatggaaaatgaactcaagtagtctggctagagtttgtgttgtgaatcctcatcctataacacacgttctgcaggagattagagcttgagatatgtaaatgtgggcatcactgacatctataacaactttggcatatattttcagcattttgaatmtacagttaagtttacctttactttgtgaaagttaaattgctttagttagtgttaagctattaagtcattttatatttttaaaaaaaagctattaagtcattttatatttaaaaaaaaaaagcaatggtttccaggagaaaagggtgatacaacaatagtatgacctgatggaaactatttctatttacaaagaa

SEQ ID NO: 760219 - DNA, 576 bp, Homo sapiens
acatgagaactctaggctaaatattttaaggtattagcaaaggttttgtaaggcagctgtgccatttcagatgccccagcaatataagagtgttccaattcctctgcatctgggccagcatttattactgtctgttttctggcaatggccatcctagtrgacataaagtgatagctcaatgtggttttgattttaatttcaatgatgattaatgatattaagcatactttcatttgcatatggtgcatatgtgtttcttcttttggagaaatatctctttaattccttaaatatttaaatttgggttgtctttttactgtcagttaaaagaaatgtttatgttttccggatactaggcccttattagaaatgtaattgacaaatagtttatctaattttgtaaattgatctattaatagtgtccactggggtaaaaactcttttttaattttaatgaaatccaacttatctacttttaaattttttccttgtgattttgttggcatagccaagaaacaattgcctaactttagggcacaagaatttattcttacattttcctataagagtgttgta

SEQ ID NO: 760220 - DNA, 565 bp, Homo sapiens
tatggtgtaaattaggcatccaacttaattctttttgcatgtggatatccagaagtccttgtgccgttggataaaaatactattacttaatgaattgtcttggccacattgataaaatgttgtaacaatgaattttagtgtaaaactgtatttctaaactcccaagtttactctattaatttacatgtgtatctttatattacattacagtaatcagattatattatattatctgattactctatccttttagtcagttttgaaatcaggaaatatagtatgaatcctccaactttgttctatctttttggaattgtttcaattattctaggtctcttgcatatgaattttatcatctgattctcaatttctgcaaaaaagctgaaattttgataakgaaagcattgtttctttaggtcagttttggaggtataaacatcttaacaatattaaaatccatcaccatgaaatatttttaaaaatttagatcatctttaattttgttcaaaagtatcttgtggttcccagaatacaaattgttatggtttggattatgtctgccccc

SEQ ID NO: 760221 - DNA, 480 bp, Homo sapiens
ggctcactgcagcattgactgcctgggctcaagcattcctttcacctcagcctcccaagcagctgagaccacaggcatgcaccaccatacctggctaacatttgtgttttttgtagacatggggttttaccatgttgtccaggttggtctcctgagctcaagtgatctgccctactcagcctcccaaagtgctggaatttaaaaataaatttcttttagaccttcmccgtatattctaagaaaatttaatactcctaaaaatgaaaaggagagtaagaattttggaatgtagaaaactcaaagaaactaacttaataacataaatgacattttaaatatctttggaacagtaaagtgtaactggaacaaaactaatatttgtaaataatgcaaaaacttatttgtataaaggctaataatttggttatgaagaaacatcaacttctagtaggtaaaagtaaaggaggctaagacataaca

SEQ ID NO: 760222 - DNA, 475 bp, Homo sapiens
aaaaaagagccagaatagccaaagcaatcctaatcaaaaagaagaaagctagaggtatcaaattacctgccttcgaaccatactataaagctacagcaaccaaaacagcatggttttctgtaaaaaaacagacacaaaggccaatgggaacataatagagagcccagaaataaagccagccacctacaataatctaatctttggcaaggctgacaaaaataagcaatggggaaaggactccttattcaatatatggtgcttcgacagctggtgagccatacgcagaggaatgaaactggacccctatcttttaccatayacaaaaattaactcaatattggttaaagatttaaacgtaaaacctcaaactataagaatcctagaagaaaatctaagaaacaccattcttgacattggcactggaaaaaattatatgactaagtcctcgatagcaattgaacaaaaccaaaaatcg

SEQ ID NO: 760223 - DNA, 585 bp, Homo sapiens
actacagcactctgttgccattatatttattgggtttattttgttttattattttataatatgcatctccttctagaaatcatgactgttttattcatcctagcgaacgcagtaagcatttaatacatacttttgattgaatgagctaatcttatttggggaacatacctgttcttgaagatttagttcaaatgcacctttcctcctaaaatctcctgtayaggagaacatttgtggggatgttatttttatcgtggtgatgatttcatgggtcaaaagttatcagattgtacactttaaatatgtacaaattatttataatttgttattaactcagcaaaactgttttaaagaaagggaaacatcttaagacaaaatgcagattttctcacacaaataaaagctaacaaaagttacggctatcagacctgcactacaaaaacaaatgctaaaggaagtttttatgcaaaaggaaaatgtaatagatgaaaatgtataccaacacaaaggaaaagagaacacttaaaatgactactttatgaatataaaacattttttctattaaaaattattttaaagataatt

SEQ ID NO: 760224 - DNA, 498 bp, Homo sapiens
catgtttttgatcaggcagagacagaactcagatactgagtacaaaggaagaaatagacaaaattatcttgagtttatcttaggacgtacctggtcaaaaaatatctaggtagagatgtccagcagccaattgaacagagtaacctaatgctcaggagagaggcctagcctagagatttaagtgtgggagtaagctgcacacaaggttgcaactgaaaccccaaaagtcaacgtgtccgcccaagagaaagtacaaagtgtgaagggtcttcaaccagaaccctgttaaataccagaactgtgcattakcctaaggggtaggggggaacaggaaagaggtatatcccagaacacagtgggagtggtcaaaaaggagatggtgatcaacagtataaaatgcagcccagatataaatccaggaaaaataagaactgaaagatgtctactagacttactgacagggttcatgacatgatctcccaaaagatagcaccttag

SEQ ID NO: 760225 - DNA, 498 bp, Homo sapiens
catgtttttgatcaggcagagacagaactcagatactgagtacaaaggaagaaatagacaaaattatcttgagtttatcttaggacgtacctggtcaaaaaatatctaggtagagatgtccagcagccaattgaacagagtaacctaatgctcaggagagaggcctagcctagagatttaagtgtgggagtaagctgcacacaaggttgcaactgaaaccccaaaagtcaacgtgtccgcccaagagaaagtacaaagtgtgaagggtcttcaaccagaaccctgttaaataccagaactgtgcattagcctaaggggtaggggggaacaggaaagaggtatatcccakaacacagtgggagtggtcaaaaaggagatggtgatcaacagtataaaatgcagcccagatataaatccaggaaaaataagaactgaaagatgtctactagacttactgacagggttcatgacatgatctcccaaaagatagcaccttag

SEQ ID NO: 760226 - DNA, 640 bp, Homo sapiens
gaagtctaatgcttcagagtggcaggggtgatttgtgaagtatttggcatgtcctgggcactgccctatcagccagccctcctgctggagcagggccctggaggtccccactgtgctagacattaactctttgattgtcagatcatggggtggccagggtggttgggaggtgtgtacttgtggggttcagggcatgggctatttactgcagctacagaaacatataaaaatatttcagcattttaacaactaactagagtgtacycttgcatcctgggcctggaagtgagatggttcagaatttaggacaaattcattctcataaaatattgttaaattaggcattaaaagatcatgacagtgatctggctgggctctcctgtatccgtatttccaggtgaagaaaccgaggcccagacaaggaagtgacttgctttggtttggctgagttttagctccaacctctttccacagcaacacaaatgccctgactcctttgtcttggctgcacactgtccacatccatagtgcaccatcatcatttcacgtcgtcattagaacaataaccaggcaataggtgttagtgtgtctgaacaataataaaacttgctctgtagttttcatataaggtgagcatcaa

SEQ ID NO: 760227 - DNA, 640 bp, Homo sapiens
gaagtctaatgcttcagagtggcaggggtgatttgtgaagtatttggcatgtcctgggcactgccctatcagccagccctcctgctggagcagggccctggaggtccccactgtgctagacattaactctttgattgtcagatcatggggtggccagggtggttgggaggtgtgtacttgtggggttcagggcatgggctatttactgcagctacagaaacatataaaaatatttcagcattttaacaactaactagagtgtacccttgcatcctgggcctggaagtgagatggttcagaatttaggacaaattcattctcataaaatattgttaaattaggcattaaaagatcatgacagtgatctggctgggctctcctktatccgtatttccaggtgaagaaaccgaggcccagacaaggaagtgacttgctttggtttggctgagttttagctccaacctctttccacagcaacacaaatgccctgactcctttgtcttggctgcacactgtccacatccatagtgcaccatcatcatttcacgtcgtcattagaacaataaccaggcaataggtgttagtgtgtctgaacaataataaaacttgctctgtagttttcatataaggtgagcatcaa

SEQ ID NO: 760228 - DNA, 561 bp, Homo sapiens
aagaaatgctgacattggtcaagttgaaatgaaaggatgctagaaagcaacacaatagcgtatgaaggtataaagtttactggtcaagataaaatatgtagtcaaatacagaatattacattactgtaatggttgcatataaatcacatttactttggtatagaagttaaaaaagaacagtataaaaatgaactataactataaaaaatatgtgaatggatccacaatatataaagatgtcatttgtggcatcaataatgtaaagcgtgtgggagaagtmaaagaacagaattttcccatgccatttggtattattttaaaacagattgttataattacaatgtgttttatgtaagcctcatggtgattaaaaagaacatacctataaaacatacacaaaagaaaatgagaatggaatcaaagcatgtcactacaaaaaaattaaagaaacacaatggaagagaccaagagagaaaaataggaacaaaaaaaacctacaacacagaaaacaacaaaatggcaatagtatgattcttcttatcaataattactataaaaatg

SEQ ID NO: 760229 - DNA, 592 bp, Homo sapiens
aattggatttatagatttttttacaagtaatgtaattattgatatgattatatttcagtttgctctcttgatatttattttctacccatcccgtttgatcttcattatctttattctttgtttactgccttcttttggataaattgaggacataattttaactccaytgttcacttactagtaatatacctttttttttgttttcagggaagtttctaatgcttacatgatagacagatagatagataaatagatagatagatagatagatggatagatagatagatagatagaacttttattctacctttaacaaacactataccttttgagatatatagtgtaagaaccatgtaacattatacttctattttccctgccatcttttggatcttattttcatacattttacttctacgtatgttataatccccataatactttgttgtttttgctttaaatagtcaattacacttaaagagactaaaatcacatgatgataatttttacattcatctaaatatttaccatttcaaatactatttatttctccctctagatccagtttcttttctgacatttttcttttcat

SEQ ID NO: 760230 - DNA, 592 bp, Homo sapiens
aattggatttatagatttttttacaagtaatgtaattattgatatgattatatttcagtttgctctcttgatatttattttctacccatcccgtttgatcttcattatctttattctttgtttactgccttcttttggataaattgaggacataattttaactccattgttcacttactagtaatatacctttttttttgttttcagggaagtttctaatgcttacatgatagacagatagatagataaatagatagatagatagatagatggatagatagatagatagatagaasttttattctacctttaacaaacactataccttttgagatatatagtgtaagaaccatgtaacattatacttctattttccctgccatcttttggatcttattttcatacattttacttctacgtatgttataatccccataatactttgttgtttttgctttaaatagtcaattacacttaaagagactaaaatcacatgatgataatttttacattcatctaaatatttaccatttcaaatactatttatttctccctctagatccagtttcttttctgacatttttcttttcat

SEQ ID NO: 760231 - DNA, 592 bp, Homo sapiens
aattggatttatagatttttttacaagtaatgtaattattgatatgattatatttcagtttgctctcttgatatttattttctacccatcccgtttgatcttcattatctttattctttgtttactgccttcttttggataaattgaggacataattttaactccattgttcacttactagtaatatacctttttttttgttttcagggaagtttctaatgcttacatgatagacagatagatagataaatagatagatagatagatagatggatagatagatagatagatagaacttttattctacctttaacaaacactataccttttgagatatatagtgtaagaaccatgtaacattatacttctattttccctgccatcttttggatcttattttcatacattttacttctacrtatgttataatccccataatactttgttgtttttgctttaaatagtcaattacacttaaagagactaaaatcacatgatgataatttttacattcatctaaatatttaccatttcaaatactatttatttctccctctagatccagtttcttttctgacatttttcttttcat

SEQ ID NO: 760232 - DNA, 311 bp, Homo sapiens
cttcttggatgtgtagattattgtttttcatcaagtttgggaaatgtaaggtaatatagtcttaggggtactatttttaaaagatggtaaagaaagaccaatctttggctgtgaaatttggccacaggcatgaattacgtgctcatgtacttaaatagctyatgtactcagagctttcaatctgctctgtggtgtttctcccttaaatagcagaaggtgtagcatgatcaccagatgtattagtgttctactgttgtgtaagaaattatcatattataaacttagaagcttaaaatgatatccatttattg

SEQ ID NO: 760233 - DNA, 590 bp, Homo sapiens
tcattgtaatgatgacatttgagccactaaaaatatctcctcaataattgaatgcttgtttccaatttctactgctttctttggaaaagacattatttttgaactatgcgctcatgcaaacttttacctcctgtgttgcagcacctatcccatcagactgtaaattatccgctttatgtgttcatcactcactgtggaatataaagttgatggacttgacaattagtgttatgagttattcaacttctttatcagagtacatagtaggaactaaaaaawctttttaactattttgaaaatctaaatataaaactttttttaaagtttctaaatggttatatttcaaaataaaaagatgaaaaattaagtatccacattaagatgttagcaacagaacaacagaataaattcaaagaaaatagaaaatagaaaaaatatagaaaagatgaaagtcaattctattaaactttcaaggataacatcccattcttataaaaagtatcctagaaaataaaatgcaaccattcttttagctcactttatgaaagcaaaattagacaagcatagtgactaaagaaaaacaacagtcc

SEQ ID NO: 760234 - DNA, 487 bp, Homo sapiens
atttggttttctgttcctacattaattcacttaggataatgacctccagctgcatccatgttgctgcaaaggacatgattttcatattttttatgctacatagtatttactggcacataagcaccacattttctttatccagtccaccaatgwgggacatctaggctaattccatgtctctgctattgtgaatggtgctgtaatgaacatacaagttcatgtgccgtttggcaaaatgatttattttcttttgtagtaatgggattgctgggtcgaatagttttgtttttaagttatttcagaaatctccaaactgctttccacagtaactgaactatttacattcccaccaacagtgtatatgcattcttttttctctccagcctcagcagcatctgttgttttttgactttttaatgatagccattctgactgatatgagataatgcctcatcgtggttttggatacgcatctctctgatgattt

SEQ ID NO: 760235 - DNA, 487 bp, Homo sapiens
atttggttttctgttcctacattaattcacttaggataatgacctccagctgcatccatgttgctgcaaaggacatgattttcatattttttatgctacatagtatttactggcacataagcaccacattttctttatccagtccaccaatgtkggacatctaggctaattccatgtctctgctattgtgaatggtgctgtaatgaacatacaagttcatgtgccgtttggcaaaatgatttattttcttttgtagtaatgggattgctgggtcgaatagttttgtttttaagttatttcagaaatctccaaactgctttccacagtaactgaactatttacattcccaccaacagtgtatatgcattcttttttctctccagcctcagcagcatctgttgttttttgactttttaatgatagccattctgactgatatgagataatgcctcatcgtggttttggatacgcatctctctgatgattt

SEQ ID NO: 760236 - DNA, 487 bp, Homo sapiens
atttggttttctgttcctacattaattcacttaggataatgacctccagctgcatccatgttgctgcaaaggacatgattttcatattttttatgctacatagtatttactggcacataagcaccacattttctttatccagtccaccaatgtgggacatctaggctaattccatgtctctgctattgtgaatggtgctgtaatgaacatayaagttcatgtgccgtttggcaaaatgatttattttcttttgtagtaatgggattgctgggtcgaatagttttgtttttaagttatttcagaaatctccaaactgctttccacagtaactgaactatttacattcccaccaacagtgtatatgcattcttttttctctccagcctcagcagcatctgttgttttttgactttttaatgatagccattctgactgatatgagataatgcctcatcgtggttttggatacgcatctctctgatgattt

SEQ ID NO: 760237 - DNA, 621 bp, Homo sapiens
ttccatggctctggatgacctcttcctcttaaacctaagtgtaaacagcctggtatcccaggcccatgcactctggacctgtgatatgagtggtggccctgatgatctttaaatagcctttggggtcatttctccattatcttgaagaatagtgcctggcttcttttggatggttgatctatactaatctacttataaaacagccacttgtccacacacagtgttctcattatttgcaaaatacataggctaagaattttccaaatatttaagttctgcctttttgcttagtaatttcatctttaaatcacttctctcttcttgcattttactataggtggtcaagaggaaccaagtcacacttcaacaccttgcttagaaatttcctcagctaaatatccaattgtattgcttccaagttctagcttccataaaacactagactacaaacacaatttagcyaagttttttgtcaatttatgacaagaattgcccttcttctgttgttcaatgacatgttcttcatttctatctaatctctcatcagaatggcctttaccatccgtatttctactaaaattctgttcattatttagttatcctctatgaagattaaggctt

SEQ ID NO: 760238 - DNA, 597 bp, Homo sapiens
gcatacttcatcatatattgtggatctatttctgtacctgtattatgtttcattcaactatttgtctgtgctaatggtaataccacactgtccagatcactggtaagcttaaagcaagccttggactcagataatatatatcatctcttttctttttgaagattattttgttttttcttgggccactttgttttcctatacattgaagtatcagcttattctttaaagaaaattttattttctggaaatgtgataggattttcattgcttctatagctaaatgtgaagtgaatttacatcttaagcattgagacttccaactgagtactctgcatatttctccatttatttagtgatttttaaatttgtcycaacaatgtactgtagtattatatagtactatgaaatgtagcaatgcattgttgctagtatacacaaatttaattctcttttataaattgattttatgtcataggaagatgctaaattcaatctttatgcttcttatttctttattttgactgataagacctccagaaaaatgttgggggcagggcatagctgaacaaaaggcagcagaaacttctgcagacttaa

SEQ ID NO: 760239 - DNA, 657 bp, Homo sapiens
tcttgtttttcatcttatctctaccacttggtgcaatttgtctgtccttaatcctcacttttgtaccctgcccaaggtttgctacatgtgatctgagtaaatagtaaaaacctctcggtgaagatcttaactgttagtaatgtttatgaatattcaaggataggcattgtcatatctgtcttgggatttttagagttgggttttggtattagctttttgtcttcctgattctcagctgtttttgaaggttgagggagaagcatttatttgtgtacctgctttgttctgggtaacttacatgatctcacttaatactcatctcactaaatcttcacaacaatcttatgggaagatactgttttctcactttatgatgaggaaaatgaggactacagactgattagggataagatttatctgatttcagatcttgtctgggctttgcatgaaaccaggctgcctggttatgatcatcagatcatagtctgctgcctttccactctattgtgctacttgacmtggttaggtacttgatttctagatgaattagttattaacttgtataagtctcaagtttctagctttgagtgaatgcgagtttgaagtagtactaacgtgggaatggtgaccttcaaaacagtgcagtgcagttgttga

SEQ ID NO: 760240 - DNA, 607 bp, Homo sapiens
tctttgctggagaacaaggattgtactcttcttgatttctgtattcacattacttggtgaaagaataaataataaatttagtactctaagttatttgtatcttctcttttataattcagttggaagtaagagagacaggatcacaataktaattgaagataaactgaggataaaatggattgtgtttggaaactgatatgaccaaaataatacggaaactttgacaagttatttaataataagaactcctttgttaatagtgtttctttcactttctctttagttacatattaattatattcttcactggtttataattaaaataagcataaatactaactgcccctaactatagtgacttgtgactagtgatctcagtagttatacaatacaggggtaatattttaatatctacttttttctttggctgtttcaggtcatgggagataatctgctgctgtcatccgtctttcagttctctaagaagataagacaatctatagataagacagctggaaagatcaggtacatgtacatatagctttaactttaatatcacctcactttgctttttgctttttctcaaggttaaaaatgtgtcatcaga

SEQ ID NO: 760241 - DNA, 648 bp, Homo sapiens
ttttattattttaacaagtagaaacctagaataaatactcacaagtttcctacttcccttatgcttgggaagtcatctttttcccccaagtagtcatgatagttacagctttctacccttgaagtcatgagtgctctgaagtggtaaggaatagaatttagtacatggttataaaagtcctttcattacagagttaagtaatggtgggaaatgtgacctctactctttagtgaatagatctttttaatatacagaggcattgttctttttggyttaataatgaaggcattcattatatctagcacttggttctaatctcatcttggtatagaatccattgtttgataatgtaatatgaccttgattgcaattcatggggaacagtcatggttgtggttgctgtaaggaccctaattatagcatttcttttgcacttgcaaaatgaacttcatttttatcaatgcttatgaagtttgagtaatcaaattcttttaggaattgctgttggttaatcattgatgagatatttccttacatttttgtgattagctctcaatataatttgatgcatgtactttttctttgtagttatctcatattattgttagtgaaaattgaaaatgtccctgtgctctgataaattaccca

SEQ ID NO: 760242 - DNA, 607 bp, Homo sapiens
aaatgcatatactaggtaattagtcatagaccttttttgaggagcttaaatataatttctgattttaacactgtaagataatttattaacatagataatacttttaccatggtgataatgtactcatttctagatataaaaacttccgtgagttgaagtgatcctgagacttgaaaccaattttrggaaaagtttagaacaagagtaaagaggtttagaaaaaacttaagaaatacagcaggcaaaataagaaatagtgtaaacaaatttgtacttttcaaaaaaacatttcattaaatgctaaatgtgtgtttattgtgctatcttacaatagtgttcataaataagaaaaaaatcatttgttatatcaaatgtcctgatttttgattaggcaactatggtcactatacatatgattggaaactagagagaaaagaaaagcaattaacaaagagctttaataactgcagaacatatgaaaatgtaagtatgataaaactaagacagttaattttgaggtaacttagaaagaatggcatcgatggctgatatatttcgtggcagactacatgaaagcagaatgagaaattgagtaccaagtgctatt

SEQ ID NO: 760243 - DNA, 590 bp, Homo sapiens
ttatgtgctttgtattcagagctgaagccattgagatacatgtgtgaccaaagagtgatgaggtggatatttctttgtgtcctatatgcatgttctcattacttcataatgagcctcatatgtgggcgtggctgcaaaggccagtgtgggaggccagctgttacaacagacttgaagatgtgtgattattttcagtaggcagacatctaagtaagccctaagtcttgagttaagagtggaggggaattgatatgaaatttcatctttttatttttgattggtttacatctaccacaccatmtcctacaagaccctaaaggaacagtactttgcatatgatacttttttcacttttcttcctcttttcactgctgctttcctccactccattcacctgtatctctttgctggtcagtgggtttggtaatgatggtcactgtctatggtagaaatggacgtagggtgaagccagataacatataatcatgattccaaaaaaaaatagacaacattttccttattaccccagtcctcatttccacacttgaagctttggttggtggttcacaaatttattgccaaatatttta

SEQ ID NO: 760244 - DNA, 545 bp, Homo sapiens
tgggagtgacttctctcatcaatggacacactgctttgtgctcggtttcctcccatacctctctgtcttttctaatggaattcctttgcatgcagcagcctagcacctcttactagatcatgtgtccagctgaactttacttaacagccaaacacacagttattttcacaacaatattttcaggctgtgtattaagcctatttcacagctgtgatcacaggtattaaagaacagatgtattgatttgcggggcacccatttttcattgtatttgatgtccttgtccacaaggcggaatggcaagaggcttagaaatctaaccatgtaccggttatgttgtrtttgctttgagcctatatcctcattgaaaacagctgctgaactcagagttattatgaagactcctggagagaaagcagaatggaataaatgggaagagcacaggctttggagtttagagagagctggtgagaatgccatctctgtctcccaccagctgtaggatatggggcaagttattttacctctctaagcttcatcttcaa

SEQ ID NO: 760245 - DNA, 605 bp, Homo sapiens
tctcacagaagcacagtgaaatgatttctcccttattctaccttcactaggtgttgcatgccacaatgccccagtaatctgtgatttttatgaagtaagatcaagctactaccctcaaagaacttatcatctagtcaggcttgaaaaggtaagaagcaactcaaggcaggatatgctcagagatgtgtgaatttcacaggcagtaagttctggaattcaggggttagggtggcttatatacagcttatgttgccctctgttggaggagaggactttgaagctcttacaccaattttcatacaactagttctcatttcattcgtgtctctgatctgaacccctcctcaaagaagcctttcatgaccactctactctgcctaaaacacactcatgcacacacacgtgtatgcacacacacacagacacacacrtagagacacagacaaacacacacacatacacactgtgccattatttatccctttcccccgctttattttctatcttctccaggagaatgtgagttcccagggcagaaagactttgtcttaatcatcactgggttcctggcacctagaggagtgcctagcatatagcaggcactc

SEQ ID NO: 760246 - DNA, 566 bp, Homo sapiens
aggtacaaaaaagagtgtctctaaaatttcagcacagggaaagggagagcccagagaggttgtctaatctaatggttgttgaacttcccagaatgttgctgctttagcacacttgttggtgcaccagcacacttggccataaggacacttttttatcttctcctttttagcacatgggcggacacatcctctttttcttcgaacaaagccgtaaatgacctgaagtagtatttctgaaagcatgctcctctgtttacctgaggtgcttgttaaaagttcagatcgtcaagcttcattcttaaccccctgaacccgtctctttctgctggtgggatttggggatctgctctataaacagtctccccagtgatccatttatacctgagtgactcagaaccactgggctrgagccagaaaggggagagttttactgaggttccagagtaaatcatgaaaatcagtaaatgtaaaatgggtaaaattacaaagttcgggctctggatgcagcaagatcctgaacagagacacctaaatgtccagctgaggtctggctgccttggaagacc

SEQ ID NO: 760247 - DNA, 599 bp, Homo sapiens
gagaccagcctagatgacatagatagactccatctctaaaaaagaaaaaggaaaagaaataaaaaagaatgagcaaaagtcacgaacaaacaatttacctaaaaaagatataaaatgcccctaaacacttatgagaagttgttcaattcattataagaaaaatgcaaattaaaactacagtgaaatgacatttatcacctatgaataataagcaaaaattttagaacttggcaacactctatgttggcaaggctgaggagaaacagacactcttacacattgctggtaggaatgcaaaatgatacagccttatgggaaggaatttggcagtatttaacaacactatatatgcatttaccttttgttccagaaatcccacttctaggaatttrctctaaaaataagcctgcagaaatacaaaattatatatgtacaagtttattcactgcagtattatctgtcattgcaaaatattggtaataacctaaatgctcatagatagatttattgaataaactaaattatatccacacaatgcagtgctatgcagtggtaaaagagaatgaagatgaagcaatgtggagtgatttccaggaaat

SEQ ID NO: 760248 - DNA, 614 bp, Homo sapiens
caaaaaacaagagattctagtctacctgagtcggcataaggaagtcccctctgttttaaccccataacgagagcaactttgaaacaaccaatccactttttattctctgtttctgctttcttcagtgcttttcagcctataaagtcaatctcctctgctcagctcattagaacagtcattcttaatgagatgttgcctgattctggaatggcaaatggaagtcaattcaatctttaaactaaatttgttgtaattttttcttttgacacaagtaagaattaccagtgggtgctaaaactagtgggtgatgattcaataaggaacaggatatttgcctagttttaaagtatctttcaaaaattacttattaattacacaggggaaaattataacttacagtaaagaaacctggaggacaacaatgtaaccaagggatcaatgccaccatyacccatgagacaaagcaaccacatgtgccttcaaataccatgttctgagaaggacacaacatacatctgtgagtttcaagctcaaatgcaagatctgaatctcatcataaggaaatgttagacaaacccaaactgagggacaatttacaaaattactgacctgtg

SEQ ID NO: 760249 - DNA, 626 bp, Homo sapiens
tattagaggggctgcagagctctgagaacaaaaagaaaatcataacagcaacgagagaaaaaagacaaattgctaataaaaggacactagattgacgacagtcttcttaactgcaacaatagattctagaagacaatgaaagactattttcaagagctgagggaaaataactgtcaactgagaattctgttccattatcactcaagagtgaaggttaagtaaaagcgtttttagrtgaggactgtataaattaccactaactgacccttccttaaagaactagtcaagagcacatttcagaaaaaaatgaaaacaaacctaataggaagaagtgggatgtagaaaaatgacaatgagcaaataaatcattacagttttgggtatatacaaaggatacatccctccttactgtataaaatgagaaaaataacaaccaattcctatggtatacaaataatactggtcagtgataacataaatgataaacaaatgtaaagttaaaatatattgttattagtaagagcagtaaaacaatatatatataaaacttagatattgttaaaataagtatgcatgttcaaaaattaagagtaaccactataagaactgatagatggtaggcctta

SEQ ID NO: 760250 - DNA, 458 bp, Homo sapiens
cagctatattgtctgtctccaatttaataaagttaggcatcattaatgaaaaggtaaccagccaatccttcatgcattcgtaaactttaaaaattccaaataatttatgactcaaagaaaaaataattattgagacgagaaatgtttttagaactgaatgaccaaaacaaaaygaaataaacacgaaaacaaaactctacaactcactagacatgtgagatacaagtgaaacgtacttaggggaaatgtatacccttaaaatttaccaaatattagagagaggaagactgaaaagtaatgagttaagtgtccactgcaagaaatttgaaaaagaactaaataaatctaaaaaaaagaacataataaagacctgaaaatatatcgtaaacaaacaaacaaacaaagagaatatctgtaaaactaaagctagttctttgaaaaagctaatcagatagatg

SEQ ID NO: 760251 - DNA, 616 bp, Homo sapiens
gagctctctgttcctatcacagcctgtacctcccatgaaaaccctgtcacagtttctgatctgagaggagcctgtttgcctgaaggaagaaaaattctctgtttctttctgccaggttttctcgcttgtccaggatgtgtccccctggcctggaatgggggtgaaagtgtaggggctattagctgaccccagcctggatcctgcccagcagtttgtctgcagctggaggggccatgtccttggcccctaccctctgacaagctgatagtgcctgggcttagttatgaagcattcaaccccatgaggccgggagaccgtaggataattgtggccctttccaattccttgacccaaagcttgcattttagctaaaatgtcttgcaacttggtttggtgcaaatggtggctgcatggtattgtgacaagagctctaagctrggagccagagacctgggtctgggttcaaactctaccactcaccagatatgtgacctgggtctgggcctcagtttcctcatctgccacaagagggctgacatatagactctccaaaggctcttaacgttgcagtattatctagtagtgtgggttgtgagcatggctaaggagccagagt

SEQ ID NO: 760252 - DNA, 616 bp, Homo sapiens
gagctctctgttcctatcacagcctgtacctcccatgaaaaccctgtcacagtttctgatctgagaggagcctgtttgcctgaaggaagaaaaattctctgtttctttctgccaggttttctcgcttgtccaggatgtgtccccctggcctggaatgggggtgaaagtgtaggggctattagctgaccccagcctggatcctgcccagcagtttgtctgcagctggaggggccatgtccttggcccctaccctctgacaagctgatagtgcctgggcttagttatgaagcattcaaccccatgaggccgggagaccgtaggataattgtggccctttccaattccttgacccaaagcttgcattttagctaaaatgtcttgcaacttggtttggtgcaaatggtggctgcatggtattgtgacaagagctctaagctgggagccagagacctgggtctgggttcaaactytaccactcaccagatatgtgacctgggtctgggcctcagtttcctcatctgccacaagagggctgacatatagactctccaaaggctcttaacgttgcagtattatctagtagtgtgggttgtgagcatggctaaggagccagagt

SEQ ID NO: 760253 - DNA, 645 bp, Homo sapiens
tggcttcagcctctactgttttttaatttgaccaaaagacattgtcagatgtaaacatcagtggaaggtccagcttttctttgcttggaaaatgctggagaattcacagtgaagagtaatcttggaagcttgctctccagccactggcctgttacctgagcactgatgttcaaacaggggtaagaaagttcaaagtgtcggcttttctgctttgtcctccaggaagtcaaacatctgctgtcctccaaaactgaatcctcattgacagaaattctagaagataggctgaagccatccttgtcctagggcttgttggggctccgaagaagaaaaaaagcccttggatagaggcagtatcatgttcatttaacctttccaagtcttgatttccttatctgcaaaatggggttrttgtgaggattggtggatagtgcttgacacatggcatgggcttacatgtaagtgttagctatgaagaatatgtgtttcagagctctcagggtttgagcccttcttggcctgcgaatcccatggagatggagatgcgcacctctcacaggagccaagtcattctcccggtcttctgtgtttttctgggtagatcggcttccatgacctgtcctggtgtccctgctttccccagtc

SEQ ID NO: 760254 - DNA, 446 bp, Homo sapiens
aggtatgcagctccacacatggggaggccaggacatccagttaggcctatcgaaacaatatttagaaaaaaaaaacacacaatagtggtcatccttgcttcttagcaatttttactcatttttttattgttaaaggaaaaagtcagctgggcttatctcatttgtccatttgttcgagagacaacttgttttattttcaaagttacaatcgataatcttgaaaacagaaacaatactatagtaactggccaacacatttttttatagaggtaaagaaatccaacaartgcattcaaaatttagttcaggagcagcgaggagtgatgtttacttgtccctttgcttgagagacctggggtttctcccaccacccagggtgcattatgaggctggagtgggaggaccatctgtatttaattgaggaaggaatagtaacctattgcctg

SEQ ID NO: 760255 - DNA, 553 bp, Homo sapiens
tgcctcctttacacttatttgtcatattaggaaaaatattgaggggcagaagtgtttgcagctgtacatttaaaacatctcatgtagcactaaagtttgatgagatgaactgaacttcatttcattatagtgactttttctttctcttttttcttcctcactttagctgtcaccttcactatggtgtcagtccttgggttctacttatggagactcatattattttgccrgaaagcctaagaacgagtttagctattaaaagtaactctacttctgaagtcatattttattcccctgcaatagtttcaataccagggcaagtaaacagtgattaaacaaaaaatggcggcaattatctttgcgggctttgctgtacacataaaatctcaaagaaggactgaattctttgaccaattgaaatgatccccaaatttgaagagaagccatttatttcctggtgtactttagacttcatcttcagaactgccgtttttattaattgtccaattcagaattcaaagatagtactgttctgcttaggaattcaaagcaa

SEQ ID NO: 760256 - DNA, 545 bp, Homo sapiens
gtggcagtttcattcataatatccaaactggaaacaattaaactgggttattacaacaaatgcaaatgtccaatggaagaatacatgcttatactgtgatatatttatactatggaatactatttagcaataaaaaggaatacttactattataacaacaatataaatgaatctcacaaacattacacatactgagtgaaagataacagataaaaaggatggatcagacacaagggaatcagacacaaaggaatactacatgctgtagtattccatctatctggaattctagataaaactaatctagacaaaattgtagaagtagaaattsttaggggtggcaaatatccaggttaccagcagcaaatccatacaggcctgcagcaaccccaattcttgtctcctcagaagaaagaatttgacagaggggcataaggcagcaaaagagactgaggcaagtttcagagcaggagtggaaatttattaaaaagctttagagcaggaaggaaagaaaagcatatttgaaagagacccaagcaggcact

SEQ ID NO: 760257 - DNA, 585 bp, Homo sapiens
tcaaatatggctattcttagctatgttttcatgtttaacaatgaagcaccggccgggcatggtggatcatgtctgtaatcccagcactttgggaggccgaggcaggtggatcacctgaggtcaggaattcaagaccagcctggctaacatgatgaaaccccgtctctactaraaatacaaaaaagttacccaggcatggtggcaggtacctgtaatgtcagctactcaggaggctgaggcaggagaatagcttgaacccaggagtcggaggttgtagtgagccaacatcgcaccactccactccagcctgagcgacagagtgagactccatcaaaaaatataaaaataaaaaaaaaaaatgaagcaccaaatgcctcaatggaaactctactttttaacttatggacagcattgtagggtaattaggaagtaggtaaccagctttttcattggatggccccaaaatattatttatgtaagtctattcacctatgcttttaactttttctagaatactcttcaactaactgtagtctgcacttacatatccagttcccagcatgctgagattagaatgcgggaaaa

SEQ ID NO: 760258 - DNA, 451 bp, Homo sapiens
tttgaactaactggagcactcagtctgtcttggtgaatttgcaaagaggctacctacatacatctttcctctaagcttcagattaatcaacatgactgcttatacggttaaaacattctgtgtttcctgtatttgctggctagacaaagggkttatttacactgtggttgcttgtttgtttgttttttactttattgagcctttttgtgattagatttaaacagtataaattgggaagctgggggaaacaaggcagggagaatagagagctacaaggattgagttatgattctgacccttcctgatggttcctcatccctatcccctcttatcagtaagcagtaatggcacatttgacctttatttaaatgaacacaccaaaacagaggacagtatgaaaactatgactgtgtcttatttacctttgcaccctcacgacttggccatgtag

SEQ ID NO: 760259 - DNA, 593 bp, Homo sapiens
cagcaagtttgttcttagatctaattgaaattctgtctttaattaagttggttccctaagaattactgttattccataacactatcaatgacagcaatgataacatcccttagtgcttttacttcaaaactacttagcacttttattgcaaattgcatgttatgtgtataataattctgagaggtcaatggtaaatgagataatatccttattttctggatagaaaatcttcatcaaaacaaaaagcttttcctggtaagttagtggtcttaaagctgaagctagctatcttttctataaagagaataactacttagtgtcattttcataaaatcccaccatattctaaaagggaggataatattgatcttggcctctactttttaggytaactaccctaatccttaactttcttcccagggcttctttactaaaggtttcttaacttttcattcctctttttcgagctttcttaagtcttttatgtccttttggaagtgtggcaacttaagccttacatagtattttagtaaaattgtgactaataaatgtttagtttcttgtaatataaatgaaattctctgcttatctac

SEQ ID NO: 760260 - DNA, 550 bp, Homo sapiens
cctcggcctcccaaagtgctgggattacaggtgtgagtcgccgcgcccggcaaaaaaaaaaaaaaaaaaaaaacttttcaagaacaaagttgattgaggtaggaaraaactaaggagacactgttcaacagtattctaggcaggacctcgcctaaaatagctgagatttctattttctatgtgagttcccccaaatgactgtttcaaactctgtcgcgggtgtgtgccaatcctcttcccataccaacactgttactatctcttggtttcatctgcctaagcagggttttggatggcaggaggatgggggtgggggaagcaagggaagaactggaaggaagtgtgactttgcgctatatgtgagaattcgcctttttagggaagacccctcaaaatcaagagacttatctgtcagcctccagattaatagcaggcgaattaaaaagggggagtcttgaggctggggaggaaggagtgaactgattaggggtgtatgcaaatttaggatcccgcttcagctcccaggaggaggggctgtctgcagcctttt

SEQ ID NO: 760261 - DNA, 550 bp, Homo sapiens
cctcggcctcccaaagtgctgggattacaggtgtgagtcgccgcgcccggcaaaaaaaaaaaaaaaaaaaaaacttttcaagaacaaagttgattgaggtaggaaaaaactaaggagacactgttcaacagtattctaggcaggacctcgcctaraatagctgagatttctattttctatgtgagttcccccaaatgactgtttcaaactctgtcgcgggtgtgtgccaatcctcttcccataccaacactgttactatctcttggtttcatctgcctaagcagggttttggatggcaggaggatgggggtgggggaagcaagggaagaactggaaggaagtgtgactttgcgctatatgtgagaattcgcctttttagggaagacccctcaaaatcaagagacttatctgtcagcctccagattaatagcaggcgaattaaaaagggggagtcttgaggctggggaggaaggagtgaactgattaggggtgtatgcaaatttaggatcccgcttcagctcccaggaggaggggctgtctgcagcctttt

SEQ ID NO: 760262 - DNA, 550 bp, Homo sapiens
cctcggcctcccaaagtgctgggattacaggtgtgagtcgccgcgcccggcaaaaaaaaaaaaaaaaaaaaaacttttcaagaacaaagttgattgaggtaggaaaaaactaaggagacactgttcaacagtattctaggcaggacctcgcctaaaatagctgagatttctattttctatgtgagttcccccaratgactgtttcaaactctgtcgcgggtgtgtgccaatcctcttcccataccaacactgttactatctcttggtttcatctgcctaagcagggttttggatggcaggaggatgggggtgggggaagcaagggaagaactggaaggaagtgtgactttgcgctatatgtgagaattcgcctttttagggaagacccctcaaaatcaagagacttatctgtcagcctccagattaatagcaggcgaattaaaaagggggagtcttgaggctggggaggaaggagtgaactgattaggggtgtatgcaaatttaggatcccgcttcagctcccaggaggaggggctgtctgcagcctttt

SEQ ID NO: 760263 - DNA, 615 bp, Homo sapiens
agttgggatcccaaaaatagtttgtgacagctggtgttgagaatccacgtgtcagcaggtatgtgggcagagggcaggaacacgcaggctgcgctgacggtggctcctggtttctgagtcctgaggcagacagcagccctgggaagggtataatgaacccctgctctgtgtttttttccccaatatctgtggtccttacatgaccttgcaaggctattattgttctttccatttacagatgaggaaaccagggcttgggaaggcaaagtggcttgctgaaaatcagtgggctgtagagctggaatttcagttcaggcttgtctggtgccacaatattcaaactcctttcctttaagctgcaaggctacagaaccttggggtgcacaggaagccacatgacccagtcttggggtgcacagraacccacatgacccagtcttggggtgaaccatggagagcaacaggcattgacctctcaggcacactccatgccatctgtcttgaacaggcatatgggcacgacgtgttcaggaaagaaagacctagacgctcaccctctctctcttttcttttctttttttttgagacagagttttgctcttgttgcccaggctg

SEQ ID NO: 760264 - DNA, 615 bp, Homo sapiens
agttgggatcccaaaaatagtttgtgacagctggtgttgagaatccacgtgtcagcaggtatgtgggcagagggcaggaacacgcaggctgcgctgacggtggctcctggtttctgagtcctgaggcagacagcagccctgggaagggtataatgaacccctgctctgtgtttttttccccaatatctgtggtccttacatgaccttgcaaggctattattgttctttccatttacagatgaggaaaccagggcttgggaaggcaaagtggcttgctgaaaatcagtgggctgtagagctggaatttcagttcaggcttgtctggtgccacaatattcaaactcctttcctttaagctgcaaggctacagaaccttggggtgcacaggaagccacatgacccagtcttggggtgcacagaaasccacatgacccagtcttggggtgaaccatggagagcaacaggcattgacctctcaggcacactccatgccatctgtcttgaacaggcatatgggcacgacgtgttcaggaaagaaagacctagacgctcaccctctctctcttttcttttctttttttttgagacagagttttgctcttgttgcccaggctg

SEQ ID NO: 760265 - DNA, 548 bp, Homo sapiens
tttcaacttttcacatcattacaaacaatctcatgttcattttttaacataacaacgtttatttatttggaatacatttttgttagtggaattgctgggtcattgacaaattgtctaggtctaattaaacatgttcatactgtgtaccaagaggagatgtagcgtggatggcaccaaagtcagggaagtctttccggctcctggtctgctggtctgcccttttgaaggccttggagtgttacagccataccctggcctttcccaggcttttctttccctggcacggatgcagtgtgtgcggtcagagctggcgagttcgagacttgtccgaaccatccacccgcagccrggccccgctgcagaggctgcggtggccctcccagcccctgggaatctatccccaggtcccctccccgaccgcgggagggcgtgttaggggagcagcttaggcaagcgacgattgcaccatccacgttttgaaaagaaagtccggggagcgcaaggaggaaacttttacaatccaaaggttgagccccagcatccatact

SEQ ID NO: 760266 - DNA, 522 bp, Homo sapiens
agctttgccggcctctggcagcttccaggtccaaaactccaaagataccctcttcccatcttgtttctgcctaaggctccaattagcatgttgatttaggacagttacttgcagttctactgggccatcaccatagggaccacagatctagggtcagttgcactgcttgtttagcttgttcaaaagccatggtctctttctctccccagtgaaagtcatagcgttttctaatgactgcatgcagaggttgtaaaatgttacccaaatggggaatatgaygtttccagaatccaaacaagccaatttctgggcttcctttttattggtaggggttgcaaattctagtattttagccttagcctttggtaaaacggattatttcccttattccataggatgccaaggaatttgtttgtgcaggtccttgaattttactagggttaatttcccatctttgagataggagctgggtttgtacctgctccaaaccctggctgactacttcttcagtacttctacttc

SEQ ID NO: 760267 - DNA, 600 bp, Homo sapiens
gcggaggttgtcgtgagcctatatcatgccactgcactccagcctgggcgacagagcgagactccatctcaaaaaaaaaaaaaaaatgatgaggtcatactacagtgtgtgaacccctaatcctataggactgttcgcctttgaaaaggggaaatttagacacagaaacagccatgcaaagagggaagatgatgtgaagaggcacagctcagacacccatcttcaaggcaaggagagaggcctggaacagatcagaaggaatcaacctgccaactccttcatttcagactgctagccacaggaacygttgtttaaaccacccagtctgtgattctttgttatggcagccctagcaaactaaccagcaatgccatcttcatctgattctctttaaatactccaagcaggagaccagttaccatttaagtccaactaccccaagaatatcagactggggaggccacatgtaggtacaatggtcaacagccccggctgaactcaacagccagcactagcatgcgaatgagccttctcaggcatcagcccagtggatccttaaccacaaccctgccaacctctgatagtatccgcatgtgagac

SEQ ID NO: 760268 - DNA, 593 bp, Homo sapiens
gtctctaaaaataaaaaattaatactgaactcaacctggaagaggccatgatccaaaggagccagagcagctaaaaaaaactgtttattggtggtctgagctttgaaactagagatggtagttttagagaacattttaagaaatggagcacactcacaggttgtgtggtaatcagagacccccaaacaaaatgttccacaaactctggttttgtgacttactcttgtgttgaagaggtggatgcagcaatgtgtgctcaaccacacaaggctgaggmgtgcaatggaaccaaagacagctgtttctagagagagttctgtaaagcccagtgcccatccaacagtgaagaaaatttttgttggtgatgttaaagaagatacagaagaacataatttgagagactactttgaaaagtatcgcaagattgaaaccacagaagttacaggaggactggcagagtggaaaaaagagaggatttgcttttgtaacttttgatgatcatgataaaattgtggttcagaaataacactctattaacaggcgttagtgaagtgaaaagggccctttttaaacaacagatgcagttgtggagt

SEQ ID NO: 760269 - DNA, 627 bp, Homo sapiens
attttactgattaaaatatgtattttatgtgttctaaagaagaaaaccaactctcaacatttagattggcagaatgtcagaaatgtcgtgtttaaacaagtatccccttccagttccctactgtgggtagcatttatccactcagtgcccaataagtgctatcttcttgggaatgcaatggttwacagatgaggttccttgccttcacttagcctacaaccttactttcaactaagggtgttaaatgctaggatacaagtagagggtgctgtaaaagggaggcactaaccgaaatatgagaggggtgtttctggcagagacatgaagctgactatagtaagactacttagacaaggggtaggcaaacgttctataaagggccagagagtaaatattttaagctttgcaagctatatggtatctgttgtaactaaactcttggcaaaagcaggcacagacaatatgtaaatgaataggcatggatgtaataccaatgttatggaccctgaaatctgaatttcatataatgtccacatatcatgaaatattaccctttctttgattttctttctcaatcatttaaaaatgttaaaaccattcttagtacacgggctatagaagaaccag

SEQ ID NO: 760270 - DNA, 605 bp, Homo sapiens
catctgatctcatgagacttattcactatcacaagaatatttcactatcacaagaacagcataggaaagaccggcccccacgattctattacctcccaccaggttcctcccacaacacgtgggaattgtgagaccaattgtaattcaagatgagatttgggtggggacacagccaaaccatatcattctgcccctggycccccccaaatctcatatcctcacatttcaaaaccaatcatgccttcccaacactcccccaaagtcttacttcagcattaactcaaaagtccaaagtctcatctgagacaaggcaagtcccttccacctataagccagtaaaatcaaaagcaagtcagttacttcctagatacaaggaggggtggggtacaggcattgggtaaacacagctgttccaaatgggagaaattggccaaaacaaagggtctacaggccctgtgaaagtccaaaatccagcatggctgccaggtcacgctaatgcaagaggtgggttcttatggccttgggcagctccacacccctgtggctttgcagggtacagcctccctcctggccactttcacgggctgacattgagtgtctgtggc

SEQ ID NO: 760271 - DNA, 654 bp, Homo sapiens
atcatggcataccatgtggctcaatattgcataataattacatagtcataacagtgtaaatgctgactatcaatttaagccaattttgatataactctgttggaagaatagaggaggagctgtgggataatagctgtatgagaaagttaaacttccaactatcataatagtgtcacaggatcgtttgggtgtcacttcacaagccagaaagctctgtggctggcagtgcctctgcttgagttttgctcgcacccgctggacttgttccattcacttgacctggcgggctgcactcggcttgcgatactggcccagatcccatgcctgccaagagcaagccaggcacayagtgacgaggggtgtgtgagcgagtgagcgtggggtccggctgctgcacacagccaagcatgctggctgctgcggcagggcagccagctctgtgtgaggctgtgactggagcagacgtactgcaagtggcttccactgcaggcaccagtgtctggatgaggggaatgtggtggtgcccagaagcttggagatgctaggaaccacagagcccaaaagagggtgttaccactactcacagctctcacttggggagccctgaggtctgggcttgcagaagggctccagctcttctcttcctctagtcac

SEQ ID NO: 760272 - DNA, 613 bp, Homo sapiens
caacctaatgatgctattaaaaattacttgtaattcctcaaatgcaaagattctccccatctctctctctctctctctcttttttttttttttttgagatggagtcttgctttgtcaccaggctggagtgcagtggcgcgatctccgcccactgcaagcttcgcctcccgggttcacgccattctcctgcctcagcctcccgagtagctgggactacaggcacccrccaccatgcctggctaattttttgtatttttagtagaggcagggtttcaccgtgttagccagagtggtttcgatctcctgaccttgtgatccacccgcctcagcctcccaaagtgctgggattacaggcatgagccaccgcgcctggcctctccccatctctttctgaagttggttgacttatatgtggttgtcaagcctctcttcacatatggccccctggatgaagcctaagtgtttcctgtctgctgctttcatctacaccctgcccccagcccctgtttcctgcgctgctccttagctgggttcccatcatgcctctatcctgccattaccctgtgtattgcaatgatttcattcacttctctctctcctaggccaaagggac

SEQ ID NO: 760273 - DNA, 613 bp, Homo sapiens
caacctaatgatgctattaaaaattacttgtaattcctcaaatgcaaagattctccccatctctctctctctctctctcttttttttttttttttgagatggagtcttgctttgtcaccaggctggagtgcagtggcgcgatctccgcccactgcaagcttcgcctcccgggttcacgccattctcctgcctcagcctcccgagtagctgggactacaggcacccaccaccatgcctrgctaattttttgtatttttagtagaggcagggtttcaccgtgttagccagagtggtttcgatctcctgaccttgtgatccacccgcctcagcctcccaaagtgctgggattacaggcatgagccaccgcgcctggcctctccccatctctttctgaagttggttgacttatatgtggttgtcaagcctctcttcacatatggccccctggatgaagcctaagtgtttcctgtctgctgctttcatctacaccctgcccccagcccctgtttcctgcgctgctccttagctgggttcccatcatgcctctatcctgccattaccctgtgtattgcaatgatttcattcacttctctctctcctaggccaaagggac

SEQ ID NO: 760274 - DNA, 590 bp, Homo sapiens
tgtaaactgctaaaaaaaaaaaaaaaaccctacaaatagtggtgtggatcctgggtgaggtaaaaaataccttgtttgtagtgctgaggtaataatctattgatttcaggggaaatgggctcttcaaaacaaagccattctccctaattgtgatagggtaacccccttgcttytttccacccaactccccatccataaacaaaagggcttttcttaccatagtcataaaaaaatgtattttatgaaatacattcattttcagagctgcaaatttccttttacccactgagaataatgacatataccaagcatgttgctaaagacttattttatttgaaaaaaatttcctgtgaaccttttcaggggacacaggactcataaaacatttagtaggctgatagaacttctttttcttttttctttctttacttttcctttttttttttggcttttgttttcaaggctggtataaagccaatgacaaaaatttgttatgtcttcaccatttccagagtgatgttagttaaaaaagatccagtccatttttttgtcccgtccctgaaagtaattctattgacttctgataaatg

SEQ ID NO: 760275 - DNA, 590 bp, Homo sapiens
tgtaaactgctaaaaaaaaaaaaaaaaccctacaaatagtggtgtggatcctgggtgaggtaaaaaataccttgtttgtagtgctgaggtaataatctattgatttcaggggaaatgggctcttcaaaacaaagccattctccctaattgtgatagggtaacccccttgcttttytccacccaactccccatccataaacaaaagggcttttcttaccatagtcataaaaaaatgtattttatgaaatacattcattttcagagctgcaaatttccttttacccactgagaataatgacatataccaagcatgttgctaaagacttattttatttgaaaaaaatttcctgtgaaccttttcaggggacacaggactcataaaacatttagtaggctgatagaacttctttttcttttttctttctttacttttcctttttttttttggcttttgttttcaaggctggtataaagccaatgacaaaaatttgttatgtcttcaccatttccagagtgatgttagttaaaaaagatccagtccatttttttgtcccgtccctgaaagtaattctattgacttctgataaatg

SEQ ID NO: 760276 - DNA, 590 bp, Homo sapiens
tgtaaactgctaaaaaaaaaaaaaaaaccctacaaatagtggtgtggatcctgggtgaggtaaaaaataccttgtttgtagtgctgaggtaataatctattgatttcaggggaaatgggctcttcaaaacaaagccattctccctaattgtgatagggtaacccccttgcttttttccacccaactccccatccataaacaaaagggcttttcttaccatagtcataaraaaatgtattttatgaaatacattcattttcagagctgcaaatttccttttacccactgagaataatgacatataccaagcatgttgctaaagacttattttatttgaaaaaaatttcctgtgaaccttttcaggggacacaggactcataaaacatttagtaggctgatagaacttctttttcttttttctttctttacttttcctttttttttttggcttttgttttcaaggctggtataaagccaatgacaaaaatttgttatgtcttcaccatttccagagtgatgttagttaaaaaagatccagtccatttttttgtcccgtccctgaaagtaattctattgacttctgataaatg

SEQ ID NO: 760277 - DNA, 635 bp, Homo sapiens
aaaaaacgcaaaatccaatttaaaaatgggcaaaacatatgagcggtcatttctcaaaagaagacatgcaaatgactcacagatatgtgaaaaaaatgttcatcactaatcgtcagaaaaatgcaaagcaaacctacaatgatctatcatctcattccagttaaaatggcttttatccaaaaggcagtaacaaatactggcaaggatgtggagaaaggggagtccttaaacacttttggtgggaatgtaaattagtacaaccactatggagaacagtatggagattcctcaaaaaaaaaaaaaaagaaaatagaactcacatatgattcagcaatcctttatatttattgtcaatttacttytcatgaaggtgctaacacaactaaatggggaaagaatagtctttttaacaaatgtttctgggacaacaggatatttacattttaaatgataaagttggacctctactgcatactacattcaaaatttaacaaaaaagatgcaaagacctcaatatgaaatctaaacataaaaaaatacctcttagaaaaaaagcatacaagtaaatcatcatgagtttgaactaggcaatggtgtcttagatatgacaccaaaagcacaagtaagaaaagaaa

SEQ ID NO: 760278 - DNA, 566 bp, Homo sapiens
tgttttaagtgctgagaaagtggaaagtgagttctatcactagaacttgaaacatattaaattattttgttgattctggatggctaataaggagagctttcaataactaagaataatttaataggtaaattttaaaacaaaaaaagttgaattccttttcaatttttaagtagagtcaggctatttctcctccttcaaatttgtagatagaattttagataatgttcttataaattaaatgtattctggtttcaaaacacatccagagtgttgtgaagaaaaacatatgaatttctctgacattgcagtgacaaggctttacattaaatcttcattttcatctttyttgaactgagtgcaggaatacacaatcctgaggggaatttcatttgcatgttgttgaacagcttgatgtcctcgactggagcacagcaaagtgcactacaggccacctgattttttatggcagaaactaaaatgggaagttgaaaagaatgaagaattgtattccactccagttatttggttaaagttcactttgagaaacatgaaatgtctcattcaat

SEQ ID NO: 760279 - DNA, 594 bp, Homo sapiens
gagttttttgttgtaggttcttttgacttttctccatagacaatcatgttattggcaaataaagacagttagatttcttcatttttagtctggatagattttatttatatttgttttaatacactaacttggacttccattgaattagtacgttttcacatggctacataaaactacttgagaccgggtaatttatgaagtaaagaggtttgactcacattctgcatgcttaacaggaagcatggctgggargcctcaggaaactgataatcatggcggaaggtgaagagaaagctcttcacatggtgggaagagagagagagagtgaagggggaagtgtcacagactttcaaacaaccagatcattaaattttaaagctccaaaatagtctttgaatccatgtcacatatccagggcatggtgattcaagacatgagctcccaaggccttgggtagctccacctctgtggctccaaagggtacagtacccaccactgcttattcggatggcactgagagcctgtggcttttccaggaacactgcgcaagctgtcagtggatctacatttctgggttctgaaggatggtggccc

SEQ ID NO: 760280 - DNA, 594 bp, Homo sapiens
gagttttttgttgtaggttcttttgacttttctccatagacaatcatgttattggcaaataaagacagttagatttcttcatttttagtctggatagattttatttatatttgttttaatacactaacttggacttccattgaattagtacgttttcacatggctacataaaactacttgagaccgggtaatttatgaagtaaagaggtttgactcacattctgcatgcttaacaggaagcatggctgggaggcctcaggaaactgataatcatggcggaaggtgaagagaaagctcttcacatggtgggaagagagagagagagtgaagggggaagtgtcacagactttcaaacaaccagatcattaaattttaaagytccaaaatagtctttgaatccatgtcacatatccagggcatggtgattcaagacatgagctcccaaggccttgggtagctccacctctgtggctccaaagggtacagtacccaccactgcttattcggatggcactgagagcctgtggcttttccaggaacactgcgcaagctgtcagtggatctacatttctgggttctgaaggatggtggccc

SEQ ID NO: 760281 - DNA, 615 bp, Homo sapiens
gcttattcggatggcactgagagcctgtggcttttccaggaacactgcgcaagctgtcagtggatctacatttctgggttctgaaggatggtggccctatctcacagctctactaggccatgtgccagtgcagattctgtgtgggggctccaaacccacatttcccctctccactgccctagtaaaagttctccatgagagctctgcccctgcagtagacttctgcctggaaatccatgtgcttccatacatcctctgaaatctaggcagaggttcccaaatctcaactcttgacttctgtgcacccagagacccaacaccacgtggaagccatcaaaggttggggcctgtgccctgggcctggcmcacaaaaccatttctccttcctaggcctccaggcctgttatgggaggggctgtcatgaaggttctgacatgctttatagacattttccccattgtcctggctactaacatccagctcctctttacttatgcaaatttctgcagctggctggaatttctccccacatttttttttcttttctaccacatggtcaggttgcaaattttccaaaattttatgctctgcttttcttttaaacataagttttaa

SEQ ID NO: 760282 - DNA, 534 bp, Homo sapiens
ttaattttgaaaacagttttctcaattatgagagctctgctcatgaaaatgtcaattccatctagcccttcagtctaaaagttataagatttatagattagaataagaaactaaggtcacatagagttcataaatgtgtractattgagatatacagaaataaatacaaacgaataaaacctaaaattgttgaacaaatacatattactataacaactttagagaaaatattgccaaatgaaaaagtggaattaaatcctgaaaagtttaatgacaaaaatctgataggatatatcaagaatgctttttggtaagttctctgtttagcatattaagcctgtcatgtttatttatattaataattcttctctcattccaatatattttttcaaattacaccctaattgttaaaaatatatataatgctgtttttttaattcagctctgtccaccaagttagttctaataggaaaagtaaaaataatacatataattaatataatactgtaatgtgagcaattcagtttaagaaac

SEQ ID NO: 760283 - DNA, 625 bp, Homo sapiens
tatttaaatatgcttagccattactctggaaaataaattataagcaatgccaatacactagttattcatagggccaataggttttaatccacatagcaaatgaagcaataatttctgcaataatttaatatacttaaaacctttagtaaacaaataatgtgaacagaaagaagagcaaattgaattggccaaatattcaaawagtatgaatatactaaatctctctaatagggctacacaaattaaataaaagtgaattatcaatgtatatctctcagactgtcaaaaattttaaatggatatgcaacttgtttgggatgtgagtgaatttcatgcatcactggttaaagattcaagtgtcaaattcttgttaagatgatcataaaatatctattaaaattaaatattattatactatcacatataacagttccactcttgagcagctataccataggaataaagtgccaattcctaagggcatatatacagaggatgtttattgcaatattatttcaagatgacaagaacaaaaaccaaataagcactgataagcactggttgactatattttgatatatccaaaacattaataactacatatttatatagaagaatgaattga

SEQ ID NO: 760284 - DNA, 663 bp, Homo sapiens
gatgccttagatatcttttaatcttccttcctactcagcgccaacattcagttagttactaagacactttgttcaacctctaaaatatctcatatctgtactccctgacttctatttcttttgctattgtttttgttcagtacatccccagttttctgttgaaatgttaaaatagactaccaactggtttccttggttccaatccagctccaccttctgtttttgcctcaatttctcttttaagctgctgccaaaaagatatttttaaaacacatcttggtcatgctattgccctgattttaaaatctggaataactccccattacctacaagattagagactttatcatgtcactcaaaactttcaacagtccagcttcaatttgtctactggtttttcttttgcccctaatcccagcacatgtgcacacacatgcgcatgcacacacacacagcatttaatgcatagagrgtccagttacctatactgcttgctacttgtgaaagactccatgcattttcatttttgtgcatttgtatatgttatttttcctacttaacgttcttccattctttctaagactggctaactcttacgtattcttccatgcacagttaaaaattgtctttcctgtggcacgcacaaatattaaacacttgtca

SEQ ID NO: 760285 - DNA, 531 bp, Homo sapiens
cagtacaaacaagttttctgtgtgcagaaccccccggttgtgggttggacaatgagacattaggccatcttccatgtaaaggaagtatcctgtgaaaggtacactgtgaatgttcacgtccagctcccctttatttctcatttggggaggttgactagccattctggtactaaaaccccagtgtagctgggggctttcaaracatccagtttcaaaattatgtgatgtaagtcaaaatatggctagctagggagcccaaagcccaatggtattgctctcagtaaatcacctgtctactgtactatcaatttcagatttcagaagattccaagtaaaagagagaacatttgatggaaatgaaatgcataagaacaaacagataaaatgtggaaaaaattaaaaagttctatattttaacaattataagtgggtttattaaaacatttttgtgtatctaggttttctttccaaatatgcattagtccgtttgatatctaccctgtgtagtttagtataacaaaatgcaaaaat

SEQ ID NO: 760286 - DNA, 565 bp, Homo sapiens
ccacttttccctcataggcctccaggcctgtgatggtaggggctgctgggaagatctctgacatactctggagacattatccccattgtcttggtgattaacatgcatctcctcattacttatgcaaatttctgcagccagcttgaatttctccccaaagacaggtttttattttctattgcatcatcaggctgcaaattttccaaacttttatgctctgcttcctcttgaaygctttgctgtttaggaatttcttctgccaggtaccctaaatcatctctctcaagttcaaagttctacagatctctaggatggggcaaactgccactagtccctttgcaaaagcataacagaatcacctttgctccagtttccaagaagtccctctccatctgagaccatctcagcctggaattcattgtctatatcactatcagcattttggtcaaaaccattcaacaatctctaggaagttccaaactttcccacaccttgctgtcttctcagccttccaagcctctgggaagttccaaatattcccacatttttatgtattcttctgaac

SEQ ID NO: 760287 - DNA, 565 bp, Homo sapiens
ccacttttccctcataggcctccaggcctgtgatggtaggggctgctgggaagatctctgacatactctggagacattatccccattgtcttggtgattaacatgcatctcctcattacttatgcaaatttctgcagccagcttgaatttctccccaaagacaggtttttattttctattgcatcatcaggctgcaaattttccaaacttttatgctctgcttcctcttgaatgctttgctgtttaggaatttcttctgccaggtaccctaaatcatctctctcaagttcaaagttctacagatctctaggatggggcaaactgccactagtcyctttgcaaaagcataacagaatcacctttgctccagtttccaagaagtccctctccatctgagaccatctcagcctggaattcattgtctatatcactatcagcattttggtcaaaaccattcaacaatctctaggaagttccaaactttcccacaccttgctgtcttctcagccttccaagcctctgggaagttccaaatattcccacatttttatgtattcttctgaac

SEQ ID NO: 760288 - DNA, 573 bp, Homo sapiens
gcatagtatctgatcagagaaagtaaaaaagtagagggctgtggttaagagggaagactctgaagccagattttctggttcaaaccctggctctgccactccatcacttaagttctgtgtgtctcagtttatccaactttaaaatgagaatgatgatggtatcsacttcagtagttatggtagtggtttggctgtataataataagaacaaaagtaatagccacttacatgaaatagaagtttgcttctcttcaatacaggagtcaagggctgataaggtggcaccatgattctgtggagtttgactccttgtgtctttttattctgctctctcaaaaggtggcttccacctcatggaccatgatggctattccagctgccacctggatatctgcattctagctagcagaagaggataagaaaaaagggaatatgtcctcatttcctttaggagtatgatccagaagttcccacatcactcccactcacaatcccattggccagaacctagtcaatggccacatctagtttcaagggatgccacatgccttgctaaaactttatcgctatagc

SEQ ID NO: 760289 - DNA, 573 bp, Homo sapiens
gcatagtatctgatcagagaaagtaaaaaagtagagggctgtggttaagagggaagactctgaagccagattttctggttcaaaccctggctctgccactccatcacttaagttctgtgtgtctcagtttatccaactttaaaatgagaatgatgatggtatccacttcagtagttatggtagtggtttggctgtataataataagaacaaaagtaatagccacttacatgaaatagaagtttgcttctcttcaatacaggagtcaagggctgataaggtggcaccatgattctgtggartttgactccttgtgtctttttattctgctctctcaaaaggtggcttccacctcatggaccatgatggctattccagctgccacctggatatctgcattctagctagcagaagaggataagaaaaaagggaatatgtcctcatttcctttaggagtatgatccagaagttcccacatcactcccactcacaatcccattggccagaacctagtcaatggccacatctagtttcaagggatgccacatgccttgctaaaactttatcgctatagc

SEQ ID NO: 760290 - DNA, 659 bp, Homo sapiens
ttattattattatatggtatggtaactccagcctgttacccagctggagtgcagcggcgtgatcatagctcactgtaacctcaaactcctgggctcaagcaatcctcctgcctcagcctctggagtagctagaactacaagcatgcaccaccacctctggctaatttttgtktttgtttttcttttttttttagagacggagttttgatttgttgcccaggctcgtcttgaactcctggcttcaatagatcttcccatttatgaccttctaaagtgttgggattacagatgtaagccagtgttcctggcttgcacttaagttttaatagtacagatatactgcatatatatatgtttatgcacatatatttacacaaaaagtaaaattattttggattaaccctaagaaccaattctccccctgttgagggcaatataatcacaagaatgcaagattacctataacaactaaactggttcagtagtggagtgcactacccttgagaagagcttcccataacagggattgctcatccagaaggacatctgtcaaagatactaagggcatgcttcccattgaagcttcttgagttctttaaaattcttatagtatttgacttcttcgttgttcctggcatattgtcctctgatttctgcca

SEQ ID NO: 760291 - DNA, 659 bp, Homo sapiens
ttattattattatatggtatggtaactccagcctgttacccagctggagtgcagcggcgtgatcatagctcactgtaacctcaaactcctgggctcaagcaatcctcctgcctcagcctctggagtagctagaactacaagcatgcaccaccacctctggctaatttttgtgtttgtttttcttttttttttagagacggagttttgatttgttgcccaggctcgtcttgaactcctggcttcaatagatcttcccatttatgaccttctaaagtgttgggattacagatgtaagccagtgttcctggcttgcacttaagttttaatagtacagatatactgcatatatatatgtttatgcacatatatttacacaaaaagtaaaattattttggattaaccctaagaaccaattmtccccctgttgagggcaatataatcacaagaatgcaagattacctataacaactaaactggttcagtagtggagtgcactacccttgagaagagcttcccataacagggattgctcatccagaaggacatctgtcaaagatactaagggcatgcttcccattgaagcttcttgagttctttaaaattcttatagtatttgacttcttcgttgttcctggcatattgtcctctgatttctgcca

SEQ ID NO: 760292 - DNA, 589 bp, Homo sapiens
ggactcttttttttgagacggagtcttgctctgtcacccacgctggagtgcagtggcgcgatctctgctcactgcaagctccgcctcctgggttcagcccattctcctacctcagcctcccgagtagctgggactacaggcgcccgccaccatgctcggctaattttttgtatttttagtagagacggggtttcaccgtgttagccaggatggtctcaatctcctgacctcgtgatccacccgcctcagcctcccaaactgctgggattacaggcgtgagccaccgcgcccggccaggactctttaactttaacttcaagttcattatatttccttctgcaatgctaatatccaaagataccaaagaataccttattcagatcttcagagttatttctctgtacagatctgtcttatmcagcactctcgtccagcaaactctagtaactatattctcttggactgtgagctctgtctcctcaacccaggagatcactgggttcccctccctacaccacaacctggaaacacactcaaggttctaatgttgtacaccttgttcatttcctctctcccagtaatcactgtg

SEQ ID NO: 760293 - DNA, 650 bp, Homo sapiens
ccaaaatagaatatctgatatgtccataattggtaatgaatttaggttacaaaacattattgctacatttatatgttagccaacagaaggaagcaaattctatatctctccaagcttcatcaagatttgatgggtaatttggttggccctaarggtttcttggctggtgaacaaccttggctaatgggaaaagattcctttgaaatactgtggatttttttcataaattaaattagtcgaagacaatgaagaattgaggatagaggataaatcagtgaagagatggaccattgcaaaggaaggagaatcttgcagcataacgactttgagaaataagaaactataaacctatgtatttgaggatttgagggctgaaatgaaaattgaaaggaaaggatagacctctatgaatgattaatcaaaaaatgtaaaacttagccagaagtagtaaagttcaaagtcattattgaaagtaagaatgtataattttttaagttaaaatctatagcaaaatatcatagaacttggaaaataatgtatcattttggtgctgctaagaggagaacattgaactagagaaaaaaatttcagaatttaattttgatgagtatgtttctgtcattgtaattttgctgattattgtggtttga

SEQ ID NO: 760294 - DNA, 558 bp, Homo sapiens
cactctgaattaaaaccctgaaggtgacgaaagccccttcctatcaatttattcttgtccgtagatatcaccagccacagtgctctgcagacaaggggttctctaccttagcaagcttgccagtcacagcccctcctcctccaaccatgccgccctctttctggggctggctcagccctgtgcagtggcaggccctttttgtaaatggaggatctctggtgagtcctagtaaattgacyatcaagtactaagaccaaggagccacagcccagaggccagaaaagaactggaaatcagaagtcaggccattgtgctgctggggaccccaggctggtctcatgtctggctcagtttccctgcctgtaagtaaggttcaccaggaagctctggctagttttgttagaaaccctgtcccccttgagggacatcacagttgtctccagaaaggtaggtgatgggatgatggtgaaatacaggatcaagtactcaactccaacctgatggccatacccaggacaaatgctgccacatagttggagatctggcccatgcctacaa

SEQ ID NO: 760295 - DNA, 558 bp, Homo sapiens
cactctgaattaaaaccctgaaggtgacgaaagccccttcctatcaatttattcttgtccgtagatatcaccagccacagtgctctgcagacaaggggttctctaccttagcaagcttgccagtcacagcccctcctcctccaaccatgccgccctctttctggggctggctcagccctgtgcagtggcaggccctttttgtaaatggaggatctctggtgagtcctagtaaattgaccaycaagtactaagaccaaggagccacagcccagaggccagaaaagaactggaaatcagaagtcaggccattgtgctgctggggaccccaggctggtctcatgtctggctcagtttccctgcctgtaagtaaggttcaccaggaagctctggctagttttgttagaaaccctgtcccccttgagggacatcacagttgtctccagaaaggtaggtgatgggatgatggtgaaatacaggatcaagtactcaactccaacctgatggccatacccaggacaaatgctgccacatagttggagatctggcccatgcctacaa

SEQ ID NO: 760296 - DNA, 602 bp, Homo sapiens
gtgaggtgtagctgctgaaactgtagctaggagctgccttgctgccttcttgcaggcagattggccagatgagccaggctaaaatacaattaatatctaccattgtggtttaatatgaaatatggatacctggtctttgtctcagttcttgtcatagagttccccaaacctttagaacttcctgagtggtaggaatatctcattagtsataatgagcccctttgattcgataactcctgagtttatgctaatgaggttacttaatgtggggccctagatattcttaggatggggctagttcccggaaagaccaggtcatttgaggattagagggttggaacttttagctctacccactgatctctgggtggggaaggtgctggagatcaagctgcctaaaaactcttgaacaacaagatttgaggagcttccagtaaatgcgtccacaagctgggagggcactgcaccccagtttcactgggacagaagctcttgcacttggaatctttccagacctagcccttcatgctgcttcatctggctgttcatctgtatcctttataataaattggcaaatgtaaaggtttagctgaatttggtga

SEQ ID NO: 760297 - DNA, 640 bp, Homo sapiens
aagtgcacaataagtgtaatgtgtttgaatcatcctgaaaccatccctgccctccatccatggaaaagttgtctttcacaaaaccagtccctggtgccgaaaaggttggggactgctgtcctggagggcacctgctccctcctgcatcctcaacctcaactcactcagtcaactaaatatttattaaaaggtcatgcacagtggctcacgcctgtaatcccagcactttgggaggccaaggtgggggggatcacttgaggccaggagttcaagaccagtctggccaacatggcaaaaccccgtctctgctaaaaatacaaaaattatcccggtgtggtggcaatcacctgtagtcccagctgctcaggaggctgaggcaggagacttgcttgaacccaggacgtggaggttgcagtgagccaagatcacgccactgcactccagcgtgggtgacagagcaagactctgtctcaaaaaacaaaaatacctattaagaaccttctrtatgccaggcattgtgttgcaccctaggaaaacattttgaacgaacatgtaaaataactacaggctataagcagtgctatcaaggaaataaagaaggcattacagtagagcataagggattctcttcatatatgga

SEQ ID NO: 760298 - DNA, 660 bp, Homo sapiens
attcagagattttgtcttggtttggatccattgctggtgagctggtatgatcttttgggggtgttaaagaaccttgttttgtcatattactggaattgtttttctggttctttctcatttaggtagactatgtcagagggcaggtctggaattcaagggctgttgtttagattattttgtcccatggggtgttcccttgatgtggtgttctcccccttcccctaggaatggggcttcctgagagctgaaytgtagagattgtttttgctcttctgggtctagccacctagctgagctactgggctacaggctggtactggggagtgtctgcagagtcctgtgatatgatccatcttcaggtattgcagccatggataccagcacctgctcctgtggaggtagcaggggagtgaaatggactctgtgagggtacttggttttgtgttggttggcctccatgcaggaggtggtgctttcaagagcacatctgctgcagtcctataaggagaatgcaaatttgccctagggacacctggttaagacggtgggcagggccatagagctcccaagagattatgacctttgtctttggctaccagggtgggtagagaaagaccatcaggtgggggcagggatatgcatttcagagctcagcctctc

SEQ ID NO: 760299 - DNA, 645 bp, Homo sapiens
gaacttgtcccagaccatgaccctccctgctgagaaaacatgcagactcacagtttttttgcatctcgaggagcctgcagtagtgatccagttccttcaaagggtctgtggattctcttggctttcctggtatgttcctgcagtagttcttggagcaaaagttcaggatgtgagtctccacacactgctctgtttgtctgagcaggagctgcaagctagtcctgcctcctatctgctatctttatcagtattctggcaattctatatttaaattctctagcttttcatctttttttttttttttwactttccctctattttcttgaacattttcatcataattattggaagtctctcatttctgaaacacctgtgggtctatttccattgtctgccttttctcttgatttttagtcatttggccctgtttttttgtttgtgttttgttttgttttttagcatgtctcatacttctctattagatgacacacattttggatgaaaagttggaaagtctctgggtgatgttgtattcatccagaaagagagaattaagttgacttctggaaggcagagtaccaaataaataccctactcctgtcaaggctttggtttatgtcatggtttggctggtgtggttctttt

SEQ ID NO: 760300 - DNA, 409 bp, Homo sapiens
ttttttttttttggctccctgaccccctgctttgtgtcaactgtcagaaatttgacccaggattacaggtgtcagctagctagagagtggctcaatctgaccactcatggccagatgtgtctactatgtacgtgcatagtgggccacgggaccccgcaagtggcttctctgccttgccatatagctgcaaaaggctggatgagggtctgtgtgtcccctgagtgagagaaatcaacaaaggcgtaacagtgaggttcaagytccaggtctctcgggtctctgctgcccagagtcagccccggtcccagctcccaggttgctctggcttttcctccaggcagctttggggataacagtgagggctctcccatcttctaagactatctgtctctacacaagataaggctga

SEQ ID NO: 760301 - DNA, 525 bp, Homo sapiens
tccagaagacataactttcatgaacacggtgataaataaatttgtaagaggagctcctgcatcctggaagttctcagtgatgacttttccctataggccagacattatagtaaaaattgcaggcactgaatttgaaaacctaaatgcaatgagagcaatttgataacaggatgagtaaagtggcagcattgagccaccaaagacaagatgtgagtagttatgtaaaggacagtagaatcaaagcagccatcagacttatggctcaaacagatttatgacattggttattaaatcatggtgttcgtagaaatgaaatagatacaaagcctattaaattcttaattgattcatataagcaaaagagttccaggtratctgaacaaaaatctaactcaaattataaaaccagagagtcatggccactcagtcagtgaccagatttaagccaatctgtagatacagaatgtctttttcttttctttttttttctaactgcctatttgatcaggtatgtattcaaaataa

SEQ ID NO: 760302 - DNA, 614 bp, Homo sapiens
atttgtatccctggctgataactattttttgaactgcagactgatatattcaactatttctttggtatctccatttaggtgtctaacagaagttagaaaattaacatatccaaaaacgtgttgctttcttatctcgaaaactgtgtcttttccatccagacctatttcaattatagactactttctaattttaatttctgataccaaaacttagactcatccttgaatgtktcccttttctttcattcagattaagttcaccagcaacttatttgctttactttgaaaatgaattaataattctaccacctcttaatactgtcatatctgctatcttggtccaaaccatcatttctcatctggattattcttgcaattgcattctaaatcttctccacaattctgacactgcatttctgttttaaacacagcagctacataatattttaagaatttatttcatgctattaatcttttaaattcctcctcttcagtgtgttttcttatcaatcaatacagggacagaagcctatatgtacgcatcataaccaatacctgttacctttctgactctgcccttcactctcctcaatacttctgtgatccacaccctg

SEQ ID NO: 760303 - DNA, 601 bp, Homo sapiens
tgaaaaaaaattttcccaaaactgtacacaaggactaagatgaataaccctaatagaaaataaactatttttggaatttttaaaatttactcctagtgaaattagtgttctcaattggttgcctttgttttccaatacacagacttgccagctgtttttatttttcagcaacagcttttatatctgtgcttaaggcagcagttgttgaattatttttaaattatttttgaagtgcttattckaaaagttaaggaaattttttttttaatttacttggaacaaatagttcatattgttttcttcctttccctttctttttttacttcttttgttcttttctgcaaatagtctagggtagtgctctgacaataacttagctatcacggacttttttttcctttgtaggtgacattgttgtgcttgactgaaaacaatagagttttaataaatatgaatgtgattaaaaatatatattagctgaatagcatgctgttttcatttgtaaggggaagggctgggtgagactttgtgcttagagataggatcagagtgcgatgttttctttaaaattgaatttagaaaataaaatatacctactata

SEQ ID NO: 760304 - DNA, 578 bp, Homo sapiens
taacaggtggcatataaattttgagtgactctctggaatgacagaccctcatggacctagttgaagacattttttctgaccaatgaaaaatggaacttttttaaatgaactatgaacctggtcttcttttcttggctagttgtaaatgagggcttatttcctgagattacagatggtagccatctagtactgtgagggcaaacaaccttagaataagataatgtagtttccaagccaraaagaaatgaaaacttcgaggcctggcacggtggctcatgactgtgttcccggtaccttcagaggctgaggtgggtggatcatttgagtcgaggagttcaagatcagcctgggcaacatggtgaaaccccgtttttataaaaaatacaaaaattagctgggtgtggtggtatgtgcctgtgttactcaggaagctgaggtgggaggatgactttagcctgggaggtcaagactgcagtgagctgagatctgcacttcagcctgagcgatagagtgagaccccatctcaaaaacaattttttttaatggaaactctgatgttattgagccacaggttttac

SEQ ID NO: 760305 - DNA, 332 bp, Homo sapiens
gtattttttaatacagataaatatgcaaattaggaatattgggaactcatttagcctttgttgcaaagtctcagcttcgcagtacattttttctgtgattctcccttcatgtatgtggtcttacttatttttaaaaattctgactttttaatgatcgccattcattctaactggcttgagatggtatcccatygtggttttgatttgcatttctctaatgactagtgatgatgagctttttctcacacgtttgttcaaaagaagacatttatgcagccaacatacctttgcccactttttgatggggttgtttttttcttgtaaatttgttt

SEQ ID NO: 760306 - DNA, 492 bp, Homo sapiens
atcatgtttaatttagaaatgaggcacaaaaagaaattaacaacaataaataaaaataaaaaaagaacaagagcaattgtaacaatgtactgtaatcaaagctatgtgaatatgggcaaagcatttgtaaacaaagttaaagactacctacaagctgggagaaatgtttgtaacatgttaacctacaaaatattctcattccgaatatttacagtttatacaaagtcataagcaaaatgtgaacaacctgataraaaaatgggcaaggactatcaataagcaactcacagaaatataatacaaaataataaacatataaaaatattttctttttctaactttcattttgaggtcgaggggtacatgtgcaggtttgttatataggtaaacgtgtgtcatgggggactgttgtacagattattatggcacccagatgctaaactttgtaaccaatagttattttttctgcccctctccctcctcctaacttcc

SEQ ID NO: 760307 - DNA, 553 bp, Homo sapiens
aacattatgatatccattttataactgtaatattaacattatgatatccattttgtgcttattacctgggctgtttttaaaaaaaaaaaaaaaactcttatttttaaacaagtaatgcgttcacatgtaacaaagtttgaaggttttgaaagactagtaggtgaacaacgtttytttttccttataaaccccaggcccccagtttccctccttaaagtcagcaatgtacattctttgattgttctggagatacataaaatatatcttttagacagcatactttttttacgtattactttttcacttcacaagataacaaagaccattctgagttgacagagtgtctgtttacattttttttctttttttttttggagacagagtcttgctctattgcccaggctggagtgcagtggcaccatcttggctcactgcaacctctggctcctggattcaagcaattcttgtgcctcagtctccaaagtagctgggactacaggcgcttgctaccacacccagctaatttttctatttgtactagagacagggtttt

SEQ ID NO: 760308 - DNA, 553 bp, Homo sapiens
aacattatgatatccattttataactgtaatattaacattatgatatccattttgtgcttattacctgggctgtttttaaaaaaaaaaaaaaaactcttatttttaaacaagtaatgcgttcacatgtaacaaagtttgaaggttttgaaagactagtaggtgaacaacgtttttttytccttataaaccccaggcccccagtttccctccttaaagtcagcaatgtacattctttgattgttctggagatacataaaatatatcttttagacagcatactttttttacgtattactttttcacttcacaagataacaaagaccattctgagttgacagagtgtctgtttacattttttttctttttttttttggagacagagtcttgctctattgcccaggctggagtgcagtggcaccatcttggctcactgcaacctctggctcctggattcaagcaattcttgtgcctcagtctccaaagtagctgggactacaggcgcttgctaccacacccagctaatttttctatttgtactagagacagggtttt

SEQ ID NO: 760309 - DNA, 635 bp, Homo sapiens
ggcacaccaacaggaatttgttttgaaaaacagaagaatgttttagaaacaaaatcgtttgtgttctcagtccaaattatgggaacataataatgagaaataaattcaaaagttaaaagaatatattaagaaaaggaaagcataaatgtatcattaaaaaggaaagctacatttgagggcttaaagctctgctgtgagcaaaaaaaaaaaaaaaaaaaaaaaaaaaaattgaccggggctttaraaaattgaatcaatgatggggaagtaatagtaagtcccttcaaaattcaggttaaaatgggaccaatgctgggataccaaagagcaaaaaagaaagaataaaaagtccaataaatacatttgagtttccttaacaagaaagcagaagcaatggtttagaagcaataatcaaagaaataatagaagagtgtttttctgaggtgaagaaaaaataggagatttacataatggtacattcacataaaacggtcttttaaatcaggtctttacataataaaggactatactatacaaatggaaaacaaaaatattcagaacttctgttgcaggatgtagctgatagttattgcttcaaaatatacagtccccaaataccagccgcatattacaat

SEQ ID NO: 760310 - DNA, 633 bp, Homo sapiens
taccttttggtctctgaacaccttctgtggtttcctttattttaaattgctaaggtttaaaagtttgttttgtggcccactttatggaatattgtctatcttggtgaactttccatgtacattgcaaagaatgtatattctgctgttgttggctggactgttctgtaaatctcagcgtattagtcagggttatccagagaaacagaaccaataggagatatttatatacatagttggatcacataaytgtggggctgacatgtctgaaattcacagggcaggctgcaggctggaagttctggcaagagctgatattgtagtttgggaggcacaactcctaccagttccaggggctttcaactaattggatagggcccatctacattacggaagataatttgctttacccaaagtctactggcttaaatgttaatcaatctaagatctaccttcatagcaatatctacactggtatttgaccaacatctgggtgtcataacctagccgaatagacacataaaattaaccatcactgttagcggtggaagacatccaagttatccaaagttacctgtggtgcatctgtgtgagttggcagcaactccagtccttgcctcctcagaagaaagaatt

SEQ ID NO: 760311 - DNA, 633 bp, Homo sapiens
taccttttggtctctgaacaccttctgtggtttcctttattttaaattgctaaggtttaaaagtttgttttgtggcccactttatggaatattgtctatcttggtgaactttccatgtacattgcaaagaatgtatattctgctgttgttggctggactgttctgtaaatctcagcgtattagtcagggttatccagagaaacagaaccaataggagatatttatatacatagttggatcacataattgtggggctgacatgtctgaaattcacagggcaggctgcaggctggaagttctggcaagagctgatattgtagtttgggaggcacaaytcctaccagttccaggggctttcaactaattggatagggcccatctacattacggaagataatttgctttacccaaagtctactggcttaaatgttaatcaatctaagatctaccttcatagcaatatctacactggtatttgaccaacatctgggtgtcataacctagccgaatagacacataaaattaaccatcactgttagcggtggaagacatccaagttatccaaagttacctgtggtgcatctgtgtgagttggcagcaactccagtccttgcctcctcagaagaaagaatt

SEQ ID NO: 760312 - DNA, 613 bp, Homo sapiens
agagtgagactctgtctcgaaaaagaagaaaaagaaaagaaaagaaaagaattatctagaagcatcaattgtaagaaaagactagaggtgagtggagcaacaagactcctgtaatagtgaaaatggaaattatgacaattaaagagtagttgcagcatcactgccaacaggagggaaagacccacttgataatttaggagggatttagaaggaatcaaagacacctgcaaaatagtgaatctgggtgacttacagaataaagaagccattaatcgctttgaaagatgagggagacatgagaggttcactttgaatatattgcttgacagctggcaggttatgtcactccatgtgttccacagatattagacaaagcataccttatctggagacaaggtttgactggataaataggaagggtmcatctgtgtaatagaactattttagaatgtaggaatagataaagtatcaaaggaatatatggagattaaaaaaatggctcctggaatcagtaatgtgctggttttcaggagttaaaaaattattgactcgggtatatcctagtgaactgacaaagatacattgttttaaatatataaaaactattaagaaa

SEQ ID NO: 760313 - DNA, 510 bp, Homo sapiens
acaacaaaacagttaaggaaaactaataaatgatcacacaaattgcatgatttctgagtgctctaagtgtaagcagaaattaacaccagctgcttgttaatgctaactttagttagtttaaaagaatttgcaagacagaatcccaaaccagcttcttagcttgtgatgggtctcaggctgtagactggtatctaccatcctagaagcagggaaaaaaaaaactcctcttccatgttggaagtgagctcaaactccataaaggagttacctgccttccatygtcatgaaagtaggaagacatgccttccttgttggaagcaagtaggtctccaaaaaaagaggagttgtacagcaaaataaactttagatctcgaccaaattttgagagatcagggattcgctggagaaggtgttcaaatacctccacaaattgtcctattggtttgagccataaagttaactgatgcgggtaccaaacacctataggagatttgtgaaaggtcagcagca

SEQ ID NO: 760314 - DNA, 483 bp, Homo sapiens
atggtgtatatgtatcacattttctctatccagtctaccattgatggacatctaggtagatttcatgtctttgctattgtgaatactgctgcagtatacatgcacatgcctgtgtcttcatggtagaatgatttatattcctttgggtctatacttggtaatgggattgctgggtcaaatgtatttctgtttttatctctttaaggaatcaccacacygtcttccacaaaggttgaactaatttacactcctacccacagtatataagtattccctttaccccacaatgtcaccagtatctgtgggtttttaaaaatctttttaataatagctattctgactggtgtgagatgatatctcattgtggttttgatttgcatttctctagtgatcaatgatgttgagcttttttatgtgagtattgtctgtgtgtctgtcttcttttgagtttttgtttgttttttcacaaaattttctggaagt

SEQ ID NO: 760315 - DNA, 516 bp, Homo sapiens
ggggactgttgtggggtggggggaggggggtgggatagcactgggagatatacctaatgctagatgatgagttagtgggtgcagtgcaccagcatggcacatgtatacatatgtaactaacctgcacaatgtgcacatgtaccctaaaayttaaagtataataaaaataaaaaaaaaagacttttatattgtgttgagtatccagcagggcccatgaatggcaaagtctcctcctctgatcgatccatcaataaagagttaattaatagcctttttcatgctcgactttgaaaaagatttcttaatagcagtgagctgaattttcttaaataaattaactcaaaatgacaatatagttacaataaattaaagcctattttatgagttttgaaacataatcatgctaactgcggaagcttacatttgttatatatataaacaggcaataaacccaaattagctatgtacctcagtcatgattatcatttaatatatttgcagttgagaaggatgctt

SEQ ID NO: 760316 - DNA, 631 bp, Homo sapiens
ctgtgaaggactgagtgggtaacagggaaactgaaatctgcagatgatcagaacatgcatttctttctgcaagtgaataaaatgaaatgagataataggttaatggcaattttatttctaccatcaggcacccattctgggcttgaatgccttgtctctcctgagattctgtctctgcatcctgcagccagttcaaagtgaaactgcctctgtgtggctccacagtgttgggatttcaacaacaagcattgggattcaccaggcatacgggttgacamaaaagagctacaatattttggctagaatcccaaatagcaatctatttttagtccataacaaatatccattagctatctatcatgagccaggcaccttttagacactggggactgtcaaataaaaaaacaaatctggatttattaagagagactttatttgaaaagattattggaagaggggaaaagaaccattgcatagggagagtgaagctattgccacagggacaacactgatctgtaatcatctcaagggttatgcaaaaagggcttttcttttacaggaaggagcaaagaggctaggaaaaacatgtgtagagaaataggatgaaagaggatttcaacaggatccaaat

SEQ ID NO: 760317 - DNA, 605 bp, Homo sapiens
agaggagaaaatatttgcaaaccatatgtctcatgagtttttaatatccaagatatataagtgacccaaataacccaatagtaagaaaataaataaccatattaaaaaatagaccaaggagcggaataggcatttctccaaagaaaataaataaatggcaaacaggtatatgaaaaatgctgaacatcactaattatcaggaaaatgcaaagcaaagccacaatgaagtatcaacacacacctgttagaagggttatcaaaaagacaaaatataacaagtgttggtgaggatgtagagagaagtgaaccctttgtacacagttggtatgtaaatttgtacacttattatggraaacactatggaggcaccacagaaaactagaaattaccatataactcaacaattttacttctggttatatcccaaaaaaattgaaatcagtatgtaaagagacatctgcactcccacgttcattgcagcattatttacgatagtgacaacatgggtttgacctaagtgttcatcaatggatgaatgtatgaggcaaatgttgaatactattcagccttaaaaaagaagaaaattccgtcatttttgaaaacat

SEQ ID NO: 760318 - DNA, 605 bp, Homo sapiens
agaggagaaaatatttgcaaaccatatgtctcatgagtttttaatatccaagatatataagtgacccaaataacccaatagtaagaaaataaataaccatattaaaaaatagaccaaggagcggaataggcatttctccaaagaaaataaataaatggcaaacaggtatatgaaaaatgctgaacatcactaattatcaggaaaatgcaaagcaaagccacaatgaagtatcaacacacacctgttagaagggttatcaaaaagacaaaatataacaagtgttggtgaggatgtagagagaagtgaaccctttgtacacagttggtatgtaaatttgtacacttattatggaaaacactatggaggcaccrcagaaaactagaaattaccatataactcaacaattttacttctggttatatcccaaaaaaattgaaatcagtatgtaaagagacatctgcactcccacgttcattgcagcattatttacgatagtgacaacatgggtttgacctaagtgttcatcaatggatgaatgtatgaggcaaatgttgaatactattcagccttaaaaaagaagaaaattccgtcatttttgaaaacat

SEQ ID NO: 760319 - DNA, 605 bp, Homo sapiens
agaggagaaaatatttgcaaaccatatgtctcatgagtttttaatatccaagatatataagtgacccaaataacccaatagtaagaaaataaataaccatattaaaaaatagaccaaggagcggaataggcatttctccaaagaaaataaataaatggcaaacaggtatatgaaaaatgctgaacatcactaattatcaggaaaatgcaaagcaaagccacaatgaagtatcaacacacacctgttagaagggttatcaaaaagacaaaatataacaagtgttggtgaggatgtagagagaagtgaaccctttgtacacagttggtatgtaaatttgtacacttattatggaaaacactatggaggcaccacagaaaactagaaattaccatataactcaacaattttacttctrgttatatcccaaaaaaattgaaatcagtatgtaaagagacatctgcactcccacgttcattgcagcattatttacgatagtgacaacatgggtttgacctaagtgttcatcaatggatgaatgtatgaggcaaatgttgaatactattcagccttaaaaaagaagaaaattccgtcatttttgaaaacat

SEQ ID NO: 760320 - DNA, 605 bp, Homo sapiens
agaggagaaaatatttgcaaaccatatgtctcatgagtttttaatatccaagatatataagtgacccaaataacccaatagtaagaaaataaataaccatattaaaaaatagaccaaggagcggaataggcatttctccaaagaaaataaataaatggcaaacaggtatatgaaaaatgctgaacatcactaattatcaggaaaatgcaaagcaaagccacaatgaagtatcaacacacacctgttagaagggttatcaaaaagacaaaatataacaagtgttggtgaggatgtagagagaagtgaaccctttgtacacagttggtatgtaaatttgtacacttattatggaaaacactatggaggcaccacagaaaactagaaattaccatataactcaacaattttacttctggytatatcccaaaaaaattgaaatcagtatgtaaagagacatctgcactcccacgttcattgcagcattatttacgatagtgacaacatgggtttgacctaagtgttcatcaatggatgaatgtatgaggcaaatgttgaatactattcagccttaaaaaagaagaaaattccgtcatttttgaaaacat

SEQ ID NO: 760321 - DNA, 641 bp, Homo sapiens
ttaagaaattattttagacagatagggaggaaaagggtccttgggaagttatttttcttttaaagcagctccagaaatgtttcttgtctagcaggaaagccctggctcttaaagctgggctggcaagctttggtatgcaaatacaggccattagaaactgtgtccacccaaacattgcgattcccgctgtcttcttgcccttgccccaacatctgtctgacaacatggccgcccccacatatccccatgtgtgcagaacatcatggcgccctgaatttgcatattaaaaggctagagtgggagggcragtcccccccgcccaggctacatgaatgacatgcctggtcaaaccaatcccctgagccctatgcaaatcagacaccacctcctccaaccttctcatataagcagctacttctccccccacaaacgaggttttctctttgttggaatcccccctctttctgtgtctgtatgggggagctgtttttcttccttccttctttcttgcctactaaacttttcgcactttaaaaccactccatgtgtgtccatgtcattttatccaaacccgtgtgagaccaagaaccctgatgttcctccagtcattggagccatattattaccaggggtccttgctc

SEQ ID NO: 760322 - DNA, 641 bp, Homo sapiens
ttaagaaattattttagacagatagggaggaaaagggtccttgggaagttatttttcttttaaagcagctccagaaatgtttcttgtctagcaggaaagccctggctcttaaagctgggctggcaagctttggtatgcaaatacaggccattagaaactgtgtccacccaaacattgcgattcccgctgtcttcttgcccttgccccaacatctgtctgacaacatggccgcccccacatatccccatgtgtgcagaacatcatggcgccctgaatttgcatattaaaaggctagagtgggagggcaagtcccccccgcccaggctacatgaatgacatgcctggtcaaaccaatcccctgagccctatgcaaatcagacaccacctcctccaaccttctcatataagcagctacttctccccccacamacgaggttttctctttgttggaatcccccctctttctgtgtctgtatgggggagctgtttttcttccttccttctttcttgcctactaaacttttcgcactttaaaaccactccatgtgtgtccatgtcattttatccaaacccgtgtgagaccaagaaccctgatgttcctccagtcattggagccatattattaccaggggtccttgctc

SEQ ID NO: 760323 - DNA, 641 bp, Homo sapiens
ttaagaaattattttagacagatagggaggaaaagggtccttgggaagttatttttcttttaaagcagctccagaaatgtttcttgtctagcaggaaagccctggctcttaaagctgggctggcaagctttggtatgcaaatacaggccattagaaactgtgtccacccaaacattgcgattcccgctgtcttcttgcccttgccccaacatctgtctgacaacatggccgcccccacatatccccatgtgtgcagaacatcatggcgccctgaatttgcatattaaaaggctagagtgggagggcaagtcccccccgcccaggctacatgaatgacatgcctggtcaaaccaatcccctgagccctatgcaaatcagacaccacctcctccaaccttctcatataagcagctacttctccccccacaaasgaggttttctctttgttggaatcccccctctttctgtgtctgtatgggggagctgtttttcttccttccttctttcttgcctactaaacttttcgcactttaaaaccactccatgtgtgtccatgtcattttatccaaacccgtgtgagaccaagaaccctgatgttcctccagtcattggagccatattattaccaggggtccttgctc

SEQ ID NO: 760324 - DNA, 638 bp, Homo sapiens
attttcttattgttcagtaactaatttctctaaagcctccagtttatctttccttagtggccattattctatccaaattggcttatctgttaacaattttcaaggtataggttctggaggcttaacaatggccgccatcaaaaattattttctaatctttggtgggaactttgtctttctgtttaaagtggttttttgaaaacttgcaaatttttttctagtcctataccagggacataccccatttcatgcatcgtatgttgattatgagggctatataattgttctggaattagaacttgtgctccccattgttgtaataaatctcttccccataaatttttaggtacagaagttataattggttgaatagtcccaggttgtccatcaggcccttcacaatgcaagatataactactttgatatacttcagcggctttaccaactccagccacattaaattgagcgggttgaattggccacgcagayggccagtgctgtagagaaatgattgaaatgtctgctcctgtatctaccaaacctttaaatttctttccctgaatagttatttcacaggtagcacgtttatcagtaatttgatttacccaataagctgctttgccttgtttatttgtgct

SEQ ID NO: 760325 - DNA, 529 bp, Homo sapiens
aaaactggtatcagccgctgcaaaaacacaccaaaatacaaagactaatgacactatgaagaaagtgcatcaactagtgtgcagcattatgatgaaaggatcaaattcacacataacaatactagccttaaatataaatgggctaaaagtcccagttaaaagacacagactggcaaactggataaagagtcaagatccatcggtgtgctgtattcaggagacctatctttaatgcaaagacacacataggctcaaaattatgggatggaggacaatttaagaaataaagagaaaaataaactggacttcatcagaattaaatcattttatctttaaaggaaccataaagtaggaagacaacctgccgaatggaataaactatttcaaattgtayctaataaagaacttgaattcagaatatataaagaaatcttccaattcaaaaatacaaataaccaaaatagcaatgggcaataaataaagatttcttcaaataagatttttttaagaaaacaattaataagcacaa

SEQ ID NO: 760326 - DNA, 627 bp, Homo sapiens
ctttataattctctttcgttagtacattgagtttgagcttctgctttttaaccaacttcttgaattaatgtcatctatctttcatttaactgaaaatgtatttaaagctattcattatccagtaagtattactttgacatgtatgattttcattattattaagtgccaagtatgacaatgtgtttgatcmtttctcactaatccaatggttattagaacatatttttaaacaagaaattatttgacctcttataaaaattatttttacttttattaaaatagagtttaataacatatgtgctactaatatttttgaatttatagaacttcatttatgtttcaatacatattttatttgtatatcatttctgtaaatctactgggtgtggtaaagaaatataggcagtttgtcggtgatttcttactatatactaatagtttaaaattatcaattgtagagcttcatgatatacacacaaacacatgttctcaggccctcctgagctaagcacgcagatgttcctggtgggccacatgcccagggatggcatggaagccccatgccccttccccataacttgtcttatctatctcttcgtatactttttaattgcctttataataaac

SEQ ID NO: 760327 - DNA, 627 bp, Homo sapiens
ctttataattctctttcgttagtacattgagtttgagcttctgctttttaaccaacttcttgaattaatgtcatctatctttcatttaactgaaaatgtatttaaagctattcattatccagtaagtattactttgacatgtatgattttcattattattaagtgccaagtatgacaatgtgtttgatcatttctcactaatccaatggttattagaacatatttttaaacaagaaattatttgacctcttataaaaattatttttacttttattaaaatagagtttaataacatatgtgctactaatatttttgaatttatagaacttcatttatgtttcaatacatattttatttgtatatcatttctgtaaatctactgggtgtggtaaagaaatataggcagtttgtcggtgatttcttactatatactaatagtttaaaaytatcaattgtagagcttcatgatatacacacaaacacatgttctcaggccctcctgagctaagcacgcagatgttcctggtgggccacatgcccagggatggcatggaagccccatgccccttccccataacttgtcttatctatctcttcgtatactttttaattgcctttataataaac

SEQ ID NO: 760328 - DNA, 611 bp, Homo sapiens
gatatgtgcttcttttctcttgctgcttttaggatcctttagttttcctggacctttgggagtttgactattaaatacattgtgatagtcttcttagggttaactttacttagcgttctataaccttcttgtacttagctattaatatctttccctaagtttgagaagttttctgttattatccctttgagatgtgatattattttatttttaattttattttagttacagttccgggaccatgtgcagaaagtcagttgtttacgtaggtatacctgtgccatggcgctttgctgcacttattgacccgtcctctatgttccctccttttgccccccacaccctaacaggccctggtgtatgctgttcccctccatctgtccatgtgttctcattgttcaactcccaattttgaatgagaatgtgtrgtgtttggttttctgttcctgtggtagtcgctgaggatgatagcttccagcttcatccatgtccctgcaaaagacatgatctaatttatttatttatatttttatttatttatttatttttgagatagagtctctgtcacccagactggagtacagtggctcaatctcagctcactgcaagct

SEQ ID NO: 760329 - DNA, 611 bp, Homo sapiens
gatatgtgcttcttttctcttgctgcttttaggatcctttagttttcctggacctttgggagtttgactattaaatacattgtgatagtcttcttagggttaactttacttagcgttctataaccttcttgtacttagctattaatatctttccctaagtttgagaagttttctgttattatccctttgagatgtgatattattttatttttaattttattttagttacagttccgggaccatgtgcagaaagtcagttgtttacgtaggtatacctgtgccatggcgctttgctgcacttattgacccgtcctctatgttccctccttttgccccccacaccctaacaggccctggtgtatgctgttcccctccatctgtccatgtgttctcattgttcaactcccaattttgaatgagaatgtgtggtgtttggttttctgttcctgtggtagtygctgaggatgatagcttccagcttcatccatgtccctgcaaaagacatgatctaatttatttatttatatttttatttatttatttatttttgagatagagtctctgtcacccagactggagtacagtggctcaatctcagctcactgcaagct

SEQ ID NO: 760330 - DNA, 366 bp, Homo sapiens
atctaatttttttaatgtattgggtaaggaagatattataagtcaatgtgaaatgctaaatttaaatcatgtggtttttagaggcagaagggttcctaatgtatattaaaaaaaacttcctttctataaaatagcagctcgtttgcaatttcttaatatcagtttttgatttcyagtattaccatgatgtgttatgaggtctattttttaaagaaaatggaaaatggtaatggaaatgaaagtacctgtggctataaaaaatcatgaaacacaggtcttcatgactgatggagaaaattactccatctagtgttgtcttctgcaactttcagacataaggtaggaaaggacctaatattgttttga

SEQ ID NO: 760331 - DNA, 627 bp, Homo sapiens
gctaaatataatcaagtcaatttatcacatattaatattcaaaattgcatgtgctactgaatttagtactttagtacaattcaatattgatgaggagaaaaatccctagccttttatctttatggaatcctttgtcactgctaaatgatcattgcaaatgttcctgaagaaagcctgaygacttatctcttcatgggcatcttactgttaaaacacatttcctttcaaagaatatagataaccatgaaaatagcaaaatagttaagatacagaacactctcggggtccatttgtcaaagttaaattatagctgtctcagtttattcttgtctgctctttcataatccagaagaaataatcgaaatgatagtgagttagaatataaatggaaataaagcttaactctcactcttgatattgatatgcagtctggtaatgcaattagaatattcctgcacataagtaataccctaacatttctgtattgattattctctcaaatatcatgccatctagccccagcatattttgccatgaaaaggaaaagtggtttgctgcacccctttaataataccaattaattggtaaataatacaaaattttttaaatttcatttaacagcacttt

SEQ ID NO: 760332 - DNA, 584 bp, Homo sapiens
tagccagccatatgcagaaaacagaaactggaccctttccttacaccttatacaaaaactaactcaagatagattaaagacttaaatgtgaaacccaaaatcataaaaaccctaaaagaaaaccttggcaataccattcaggacataggcatgggcaaagacttcatgactaaaacaccaaaagaaatttcaacagaagccaaaattgacaaattgggtctaattaaattaaagagcttctgcacagcaaaakaaactagcatcagaatgaacaggcaacctacagaaaagttggattctttaagctacagtatactttcataatctaattcaaatagttcagattacagataagataattaaggattagagaggaaaaatggcttgtataatgtaagagacaaaaacagacagagctagatgaaatttcatgtttcctgatgcctatttcatttcacattgtattcttggcacaaaaggggctgagaaatgttgtaattattaagaaatttggtattagcaatctcagtctccttaattccttaatatagaacataaattcttataatatttttacatattta

SEQ ID NO: 760333 - DNA, 644 bp, Homo sapiens
catatcattatctgtattattgggcaaaaccattcaacaagtctatatggagtttcaaactttcccacatttttccaccttcttctgagccctccaaactgtgccaacctttgcctgtgacccacttccaaagtcacttccacatctctgggtatctttttagcaatgccccactctactgggaccaatctactgtattagttcgttttcacactgctaataaagacatacctgagattgggaagaaaaagggacttacagtttcacatggctggggaggcctcacaatcgtggaggacataatgaggagcaagtcacatcttacatggatggtggcaggcaaagagagagacagcttgtacagagaaactctctttttttaaaaccatcaartctcttgagactcattcactatcatgagaacagtacaggaaacacccgcccccataattcaatcacctctcaccaggcacctcccatgatatgtgggaattgtgtgagttacaattcaagatgagatttgggtggggacacagccaaaccatatcactcttctttgttgtccatagatgtataagctagcaaatattattcttcatcttgttttgagattgtgtgtctatacatttttaatatgccactgt

SEQ ID NO: 760334 - DNA, 639 bp, Homo sapiens
aaatattgatatggtttggctgtgtcccctcccaaatctcattttgaattttaactcccatgattcctacatgttgtgggaggaacctggtgggatgtggttggattatgggggcaggtttttcccatgctgttctcatgatagtgaatgagtctcatgagatctgatggatctctttctttgcctgctgccatccrtgtaagatgtgacttgctcccccttgccttacacaatgattgtgaggccttcccatccagtggaactgtaagttcactaaaccctttttcctgtataaattacccagtatcaggtatgtctttatcagcagcatgaaaacagactgatacaaatatagaccaaattaatatttatatcaggatttgtcctttttagacttagtttaagaaatgtaagctggcttactatattttctggaagcctatgtattaagtaattagttaatttacttatttcacttttcacattttagacctgcaaacaacctggaattgtatttttctgtgttgcacgggaacatataattaaatcccaatattttgcagtgccattttttataaataaattttttcaataaaaagatgtcagtttctatattatttaatccatcaaattgaaata

SEQ ID NO: 760335 - DNA, 595 bp, Homo sapiens
ttggtcatgtgacactccaaaggcacgctagtggacatggcttatcagtgacattaaacgtcgtttatgttatttttctcagcttcttgttctcctgctattggccatgtgaaaaagtaaccgtaggtaactgcttcaactcaggctttttcagtaagaaaataaagagaacaggtctggctcacgcttgtaatcccagcactttgggaggccgaggcggacrgatcacgaggtcaggagttcgagaccacggtgaaaccctgtctctactaaaaatacaaaaaattagccggacgtggtggcgggcgcctgtagtcccagctactcggagaggctgaggcaggacaatggcgtgaacccgggaggcagagcttgcggtaagccgagatcgcgccactgcactccagcctgggcgacagggactctgtctcaaaacaaaacaaaacaaaacaaacaaacaaaagaacaggtctgaatttgatccatactctgaagcagaaacacttgcagtaagctcccaacatgagcttgaaaaataagtgcttgtttttgtaagtcattaggctttggagtaatttgtaatgtagtatcagca

SEQ ID NO: 760336 - DNA, 636 bp, Homo sapiens
ggatcgtgtccctcttacccatttttttctttctttttgcttttggcacatctcaagttgtgtttttcacatgccaggttaattgtatttacagattatcttatcttgttttaattaagtcagtcttcacaaaaaaagacaagtggctgragacgattccctcaaagaaagcacaattaaagttaataatgataatgccagtagaagtaaagaagaacatggccaagctgtcacttcctttctgtacaaacgcttttgaccagccacattatgaggtaaaacaatggttatctaataagatccgaaagaagttggccaattgaaataatcaaaaaggtaatctgaaatgtggttttacatccctattgttgacaccaatctctccctaaaggcatattgtgccatgagatattaactgatggtagtatgaagccctcacaattgggataacgttttaaaatattgctcattttgggccaggcatggtggataacacctgtaatcccagcattttgggaggctgagggggaaggatcacttgaggtgaggagattgaaactaacttggggaacatagcgataactcatctcagcaaaaataacaaacaaaaaaataaaatactgctcattttatctt

SEQ ID NO: 760337 - DNA, 504 bp, Homo sapiens
ggaagaaatgccccagatgttatcagggtgatggcagtacagatttcctctttatgcttctgtctgttttaaaaagtgagtatggttttgtaataattagagttaaatgttatcataatagtaacgacattttaagggagcacagacttctagccaaagataaaatcatttcttctctgttcctctcccttaaaatctacatacaacaaccacaaataagtaaacattgaaataaactttatttttgatggagctgggagatgtctccattgctggacagtctctcttgtatctggaacaaagcatggcaggygaacagagctggcagggccctcatcagacttgaagcaagatctgctttccctggaaataaggtttaccctcctgaaagacttctgtcttagtttagaggggccataaatgaggatgggatgttcagagagaagcagaggcacagctatgcaggtctgtttgactccacagagcagaagggaagaaatcatg

SEQ ID NO: 760338 - DNA, 619 bp, Homo sapiens
tagaaaaaaaattaaaagaacagattaaactcaaagttagcagaaaaaaacagaacaataaagatcaaagtgaaaatgaataaaatacaaagtagaaaaacaatagagaaaaagttgatactttgagatcaataaaattaataaacctttaaccaggctaatcagaaaaaaaagatataaattaccaatatcagaattgagagaagtgcaatcactgtatataatcctatattaaaatamtaatagggaaatattatgaacaactttaggccaccaaatttaataatgttcacgagatagacaaatcccttgaaaaacacaaactatcaaagctcacttgaaaggaagtggatattctgaatagcatcattattaagtaaatagattctgtagttaagaaatcctctcataaagaaaacttctggccaaaaaatattcactgatgaattctgccaaatatttgataaagaaacaatacagcttcttcaaaaacttttccagaaaattgaagaggagggaattttctccagctcttgtcggccagcattatgctgatactaaaaccagaccgagacattacttgaaaagaaagctatagaccattattgctcatgaatat

SEQ ID NO: 760339 - DNA, 619 bp, Homo sapiens
tagaaaaaaaattaaaagaacagattaaactcaaagttagcagaaaaaaacagaacaataaagatcaaagtgaaaatgaataaaatacaaagtagaaaaacaatagagaaaaagttgatactttgagatcaataaaattaataaacctttaaccaggctaatcagaaaaaaaagatataaattaccaatatcagaattgagagaagtgcaatcactgtatataatcctatattaaaatactaatagggaaatattatgaacaactttaggccaccaaatttaataatgttcacgagatagacaaatcccttgaaaaacacaaactatcaaagctcactygaaaggaagtggatattctgaatagcatcattattaagtaaatagattctgtagttaagaaatcctctcataaagaaaacttctggccaaaaaatattcactgatgaattctgccaaatatttgataaagaaacaatacagcttcttcaaaaacttttccagaaaattgaagaggagggaattttctccagctcttgtcggccagcattatgctgatactaaaaccagaccgagacattacttgaaaagaaagctatagaccattattgctcatgaatat

SEQ ID NO: 760340 - DNA, 619 bp, Homo sapiens
tagaaaaaaaattaaaagaacagattaaactcaaagttagcagaaaaaaacagaacaataaagatcaaagtgaaaatgaataaaatacaaagtagaaaaacaatagagaaaaagttgatactttgagatcaataaaattaataaacctttaaccaggctaatcagaaaaaaaagatataaattaccaatatcagaattgagagaagtgcaatcactgtatataatcctatattaaaatactaatagggaaatattatgaacaactttaggccaccaaatttaataatgttcacgagatagacaaatcccttgaaaaacacaaactatcaaagctcacttgaaaggaagtggatattctgaatagcatcattattaagtaaatagattctgtagttaagaaatcctctcataaagaaaacttctggccaamaaatattcactgatgaattctgccaaatatttgataaagaaacaatacagcttcttcaaaaacttttccagaaaattgaagaggagggaattttctccagctcttgtcggccagcattatgctgatactaaaaccagaccgagacattacttgaaaagaaagctatagaccattattgctcatgaatat

SEQ ID NO: 760341 - DNA, 629 bp, Homo sapiens
ctagcgggacacaatgtatgccaatgtggggctcgaaaaaaaccactcagctgactccttgaaaacaggagaaacttctcactttggggtggccttggggacattgggaagctcgagcttatgtttcatggggcctatactcaagtgacasccacccacctcatcataccaatgacccccaaggaatgacagagatacgttctccacaattcagtggcatctgaaggtatcttcaaaggaattgattagaaggtgaatccaggggtcatcttctagactaatctaactccatctcatcattcccctccaaagtagaaaggtgtgagattggtggccatttgactcattcattcagtcattaattcattcacatattcacatattcaacaaagggttgcttccatgtgccttcgatgtgccaggagcttggaacataatggtcataaggcaggcaagtccccctttgtgttaggtagaattctaagacagcccctgtattagtcccttttcacgctgctgataaagacatacccaacactgggaagaaaaagaagtttaatggactcacagttccacagggctggggagacctcacgatcatggcagaaggcaaggaggagcaagtcaca

SEQ ID NO: 760342 - DNA, 630 bp, Homo sapiens
cctcagtctcagcttatgtgctactttctcaaagaatccttatcctccccaaatatgggtccactatacctcttttcctctctcatatcaccatatagcttaccttcatatcgcttaccctataattttcatacarttgtttaaaatatatcttacctctttcaatatgatacaaaccatgatgtcaggggtcatgcatattttatctatatttcccatgcctagaacataatgaacactcaacaaatgtcatggtatgagtgaatgtttttcattctattccttgtttcttcaattctggactcagcctgataaaactactgtacatctttgggcctggtgggtaccaaagttattataagaaaggcaacagatgaaaattttaattttataataaactgatcaaattaatttacatcaacataatgctcactacttacatttcagatgaatattactaatcctcatttagggatgatttggtagtaaaaataagaaattcactcaataatgccaaatataaacgttatattttaagaataccggaaaattccttagaaccaaatgcagaataaagacttttacttcataggactgaaaagtcctcaggcaatcttactttcttattct

SEQ ID NO: 760343 - DNA, 669 bp, Homo sapiens
aagcagcttcctccaaaagggcagagtagctttcatatagaaggcacaattcctttcccatgaagaacattttaactaatgcttcctactaggcaacgatcttcagttggattcctcaaaaggagaccctgagataaggatttgtatgcaagtgatttattaaataagtttgaggaaaaactagtaagtaaggaaagcaaaaagcaaaaggaagcaacagtgcaatttcacacaaagctttcagagctgaaactcaatctgatctaacagagagaccctggaagtatggaagtataaattatgtctcagcactattgcaacctaaggcaaagagctgggcttttaaacctcctcacccataggtattcrttggctaaggatcacccttagaaatgagtagggtgaggtataaattcccaggcactgcccactttttatacttgagggacaaagtggttccagtagcctgagagtggcctccaaggtggagccactggtataggtcatcgacgtcaaaagccacagaagccaagacaggtgccgaaaacagtaggaaagatctgttttgggacaaacattgagtgttcaatcaaggagcccccctgcctttgagccacagtgctggacctctttacacaggctctgagagagagtttacagagacattta

SEQ ID NO: 760344 - DNA, 521 bp, Homo sapiens
tgctgttgtatcatatggatgatttgtctcttttcctctggctactttggaacctttttgtgtttgctcttctacagtttcactatgatgtgtctacatttgggtttcttttattctacttaggaaaatagatttatatttatcatcacttctgtaaaawtctcaattactatctcttcaattaattcctttttctcagttctctttactgtcttagagttcagaatacatatgtttctgtttcctcttctgttctccgtatctcttaacttctttcatctttttcatcttactactctctgtgctctattctgggtaatttcctcagatgtgtattccatatcactgttcaactatgtttcatctgttgataaacccatacattgagacttttttaatttctaaaagtctatttttcattttagaagttccattttattgttatgcgtatcttcccagttattcctgatactcttgtattccttcccgatctttgtggttccatacttcatttctttaaa

SEQ ID NO: 760345 - DNA, 533 bp, Homo sapiens
gaggactccccaacccccaaccaggaatgtcaggcaaccatcaggtgatggtcaggcggttgttaactgtctttccaaaataataattggtcaggtgcagctagtgccagggaaaggcagtctcccgataagatagaaaatgcctgaaactggtaatcagcagcttcccaataagacctcaggagttgggcaagtgagctcaagcatgagcattaagaagcaaaatggtasagtttaaatggtatatgaccttctagggacattcgactggtaaggggagaacgcctcaagagagcatgcgtacaactccactaaacacaccactcatgttcccctcccaaacgctagcaggccactgcctatgtggacagcccaccccacgggaagaatcagggaagtaatgcaagaccctggaagtcagaggtcaaagcatgcatttgatctctcaagtcgcctgtttggccctcttcctttcattcctgccctaaagctttttaaattattaataactttgattcctgctctaaaacttg

SEQ ID NO: 760346 - DNA, 533 bp, Homo sapiens
gaggactccccaacccccaaccaggaatgtcaggcaaccatcaggtgatggtcaggcggttgttaactgtctttccaaaataataattggtcaggtgcagctagtgccagggaaaggcagtctcccgataagatagaaaatgcctgaaactggtaatcagcagcttcccaataagacctcaggagttgggcaagtgagctcaagcatgagcattaagaagcaaaatggtagagtttwaatggtatatgaccttctagggacattcgactggtaaggggagaacgcctcaagagagcatgcgtacaactccactaaacacaccactcatgttcccctcccaaacgctagcaggccactgcctatgtggacagcccaccccacgggaagaatcagggaagtaatgcaagaccctggaagtcagaggtcaaagcatgcatttgatctctcaagtcgcctgtttggccctcttcctttcattcctgccctaaagctttttaaattattaataactttgattcctgctctaaaacttg

SEQ ID NO: 760347 - DNA, 579 bp, Homo sapiens
ttttttttactgttgagttgtagaagttccttatatagtctggatattaaccccaaatcagatacatgtgttgcagttatttttgcccagtccataagctgccccttcactctgtcgatcatgtctgtttacgcacaaaagtttctcgtagtcccatttgtctatttttttcttttgtygcctgtgcttatggtgtcacttccaagacataattctcaaatccaatatcctgaagtttttcccctatatttttttctaggagtttaatagttttaggccttacatttaggtctttaatcccttttgagttaattttatgtaaggtgtaagttaaggtccagcttaatatttatttatttatttatttatttatttaggcatgtggatatcccagttttcccagtaccatttgttaaggagactgtcctttattcactgtgtcatcttggcatccttgtcaaaagtcatttggccatatatacaagggtttattcctaggctctaaattctgttccattggtgtatatatatctgtctttattctagtaccataccatcttaattactgttgctgtgtag

SEQ ID NO: 760348 - DNA, 556 bp, Homo sapiens
gtccatggattcaattattttgggtatataccaaggagtgatattgtttaactttatgaggaacctggatactgtcttccacagttactgtaccattttacattcccagcagcaatgctcaagggttcatatttctccacatccttgtcaacacttgtattctgttgttttgttttaatatagctatcctaatgggtakgaagtggtaccttaatgtggttttatttgcatttccctactgactaatgatgttgagcatcttttcttgtgcttattgtccacttggatatttcctttggcaaattatctgttcaagtacttttcttattttcaattgggtggtttatcattttgttcttgagttataggagttctttgtatattctagataacatgatttgcaaatattttttcccattctgtcagttgtcactttcttgataatgtccttttatgtacagaagtttcaaattttgatgtagtccaatttaccttttttctttttttgcttatgatatgaagcataagcaaaaacctttttttttttttttttttg

SEQ ID NO: 760349 - DNA, 566 bp, Homo sapiens
aaaagtttttcttttccagaaagaaatataagtaaacattcacctgtgactatttgtgactcatgaatatttttgtaaattgaaccttgtggattcaaatcatactgaattttgtgtattcaatctaaatgtattttttaaaatgttccttttacattttctcacacaaaaagtttgttttctttgcaattttaatcgtgaatcgctatattattactaaatggattcataactatgaacagtaaatttaactctagtaagttgttgagtaactaaggtacattgtactgaatattaaatatataaagtaaaatgactgagactgtcacaaatttgctttcttcaaggcactgtggttatagcaaagctgaccaagaaggcgatgaagagctttactttcattgtaagtgtytggcttttctttattatgatgtacccctattaacagaaaaatctggttattagcattggcattaacaaagtcctcatgcatcatgcttgaaattataccatgagctcaaaatgttgctttaaagcatttgaatcagatgtttagaattaaaatc

SEQ ID NO: 760350 - DNA, 651 bp, Homo sapiens
tatcaaaaagactgagtgtcagaaattagtattattatgtacacaataaaacaaattatgaaatatgttgcacagtctaaatgaatgtgttttcttggtatgtaactaatcaaaaaattcttcctttatgttatcacctcaagggaaaagaaagcagaaaaaaaatgaatgcaagattagagttgaagaataactctgatagatggaatgactgataaatgtttttatttctcttcaagagacataataattatgcaatatagtctttacattttacataaagtgtaattttctctgagttttactcacaaagcaggagtcagaagaacacagtgacttttatttatatggtttaattttatgaatcatgaccatcttccaagcagacatataatgactttttgagcttagcagcaacaataaaagaaatgctcatacttctcacactcactctttcaaaagaacaccatgtrttttattgggggatgagaaaggaaatgaccctccagctcaggttacgactcctgaaactttttttttttaattttagggaaaccagtcatgatagtaatagagttcatggaaaatggagccctagatgcatttctcagggtaagtaccaaagtgatccacttattctaaatatactat

SEQ ID NO: 760351 - DNA, 623 bp, Homo sapiens
aaaagtttgcaaacaaaaatacattgcatgagccatttattatttaagccaagtaatgaaaatattcatgattgatgtactgtgtgcaagactattttggtatgcattatgatatattgagaatgtaaagattatgtggaatatttgacataatagtttctcagtgaaatgtggaaacagtaaaaaatacatatattctgaggcggaacttaagcaaatctgaaatttatttttgaaagttttcctcgtgtaatatagcatcctcagaaagtttactttgtatatctaccaaagtttgccacacagcaaacaagamcttttggaaaggactgtgtctcatggtacagcaacctcagctaataaaacattacgtatttcttactgtcagaacccatctcaagaaacacagttatgattgtcaatctaatttctattaaacatgctttgcatgtggaatgtggaatccgagaagaattgaggcaaaggaaaaagttattttatagcctcattgaagattatagttatagaaagagatatgaattcttaattgctttcatgattattgaaattagtattttaaataaatattttctgtatatagtactttactgtagctattcaga

SEQ ID NO: 760352 - DNA, 633 bp, Homo sapiens
tagagaaaaaagaatgaaaagaaacaaaacctctaagaattatggaactatgtaaaaagactgaacctatgactgattggagtagctgaaagagatgggagaaaggaaccaagttggaaaacacacttcaggatatcatccaggataacttcttcaacttagcaagacaagccaatattcaaattcaagaaatccagagaatcccaataagacacttcataaaaagatctaccccaagacacataaacatcttattctctaaggtcgaaatgagggaaaaaatgttaagggtagcaagagagaaaggccaggtcacctacaaaaggaagtccatcagactaayggcagacatctctgtggaaaccctgcaatctatgagattgggggccaatattcaacattcttaaagaaaaagaaattccaacccagaatttcatatccagccaaactaagcttcataagcaaaggagaaataaaatctttttcagagaagcaaatgctgaggaattttgtgaccaccaggcctgccttgcaagagctcctgaaggaagcactaaacatggataggaaaacctgttaccagccactgcagaaacacaatgaagtacacagaccaatgacactatgaagcga

SEQ ID NO: 760353 - DNA, 633 bp, Homo sapiens
tagagaaaaaagaatgaaaagaaacaaaacctctaagaattatggaactatgtaaaaagactgaacctatgactgattggagtagctgaaagagatgggagaaaggaaccaagttggaaaacacacttcaggatatcatccaggataacttcttcaacttagcaagacaagccaatattcaaattcaagaaatccagagaatcccaataagacacttcataaaaagatctaccccaagacacataaacatcttattctctaaggtcgaaatgagggaaaaaatgttaagggtagcaagagagaaaggccaggtcacctacaaaaggaagtccatcagactaacggcagacatctctgtggaaaccctgcaatctakgagattgggggccaatattcaacattcttaaagaaaaagaaattccaacccagaatttcatatccagccaaactaagcttcataagcaaaggagaaataaaatctttttcagagaagcaaatgctgaggaattttgtgaccaccaggcctgccttgcaagagctcctgaaggaagcactaaacatggataggaaaacctgttaccagccactgcagaaacacaatgaagtacacagaccaatgacactatgaagcga

SEQ ID NO: 760354 - DNA, 592 bp, Homo sapiens
cataagactgaacaaaattttctagtccctattgtttatgcaaacatatgcatagatcttttttaaagtagtacccaaatgtacttgaaaactgggattatgtgaaattgaaaaactatttcatttctcttcagaatggaattatattatcttaatctttctgtggaaatctcaggtaaatttatacccatcagtaaaacatttcattttctaacttctcaaataaattaataagcaattcttgcttgaaaaaatgatttttcttgtataccattcaatttttttgatcttcttaataatrcatcacttttgccagttgtaaacaaatacaattttaatttacaaagtcagaaatgtatattcaaaacaaacgtgatctgataaaattgcaacaagtgacgttcttggtcatctcttttttcagctgctacctaaataattgtcaacctatataaaagtgtgaaacacctggagtatagagccacttgcttaagtgtattttacactgtatatttaatacatttttatataatttttctgaaggactatagagccgaaaaatttgtatccaatgtttttgaaaggtagatat

SEQ ID NO: 760355 - DNA, 638 bp, Homo sapiens
agacataacgatctttaatgtgtatgtgtctaacaaccaaatgtcaaatacctgaggcaaaaactggtagaaatgcaagagaaatagatgagtctgctattgtagttggaaaccttaacacctatctatcagaagtggacaaatccagcaggcagaaaattagtaagggtatagttgaactcaacatcaccatcaatcaacgggatataattgacatctatagactacagtcatgcgtcacgtaacaatgggaatatgttctgagaaacgcatcgtcaggcaatttcatcattgtgcaaacatcatagagtatacttatgcaaacatagatggtacagcctactatgcccctatgttataatggtgtagcctattgctcctgggctacaaatccatagagcatattactgtacagaacactgtaggcaactgtargacaatgataagtatttgtgtgtctaaacatacctaaacatagaaaagtaatgtgttatgctatgatattacaacatcactaagtgataggaatttttcagctccattataatctgatgggaccactgtcatacatgtggtcctttgttgactgaaacgtcattatgaggggaatgacagtacttctgtggaacataaaacac

SEQ ID NO: 760356 - DNA, 480 bp, Homo sapiens
gcacagggttgcaaacattgcaattgaagatctgtataagcagtagttggacctccccctactatctcaactagactatccctctggtaaactcacagtagacaaaagttagagtccctggagagattgaactagaagcgtactgtatttaggaaccaaggcwcagaagtagaagaaaattgcgtcggctaactgaaaagtacaaccacagaaactcccaatcaccagctccagaagtcaaaggaaacttgtagaccatatccaggcaggagatcggaggatcctttctggagaaactgaactgccacagagaaattacccagaaactgacaaatgaaggtctctgtgagaaagcaagatggccacacagttgccctacactaaaacccacccaccaacaagttccacccaaacacacatgatggcttaagctgaattatgatatccaaggatgatcagcctttaagaaaagtctctggt

SEQ ID NO: 760357 - DNA, 628 bp, Homo sapiens
cgccttggcctattccttgaccaaagcacatccatgtaccttacagcttcgctcatgggacccaccgaggggactaaaagtgggagaggatggattcatcaacaaaaatctggccctaaagtcagaagaaagggtgtgctgggaggcaaaccccaaatgttgaccgtggtcccagtagatgcactatttgggaccagcctgcctcataagatcagccctggaattggggccagggatttctgttgttcccttccacctttaagctccacactttatagttaacatggcacttcacagtttactttaaagccagaggcctgggtgttgcgtcaatagtggcatccgtcttcagacaaaagccacatgtcccaagcagtgtttggggcaggtcaggcttatgttcccttaagctgcaggtggargaacactgcccttttatttagagaagtacttctcaaaagtgcttcagcatatgccagcatcacctagagggcttgttaaaacgcagattgctaggtcccagccccagaatttctgattcagaggggctggtgtcgggtcagagaatttgcatttctaacaagtttctaggttatggcaatgctgctggtctggggactgcactttg

SEQ ID NO: 760358 - DNA, 576 bp, Homo sapiens
tgactttctctcacctcctcctgggctcctgatcttgagaggaagggcgaccaggtggagagagatggaggtggaggaagagtgaagggccaggccaggccctttccctccaaagctgtaagtcaggcatggactgggggaatgagaaagcctttacattgcgggtgagatttgattttaattgatactggtcagggcttttcagttcctgaaaggtgagtctgaatgattcagatggcacttttcttatgcctgagaggccctggacagctgcggtcctaagatgtcaaggggcatggaagggagaggctkcagagttccaccaaagggtgttttcctggcacccaacaagggccagtaagcagttacagagacacaaggatactaggaaggggagtctgggaagagggaggagcagcagggagaacgggatagggtgggcctgaagtgtttgtgaacctccccgagtccacctgtggaaggagagaggatggtggggaacaaggctgagaggaaaacagcatctcactgcagaggtcttgatctaggacttcagcattctttttttactttttt

SEQ ID NO: 760359 - DNA, 576 bp, Homo sapiens
tgactttctctcacctcctcctgggctcctgatcttgagaggaagggcgaccaggtggagagagatggaggtggaggaagagtgaagggccaggccaggccctttccctccaaagctgtaagtcaggcatggactgggggaatgagaaagcctttacattgcgggtgagatttgattttaattgatactggtcagggcttttcagttcctgaaaggtgagtctgaatgattcagatggcacttttcttatgcctgagaggccctggacagctgcggtcctaagatgtcaaggggcatggaagggagaggctgcagagttccaccaaagggtgttttcctggcayccaacaagggccagtaagcagttacagagacacaaggatactaggaaggggagtctgggaagagggaggagcagcagggagaacgggatagggtgggcctgaagtgtttgtgaacctccccgagtccacctgtggaaggagagaggatggtggggaacaaggctgagaggaaaacagcatctcactgcagaggtcttgatctaggacttcagcattctttttttactttttt

SEQ ID NO: 760360 - DNA, 594 bp, Homo sapiens
ccgggctggaatgtgcaataggaagagacaggaatatgcagcaggggtgaagtcagtgcagagacggggcggccagatcacgcagtcctcctaagcccctccgaggagcctggactttactcttgagtatggtgggaagctgttggagggtttggagcagaggactggcacggtcccacttttccttcaatgtgctcactgtggttgctgtatggagaatagacagaatcagggaagggaagaaggtgggagccatcctaggcactggctcatatgatggcacctmggaccaagggtggtagtggaggtaagcagacatcagcaggaggcttctcgaaaagtttttgatttcctaataaaaagagacagactgtgctgaaatggcccttccgcctttcctcttcttcatggccatgacactctgacttgcagcagccatttttggctaaaacacatgtagagacatcatccagatatcgttgaaccatgtcatccaggtatcattgaacctccgaacaaagggcagtgactgcctagctgcagagttgttcttttgtgaatgaacaaactcctgcctgggaatgctctgcagtc

SEQ ID NO: 760361 - DNA, 611 bp, Homo sapiens
taacattttacattagtgtagtacatttgttataattgatgagtagatattgatagattaatattaaccaaaggccatagtttacattagagtttattctttgtatttgacatcataggggttttggtcaatgtattatatcatggtttcaccattatagtatcatgcttaattttgtcccacctatttatttctctgtcactcttgctgaaccccggcaaccactactatttttacygtttccagaattttgccttttccacaatgtcatgtagttggcttcttgcacttagaaatacgcatttaagattcttctgtgtcctttggtggattgatagctcatctctttttatcacaatatttcatcacgtggatgttcacagcttgtttattaattcactgattgaaggacatcttgattatttctaactctggcagtcatgaataaagctactataaacattcatgtgaaggtttttgtgtgaacagttttcagtttatttgggtaaattctaaggagaatgattgctggatcatgtggtaagagtatgtttaattttataagaaattgtcaaactattctaacgttgctgtaccattttgcatttcca

SEQ ID NO: 760362 - DNA, 611 bp, Homo sapiens
taacattttacattagtgtagtacatttgttataattgatgagtagatattgatagattaatattaaccaaaggccatagtttacattagagtttattctttgtatttgacatcataggggttttggtcaatgtattatatcatggtttcaccattatagtatcatgcttaattttgtcccacctatttatttctctgtcactcttgctgaaccccggcaaccactactatttttaccgtttccagaattttgccttttccacaatgtcatgtagttggcttcttgcacttagaaatacgcrtttaagattcttctgtgtcctttggtggattgatagctcatctctttttatcacaatatttcatcacgtggatgttcacagcttgtttattaattcactgattgaaggacatcttgattatttctaactctggcagtcatgaataaagctactataaacattcatgtgaaggtttttgtgtgaacagttttcagtttatttgggtaaattctaaggagaatgattgctggatcatgtggtaagagtatgtttaattttataagaaattgtcaaactattctaacgttgctgtaccattttgcatttcca

SEQ ID NO: 760363 - DNA, 595 bp, Homo sapiens
tactgttcgcaaacgggcaatttgacttccttcttgccagtctgaatgtcctttctttttttctcttgccttattgctctgtctagggcttccaatgttattttaagtaagagtgttgagaatgagcatccttttcttgtttcagctctaagagaaaaaattgtcagcttttccacatttggaatggtgttagctatgggtttgtcatatatcatctttaatgtgatgagatacyttccttctatacctaacttgttgagcatttttagcataaagggttattgtattttatcaagggctttttatatgtctgttgagatgatcatctggttcttgtcctttattctgttggtatgatgtattgtgtttattgatttacatgtgttgagccatacttgtattcctggaataagtcccacttggttatggtgtatagtcttgttggtgtactgttggattctgtttgctagtattttattgataatttttgtatctatgcttatcagcaaaggtactgctctgtacctttctttttgtgttgtatctttgtctgcttttggtattagggtaaagctaatcttgtaaaatgatattg

SEQ ID NO: 760364 - DNA, 634 bp, Homo sapiens
aactgattgaattataaacgactgaaggaagtacaagcattgagaacatcaatttgaaatgtaaatatctttctttgaaatgccttcttctcctgacagacacaaacttcaaacaaagctttatgcatgtactgcagtgggaggatattttaaatactaccaagtcatgactgttactagtttaattgcagtttccaaatcacacaattctgaaggtgaccaagggaaaacaactgatacatgtgaggagaaaaactacagggtaatggtttccatacaatggccaaaaaataaaagaacttgttctggtctaatagttttctgcaaatatagaatattgtgaggttctaggttctattaagaacttttcattgcttcttattatgtatttaacacttgaatcctttagcagaaaacctaaataaataaattcttctagttcccgtgatataagaacaaaagctgtgtcaaaatagtgaattaaagtgagtaggactakcccaaatattaccttaattttttactaacttagaaattcttgaaacagaggcaaattttgttttgatgttgtccctcattgtaggtttacctcacacatttcctctctgttaatcctgggtacccaacatactga

SEQ ID NO: 760365 - DNA, 660 bp, Homo sapiens
ccaggctatattttttttctctatagaccagctttgattggattgaatgattggagcatattgcagaacacatggagctgacatttcccagtttcctaataaaaacccaccacttcatctgagactgaatttcttttccttactctgtttggtttagggaccaatcatccctgaaaaaaaaaaacaattagggtcaaagaatgaaatagggagaaaggtcatcaattgtctcaaccatgtcatataccacttctggcccaatcaaccttggtcataaggaaagcatcacagaattgctctcaggagcacaccaatgttactrtgtggatttggaggctcttctggctattcttagagaatgtgaggatggttaggtgaggcagcttgctagatatctactatcctgtcttccccagacataatcttagctattcctggttatggcagggaaaccagaataatgtggagaaaaacagaacaaaagaaaaatggttttaggattctgatggtctgtgtttgaatttcagtttgttcatctgtgcaacaagtgacagattgctttatatccttgggtctcagttttatctataaaataagatttatcaacctctttagataaggcataccatacttatcttactcatctgctaggattctctt

SEQ ID NO: 760366 - DNA, 618 bp, Homo sapiens
cctagtgctgaattttgctggtgttccacagtgaagttagatacttacttcattcttacttcattctcttttttctaggtgaagagtatcttctttgtgctacctgggttcagggaattggtgatgtgataatgtgaaactgttcttaytcccatcaacgcctctttttttttttaatttctgtgctccactgaaacaatctaacctctcacctggattctttagctactatgaaaacattttcatgcatggatagttgattgaatttatgtttctgcaaggggatgagtgctagaaagtctttcctctccatcttgctgatgtcactccatcctaatagcctttaataagatgtttatttattccatttattgtgtcagacctgtcctagagatagaagagcagaagcacaaatgttgcctgagtccaatatgactattgagctgccataccaatggtgaaatatttacatcaagacttttaagtgagaaagtaatagatgtttatcttatttaacccattttattttgggtatctattacatatgactatgtattataactaacagtcacttagcattactaatttcactataatgtagtatatgtatatatacac

SEQ ID NO: 760367 - DNA, 638 bp, Homo sapiens
cacatagataatccacattgtttgctacttgttgatcagctactatatgccaagttttgtaccgtatacttttgtgtgcattttcccatttaattctcataaagaaaaataccaggaagataagtaatattactcccattttatagttgagaaaattgggacttaaagagattaaataacttacacaggacctcactaataagcagcagtgcctgggtttgaatcttgggccacgtggtacctgaagccatcatgcccttttagtacaaggctgagtgtaatcagaacctgtctgggatgactagtgtgtcattcaggattctccggagaaacagaagcaattatatgtatatacatattgtatgtgtatgtctgtgtgtgtacggagaaagagayttattctacggagtttgtccacccaattatgggactgacaaatgtgaaatttgtagagtgggcccgtgggctggaaattcagataagagttgatgcttcaatcttaaatgcaaaatcagtagggcaggccagcaggatgtaatctcaggcaagacttctatattatagtatgagggagaatttcttctggaaacctcagttttttgctcttaaggctttcaacaacttggatgaagcccacc

SEQ ID NO: 760368 - DNA, 542 bp, Homo sapiens
ttttccagctttttcttacttgctgttggcctttatgttcaggcttgtccctcatcgtctctagagttactgaatcattaagggtcccaggcaaaatagttgacctttaaattaggaaagctcaagattatttattaaaaagtatgggcagagtgtaggaaaccacaagggataatgctgttccccaagaggccagtaacaacagcaggactgccaccattcccaagcgtggtaaggcaagaggagggagcagctatagctaccagaaccaggaaagaggaggcatgtagagcaactgactgagaagaactgtgaccttcagtaygaggaaatagctatcatctgtgaagactgtggggagaggggtagaggaatcactgcttctctcactttctattcttccagtcacctgccagagctccttatgggttaaactcaatgggaattcagagagaaagggaaccctttaacttgtccatgtaggtcagccttctctgagagcagaatgcagaagggaggggagtgcatctggagagtgaaac

SEQ ID NO: 760369 - DNA, 500 bp, Homo sapiens
cctagaaataaatccacatatttatagccaaataattttcaataaaggtgccaagaacatacgttgtggaaaggacagcctccttaaataatggtactgggaaaactggattttcatatgcagaagaacaaaactagacccctatctcttaccatatasaaaaatcatctccaaatgcatgaaagatttaaatgtaaggctccaaactataccactactggaaaaaaacataggggaataatttaataacatcggtttgaaaaaaagttcgtataggtctgccttcaaaagcaaaggcaaccaaaacaaaaaaagacaaatgagactatatcaaactgtaaaactcatgcacagctgaggaagtaacagagcaaagagacaatctgtagagtgagaatgtctggaaatcatttatcctcacaggattaatatccagaacatacaaagaactcaatacaacagcaaaacaagcaaacaaacaaataattctattaaaatgt

SEQ ID NO: 760370 - DNA, 578 bp, Homo sapiens
gaaaatttttattaaaattcatataaacatgtaaataaattattaattttcttgttttagtttaaaactattaagagacagtattatttttcttgcaccaaagtcttttggtaagctagcatttaatatttaaataracaatagagacagattaccagatggagaggggttgaacattaggcctataaccatagcaatcaaagagaacactttaagataattttataggtagtgtgttcactgcaatgcaaggaaaataatagacagatgtctcattagctcatgcactttgtatattccttatctgtaattcttaaaagcattacccagcattgcgaataagcaaaatattgggctattggtgaaataaaacacaacaatatagagagttaactgagttcatctttcattccagacagatgactgtcattcactagaaaatgtattgcacccagtttaaatttcatggtaatttaaatgtgcttggcatctctccagggccaccaggaagttaacttcagcatttgtgaacaaagctgaaattactggaagtaacctttgaactggtgtgacttggg

SEQ ID NO: 760371 - DNA, 572 bp, Homo sapiens
cctataaccatagcaatcaaagagaacactttaagataattttataggtagtgtgttcactgcaatgcaaggaaaataatagacagatgtctcattagctcatgcactttgtatattccttatctgtaattcttaaaagcattacccagcattgcgaataagcaaaakattgggctattggtgaaataaaacacaacaatatagagagttaactgagttcatctttcattccagacagatgactgtcattcactagaaaatgtattgcacccagtttaaatttcatggtaatttaaatgtgcttggcatctctccagggccaccaggaagttaacttcagcatttgtgaacaaagctgaaattactggaagtaacctttgaactggtgtgacttgggataactccattcattcctttttcatttttgacataatcctatgcatactaagaattttccaattgcaatataacagctgatatttagattcaaaagtctccagagagggtttttaaaatgcatttatatctaagaaactgggtggcttatgcctgtaatcccagcactttgggag

SEQ ID NO: 760372 - DNA, 584 bp, Homo sapiens; identical to SEQ ID NO: 751442

SEQ ID NO: 760373 - DNA, 606 bp, Homo sapiens
cagaacaaaaatggacaaatgggatcgcgtgaagttaaaaagtttctgcacagcaaaggatacaatcaacaaagtgaagagacaacccacagaatgggataaaatatttgcaaactacccatctgacaagggattaataacaagaatatatgaggagctcaagcaattctatagraaaaaaattaatccaatcaataaatgggcaaaagatttgaatagacatttctcaaaataatatatacaaatatccaacaggcatatgaaaagatgctcaacttcattgatcataagagaaacgtaaatcaaaactacaaaaagatatctcaccccagcaaaatgacttatatctgaaagacaggcaataacatgctggcaaggatgtggagcaaaggaaatccttgtacactgttgatgggaatgtaaattagtacaaccactattgagaacagtttggaggttccttcaaaaactaaaaatagagctaccatatgatccagcaatgccatttctggatatgtagcaaaaagtgaggaaataggtatattgaagagatatctgcacttctatgcttgttgcagcactgcttacaatagctaagatttgaaa

SEQ ID NO: 760374 - DNA, 614 bp, Homo sapiens
ggcacaagtgtatagtcccagctactcgggaggctgaggtaaggattgctggaacctgggaggtcaaggctgcaatgagccatgatggcatcattacaccccagcctaggcaccagagcaagaccttgtctcaaaaaaaaaaaaaaaaaaactacaaatggccagtgggtacgtgaaaaaaaaaatgttcaacatcactaatcatcagggaaacacaaattacaaagacaatgagatatcatctcaccccagttaggatggctattaccaaaaagacaaaaaaataacaaatgctggtgaggatgaagagatargggaatgttcgtacactgttggtggaaaataaactagtacggccgttatggaagacagtacggagtttccatctagaactatcatatgatccagcaatctcactgctgggtatatatccaaaagaaaagaaatcagtatatcaaagagatatctgcacccatatttattgcagcactattcataataagcaagtatgaaattaacctaagtatccatcaacagatggatggataaagaaaatgtggtatacgtagacaatggaatattattcaactataaaaagaataaaattctgtcat

SEQ ID NO: 760375 - DNA, 614 bp, Homo sapiens
ggcacaagtgtatagtcccagctactcgggaggctgaggtaaggattgctggaacctgggaggtcaaggctgcaatgagccatgatggcatcattacaccccagcctaggcaccagagcaagaccttgtctcaaaaaaaaaaaaaaaaaaactacaaatggccagtgggtacgtgaaaaaaaaaatgttcaacatcactaatcatcagggaaacacaaattacaaagacaatgagatatcatctcaccccagttaggatggctattaccaaaaagacaaaaaaataacaaatgctggtgaggatgaagagataggggaatgttcgtacactgttggtggaaaataaactagtacggccgttatggaagacagtacggagtttccatctagaactatcatatgatccagcaatctcactgctgggtatatatccaaaagaaaagaaatcagtatatcaaagagatatctgcacccatrtttattgcagcactattcataataagcaagtatgaaattaacctaagtatccatcaacagatggatggataaagaaaatgtggtatacgtagacaatggaatattattcaactataaaaagaataaaattctgtcat

SEQ ID NO: 760376 - DNA, 600 bp, Homo sapiens
tagaactatcatatgatccagcaatctcactgctgggtatatatccaaaagaaaagaaatcagtatatcaaagagatatctgcacccatatttattgcagcactattcataataagcaagtatgaaattaacctaagtatccatcaacagatggatggataaagaaaatgtggtatacgtagacaatggaatattattcaactataaaaagaataaaattctgtcatttgcagcacatggataaaactggaagtcatactataaatgaagtaagccaggcacagaaagacaaatattgcaygttttcactcgtaagtgtgagttacctcactcacctggaggtggagagtagaatagcggttaccagaggctgagaagggaaggcgaggaagacaatggaaataaattggttaatgggataaaaattacagttagacagaagaaataacttttagtattcaatagcacagtagagaaattatggttaaaaataatttgttgtatatttcaaaatagctagaacagaagaattgtaacattctcaacacaaagataaaggtttgaggtgatggatatcccaattaccctgatttgaggatt

SEQ ID NO: 760377 - DNA, 643 bp, Homo sapiens
gggatgtgaaggacctcttcaatcagaactgcaaatctgctcaaggaaataaaagaggacacaaacaaatggaaaaaaaattccatgctcatgaataggaggaatcaatatcatgaaaatggccagttgcccaagtaatttatagattcaatgctattcccatcaagctaccattgacttccttcacagaattagaaaaaactactttaaacttcatatggarcaaaaaaagagcccatatagccaagacaatcctaagcaaaaagaacaaagctggaggcatcacactacctaagttcaaactatactacaagtctgcagtaaccaaaacagcatggtactggtaccaaaacacatatatagaccaatgacagaacagagacctcagaaataacactatacatctacagccatctgatctttgacaaacctgacaaaacaagtaatggggaaaggattccttatttaataaatggtgttgggaaaacagtttagctagatgcagaaaactgaaactggaccccttccttacaccttatacaaaaattaactcaagatggatcaaagatttaaacctaacacctaaaaccgtaaaaaccctagaagaaaacctaggcaataccatttaggacataggcatggg

SEQ ID NO: 760378 - DNA, 578 bp, Homo sapiens
acaaaagcaatctcttttaaaaatctggggtaagaataattttgtaagctctagtcataggtatcagcaaccttacttgttcctgagtaagtaactctctgctcttttttttctgagatggagtctcgctctgtcgcccaggctggagtgcagtggcgcgatctccgctcactacaagctccgcctcccgggttcwcgccattctcctgcctcagcctcccgagtagctgggactacaggcgcccgccaccacgcccggctaatttattgtgtttttagtagagacggggtttcaccatgttagacaagatggtctccatctcctgacctcgtgatccgcccgcctcggtctcccaaagtgctgggattacaggcgtgagccaccgcgcctggccaaatctctgctctttttctgaaaaggcagggttaaaagcaactccagtgaagtaagaaactgtgttttctatgaaaggattctggaaaaaccatatcttgaggaggaatttgaataaaagaacaagcaagcagttgactgctatcagctgtcacctctcactgtcctacctctgccttgttgc

SEQ ID NO: 760379 - DNA, 578 bp, Homo sapiens
acaaaagcaatctcttttaaaaatctggggtaagaataattttgtaagctctagtcataggtatcagcaaccttacttgttcctgagtaagtaactctctgctcttttttttctgagatggagtctcgctctgtcgcccaggctggagtgcagtggcgcgatctccgctcactacaagctccgcctcccgggttctcgccattctcctgcctcagcctcccgagtagctgggactacaggcgcccgccaccacgcccggctaatttattgtgtttttagtagagacggggtttcaccatgttagacaagatggtctccatctcctgacctcgtgatccgccsgcctcggtctcccaaagtgctgggattacaggcgtgagccaccgcgcctggccaaatctctgctctttttctgaaaaggcagggttaaaagcaactccagtgaagtaagaaactgtgttttctatgaaaggattctggaaaaaccatatcttgaggaggaatttgaataaaagaacaagcaagcagttgactgctatcagctgtcacctctcactgtcctacctctgccttgttgc

SEQ ID NO: 760380 - DNA, 612 bp, Homo sapiens
tatgttaacttgtaacatggtaataagatgagtgacgctaaagttgggttcatgcattctcattcacaacctggggagataaattgtcattttacatagccattaaaaatgttgctgctttcagtttttttttaatgtattaatctcctttcactgccttaaaaatgtatttaatacatgaaatttgtccataagtggatgaattattgtaaaaaaatgaaaggcatgtggacactgactcaggaccatcaggcctatatttttattattgctcatggttaactcctttcataccttttaggttctacacaataaggagmaatttgatgagacaatcacaatatccaccacatttacttaatgtgccaatacatttgatgatttattaattgcaatatcccagtgttagtatcatattgtaagacaattagaacaagtttctttattcaaaagaaacttcaaatcactcaaataattttacacagcattgctagatatttattttataggtttcctttcattaaatttctaatacctcttccaatttctttacatgtattgtatcagataacattgcttctccaaaaacttataaaataagagcaatcagaa

SEQ ID NO: 760381 - DNA, 618 bp, Homo sapiens
aagactcccaagtagctgggattataggcatgagccaccaagcccagctaaatctattcttgtgtcagctttgacaaactttacttttctaaaaatatatgcattatgtctaaactttcaaattttagtaaaagacgacattgtaatatacaattggcttctgatatctgtaaagtctatagttacaagaggcggtaagcctcttgattttttcctaatattcttcatttgttctatttctctcttttgtttttaacaatttaccagggacttatctgtcttttcaaataactaagctgtgaactcttcaatgttttcttttggttcatttccatktcattaaattcatctcataaattgttattctattttatttggattaaattgatttatttttctaacttcttaagaataatgcttaggcttttaatttgcattattttatcttctttattatatgcatttaaaattataaatttcctgttagttatggctgaactgtttcctagaaatttttatatggacttatttacattatcatttcatggaacttgttttttcatttaagtttgttcttcttcatggaatattaagttacttagaagtgcattcctttat

SEQ ID NO: 760382 - DNA, 635 bp, Homo sapiens
atctctcaggaacatcctggtttatataagtagggattacatcagaaatgctgtgtgtactgttcaccactggagttttgcagctagtcaaaaaaccttatttatgtttgtttacttcatgataagcaatttctacaggggagaaaagaaagtcagagaataggcggtgataagaaagtggattgaaaataggatatatacacttaaaagagtggtcaaggctagatraaattattcaaaccctccagagctttcacagcttttatcattgacagtaacacaacatcagccactggtgatggccttagctaggctccgtgggcgcttgccacacatgatcttgggggacagtgactgcggggggccggacaggaagaagcaggctccagggtgtgctgggtggtaacagctgatgtgccagaaccaaggaccaggcagtgttgttgtcccctcttctgtgttttgctgctgaatctgggtgagtggccatcagtgaccactactgaggatctccatagttcactgtaatctggctaacataatttgcctataatgttgtgggctggtattttagctaaatgtgtacttaaccatgatttcattcaggcttcagtcactctttcattgttaggcca

SEQ ID NO: 760383 - DNA, 600 bp, Homo sapiens
acggggcttgtgatgtgaaggccatggctccctaacagtggccttcttcttgagggaaggaagagcatgagagtgaatcaaagttcagacagcagagaggactgatgtactgtatcatatctcctgttaatataatctcatcttcattgtatggattgttttcatttctgtttcttctcagcattgcttatatagcccatattgactattccaaatatgttaagtactgattaaagttcaactcccacaatcacaacttaaaaaattgtaacacaatttgctcttacttcacaaatttrtacatgtgttatacatgccacatacatacacaaacacatgcccaccccacagcacacttcagttgttttatttcaggtgcagtattggcatatgaagaatagaaaagggaattataatactaatttagagtgtttgcttcagatataaactccagactggttgtcatgccaggggctcacatcctatttgtggctcactatggaaaaaaattgagttgcacaaaattattagggacacagaccaatttttatttgctctgaagatacctcaagctctgtatgataaatgttttccattaga

SEQ ID NO: 760384 - DNA, 595 bp, Homo sapiens
gagtcctattctactgttttgaaggaactaatcaacattattgaagaagaaaacaagccttttcccttataataggggagagacatagggggaagtcaggagaagatggggaaactgcaggcctctgagaacaaaaaccaatctttccaagtcctcactccgcattgtagtagcacaaagtagccttcaagactccctacatttatgtttggaaaaaggactcttgaatgtataaataactttttttcttcccttgcttccctcaagcaatcaagcagatattcagtcatgtgtggtgtgtggacttcggcatgattagatttaatcaacaagccccttccttcttgatgcagttctccaaggcctaaagcaaattagtccacatcaaggaaaaaytggcaaaccgagaggggaagaacctaatatataaaaacaccatgataaaaccaaaagacctcaaatgaagcggcggactctgacaagaccacttcaagtgactccaaaaatataaacaaactaatgaggaagatgccccatatgtcatcatcacaaagaactctacgaataagtcagatcccctataatctaatggaaa

SEQ ID NO: 760385 - DNA, 645 bp, Homo sapiens
aactgttcttaaaagataaatttatttaaaaaaattttaaagaatgggagcaacaagtatagaatctatattcactaaatgtttgtggaaccgatgctaaaacaatgtttgcatccacattcacatatgtagaattcaagtcctgcattaagctccattgattttgcttaagttcttactttgtgaagttgccatgtaactctgaggacactagttaaagtatattgaaaataattytgattcacaggaaaaaaaacagtgtctccatggggttaataagatctcaagagtgaactccctgagaggtttccatttggcacctgtgtggcagatgaatctatctgttagatgggctgaaatttcattggcagacaaatctcaagaacctggatgaacctacctagctcattccaagtttcctcaagctctggacaccatcaacttgactctttcttttttttttttttttttttttttgacagggtctcactctgtcatccaggctggagtgcaatggtgcaaccactgctcactgcagccttgaactcctgggctcaagccatcctcccacctcagcctcctgaatagctaggaccacaggcatgtaccatgcccggctaattttttaaaatttttgtagagaca

SEQ ID NO: 760386 - DNA, 635 bp, Homo sapiens
caacagactgcttcctagtgggcctcctatttgacctctgattgtatcacttctccctatacttgagcgacacatcttcagtgaagcctcataatgtaaagaatagattctgacagcagtggcagaggtggtggctcaggcacatagagtccccatgattcttcagaggctcttcaagttctcctctgtcattcggtcagtagtctcactccctttgcagaagaacgttggtgtcacacagtggcatttaacaagaaacttggtcccatacagaaactcttcgtggacaacattagggactacaaatctaagccacaggcatctggaggacctgctgatactggcccagagcaccagcaagagttggagagtaaacttctgctgaaagcagacaggaatatgttatctaatttcaaatgcraagattctaaatttgaaaccatcgaaaaaccccagtcctgaagaaataaagtaaaaattaatctggtaatttgtcatgaatttgttgcacaactaatcagaagtatcagagtaagtatacatttcataactgtcaaatgttcttttaattctcattccaaatcaattatttggtgatgttgcaggggaaaaggaataaattctgttggctttct

SEQ ID NO: 760387 - DNA, 575 bp, Homo sapiens
cttaagtgaggaatgactgtacttatccttggagtctccaaagtgatagtcttttgtatgctagtgagatgactggtggctggcagcccctaggtagtttcaggatgtgggctggtcaccggaaaggccaaggcagggttacaggattgggattttcagctccacctaccagcatccacggaaggaggaggggctgaaggttaaattgatcactaattactaataatttaaccaatcatgcctgcataatgaagcttccataaaaacccaaaaggacgggccrggcacggtggctcacgcctgtaatcccagcactttgggaggccgagacgggcggatcacgaggttaggagattgagaccatcctggctaacatggtgaaacctgtctctactaaaaatacaaaaaattagcagggcgtggtggcgggtgcctgtagtcccagctactcgggaggctgaggcaggagaatggcgtgaacccgggaggcggagcttgcagtgagccgagattgtgccactgcactccagcctgggtgacagagcaagactctgtctcaaaaaaaaaaaaaaacc

SEQ ID NO: 760388 - DNA, 613 bp, Homo sapiens
atgccattatcctcttgcaaatcctttcctttctcttattctcagtcctgctgtctcatgcacccaacaataatacaacatagtttcagcgtggtgactggtgctataaaaatgcagttaaatagaaacccacagttgtgtccttcaggataaagatggcttctgtcacagagaaagccaaaagcctaacaacataggaaagcaaaactcagaatcaagtattttctgaatcctgattatttttaaaacagtagccatagatgctatatttccaagcacaaaatgaaaaaggaaagtttttaattatggctgagggcaggtcaagaagaaacacatttaagaaagattagacacaaagaatttcccrctggcaagtgttattaaataaaggaatgtattactttgagactttttttttttttttttaatctggctgggcacagaggatcatgcctgtaatcccagcactttgggaagctgaagcagacagatcacttgagcccaagagttcgagtccagcctggacaacatggtgaaaccccgtctctactaaaaatacaaaaattagcagggtgtggtggtgctgtctgtagttacagctactctggaggct

SEQ ID NO: 760389 - DNA, 565 bp, Homo sapiens
cttataaaactaaatgcctttaacagcacccaagtcacctcttccatgctttgctgcttagaaatttcttctgccagataccctaaatcatctctttcaagttcaaagttccacaaatctctagggcagggacaaaatactgcgaatctctttgataaaatataacaagagtcaccctcactccagttcccaacaagtttctcatctccatctgagaccacctcggcctggatttcattgtccatatcactatcagccttttggycaaagccattcaacaagtctctaggagttccaaactttcccacatgttcctgtcttcttctgagccctccaaactcttccagtctctgtctgttacccagttccaaagttgcttccacattttcaggtgtcttttcagcagtgcctcactctactggcaccaatttactgtattagtccattttcacactgctgataaagacatacccaaaactgggaagaaaaagaggtttaatggactccccacatggctggggaggcctcaaaatcatggtggaaggtgaaaggcacatctcacatg

SEQ ID NO: 760390 - DNA, 588 bp, Homo sapiens
catgggctcagcaacatgggcttccactcaccaaggctgacttggctacagccactgttgagtgcccaatttgccagcagcagagaccaacattgagcctcgatatggcaccattcctcagggtgatcagccatctatctggtggcaggttgattatattagacctctcccatcayggaaatggcagaggtttgtcctcactgggatagacgcttaccctggatatgggttttcctatcctgaacacaatgtttctgccaagactaccatccatggactcacagaatgccttatccaccatcatggtattccatacagcattgcctctgaccaaggcactcactttatggctaaagcagtgtggcagtgggctcatgctcatggaattcactggtcttatcacgttccccatcaccctgaaacagccggattgatagaacagtggaatggccttttgaagtcacagttacaatgccaactaggtgacagtactttacagggctggggtaaagttctccacaaggccatgtatgctctgaatcagtgttcaatatatgatactgtttctcccatagccagaattcattg

SEQ ID NO: 760391 - DNA, 588 bp, Homo sapiens
catgggctcagcaacatgggcttccactcaccaaggctgacttggctacagccactgttgagtgcccaatttgccagcagcagagaccaacattgagcctcgatatggcaccattcctcagggtgatcagccatctatctggtggcaggttgattatattagacctctcccatcatggaaatggcagaggtttgtcctcactgggatagacgcttaccctggatatgggttttcctatcctgaacacaatgtttctgccaagactaccatccatggactcayagaatgccttatccaccatcatggtattccatacagcattgcctctgaccaaggcactcactttatggctaaagcagtgtggcagtgggctcatgctcatggaattcactggtcttatcacgttccccatcaccctgaaacagccggattgatagaacagtggaatggccttttgaagtcacagttacaatgccaactaggtgacagtactttacagggctggggtaaagttctccacaaggccatgtatgctctgaatcagtgttcaatatatgatactgtttctcccatagccagaattcattg

SEQ ID NO: 760392 - DNA, 506 bp, Homo sapiens
tgttgttagaaaattcttcactatttattttttgctcatactttgccacaccaagttctttcttaaagtacacatttttctagccaaaaggattgcaaatcaaagaatgccctatttctttactcttaactaaattttcaaacattacatatcttaatcagctgtacgttctccaagtatgctgtaaaaataagagacaacactggaatatctgttttctctgcgaaggacacacaccagatttaaccttctttttctacacaaatcacaaaaaggagagagactgctggaacacttttgttagacatttgacatggtctctcccaataacagaaggacccacagcgactggctttgaagggctrtgttcccaacatgatttcaatagggaacattctctctggactgagcacctggatcatgggcagtgttcccttgggcaggacagcagtcactgagccacctgcatcagaggatgggagatgagagacaggatcctctggcta

SEQ ID NO: 760393 - DNA, 606 bp, Homo sapiens
acacatttacatatgtgtctatcttccatttccagcacctaccctatgagattcatgtgagggttaaatgcgatatggtaattgaagctggagaaatttgggttatcttattctctggacagtggtgaacacagcatgagggaatgcctgtggctacctggacccttcctccagacctcttattttggctctgggcacccacccttgtctgcagtcactgtacccaggctgtcctgaagggagaatagagcaccccttccgtcctctccttccacgtgctttatgagagctggttccgccctgctccaggagtggacatgtgactctggactggccaatcagaactcccacccctgcccggcccctgtgattggttcaggtgagccaatcagattcagggaaataatagaagggtgaggaagtgagggyggccttggccctgcagtggcctttattccccacagtggagggatggaaaccaaagaggtccgcgaagcccagacagcgggccaggcctggggccctgtgctcccggatccaaccaaccacgccccaaggtgtccagcttcagcttctggtgtttattgctgctgtttcttttcagtt

SEQ ID NO: 760394 - DNA, 617 bp, Homo sapiens
ccatcccctgtgtctatggggatcccacttccgccaccccttgtgtctatggatattccacttccgccaccccctgcgtctatggggtatcccagttccgccatctcatgtgtctgtaggatattccagctctgtcatcccctgtgtctgtggggtatcccactcccgccatcccctgcgtctgtgggatattccagttctgtcatcccctatgtccttgagaaccaggattctccgtggggctgaagggaggtgcagatgtcacaaagaaaaggatgaatgaaaactttagtcctgaatttctatgggaagtatcagtgtgaactcaggaattttatcttaaaaaaaaaaaaaaaaagcatttccagattttgctctagaaacatttatctcccgtggaggggaaacctgggcttcctggagtagtggtgctgcaggtrgggcaggaggcgtagaggtagagcctggggcgtaggggatctggagtggaggaccgccccccagcccatcccctcgggacctcagctgagtccttcagtgagaggacagtgatagtgttggccatggattaaatgtggtaatccacggaacacatttagcccagggccaggcgtctg

SEQ ID NO: 760395 - DNA, 578 bp, Homo sapiens
cagaggcaaggtctcgtttggttgctcagtctgatcttgaactcctgggctcaggtggtcctccccgcttggcctcccagagcactgggattataggcttgagccaccatacccagcgagattttaattgtatagaggttgaatgtgcccttctgggccgggcgcggtggctcacgcctgtaatcccagcactttgggaggccgaggcaggcagatcacttgaggtcaggagttcaagaccagcctggccaacatggtgaaactccatctctaccaaaaatacaaaaattagccargcgtggcagccacctgtaatcccagctactcgggaggctgagtcaggagaatctcttgaacccggcaggcggaggttgcagtgagctgagaccgtgccactgcactccagcctgggcaacaagagcaaaactctgtctcaaaggaaaaaaagtgcccttctggcagtttctcccagtggttaatcttacatactatcgcataatatcaaaactgggaaacagatcctggtatggtgtgtgtacattattctatagcagtttattacatctagatttgtgtaa

SEQ ID NO: 760396 - DNA, 618 bp, Homo sapiens
aatattaattgtaattctagtggcatttagtgaagaaagagtgaaagaggaattggaatggttaccttggagatcctggagaaagtagaaaaacgatgacagcaaatatctgtatggtacgcacaagtaaagctcttagractgtgccaggcacagagtgagggctacataagcatctgatattgctattgttatcattgttgtcaatcttaacaagaaccaggatgtatgactctactattaacataccaattttgcagattataaaaccagaggattaggttttactcaggatacatgccaggttgtatcagacacctccaataccatagcttcaataggatataatgttttttcctctatcctaaaatattcaagcaggtagtccactgttggtagggcaactcaccattatctgggacctgaacccttctatctttttactctttcattctcagtgaggcttccactttgcagttccagatgactgctctagctctcagcttcatgtcgacattccaaaggaatatgggcaatactttcttttcattgaaggaaaaagctcaggaattgcacacaatttctgttgatttcacattgaccacaatttaatcacat

SEQ ID NO: 760397 - DNA, 383 bp, Homo sapiens
atgtgttctttgcttgagttagtcttattcccatctctatctgtagatcccctgcccctccagaacaaacataacttttttggaagtatttagctgctaacatctaactgattgacattctcctttgaatttttggatgaagttcagtatatcctctagcttcagaattgtctggtatcttgaattttyattatttgtctctatttatttaatgtgaagggaaaaggtgccatagaaagactcagaacttgtgaatttgtttgagttctgtgtagattctggatattagccctttgtcagataagtagattgcaaaaattgtctcccattctgtacgttgcctgttcactctgatggtagtttcttttgctgtgcagaagctc

SEQ ID NO: 760398 - DNA, 622 bp, Homo sapiens
agtgagaggagatatatgaaagaacttagcaatagtgctggcatgcaataggcactgaaaataaagcacttggaaaacaatacaacactgcccaactattattgttaagtcatatatgagactggaggggcaaacaaacttcttcattagagtaagatatttccaagtgggttctgaagtttcataggatgatatgggagaaaagccatcttatggctaaatgattttagatgttaaattaaaaataatacaaaagtgtttcttaatcataggatttctcagagtcttttagaagatcrtggagtgtgccttgtgttcaaattctttacattaaacagaaaagcagtttctcattctgggctggaatgcatgaggggaactaaagcaccataatgaactgggagcagaggggaaagatgtgtatcaattatgtgtgaatggaaataaggcagattcaagttgggatgggagaacaggctttctctttctccctcccatctcaaagaagggaatgattgtgcagtggtcataaagttacctgactacagaactcttatctaatgctgtatctcagagagctaatgttcctcttcacacagtttgacaactactgatctggaaa

SEQ ID NO: 760399 - DNA, 590 bp, Homo sapiens
atgatacacaaatgcagcaactgatgaaagctgaggatgaattcaggaacaccagaaacaagcctctgatactccaggccccatactaaacacacactggaggatttgaaagctctggtgtattgagactaatggtaccaacaaaacagctcaattcctggctagaatcattcaacctctgacattacagcctcacaggagaggcatgcccattgtaagtcataagtacaatttacctacaagtctacctttcatacatacacaatgtccaatattcagtaaaaaattgcagaacccaccaaaatgcaagaaacaaatctcattgtcatgagataaacagtctaycttaccaaaatcagaaatcagcaatgattcatatgctggaaataccagacagtgacttcaaaataatatgttaaaaaatctatgggggaattttgaagaaagaggaagcttgtagaaagagtcaagtggaatttgctagaaataataaacgcaataccaagagaaacagatcctcactgtgttcatcagcagactggacacagccgaggaaacaatcagcacacctaaggataggttgatagttt

SEQ ID NO: 760400 - DNA, 634 bp, Homo sapiens
ttgatagttttctaatctgaaacaacaaagagaaaaatgatctacaataaaggaacaaaaaaacctaaacaaacgaaaggagaataaagcatcacagaactgtgagatactatcaatggttttatgcacatgcaattgaaatgacagaaggagaagagagagaaaatggcacagaaaaaataaatatttaaaatttagtggctgagaatttccaaaattaatggaagacaagccaaagtttcaagaatctctgagagccccaagcagattgcatgaatttaaacaataagaatccactgaataaactatggataaaaaataaatcacaaggaaaaatacaaacattttaaactgaatatttatgactgagygaaagcagggcttaaaaggaaaaattatagcagtatacacttacattaccaaagaaaaaaatatttaaatcagtaacgtatgcttctactttcaaaaagtagaaaaaaaaaagacttctggttccaaaatgctggtgtagaatctagctggcttcactgcctccccactcttcaaaatacagcactaaggttatagtcaggaacatcccagaacttaagtctgaggaaaagacaattcctgggaccataaaaaactgaaaaaa

SEQ ID NO: 760401 - DNA, 634 bp, Homo sapiens
ttgatagttttctaatctgaaacaacaaagagaaaaatgatctacaataaaggaacaaaaaaacctaaacaaacgaaaggagaataaagcatcacagaactgtgagatactatcaatggttttatgcacatgcaattgaaatgacagaaggagaagagagagaaaatggcacagaaaaaataaatatttaaaatttagtggctgagaatttccaaaattaatggaagacaagccaaagtttcaagaatctctgagagccccaagcagattgcatgaatttaaacaataagaatccactgaataaactatggataaaaaataaatcacaaggaaaaatacaaacattttaaactgaatatttatgactgagcgaaagcagggcttaaaaggaaaaattatagcagtatacrcttacattaccaaagaaaaaaatatttaaatcagtaacgtatgcttctactttcaaaaagtagaaaaaaaaaagacttctggttccaaaatgctggtgtagaatctagctggcttcactgcctccccactcttcaaaatacagcactaaggttatagtcaggaacatcccagaacttaagtctgaggaaaagacaattcctgggaccataaaaaactgaaaaaa

SEQ ID NO: 760402 - DNA, 634 bp, Homo sapiens
ttgatagttttctaatctgaaacaacaaagagaaaaatgatctacaataaaggaacaaaaaaacctaaacaaacgaaaggagaataaagcatcacagaactgtgagatactatcaatggttttatgcacatgcaattgaaatgacagaaggagaagagagagaaaatggcacagaaaaaataaatatttaaaatttagtggctgagaatttccaaaattaatggaagacaagccaaagtttcaagaatctctgagagccccaagcagattgcatgaatttaaacaataagaatccactgaataaactatggataaaaaataaatcacaaggaaaaatacaaacattttaaactgaatatttatgactgagcgaaagcagggcttaaaaggaaaaattatagcagtatacacttacattaccaaagaaaaaaatatttaaatcagtaacrtatgcttctactttcaaaaagtagaaaaaaaaaagacttctggttccaaaatgctggtgtagaatctagctggcttcactgcctccccactcttcaaaatacagcactaaggttatagtcaggaacatcccagaacttaagtctgaggaaaagacaattcctgggaccataaaaaactgaaaaaa

SEQ ID NO: 760403 - DNA, 603 bp, Homo sapiens
cggaggttgcagtgagccaggattgtaccactgcactccagcctgggcaacagagagagactccatcaaaaaaaaaaaaaaaaagaaagaaagaaagaaaagaaaagaaaagaaaagaaaagaaaagaaaagaaagaaagcaagcaagaaaagaaaaagaatataaaatatctaggaatcaatttaacctaagaaacaaaagwtctatacaaagaaaactataaaacacaatgagagaaattgaagaggacacaaaaatggaaagttattacatattcatggattagaagaacaaatatttaataattaaaatgacaatatgaccaaatgcactttaaagattcaatcctggtcctttcaaattaccaatgacattcttcacaggaacaaacatactaaaaatcctaaaatttatatggaattactaaagagcccaaatagccaaagcaatcctgattaaaaaaaacaacaaagctggaggaatcacactacctgatttcagaatatactacaaagctaaaataaccaaatcagcatggtactgccataaatgcagacacctagataaatagaacagaatgcagaacccagatataagtcaat

SEQ ID NO: 760404 - DNA, 603 bp, Homo sapiens
cggaggttgcagtgagccaggattgtaccactgcactccagcctgggcaacagagagagactccatcaaaaaaaaaaaaaaaaagaaagaaagaaagaaaagaaaagaaaagaaaagaaaagaaaagaaaagaaagaaagcaagcaagaaaagaaaaagaatataaaatatctaggaatcaatttaacctaagaaacaaaagttctatacaaagaaaactataaaacacaatgagagaaattgaagaggacacaaaaatggaaagttattacatattcatggattagaagaacaaatatttaataattaaaatgacaatatgaccaaatgcactttaaagattcaatcctggtcctttcaaattaccaatgacattcttcacaggaacaaacatactaaaaatcctaaaatttatatggaattactaaagagcccaaatagccaaagcaatcctgatwaaaaaaaacaacaaagctggaggaatcacactacctgatttcagaatatactacaaagctaaaataaccaaatcagcatggtactgccataaatgcagacacctagataaatagaacagaatgcagaacccagatataagtcaat

SEQ ID NO: 760405 - DNA, 601 bp, Homo sapiens
aaagacagatgctgtatgttctcactcatatttgggagcttaaaaagtggatcccattaagatagagagtagactggtgatcatcagaggtggggaaaagtagggggaagacagttatgaagagagattgcaatcagtacaaatatacaaatttgatagaagaaataagacttcgtgtttgatatagcagtagggcaactataatttacaaggatctattgtatattttaaaatagccagaaggaaataaataaaatacttctagcataaagaaaagataaatatttaaggtaatgaatttcayagttacattgattttatctttccattttatatgaacatgttaaattatcacatgtaccctgaaaatatgtacatctattatgtatcaattaaaaaacttagaaagtaggaaaaaaatagagcaaacgaaacctaaagtgggccaatgggaagaattaatcaagataaaaattcaatgaaatagtcaactaaaaaacaatagagaaaacaaatgagaccaaaacttctttgaaaatatcaataaaatagataaatctctggttaaactggaagagagaagaaacaaaacagtaatatc

SEQ ID NO: 760406 - DNA, 510 bp, Homo sapiens
cgcccgctggccttctcccagcattgccgcaccacgctgaagcggcccctgctcaaggggacagcggtcaggctggtgggtggtcccctcccattccccgattcccaacactcagagcagcaggagcccagttcagcgagatggtgggtgtgggggcatgggtggtcaacaagggggggtccaggccctggccccacccrcctgcagccccccaggccactgcacctctggatctgtgtctggaatgcgaaggtctttgtgctgggcaggggttgggctgaccgcccctggctctcctcctcagaggctgtgggaggaggggcagatgataagagggggtgaagagggcatccccacagccccagctctccccacgtctcccatcaccccttcccaggcaccttgacagctgggactttgagttacgcactcccacctcttgttcctcaggttctgggggtatggggacagggagggggtacagcaagcagtgagaggcaacctgagtga

SEQ ID NO: 760407 - DNA, 581 bp, Homo sapiens
gatgtaatagaatagatagacatgatagatatacagagatacagaagatagagatgtagagatagatatacaaagatagatagttagatagatgcatacatttaaggcaactgcataatttagagtatgttctctgcccataacataattaaattgaaaaccagtaaccagttaaatatatctgaaaaatctccaagtgtttgacataaacaatacacttccaagtaatccatgagtcagagaagaaatgacaaaggagaccaaatgagaatgaaaaaaaactatgtcaaaatttgtgcgatataaaaatgaatcaaacaggaawtcagctgaggaatacaataagtggactgaaaagttcactagaggaattcaagagtagacttgatcaaatagaaaaatcagcaaactcaaagacaggtcatttaaaattatccagttagaggagcaaaaaaataataataaaaaggaataaagaaagcctaagggaatcctagaacagagagagaaaggggcagaatgcttatttaaagaaataatgccctaaaaaccaaaaaagaaataatgccttaaaactcccc

SEQ ID NO: 760408 - DNA, 640 bp, Homo sapiens
gaaaataatgttttaagagatttccagtaccatccaaaatcttgtagttaccaactgcaagcctaacaaaagacctttagatggtttgtggggggaaattattaaacattgttgagagacagtaaaaaatatctcaataaatggttagaaagctgtaggagacctgaaagtgtaaatcccagtcaaccatagttctgttgggtaagagaatgctgacaagcgcatagcaaaggccaagctgcccttgaggaatgcagtgtgggggcctttgctgtaccagacagcagggtgtcctctaaagcagcagtgctccagatacctggacccaaaggcaggaagagatgaacagatcaaaatatttgaatactgagctcaaaacagctttgatggmatcagattcctcctccctttctttattttttaccctggtgctaggaggtggtgtagaggaagggtgatcttttcacaaatggtgctaagacgattaacagtttacaaaaataaaataaaattgggtgtctacctccccatacaagaaatcaactcaatgtatgggtagtatagctcttaccagataatatagataatatagattatctggtgacctgtgggtaatagaagatgttttgaacagaacatg

SEQ ID NO: 760409 - DNA, 283 bp, Homo sapiens
cagccgggcgattcttcccctcatttgttgcattgtttgcattaatatgaatatcttgttctgtttgttttgtctcctgagagccaataaagctgtgttttttctttacaccaaaaaaaaaaaaaaaaaaaaaaawaggaataagtagcttatggcacagtgacacactggtagaattaagttatggtggtagcagtcgctgactggggaagccatatttacatcatcctgtttccttgatgagtcctgtgcctgccccctctccagctgattcataggaagt

SEQ ID NO: 760410 - DNA, 615 bp, Homo sapiens
tccatttaaattaacattagttacagtatttaacttggacagttgaaaacttgaatgtactggtaatacctcaatactctttgaaaatagatgaaaaatacagagaatagtaattttcacactttatgattattctttacatagtataaaggagtctccaacccctgggctgcaaaccagtacctggctgcacagcaggaggtgagtggcaggtgagcgagcatcactgctggagctcttcctcctgtcagatcagcrgcagcgatagattctcatagaagcgtgaaccctattgtaaactgtgcatgtgagggatctaggttgcatgctccttaagagaatctaactaatgcctgataatctgaggtggaatagtttcattctgaaactatcccctctgccacctatccatgaaaaattgtcttccatgaaaactggtccctggtgtcaaaaaggttggggaccgttggtattgagcatggtttaagacacgtatttaacatgtctaccccataactgtataatgctatacaagcaactgagggtagagtagaagaaacatacatcaataaaatgtccgtcaaaataaattgctagttaaaaaaattacagtac

SEQ ID NO: 760411 - DNA, 615 bp, Homo sapiens
tccatttaaattaacattagttacagtatttaacttggacagttgaaaacttgaatgtactggtaatacctcaatactctttgaaaatagatgaaaaatacagagaatagtaattttcacactttatgattattctttacatagtataaaggagtctccaacccctgggctgcaaaccagtacctggctgcacagcaggaggtgagtggcaggtgagcgagcatcactgctggagctcttcctcctgtcagatcagcagcagcgatagattctcatagaagcgtgaaccctaytgtaaactgtgcatgtgagggatctaggttgcatgctccttaagagaatctaactaatgcctgataatctgaggtggaatagtttcattctgaaactatcccctctgccacctatccatgaaaaattgtcttccatgaaaactggtccctggtgtcaaaaaggttggggaccgttggtattgagcatggtttaagacacgtatttaacatgtctaccccataactgtataatgctatacaagcaactgagggtagagtagaagaaacatacatcaataaaatgtccgtcaaaataaattgctagttaaaaaaattacagtac

SEQ ID NO: 760412 - DNA, 590 bp, Homo sapiens
gcaaagtaatgagaatgattcttatcgcagattgaaaacctgggattaggataaaagtgacctagagaaggactgtacagcctcctaaagtaagaattgaccaaagaagagctggtcaccttagcaagtatgagctcctcatccgggcctgaatatcattaacggacaatattgtagaaggaatctgactacattaaattgaaaaatttccgagattcaatagaaaagatgccttaagsggtcaggggtggtggctcacacctgtaatcccagcactttgggaggccgaggcagttggatcacgaagtcaggagttcaaaaccagcctggtcaagatgtgaaaccccatctctactaaaaatatagaagtagccaggcatgatggtgggcacctgtaatctcaactactcaggaggctgaggcaggagaatcactggaaaccgggaggcagaggttgcagtgaaccaagatcatgccgctgcactccagcctgggtgacagagcgagactcttgtctccaaaaaaaaaaaaaatccttaagaatatgcatctatggatgagattattcagaacatagtggcctgaaaaga

SEQ ID NO: 760413 - DNA, 622 bp, Homo sapiens
agctcagtgcagcctcaaactcctaggatcaagtgatcctcctgccttagcctcctgagtagctgggactataggaacacaccaccacacccagctcataagtttgttttcatattgaaaatttcatcaaacctatatcccctgtcagctatggcaaaacatacttacagctcgctgctctgcataagctcgatgagatccataaaaagcacatcccggttcctttcacaaaagccatccatgtcataggatacctggccaagaatggaaagaaatcgaatttcattgaacaaaatgtaattaattgaacaaaatcatttattgaacaaaaaatctaatttcaccaaacaaaaaaccaaagctgtcatggctaccctcaccacaacatgtggatttccagatgttgcatttgggatttcattgtgcmctgtcacaggaaggctgtgcacgtcttacttgttagctgacttagtggggaaggcctgcagatgctgatgagtatctggctgcctggatggcccagctgatccgtaatcagaactccagctctcaagtccccataccccttcttcagtggatccataggggtgtctaagtgacatactcaatacttttcctaaat

SEQ ID NO: 760414 - DNA, 517 bp, Homo sapiens
caacattattttgacacttgactctattccagagttgttgctatacaaggcatgtggcagaacaaaaaaaaagctggtgttgatataagagctttttacccagtattgacagtgagcaactttctttctttttttttttttttcctttttttttttttgagatgggttcgctctgttgcccaggctggtgtgcagtggtgcgatmtcagctcactgcaacctccacctcccgggttgaagcgattgtcttgcctcagccttccaagtagctggaattacaggtgcccgccgccacacctggctaatttttgtatttttagtagagacggggcttcaccatgttggccaggctagtctcgaactcttgacctcaagtgatccacctgccttggcctccctaagtgctgggattacaggcatgagccaccacacctgtccgacagtgtagcaactttctaaaactgaaaaatctcaaaggagatcattggaactgacttgttcatttattttttgtttt

SEQ ID NO: 760415 - DNA, 609 bp, Homo sapiens
gtgagcatttagtgctatagctgcttaacactgctttagctgtgtcccagagattctgatatgtggtctctttgttctcattggtttcaaagaacttcttgatttttgccttaatttcattatttactcaggagtcattcaggagcagattgttcagtttccatgaaattttgtggttttgagtgagtttcctaatcctgagttctaatttgactgcagtgtggtctgcaagactgtttgttatgatttcagttcttttgcatttgctgaggagtgttttactttcaattacatggtcaattttagaataagtgccatgtggcaatgagaagaatgtatattctgttgatttggggtagagagttcttyagatgtctagtagtgtgtccagagttggttccttctggtgggtttatggtctcgttgacttcaagaatggagccacggaccttcgtggtgagtgttacagctcttaaagatggaatggacccaaaatgtgagcagcagcgagatttattgtgaagagcaaaagaacaaagcttccacagtgtggaagtgagcaggttgccactgctggctggggtggccagcttttattaccctatttgt

SEQ ID NO: 760416 - DNA, 596 bp, Homo sapiens
tctctagtagttgcttgatctactggacagctctttttatgttgggagctggttagctaaaaccattttattcataatagccaatgcacagggccttggatctgaagtacatttgtagagaaagaatatttaaacatatcacagggaagaaaatatggttaatgagataccatagattttactggaaaaataaagwcttcgacaaaatattttcattgtttcttattggtgacttggtttatagcaagaaacatatggcttcaaatcccccacatgctgctaactagttagatctaaacggattgttttatctcctgaatctgttagccctggaaaactggataatgacatctaacttctggggttgctgtggaattaatgtcaccctatttatcatataggagacattcataaatgatgcctattattgttttagtagcaatgatataatcgctctaaaataatcatttctttcaagaagcagtgcagggcttggagttgccaagtttatttaattcagataacaactactaagtccaacttctcaagtcaatttcccaacatgccaatcatttttgcttgatttactgaccaac

SEQ ID NO: 760417 - DNA, 603 bp, Homo sapiens
tatggtaatgtttcacctgagcaatcgtacttgcattacctttgctaaactagacatcaatctagctcaaaaacagataaatggaaagtttgaaattgtgtacgttctcctgtgtttcattattgaagaatgagaggccatccgtggaaaacaataataggaaaggggtcactagataagaaaacaaaaacctttctataggaaaacatccatttaagtcaccaatacttaagaaacacacaatttgtaggtatttacaatttaaaagccccaatttcctcccaacatcccttaaaactaagttacatctatcaccaaacagtctcacttagactattttccagtattaaatattacattagactattttccagtattaawtattacacaaatacatgtgctttaacatactcttaagagaacaaaaacaaagaagtatctgagaggtcaaaaaaacattaacaaatgacttttcaaaactagaggtagctcttttaagaagtaatgttggcagcttatgctactagaagatttcaaacaaaaataaccatatcgtatttctcatgcaattttacccaggaagacatttaattttatgagatt

SEQ ID NO: 760418 - DNA, 502 bp, Homo sapiens
cctgtttacctttcttactacttaaaaaaaaaaaaacactaagtcacaaatccttaatactgacataagcttgttaaacaggactttggaggatcattaaataggaaatcattaaaaatattgaccttttgtaatcccagttttctaataagaccctttgaaataagcaccacccctctattccctttgattaacacagtagagaggacttagccacttcagtagttctctttctgtttgacaaaaatgcaatatgaaaatgcagtgacctcttgcagcttcatgcttatgrtttaaaatggatgctaaaaattggaattggactgtgggtttgaaagtttggtaaaatagccaaactttatatttcctaggttattggaacaaacacacagaggaaaaagtactttttaaaaggttctaattcgagaaatttttgaagaggaaggttatgggatccaaaactacttatttgaagaagaatcattatacaaacttagataac

SEQ ID NO: 760419 - DNA, 614 bp, Homo sapiens
tcacactaatgcaagatcttaataataggggaaactgtgtgtgtgttggaggtggggggtaaggggcatatgggaactctgtactttccactcatctttccataaacctaaaacagctctaaaaattaaattatatttgtattagtccattttcatgttgctgataaaaacataactgagattgggaagaaaaagaggttgaattggacttacagtttcacatggctggagaggctttaaaatcatggtgggaggcgaaggaaacttctaacatggtggcagcaagagaaaatgaggaagaagcaaaagcagaaacccctgataaacccatcaggtctcatgagacttatttactatcacgagaatagcatgggaaagaccggcccccatgattcagttacctccccatgagtccctcccacaacatgggsgaattctgggagatacaattcaagttgagattttggtggggacacagccaaaccatatcactattaatgaacaaataaagacttacaggttggtgaaaataagttacaaataatttacctcgttggacctaagttagccatatgttttcaagctcttgccagtattgagaattgtcagttgtt

SEQ ID NO: 760420 - DNA, 614 bp, Homo sapiens
tcacactaatgcaagatcttaataataggggaaactgtgtgtgtgttggaggtggggggtaaggggcatatgggaactctgtactttccactcatctttccataaacctaaaacagctctaaaaattaaattatatttgtattagtccattttcatgttgctgataaaaacataactgagattgggaagaaaaagaggttgaattggacttacagtttcacatggctggagaggctttaaaatcatggtgggaggcgaaggaaacttctaacatggtggcagcaagagaaaatgaggaagaagcaaaagcagaaacccctgataaacccatcaggtctcatgagacttatttactatcacgagaatagcatgggaaagaccggcccccatgattcagttacctccccatgagtccctcccacaacatgggcgawttctgggagatacaattcaagttgagattttggtggggacacagccaaaccatatcactattaatgaacaaataaagacttacaggttggtgaaaataagttacaaataatttacctcgttggacctaagttagccatatgttttcaagctcttgccagtattgagaattgtcagttgtt

SEQ ID NO: 760421 - DNA, 610 bp, Homo sapiens
tttaggaaaaacaagccatatacttcttctgttttctagggtaactaaggaataaggtaaaattcaataggatattcaacagtccttaaagactggaaattactggtttcaggtagagcttcccatatatttacggcaggacacacaggtgtgccttgaatgggttgtagatctactgagctattggttcccccagtccttgtgcttgggtggggtctgggacagccagagcactgggtccagtcacttttcctctcattttatccctgtgtgccatatctgactgtgccattggttagataggttatggtaccagggaaaaataaatgtcttaatgtgttcttcatgtattttgatgtgccataggtatgtatagaagctaagcatttcacagtatattcaaaatttttgcagaaggcattttttctgtggtgctagtacagtaaaatatagttcctttgagyggttatggtaaattgtgaggatatctttaaaattgtaaaagttaattttgtagacttgagccaataagtgtctgacattgggaaaatctttgcatttcttattactgagttcagtaattagatcaaagagtgggtgcttatagccc

SEQ ID NO: 760422 - DNA, 623 bp, Homo sapiens
aggagactacatcatgatcatcctcttcttgctttatggttggaagtggagcttcaagaatatagccattttcacagataattagtaaagtactttcaggctaaaaaagaaaaattgaacatatttacatttaggcaaatttttaaaagcatagtttaaagagattataaataaaaatataattactatgtatattagccatgtttaaaacacacttaattcctcactgcagttattggtaaaaagtcaagtttattaataattattatattgtcatagtactaattattgttatatcattattaagtgattaaarattaataattattaaaattagatttacatttggttcctttatagatgctataacatatgtgattcatatatgttttctgattttctgatgaatatatgtggttgtgaaatctgttagccgaaaggaccagatattaaaattaggactgccaaggaaactctgcgtgtgtggatggcgtagtcagtcccatcctactttaatggctcatcctctatctgtctcagtttaacaaacgtggatgttcccaaggtttttgtcctcttccctcttctctgcctccataagcattttctgggaaatcttacaa

SEQ ID NO: 760423 - DNA, 476 bp, Homo sapiens
ttcttttccttagcaactttccctcagacattcttttggttatgactgtagaaagcgagccaacctacaacttctggacgacagtatcgccatatacatagctgggaaccaactgatctttctgaatttgaaaaccaaggaacagatctacctgcgaagtagcagtggtgaaggaattggcgtcattggggtatgccttcaataaattagaaaaaaaccccaaaaaaccctatctttttgcttgttctgtggaccagccaacatggttgttagatgccaacaccatgcacmgtattgtgggttcacatgagatgcacagctgtctttattccaaggcattttcaattcagttattacagacactcattcactgtcactacctctgtgcactattataatattattatgtctttttgcagataaggaaatgggcttatagaggttaggtgacttccccatagtcgtgcaagtttttc

SEQ ID NO: 760424 - DNA, 613 bp, Homo sapiens
ggagtttcacgttacatatatgcagtacaggctttgaccaaagacttgggagcccctgtgtgcagctctgtcctcttcagtaccctactccacaagttccaattgggtcagcagtcgtgcattctattctttgccttcccagagagacccttcttggactctactttcctcataaaagttgggaaataggccccaagtacaaagttggcaagagtatgrgaggctaaatttcatgtgttactcttctctcatgggtcattgtgatattgtgaaacatatatttggtctttgaccctgtttcctggcatacaaccaaaatctttagactgttttgtatgctaatgattgactaatgacaagcagcccctatgtagctttgaggagtgtaagcgcaagtgcaagggtggggctggtaatcagaaaaaaacaagtcatggttacagggttgatattttcaggcccactccacaacctccagagatggggaagggactgaaggttaagctgatcaccaatggccaatgatttaatcaatcatgcctacataatgaggcttccattgaaacccaaaggagtgggttcagagagcttctggatagctgacacgtggagg

SEQ ID NO: 760425 - DNA, 617 bp, Homo sapiens
gcgtgagccaccgcgcccggcctgatctactttaagtaaagttttatatatggtgtgaggttgggtttcacctttatttatttatttattttcgcatgtggatatctagttgtctcaccacatttgtttagaagataattctttcccccatgaatggtcttggtagcttgtcatagatgtatggttttatttctgaactataaattttattccattgaccaatttgtccattcttatacaagtaaaatattgtttattaatgtagctttgtagtaagccttgaaattggaaagtgtgagacttctaatggtctwttgtgaaaagctgttttgatttctctgtatcccttgcatttccatatacattgtaggatcagcttgccaatttctgaaaaaaaaaaaagaggttgcaggagggaagctaagattttggtagaggttgcactaaatttgtgaattaatttggagaatttttccatcttaaaaatgttatgcctggatctgtgaacacagaatatctttataattaattaggtctttaatttctttcaatgttgttttgtaattttcagtgaacaagtcttatgcttctttggttcaatttactcctaaatatgt

SEQ ID NO: 760426 - DNA, 502 bp, Homo sapiens
aattcctacatatataaccagaagaactgaaaataaagactcaaatacttgtactacaattaaacattattcacaatagccaaaaggtggaaacaatctagtgtctatgaatagataactgcataaacacaatgtgatatatacttagaatattcagccataaaaaggaatgaactgccaaaacacgttacatgagtgaacctcgaacacagtatgctaagtaaaacaagccagacatgaaaggagaagtaggttgattccacctttatgaaatatctaaaccaggcaaattcatagagacaggttacattgctagaagttggggaaggsaaagaatggggaattactgcttaatgggtacagagtttatattttgggtgactgaaaagttttggaaatactaatagtaatgaccaacactgtgaataaaataaatatcactggatcgtacacttaaaatagtaaaacttcataatttgttatgcagattgcataataaaaa

SEQ ID NO: 760427 - DNA, 620 bp, Homo sapiens
acaaatcattgtcacactcttccaaaaaatttaagaagaaataatacttccaaacttatgaggccaggattactctgataccaaagccagataaagacattacaagaacagaaagctacaagccaatatccctaacaaacattgacacaaaaatcctcagcaaaatactaacaaaccaagatcaacaacacgttaaaatgatcattcactatgatcaagtgtgatttatcctagggatacaaggatrttttacatacacaaatgaataaatgtgatccaccgaattaatcgaacgaagaacaaaactatacaataatttcaacagatgcagaaaaaacatgataaaatgtatatgataaaaactttcatgataaaaactctcaacatattaagtatggaatgaatgtacctcggcacaataaagcccctatatgaaaaacccatagctaacattatattcaaaggtaaaaagttgaaacctttccttctaggatcagaaacaaaataagtatgcccactctcaccattactacgcaacattgtactcgaagtcctagccaaaacaatcagaaaaaaagaaagaaagaaaaggtatccagaacaattagaaaaaaagaaag

SEQ ID NO: 760428 - DNA, 620 bp, Homo sapiens
acaaatcattgtcacactcttccaaaaaatttaagaagaaataatacttccaaacttatgaggccaggattactctgataccaaagccagataaagacattacaagaacagaaagctacaagccaatatccctaacaaacattgacacaaaaatcctcagcaaaatactaacaaaccaagatcaacaacacgttaaaatgatcattcactatgatcaagtgtgatttatcctagggatacaaggatgttttacatacacaaatgaataaatgtgatccaccgaattaatcgaacgaagaacaaaactatacaataatttcaacagatgcagaaaaaacatgataaaatgtatatgataaaaactttcatgataaaaactctcaacatattaagtatggaatgaatgtacctcrgcacaataaagcccctatatgaaaaacccatagctaacattatattcaaaggtaaaaagttgaaacctttccttctaggatcagaaacaaaataagtatgcccactctcaccattactacgcaacattgtactcgaagtcctagccaaaacaatcagaaaaaaagaaagaaagaaaaggtatccagaacaattagaaaaaaagaaag

SEQ ID NO: 760429 - DNA, 627 bp, Homo sapiens
tctataaggaacttatacaaatttacaagaaaaaaagcaaacaaccacattaaaaagtaggcaaaggagatgagcagacacttttcaaaagaagacataccagcagccaacaatcatgtgacaaaaaggtcaatgtcactgataattacagaaatgccaatcaaaaccgcaatgagataccatctcacaccagtcagaatggctgttactaaaaagtcagaacaataacagatgctggagaggttgtgaaagaagggaagacttatgtggtgctggtgggaatataaactagttcagccattgtagaaagcagtttggcaatttctcaaagaacttaaaacattaccattcgaccctgcaatcscattactggatatatgcccaagggaatgtaaatcattctatcataaagacatgtgcatgtgtctgttcaatgcagcacactactcacaatagcaaagacatggaatcaacctatatgcccatcaatgggaaacaggataaagaaaatgtagtacgtatacaccatggaatactatgcagccgtgaaaaatgagatcatgtcctttgcaggaaaatggatagagctggaggccattatccttagcaaactaattctggaacaga

SEQ ID NO: 760430 - DNA, 592 bp, Homo sapiens
catttgcttctctattataaatcaagacagtgaccaagtacagcataacaggtgtgaaagcagggtagcatagaaatgatgtaaaatgaaataaattgttcataagaagtgctgaaactaagctgggcacaggggctcatgccagtaattccagtgctttgggaggctgaggcaggaagacagcttgagcacaggagtttgaaaccagcctgggcaacatagtgagacctcgtctctacaaaaaaaaaaatgtttaaatattagccaagtgtgggcgcgtgtgcctgtagtcccagcyactcaagaggcagagaggatcacttaagcctgggaggcggagattgcagtaagatcacaccactgcactccaccctgggtgatggagcaaaacactgtcaaaaaataatttaaaaaaagggctgaaaataataacacaaaaggaaataatagctgatggtaaattcaagtcttctcacaaaccaaacactattagtaattttagtcattttcagccttaaaaacactatgacttaaaaatatatacagaatcaaactgattagttttttttaaccaacagatcagaggaaaggg

SEQ ID NO: 760431 - DNA, 619 bp, Homo sapiens
gggttggggtcctgtaatctacagcacaagaagtaggaagcagacaccattatctgcatcatcatgaaattttgctaggaaagtaattccgtttggcaaggatggttgtttaaaagtagctcctggtggcataataytaacagaaaagaggggagttaggtgtgaaagctgtgttctttctccgtagcaattacagcagaaaaggaagacactttcctccgattgcctgtgttgtcctttgagcactcaggtcaacttggatagggaacggggccggtaaagtggggacacttgggagactttgggtccatttacagctacaacagcacttttcaaaaatggtgattttaatttaaaaaatggtatgctataacgcaacaaatgtctaaataacttaactgtaattagacgggcaaagggcaatctgagaaagtcctagtttccatttgagcacagttttcctcaacaattctttcatgtagcacaagagaaagctttctcgagctgaggccagcactctgaagatggcgaacgtgtaatttgaagtgcaccctatacttacacaccacagaattgtagtgctatcgagaatgctggatccacgtgacctagccctatt

SEQ ID NO: 760432 - DNA, 589 bp, Homo sapiens
agggctggctggggaaggtaggcccagctctagctgcggaactggagcaggctgtggaggcacagaagtggcagggaaacactcaagtttgtcgttgtgcaggtgcctctgcaatgcattccctggcttgagcaatggaagatcaaaccggcatggttccctactgtgcccacagcyggggggttgtttttgtcagtccttggagaagagtatttgatgcattcagggagggcaatgtcaggctcgctgacatcctctccagctcccaggacaggctgtggaaagaggaaggggctgaggtcggtgagttgttctcagggttgctcaatgaagatttgcccccaggaggaagccagggtgatgaatgcaggaggaatctgttccaacaacccccttcccccaaaaaaaacaaccagactcaagatgctgataagaattcttttatgttattccaataaaaaatacattcatacagaaatataacaatcttgcaaaaaacaatttcaaataaaatcttgtaaaacaaaattttacaaaaatcttacaaagattctttagataacagggtgcttccaaaaaaaaaaaaaaa

SEQ ID NO: 760433 - DNA, 625 bp, Homo sapiens
caagtatgtttttaatacctgatatttatttcacaaaaaagctgaaattgctttgtgtgtccaggcttgaatgtttaaggcatacttgattaatacatgtgtgctgagcgcttcctggggctcctagacactgccaaaggtagctcagtggggaaattcaaggcaattttccccttaacttttgctacttctgaccattttccacttatgttattatgcttctgtatccatctgtctgcctatgtctagctatccatcatctatcaatcaatcactstatcttgcaatggaggaattaactgtgatgttttcaagcgtgtcgcttctctcatattcctattaacatattggaaacgctcagctaaatagaataaagtttttagcctaaacctacagtgaatgtctaatgctttgggcaagatattgaaggggtgggggagagataatatgaatgctttcatagacacagctggacttctttccccctaaacatgagtgagaattctttctatgcttctagttgagattgtagataaatagagaaatcacatttgaacataggaaatggcttctgataaagaaggcacattcctgtctctctcacacacacatgcacgcatgcacg

SEQ ID NO: 760434 - DNA, 566 bp, Homo sapiens
ttattaatttataatattaggaaaaagcacaaaactaatacaaataagaaacttacaaaattattaataattttaaaatcccagaaaacgaatagaaatagaagttgaaatttgtgacttgctacattctaggcactgcgctgtgggttttgttaaagctaactttagttaagctttgcattagtctttcaaggtggggaagatgacccatgttctacaaaggaaaagctgctatttaattatcagtctactgccctgatgcttccttttctagaaactgttgtaaagagtacaactatatcccattgccctctctcctcacccttcattcactccttggtccccaccattctacmgaatggaccttcactgtctatgtactaatcttcagttcaataaccttctctttaggtaccatccccgcctcctcctattttgaatggaatcccctttcaccctcttgaaagcctccattccttcttctcttctccactttcttttggttttcccttttctctgatctttcctctccctcccaacttgagtcttctgtctgcttcctaaaa

SEQ ID NO: 760435 - DNA, 661 bp, Homo sapiens
aaatgcagtcctttgttgggggtgagtgggcaccattctagccacttgttattagagtcatcaagcacgctctcctaggacagtttaaaaatacatgcaaaacatcagtaaggttatggaataaagtctatcctcatcaacctgttctaatgtcaccattcacctcctgggggacaccttgtaagagccaacagacctcatgacccccttagggtcaagggttcaatatctaagttacctgaagttcaacaaaaattgcttccctaaaatagggacwtttatctgaatcaaaaccacgtatgagaacaagtataggtgtagcatataggtagaaagtatctatgtgttttgcaagacttttctcctcattaagaacacagcaaagcctgcttgttcagatgcttctctgtgtctctgtgttgtcagaagtaaggatgttccctttctccagatcttacggagaaagctctgcttcagggagaagggcaagacgaggttggagagtgaccttcttgcttctgctgttttctccaatgccaaggtgccatatttggggtagcctgtcctgaacgcatcactgcctgactccctctgacccttggtgttggcattaggctgcattgcatgtaagttatgcagagcagttggcctgagatttgat

SEQ ID NO: 760436 - DNA, 636 bp, Homo sapiens
  misc_feature 266: n = A,T,C or G
tatggcagggcacgatggcctttgaatgcatggctttgaagtttggatcctaagctgactgttttaaatcggtagctaacacttaagttctctttaatttacatgaactcaattatttgtatatttgaatgttgctcaaaggcaatttaccatgaggagttagatttaaaaaaaataaaaataaaccccagcaaacacacatatgtgtcatggtaagcccacttgatctagcttctgaacctgagaataaatcacctatttggggngaggatagcacattgcacaaggaaggtggggatgatagtgaaggattttccattcccatctgaaaggattcagaaggctgcattctactgcagcccaaactgccccactttcttgtctcctcaccaacagaaaaatgccacctgggtcatgccgcctggctctggagtgagttaactgataatgtcagtgcatgtcattaactatcttgcacatctggaagcagatcttgcagaaccaaatgaaatgtggtaacgcgaaacttaagaaatcaaggggagcggcgctgygcttggttgatacctgcaagtcacccataaatgtgcctgtcgtcaacaaagggcaaatcttggaaaaatggcgtgcaaccct

SEQ ID NO: 760437 - DNA, 666 bp, Homo sapiens
gctcactgaaaggccactgcatgagctaaatttcaggtgctgttgcacgggacgatggctaatcctcatgtgtcattggagggcaaaatatagttttatccttcttgtggtttcatttcctttggaattataggatatgtcaggagatttctgggtgggacttagaggacagtaaaaggaaacccattagctctctgaggacaygaaacatacatccagtaatcacttttaagtactacccagcaatcatataatcatcctgtcaaatagctcttccaatgaaactaaaacattggaacatttgctgttaagaacaaatacttaatgcacagtgatctgtaaaatacttaacggcacgtgtccttctagaccgcacggctctttgtgagcaaacggatctcactgtcttctctccaccgctctcccagcaaaattcactgagcacttgtcacatgccctcaagcgatgccttttccttcttcctcaaggtacctctgcagagggcatgacaagtctcatcatcccagactaacaggcaggaacctgcaaaagtcaggtagcccacagtggcagggtcaagtgctgcctccagaccaggaatgttctctcctgctctgtgggggcatctctcctatcttaccaaatacaacctggcagaataaatgc

SEQ ID NO: 760438 - DNA, 585 bp, Homo sapiens
gtcattggagggcaaaatatagttttatccttcttgtggtttcatttcctttggaattataggatatgtcaggagatttctgggtgggacttagaggacagtaaaaggaaacccattagctctctgaggacatgaaacatacatccagtaatcacttttaagtactacccagcaatcatataatcatcctgtcaaatagctcttccaatgaaactaaaacattggaacatttgctgttaagaacaaatacttaatgcacagtgatctgtaaaatacttaacggcacgtgtccttctagaccgcacggctctttgtgagcaaacggatctcactgtcttctctccaccgctctcccagcaaaattcactgagcacttgtcacatgccctcaagygatgccttttccttcttcctcaaggtacctctgcagagggcatgacaagtctcatcatcccagactaacaggcaggaacctgcaaaagtcaggtagcccacagtggcagggtcaagtgctgcctccagaccaggaatgttctctcctgctctgtgggggcatctctcctatcttaccaaatacaacctggca

SEQ ID NO: 760439 - DNA, 537 bp, Homo sapiens
atattgataaagatgtgaaacaaagtaatactcttgttcagaaaattgacaccaaaaatttagtttctattagataaagtaatgggtgagaataataattttgaacttgtttttaccatcatttaaagaggatccaaaatgttggtcagcaatgccttcattcactcatttatgcaactttgtcrtgctatgagcaatggcactttacacatggaaaatgcacttgtttcatgtatttaaaaacctccctgtacaccaaggtgtagcaaatatcacatgtgtaatccatgaggcaagacaaagatgagcaggccgtgtaatttgcaaagaaagtcaggcttggtttgtgtgcctgatttaaatgaattctagagaaaggaaatcgctcttaggcagaggagaaggcagggtgctaatgaataaaatgctgggcatcaactttcttgcctgttgacaccatcgtctttttgcctaatgatctctcccactaccagaccacgaacttggaacccagcaaatgtagtaactctagcggac

SEQ ID NO: 760440 - DNA, 552 bp, Homo sapiens
cgttggggtattttggtttggcagacaccgataaaatgtagaaatttctattcgagtggttaaaatattcagtcagtggtgtctttaacaagaagcaatctgtacccctgagtagttaactgtgaacttgacaaacatcaaatgcttatgtcttgtataagaaaatgacattttagccttaagtaaaaatttaagatgtcttcataacttaaaaataattgtatttcatttcctttatttaatctgaattgaagaccccattttttgccaagatccatgttgaagaagaatgtctggagttgtgaatgaatgaatgagttttctgtttacattctgtggccatggtacagattgtccagaatggcccgctccccattctggacaatcacctgrggactgagtcccaggttccatgtctgttatggtgataataataggtcactttaggggagtctgtgaggatgaccttcggtgacccgtgtgcagaatctctcagaattgtgaggctcagaaaacaagaccccaaagtatggcgccagagcatgtcaagtg

SEQ ID NO: 760441 - DNA, 552 bp, Homo sapiens
cgttggggtattttggtttggcagacaccgataaaatgtagaaatttctattcgagtggttaaaatattcagtcagtggtgtctttaacaagaagcaatctgtacccctgagtagttaactgtgaacttgacaaacatcaaatgcttatgtcttgtataagaaaatgacattttagccttaagtaaaaatttaagatgtcttcataacttaaaaataattgtatttcatttcctttatttaatctgaattgaagaccccattttttgccaagatccatgttgaagaagaatgtctggagttgtgaatgaatgaatgagttttctgtttacattctgtggccatggtacagattgtccagaatggcccgctccccattctggacaatcacctgaggacygagtcccaggttccatgtctgttatggtgataataataggtcactttaggggagtctgtgaggatgaccttcggtgacccgtgtgcagaatctctcagaattgtgaggctcagaaaacaagaccccaaagtatggcgccagagcatgtcaagtg

SEQ ID NO: 760442 - DNA, 663 bp, Homo sapiens
gagcccgaaacggaccaggatagaaaaataatgccaattacacttgaatccatttaagcagcagcttctggaggaagaaggaggctacaataatagtatccaaaataaacaattcagtaattgatcaactagtcagaggaaattatcctaattcaagatctcatatgaaatataaagtgttatacagacaagaatgaggaaaaaagacaccaggagatgtatctaatgtgcagttgtgagttcaattgtttatgcaatttaaaagaatatctggcatcgctacttctacacactcttctgaatctgtcttaaatgcactatcatttaaacaaaaacacaaaagcagtctgtcytacttttttccaaagaagtaaatatacagaaaggttttaccataaaatgttagcaatatttcctgtagattataaatgacatcaagaaaccataaaaataaaaattttcactgtggccaaaaaacaccaaaagccaagtcaaaagacaattgacaggtgggaaatttttttgcaactcaaaattgaaaaacaagagcaagtcattgtaacatatagagttctaagaaaaatgggtaagagaaagaccaaggtccccaaagacaaacaagaaaggatatcaactaggcaggtacagaaaaagaatacaaat

SEQ ID NO: 760443 - DNA, 611 bp, Homo sapiens
acagacactagggcctacttgagggtggacagtgaggatcgaaatactacctattgggtactatgctcattacatgggtgatgaaataaactgtacaccaaaccccacaacacataatttacttatttaacaaacctgcmtgtgtacccccagaaaccaaaataaaagttaaaaatttttgctgactgggcacagtggctcacacctgtaatcccagcactttgggaagctgaggtgggagaatcacctaaggtcaggagttcgagaccagcctggccaacacagtgaaacctcgtctctattaaaaatacaaaaattagctgggtgtggttgtacatgcctgcaatcccagctacacaggaggctgaggcaggaggattgcttgaacctgggaggtggaggttgcagtgagctgagattgcgccactgcactccagcctgggcgacagagtgagactccatctaaaaaaaaaaaaaaaaaaaaaaaggaataaaatgcctaataaaaataaataaaatttggccggacgcggtggctcacgcctgtaatcccagcactttgggaggccgaggcgggcggatcacgaggtcaggagatcgagaccatcctg

SEQ ID NO: 760444 - DNA, 611 bp, Homo sapiens
acagacactagggcctacttgagggtggacagtgaggatcgaaatactacctattgggtactatgctcattacatgggtgatgaaataaactgtacaccaaaccccacaacacataatttacttatttaacaaacctgcctrtgtacccccagaaaccaaaataaaagttaaaaatttttgctgactgggcacagtggctcacacctgtaatcccagcactttgggaagctgaggtgggagaatcacctaaggtcaggagttcgagaccagcctggccaacacagtgaaacctcgtctctattaaaaatacaaaaattagctgggtgtggttgtacatgcctgcaatcccagctacacaggaggctgaggcaggaggattgcttgaacctgggaggtggaggttgcagtgagctgagattgcgccactgcactccagcctgggcgacagagtgagactccatctaaaaaaaaaaaaaaaaaaaaaaaggaataaaatgcctaataaaaataaataaaatttggccggacgcggtggctcacgcctgtaatcccagcactttgggaggccgaggcgggcggatcacgaggtcaggagatcgagaccatcctg

SEQ ID NO: 760445 - DNA, 611 bp, Homo sapiens
acagacactagggcctacttgagggtggacagtgaggatcgaaatactacctattgggtactatgctcattacatgggtgatgaaataaactgtacaccaaaccccacaacacataatttacttatttaacaaacctgcctgtgtacccccagaaaccaaaataaaagttaaaaatttttgctgactgggcacagtggctcacacctgtaatcccagcactttgggaagctgaggtggsagaatcacctaaggtcaggagttcgagaccagcctggccaacacagtgaaacctcgtctctattaaaaatacaaaaattagctgggtgtggttgtacatgcctgcaatcccagctacacaggaggctgaggcaggaggattgcttgaacctgggaggtggaggttgcagtgagctgagattgcgccactgcactccagcctgggcgacagagtgagactccatctaaaaaaaaaaaaaaaaaaaaaaaggaataaaatgcctaataaaaataaataaaatttggccggacgcggtggctcacgcctgtaatcccagcactttgggaggccgaggcgggcggatcacgaggtcaggagatcgagaccatcctg

SEQ ID NO: 760446 - DNA, 605 bp, Homo sapiens
tctgtagttagattagactcaacctgaatattgtcttctttctttttttttaaaacaatttgtaattgtggtaaagtatacataacaaaatttatgaccttaaccacagttcagtgatattcaatacattcataatgttgtgctaccatcaccaccatctatctccataactcctttcattttgtaaaattgaaatgctgtattattccctggcaaccatcactcttctttttgtcgctatggtgttgactattctaaacacatcgtattagtggaatygtatagtatttgtccctctgtgactgacttatttcatgtagcataatgtcttcagtgttcattcatgttatagcatatgttgaaatttccttcctttttaaggttgaataatatttcattgtatgtatatactgcattttgcttatccattcatccatcaatggacgcttggattgtttccatgttttagctattaaaaataatgctgctaaagtcttgagtgtacaaatatctcttatttgtggttcccatggagattacatttaataccttatagttataatgctctaatttgaatttatagtagcttaactttaataacatac

SEQ ID NO: 760447 - DNA, 605 bp, Homo sapiens
tctgtagttagattagactcaacctgaatattgtcttctttctttttttttaaaacaatttgtaattgtggtaaagtatacataacaaaatttatgaccttaaccacagttcagtgatattcaatacattcataatgttgtgctaccatcaccaccatctatctccataactcctttcattttgtaaaattgaaatgctgtattattccctggcaaccatcactcttctttttgtcgctatggtgttgactattctaaacacatcgtattagtggaatcgtatagyatttgtccctctgtgactgacttatttcatgtagcataatgtcttcagtgttcattcatgttatagcatatgttgaaatttccttcctttttaaggttgaataatatttcattgtatgtatatactgcattttgcttatccattcatccatcaatggacgcttggattgtttccatgttttagctattaaaaataatgctgctaaagtcttgagtgtacaaatatctcttatttgtggttcccatggagattacatttaataccttatagttataatgctctaatttgaatttatagtagcttaactttaataacatac

SEQ ID NO: 760448 - DNA, 479 bp, Homo sapiens
gatggagcttgaaggcataaaggtgcaattccaaatacctcaactgctgtagatgaaggggcagcatttgctctagatcctcatcacagcatttcctggtattctttcaggtaggtgaccaaagctcagcctgcagttcctctgaccaggcttccagctcaggtcctgcccatagaggtggtccacctgatgcagctggccaacttctgtctcctaccacaataagctctagtgaacccctgagcccagtagcctcttcatccaagcaagctctcaccagcttgcttctgtgactcaygaaaaggaggaaggaaagaaatggcccaccaaagagagatggtgatggagtccactgttggggaaaacagtcttatatctttcttttcattttaatcttcagtatcttctcagttaattattctccattgagtcatatcattggagtagactttcatcaatcaagacatagttcattcatc

SEQ ID NO: 760449 - DNA, 642 bp, Homo sapiens
atatacatattcaacaagctataggaggagcatgaatatatatgaaaggagaaatgtacgcacatgcagttgagcttcatgccctttcatgggtctcatgtgacaaaaatagcagcattagcatgatctaagggtggagttttcagccctctgctgtcaaaaggtgaagcagagtacatgtagggctttactgtgccctctccagactggccagagccactccatggtcagtggtctcttatcaggcaaaaaaggaggggcggcatgaggttgttagttgatatcagtgtggagtcttttgaaagagttagtttctgttgaacccttagagaagaaagtctaatagaagttaatgaaggagrgggcataaggaagcatgccccatcttcttctatcccactgtggccaagaactcagttttcaaggttactctggggtccccttggccaaagaaggtccattcagtcagttggggagcttagaattttatttttattttacagtggacaggtagattgctacagatatctgaaaggtaggttggcagtatctattagattggtgcaattgtggtttttgtcattacttttaatggaaaaaaacacaatcacttttgcaccaatctaatattaaatgcatgta

SEQ ID NO: 760450 - DNA, 595 bp, Homo sapiens
atttaagaaactgaatgcttacataactcctatatcttagatatttctggagagaactggaatctgatacttctacgaataagaagtatggtaactaaattatagaacatcactcagttttatggtgggatttacaatacgtggaaagaacgaactgatttgttgagggttaggagatggataaagaaaagtatgcacagttaaaccacagatcttaagaaaaaattgcttcaattagttctctwgctaagacaaaatgaaaataaaaagcagatgtaaaaactgcaaccacatattattcacactacagaaagagcagtaatatgccattctttcttttgactgtgaccacaagctttgttttatgctaaggaaatcagatacgtaaaagccaaatgctgcttttaaaacattgccataaagttaagtgctgggccagagcatctatatgagaacatcacaatcagtgagcccataaggaaaagaagacttcttatctgcccttttcacaaagaccaacacctccttcatctctgagccacattcctagagttcctcaaactattctgacttaaccacattgactcaaccacat

SEQ ID NO: 760451 - DNA, 625 bp, Homo sapiens
aagtagacaaattacagttatgtgtcgcttaacgacaggaatatgtgttctaagaaatgtaccattaggcaattctgtcattgtgcaaaaatcattgggtgtacttacacaaacctagatggtagagtgtactacacacccaggccacattgtaaagcctattgctcctaggctataaacctgtacagtatgttttgtagttactgtgttgtaggtgattgttaacacaataggaagtatttgtgaatctaaacatattamaacatagaaaaggtacaataaaatatggtataaaaatctttttaatggcatacctgtaaagggcacttaaccatgagtggagcttgcaggagtggaagctgctctggtgagtcagtgagtgagtggtgagcgactgtgaacaccaaggacattactggctgctactgtagactttataaacactgtaaacttaggctacactaaatttattttaaaatatttttctttatttaataataaaggaatttttactgtaacttttttacttttaaaacttttaaatttgtttaactttttcgctctcttataataacacttagcttaaaacataaacacagtatagaactgtacaaaaatattttct

SEQ ID NO: 760452 - DNA, 606 bp, Homo sapiens
gaaagtcgccccactgcaaggcttggccagtgactggagcctcctgtgtaagaagaagcagtgtkccagcaagcaccattcatcaaatggaacacagcagatttcagccacttctttccctcagccagtcacctctggacagtgtacagtgacgcagtcgtcctgcctgaaactaaggcagaatgttcttcttcaagaagttaggttccgggatgagtctgtggcatcagccaattaaagtcctttccaaagagtctcatctattaaagaagagagatcctgataagataaagatggcagaaggggactgtttgatgggtacactttttttcatggggctggggaagtactggactgaaagtgataaagtctctcaactaatgtgactccttcctagctcagaaaagagaattatctgtgaattctctcaccctctctgaagtgccagttaccagggggacagtcatcagtctatcttctttatacttctttcaagaggcttaaagccctgtgagggggtagatagatagatagatagagagcgagtgatagatagagaattttaaaagctagactagcaattactcaccaaaaagaaaaaacaat

SEQ ID NO: 760453 - DNA, 606 bp, Homo sapiens
gaaagtcgccccactgcaaggcttggccagtgactggagcctcctgtgtaagaagaagcagtgtgccagcaagcaccattcatcaaatggaacacagcagatttcagccacttctttccctcagccagtcacctctggacagtgtacagtgacgcagtcgtcctgcctgaaactaaggcagaatgttcttcttcaagaagttaggttccgggatgagtctgtggcatcagccaattaaagtcctttccaaagagtctcatctattaaagaagagagatcctgataagataaagatggcagaaggggaytgtttgatgggtacactttttttcatggggctggggaagtactggactgaaagtgataaagtctctcaactaatgtgactccttcctagctcagaaaagagaattatctgtgaattctctcaccctctctgaagtgccagttaccagggggacagtcatcagtctatcttctttatacttctttcaagaggcttaaagccctgtgagggggtagatagatagatagatagagagcgagtgatagatagagaattttaaaagctagactagcaattactcaccaaaaagaaaaaacaat

SEQ ID NO: 760454 - DNA, 542 bp, Homo sapiens
taactgaattaaaataatttcaaaagccctgtgagcaaaggctgtgactaactgaaaaaacaaatggtggcctctaatacttcttgagtcccagcctatgacggcaagtgtcaagtaatcctgcagactgggtagaatgtatatcatttcttcatccctttcaaataaayatattgaagttttaaaagattttttaaaacaggtctagattatgaccttgtaggatctacaaacaattagcaaattcctcaagacttgggtgacattattagattcaaagggaaagtctgagtaatgggcatttcccttatttggaattatgttttatgttttgtttgttgttggcaggagaatggggcagacagttctgcctacttgtctgtatctatttgcaaaatatcatcccagtttcaggtagctacaaatggctgggtcccaagtaaaccttttaaatgtgaggtttctccttggcaatctcaatctctccttttctctccaatctgtgtccttccctgctttgcagcctcttactcaataacact

SEQ ID NO: 760455 - DNA, 652 bp, Homo sapiens
tattcatttttaaaatataggacttgtacaaaattctggagaagaaaagaaagtcatcatcattttctaaataacgattagtatatttagtttaatgaggttcccattgtcaatttttgtttttgttgctattgtttttgagaatttagtcataaaatctttgcctaggccaataaccagaagagtatttcctaggttttcttctagaatttttatatatttaaatccttagtccatcttgagttgatttctgtacatggtaagttagagatccagttttatctctcttcctatggttagcaagttttcccagcaccactccttaagcaggggctgcaaatagcaatctctttccaaagagtagagtgtggcaaaggatggkgaaatatggtaacttacagtggaaaaatcttacaaatatttcctcagccaggtgaacagagttaacattaatagcaatgttatgttaataatatgatgtaatgtaatgaaaatgaccctgtaactccatggttttcctcccaaaaacacatactctcagtctaatcatgagaaaagcatgagataaattccaactcttggacattctacaaaatacctgaccagtactcctcaaaactgtcaaggtcattaaaaataaaaaaagtctgag

SEQ ID NO: 760456 - DNA, 499 bp, Homo sapiens
aaggccaataatccactgggaaaatgcaaaacaatatgaacagactttatagaaaagagatacaaagttttttgaaactatgaaaagatgtacaatgttaagtataagaaaaataaaaaaaccccactgaaatgccattttattttttgagacaaagtcttgatctgtcacccaggctggagtgcaatgctgcgatctcggctcactgcaacctctgtctccccattcaaacaattctcctgcctcagcctcccaagtagctagattacaagcatgcaccaccacacccagctaatttctgtatttttagtagagacagggtttcaccatgttggccaggytggtctcaaactcctgacttcaagtgatccacccacctcagcctcccaaagtgctgggattacaggcatgaaccaccatgcctggcctgaaatgccattttaatattaacatattgtcaaaagtcctaaaattttaaaataactactgagaataatat

SEQ ID NO: 760457 - DNA, 614 bp, Homo sapiens
gttaatttgttctgttaatttattctgaaatatagtagatgaagaaaaatcaaatatgcttacttttcaatagcttatttttagaataaatagctgatactctagttacctccagtgagaagtgattgttttcccttttgtagagcattattataaactcatagatttttatctaatcaatgtaattacttaattggatttcttctttttttttatcttcaaatttccctgtcatttgccaaatggaagcacctttattgtgatggttaatactgagtgtcaacttgattggattgagggatataaagtattaatcctgggtgtgtctgtgtgggtgttgacaaamgagattaacatttgagtcagtgggctccgtaaggaagatccacccttaatctggtgggcacaatctaatcagcttccagctaatataaagcaggcagaaaaccatgtaaaggagagatagacctagcctcccagactacatctttctcctgtgctggattcttcctgctctcgaacatgggactccaagttcctcagctttgggattcagactggctctccttgctccccagcttgtaggcagcctattgtgggaccttgccgtcatg

SEQ ID NO: 760458 - DNA, 639 bp, Homo sapiens
tggactttgcgcaatttccagtctcttatattacaaaacaatgccacacttgataactttataagtaactcatttattatcttaaggcacttcttaattcatcatcatgacccgtaactgaaggatacattacccgaaaaattaattatattcactaagacagtacttggattgtgtattcgttttctattattatataacaagttatcacaaactttgcagtttaaaagaacatccatttattttctaagggttttatagatcattaatacaagcaatgagtgtgtgggttccctgcttggagtgctacaagtctgagattaatttgtccatgatgcattcctttcggaatgtmtagggcagaatctgcatccaagaccatttaggttgggggtacaattcagggtactgaaattctaacttccttgttgcctctgatcaaggagcaactctcagcctctaaaatttgcccacattgctaggcaggtccctttatccttataaatcagcaaaggagacgttcccttgcatcaaatccttctcatgcttcaaatatcctccagggaaggtcccagcctcttttaacaactcatctgagtacctctaccacacaaaaagtaatctccttatcttaaggtc

SEQ ID NO: 760459 - DNA, 623 bp, Homo sapiens
aatacttggagattaattatataattctaaataaaaaaggaataaaaaaagaaatcccaagagaaatttaaaaatattttgaactaaatgaaaatttaaaatacaacttacagaatttgtgagataaagcataatcagtgcttagaggaaaatgtaaaagcattgaaagcatttattagggaaaaaaatactaaagtcaaccgtctaagcttccacattgaaaaactagtaaaagaaaatcaaataaaatccaagtgaaagaaaatacataataaaaattataacagaaatcaatgaaattgaaaacagaaaatcaatagagaaaaacaataaaaaccaaagcttgttctttgaaaatagcaataaaattgataaacttctagcaggactaatgaagtaaaacatacaaaagacrcaaattgctaatataagaaaagaaacaggacacaagtacagattctatgaatattaaaaggataataaaggaatattattagtaactctgtgacaaaaatgtgataacatagatgaaatcaatgcatttcttgaaagaaacaaccagtcaaaactcacacaagagaaaacagacaacctcaatagacttattaaataaattgagccaa

SEQ ID NO: 760460 - DNA, 546 bp, Homo sapiens
tacctgtttgtgatttgtatgccatcttttgtgaaatgtctagtcatatcttttgcccatttttaatcaaattcttaggtatttttctatagagttgtttgagtttcttatatattctagtaattaatctcttgtcagatggagagagtgcaaatattttctccccttctatggattgtttcttcacatggcgaattgtttcctttgctgtgcagaagctttttaacttgatgtgatcccatttgtccattgtggtttggttgcccgtggttgtgggttattactcaagaaatctttgaccagtctaatggccyggaaagtttctccaatgttttattttagttgtttcatattttgaggtcttaaagttttcaatgcattttgatttagtttttgtatatggcaagtgataggagtctaatttttatttttctgcatgtagatggatatacagttttcccagaactatttattgaggagactcctttcccaatagatgttcttagcacctttgttgaaaatgagtttgctgtagatgtatgggtt

SEQ ID NO: 760461 - DNA, 546 bp, Homo sapiens
gaaactgtggtacatccagacaatgaaagattatttagtgctaaaatgaatgagctgtcaagccatgaaaagacatggcataaaagcacatttttaagtgaaataagctaatctacaaagtcaacatgataaatatttcaaaccatgttacattctggaaaaggcaactatgagaataataataaaagaaaaaaggtcagtggttatccggggttgaagagaaaagagagggatgaataggcagagcacagggattttttaggcccrtaaaactattctggatgatagtattaaaaataatacatgcatgtcattatacatttgtcaaaatccatagaatgcacaataccgagaatgaaccacacagtaaactatggacattgggtgatagtgatatctcggtgtaggttcattgattgtaaaaaatgtaccactgcaatacaggatattgaggttaacattgtgcaaggatacctggaaactgtctgttctttttgcccaattttgctgcaaacctaaaattgcctttaaaaataaaatgtagta

SEQ ID NO: 760462 - DNA, 591 bp, Homo sapiens
tgatagagtaaataaaatccctcctcccctgacagacttaaaatatttgatggtgccttttattactcctcttcatctcccatgcaggccaaatacaccatccctcacataactcaactcctagaactcctttccatcctcactgcatgctgttatgtgaacttaggtttggccacagctctcttaaatacgaccctcaatggaacayggcagtctgaccaatgtccagtagaatgggaccattatagagtaaatatttagcattaaaggacttaacaatcattgtttcaattattcacgaggaattccaaagaatatgttctagtgtgaaatttcactgagatgcaaacttggattctgtggttgatgtatccagtgtttagaatagctatgtaggtcccaagggcccagcatctttctggcaataaaacttggagattcctcccttgtccttgtaatgcctgtgaagtgactacaaactcaggttccttgtaaaaacttgccatcggccaggtgcagtggctcacgctggtaatcccagcactttgggaggtcgtggtgggtggatcacaaggtcaggagatcgagacc

SEQ ID NO: 760463 - DNA, 646 bp, Homo sapiens
gctccaggtagctttggagtcacacattttcctgccccttacctggcaaaagaatggccttccttccttcagaggcacagcaagggcagccaaaaataaaaggggattgaatcgcccacagtgttaatgaaataccttgtaaatgtcaaacaggcagaatgcaaaacwtctctctgctcaagagttcttgatatctacttccacggagcattggattaatctctttcaccaaaaaaaacaataagagctgagagtagagacaggcagaggaagcatccacttctgcagtcagaaaaccaaaattaggccaattatattgttccagaacctagatttcacggtgagaggcaccatatgaataaaccagtgattgatagatacatctaaatgagcgtttggcaaagcagtgaggaagtaaagagattctgtcgttttggcattaggattgaatttattcctcctcgagacaggtgaggattcagagcttattcatgtgtcatccccatcctattctactttgaacttcctcagtcactggaaaagagacatgcacagaattttagagttagaatctgaaagatcatcattgcacaggcgagaaatctgaggctcagagaacataagtgacttgcccggctgattaggg

SEQ ID NO: 760464 - DNA, 605 bp, Homo sapiens
tcacgaagatgatgaactaaagccttacgtggagccactccctgactacaaggacccccggcggacaggtgaggctgtgccgggctgtgaggttaagcttgcctaggagttgaggccagtcttaactgtatgtccccctgtgcagagctgatggtgtccatgggttatacacgggaagagatccaggactcgctggtgggccagagatacaacgaggtgatggccacctatctgctcctgggctacaagagctccgaggtgtgtgctccccgcyccattctctgacctggccagcctcactgtctgtagcacctatgcttctaacacctgttgagggcagaagctcatctctgagtaggtgtgctctctgctcaccaattttaagcctcagctttggtgtctaaggtcctctggcccattcactgatctccatgagtgaattaatagaaagctggtagggtcggtgtgggactgggtcagagtttcaatacgggtgagttgatctaggttagtctgcattgattagatgtgtctaggtcatcggctagcactactacattgatctagatatctttgtgtctctttttgtatctggaagtgtacat

SEQ ID NO: 760465 - DNA, 528 bp, Homo sapiens
agttacttttcactctccatttatctttttgagagagtcttgctttgtcgcccaggctggagtgcggtggggcaatctcggctcactgcagcctctgctttccaagtagctgcgattacaagcacacatcaccatactaagctaatttttttttctttttttgagatggagtctcgcttcttcgcccaggctggagtatctggcacaatcttggctcactgcaacctccgcctcccgggttcaagcgattctccaccacgtgccaccacgcctggctaatttttgtatttttagtagagacgggttcaccatgttggccaggatggtctcgatckcttcacctcgtgatctgcctgcctcagcctcccaaagggctgggataacaggtgtgagccactgtgtccaacctaattttttgagacggagtctcactgtcaccaggctggagcacaatggcgtgatctcggctcactgcaacctccgcctcccaggttcaagcgattctcctgtctcagcctcccaagtagc

SEQ ID NO: 760466 - DNA, 596 bp, Homo sapiens
cccagataaatcttacaagcattgcaatgaataataacagcaaaccgggagctcccgtttatacaaaactcaaagacacagaacctatcttaccttgttgaggggcacgcatagtaaaactctaaagaaaataacatgccaaatccagaatagtggacacctctgcagggagggggcttcygctgttttgtgaggttgattcatccatgcaggaaatgcatggaaaaggctcatcagttgctgggagaggaaggcatgaggggtgaggggcagctgaggagccgcctatgtaggaggccacagcagccacgcctcctgggatggggatctgggagtcagggggagcccaggctggcctggctgttcagagctggtgctcactctttcctcgtgcaaactcctgctttgttttctactaaaatagccccagctgggtatggtggctcctacctgtaatctgagtactctgacttgaggtcaggagttcaagactagcctggccaacatggtgaaaccccgtctctactaaaaatacaaaaatcagatgggtgtggtgtcgtgtgcctgtagtcccagctactcaggaggctgaggcc

SEQ ID NO: 760467 - DNA, 643 bp, Homo sapiens
ccttttttttttttttttttgagacggagtcttactccgtcgctcaggctagagtacagtgcgggatcttgcctcactgcaacctccgcctcccagatgcaagcaattctcctgcctcagccttcccaatagctggaactacacgcgcgcaccaccactcccagctaatttttgtatttttagtacagatggggtttcgccatgttgaccaggctggtctcgaactcctgacctcaggtgatctgcccgcctcaacctcccaaagtgctgggattacaggcgtgagccaccgtgcccggccagaagatgcttttattgtccctrtttatagatgagaacacccattttagagacactaaaggacttgccaaggatacagctgctgagtagcagagtctagatttgaatcaatgtcttttttttttttttgtgagacagtcttctgttgccctggctggagtgcagtgctgcaatcttggctcactgcaacctccgcctcccggattcaagcaattctcctgcctcagccctgcgagtagctgcgattacaggtgcctgccaccacacccggctaatttttgtatttttagtagagatggggtttcaccatatcagccagactggtctcgaactcctgacctca

SEQ ID NO: 760468 - DNA, 580 bp, Homo sapiens
gaaagtagtgtggcagtccctcagaaattaaaaataaaattatcacatgatccagcatttccctcctgggtatatatccaaaagaatggaaagcaaggtctccaagaattacttgcatacccatgttcatagcagcatgattcaccatagccagaaggtggagccaacccaagtgtccctcaatagataaacaggtaccaaaatgtcttctgcccagatggcggaatactattcagccctaaacaggaaggaaattctgatagatgctgcaacatggaagaatcttgaggacactgtgcccagtaaaatgaggccatcacagagggacaactgccacatgatttcactkgtataaagtgcttagaggaagttaaatcatgtagacagacagttgatggtatttggcagggcctggggagtaggagaaggaatggggagttagtgtttaatggggccagggtttctgattgggaagatgaacagttctggggatgaatggtcgtgatggttgcgcgacaatgtcaatgtatttagtgcccctgaactccgcacttaaaaatggttacaatcatcaatttta

SEQ ID NO: 760469 - DNA, 602 bp, Homo sapiens
attcgccctcattgaaaggatacacctgagtgagaaaatattgaacccgtgagtcagaggtcagaggcaaaagagtgaagacattgtaaacacctgggagaccctgggaagggcgtcatagcaaggagacaccaggaggccgggcagtgtggcttattggatagcttggtggggagagagttggaatggaagattcccagggtctctgtacaatcagaagattaatagagataytggccacctttagccaacttatggttagacctggcattaaaaccagtagtgaaaaaaaaaaggaagtaaagtaaattctgttaatttaacagaagacgggaaaaagctggggagaccaaaacaaggcgtggcaaacagacaacaaaggaaagtaacagcgtgactcagggttgggcaaaggtttctgagggcacacaaagtaataactattaaaaatagataaattgaacataattaaaatgtaaaacttgtttattaaaacacatcattcataaataggtaagccatagagaaagataaaatatctgaaaagcatgtgtctaacaaagcactagtttccaggatatatagagaaatcatccaactgc

SEQ ID NO: 760470 - DNA, 602 bp, Homo sapiens
attcgccctcattgaaaggatacacctgagtgagaaaatattgaacccgtgagtcagaggtcagaggcaaaagagtgaagacattgtaaacacctgggagaccctgggaagggcgtcatagcaaggagacaccaggaggccgggcagtgtggcttattggatagcttggtggggagagagttggaatggaagattcccagggtctctgtacaatcagaagattaatagagatactggccacctttagccaacttatggttagacctggcattaaaaccagtagtgaaaaaaaaaaggaagtaaagtaaattctgttaatttaacagaagacgkgaaaaagctggggagaccaaaacaaggcgtggcaaacagacaacaaaggaaagtaacagcgtgactcagggttgggcaaaggtttctgagggcacacaaagtaataactattaaaaatagataaattgaacataattaaaatgtaaaacttgtttattaaaacacatcattcataaataggtaagccatagagaaagataaaatatctgaaaagcatgtgtctaacaaagcactagtttccaggatatatagagaaatcatccaactgc

SEQ ID NO: 760471 - DNA, 663 bp, Homo sapiens
taaaaatatctcagcttctaaatatatgcccttcccacataatgaggtctaccaaggcttttctgggtgtgtggccacctgagagtctggggaataagctctgagtgtggcatgcgggagccacccgctcactgctsaccacacctcggagagtcacctgtcctcatgcttctgtgaagccagcatccgtctggccccagccttgctgtgggtcccagggcatcagggagccgctgacagcgcccaggagaaaggtactagcagaagcgtctgatggcagcataaccaaatattcagaatttcacatgtgggagatttcttttctgagaacctcaaagttcatacaaaattaattaaagcagggtctgtggaaatagcaattatgtctgtagtatgtttgctttgatgttacataggttaaatggtattaaaaacagcaaaatatatggcatgaaaatagatagcaaactctgagctcctgcaaacacaaccagagcctgtattaacagtgaaagagcccaatacaattgcagaacatgaccatgaaataatactggacaacaaacagtattaggagaagtatattatagccagaagtgtagaggtaagtgaaggtcagagacaagaagtatgtaaagaaataattttaggttatgtagaaaa

SEQ ID NO: 760472 - DNA, 663 bp, Homo sapiens
taaaaatatctcagcttctaaatatatgcccttcccacataatgaggtctaccaaggcttttctgggtgtgtggccacctgagagtctggggaataagctctgagtgtggcatgcgggagccacccgctcactgctcaccacacctcrgagagtcacctgtcctcatgcttctgtgaagccagcatccgtctggccccagccttgctgtgggtcccagggcatcagggagccgctgacagcgcccaggagaaaggtactagcagaagcgtctgatggcagcataaccaaatattcagaatttcacatgtgggagatttcttttctgagaacctcaaagttcatacaaaattaattaaagcagggtctgtggaaatagcaattatgtctgtagtatgtttgctttgatgttacataggttaaatggtattaaaaacagcaaaatatatggcatgaaaatagatagcaaactctgagctcctgcaaacacaaccagagcctgtattaacagtgaaagagcccaatacaattgcagaacatgaccatgaaataatactggacaacaaacagtattaggagaagtatattatagccagaagtgtagaggtaagtgaaggtcagagacaagaagtatgtaaagaaataattttaggttatgtagaaaa

SEQ ID NO: 760473 - DNA, 629 bp, Homo sapiens
ctcttagttttattattttcttctgttttcttagatttactttccttttcttcttctaacctcctaaaaagaaaatataattgattttcatttttctttttctttactatatccatctaacactataaatgtccctctaagcactgttttaggtacacccaacagattctgacgtgttctgttttcacacatactaaactgctgtgtgtcttcctacccactgttttagttgaatctcataaactttgatgtgttttatcaaatgcccatttgttttgcagctgtgcttgtttcaaattttagcaattgctctagtaatcacatcacgcattactaacttatcccagtgtacctaatatcatatcacttcctgtatgacagtcttcctccctttcagacctgagtcatatatttctatgtgtgttatmaaactcacaataaatttttaaattatttttgtttaattcagtagattctcattaagaaaactggcaaaaaatagtatttctatttatctgatatttatcatttccactgctcttcattctttttacaatcacttagcctttctaatatatgggtctcatggcaaattatttccttagcttttgtttatctaaaaatatatt

SEQ ID NO: 760474 - DNA, 568 bp, Homo sapiens
acaggcaggaggggtgtccaggctgagcagaggaggcagctgctcttctccactccagagggacccttaaggtcataaatccccaaataaacggccgtctgaacctccagattcaactgcctggccaaatgtccctgtcccactctcgggatgtgggcctgactgccagcctctgcagaggggccctcaactcaggccaccctcaggatggtcccyggtgtcctggggagggaagatggaggccacactatgctaaaagactcctccatccctccttctccctccccacttctgaggatgcctcgtgggtgcagagggtgcacagcacagacctgcagagaacaggtatctcctttcagctcctgctgcctctggctcctgcctctccctgggatgcctcagggtcgccccagccagtgtgcttcctggcatggtctccccccagggtcactactgggggtcagtgcctgggaggtggaagaaaatgaatacaaaaagccatggaagacagggaagtggtgtggagggacagtgtacacccaaagtcaatcgctggcccctcctgcag

SEQ ID NO: 760475 - DNA, 628 bp, Homo sapiens
atcctgctctgtgcggtcctcactgtgtgccctaattatgcccaggctggttcctaagtcactcttccatgcagccttttcagctcccccaaaggtaaggcggcagctccgcaggcatgacccagaagggcctttgcgtactccctcactctccagccacatcagtacgcacatgagggcatagccctgagctcyggcggggccagaccaggtctccattaccttcagcactgcgagccccgtgcttggcacaagcccgggagcctacttgggaaacagcatctcaatgaatgagggggcgttgtcaacttttttgaaaaacctctggtataaaggatattcacaacttcacataaagttctgtaccttattatttcttgtagttcctatttaaggtaacacattttctaatatttcctcagaaaaactggatattagatataaagaatttttaggggtaatttagttttcaaatctactttatcttgttgcctcttaaagaaattataggctgggcctggtggctcacgcctgtaatcccagcactttgggaggctgaggtgggtggatcacctgaggtcaggagtttgagaccagcctggcccacatggcaaaaccccatctctac

SEQ ID NO: 760476 - DNA, 591 bp, Homo sapiens
tttctcccatgtgtgggggctttcctcagatggctggtgacccaggggtctgatcccactgaagcactaaggttgacaggaagccttctgtggggccagcgccatcactaactttccctctgcagggtgcctgggggtctggcaggcaggagctgtaggacacttctctgggggcattcaacctccctcagcagggactccccacctcctgcctggccagggaactgactgctgggcccwttgctcattcgggatgcccagtttcaggctggtgcctcaccctggcctgtctctagtatcccatgctgaagcttccctgggtcaggtgctcctggaattaaacatgaggtctccttcaattgttggcaagagccatcatctggccaagtgggccctgaagtctctagctgacactccctagaggttttcaaccctccccccttgttcctgtcccccgatcactcccacctcttgcctttcctggtacctgaacagatggtcttccttctcaccaggatgccctgttctggcacagagatttctgaagcttccctcagcaggttgccaccctccctccatgtccatcttcca

SEQ ID NO: 760477 - DNA, 556 bp, Homo sapiens
gaggctagtgtgacctcaaaactcagagcccccgtgagacacagggccagccagtcccatgccttgcaaaggggaacgttcctcccaggtgtggatttgggggctcacgctttgctttccctgtagttgcctcggacagtaaggaaaggagtttcaaggagcagacatakgcaccttgtccccacctgccttctttcggtgtttttttctgatgctacaatacttcaaacacacagggcttctcccagtccttctgcaaggctcttaaccatagcccagggagctgtgtgaatattacaatcaacagcctttcttaatgggatgaaaggagggtgtgtcgaagctttggaatgctttaccaacaaggccaaaatacaagacaaaactccacgcccctcatatgtaacaactgccctaaccagacctgggaggggaaggtgcctattttaagctgtgggtatcgccctgcgatgagtccttactcatcttcccacactccctgacagtgtgagccaatgttgactttagtcacattaaactctgcttccgggtgaca

SEQ ID NO: 760478 - DNA, 545 bp, Homo sapiens
gacatacattttgcaaatatttcctcccagtctgtgacttgccttgacattgttataacaatgtcttttgaagattaaaagtttcaaattttggtaagatcaaatttattgattttttcctattatagtttgtgctttttgtgtcagatttaagaatcccaaggtcactaagattttctcgtacatgttcatctagaagctttatagttttagttctcacacttagatggtccacttyaagtaaatctttgaaaatggcagaaaataagagttgaagttcatttttttttttgcatatggatatccaattgttccgtcgtcgattgtttaaaagattatcctttcccccactgaactgtcttggcacctttatggaaaatctattgattgtaaatgtgtgggtctatttctgggcactattctgttccagcaatccatttgtctgtctttatgctgttaaattaaatttagactaaactgcttccttatatattttaagttcggcctaaaggtttctccatacacagtgaactgtcacctaaatg

SEQ ID NO: 760479 - DNA, 515 bp, Homo sapiens
aattgcaaacttagagcagtaaacaactaggataaacttttatgtttcagcataaaagtgagttatgacttttttgtcatttaaaatattgcacacatttcctttttatttctgtgggatctttgttactgttttagtggtcttaagtaaaaataacttcaaggacaacacggttggatgtgargtagaatatttatttcagacaagtattatgaccacatattttagattcaactatgtgctttattttcagcattaaagaaaatgagctgttttccaacacctgcataccaactgggcctgcatcctctttagaaatgttgtttaataaacactgtggctttatcatccagaggctgttgccaaatgctgttaattaggccaaaaaaatgttttttaaaggttggtgaaacagatccacttttctctctgtaatggcatcttagcttgaaatccaggaagcagtggtgtatggtgtccatatccacgatttcctgcattggagaaaaagtgtg

SEQ ID NO: 760480 - DNA, 515 bp, Homo sapiens
aattgcaaacttagagcagtaaacaactaggataaacttttatgtttcagcataaaagtgagttatgacttttttgtcatttaaaatattgcacacatttcctttttatttctgtgggatctttgttactgttttagtggtcttaagtaaaaataacttcaaggacaacacggttggatgtgaggtagaatatttatttcagacaagtattatgmccacatattttagattcaactatgtgctttattttcagcattaaagaaaatgagctgttttccaacacctgcataccaactgggcctgcatcctctttagaaatgttgtttaataaacactgtggctttatcatccagaggctgttgccaaatgctgttaattaggccaaaaaaatgttttttaaaggttggtgaaacagatccacttttctctctgtaatggcatcttagcttgaaatccaggaagcagtggtgtatggtgtccatatccacgatttcctgcattggagaaaaagtgtg

SEQ ID NO: 760481 - DNA, 582 bp, Homo sapiens
agtttcccgagaatatttggagcttttcaaaccaccaatgggtgtctcatttgccagcttttccttttaatttttttggctcatgtattatttgtttgtttgccccaactgttatcactgcctcagacagctgtgatcttaaacaattgctactacttttgacaaatgtcccagggaaaaggctattygcactgagatctgagactggtcaaagataaaaactgtgagtgggtttttccagataacttccagggaggtaaaataatgacagtttatgtgaattaagatttggagaagctccaacctttttctgtgccctttagaggctgctaggctactgtttttcacaataattgtgtggctattggttttcagagcaaccacgagtatggggatagaggaatgagactaaggcaagtcaaaatgccacaaagcttgctgttgttactgaggtttaaccattttctttcttttcttttcctttttttttttatgagatggagtctcactctgtcgctcaggctggaatacagtggtgcgatctcggctcactgcaacctctgcctcctgggttcatacaat

SEQ ID NO: 760482 - DNA, 582 bp, Homo sapiens
agtttcccgagaatatttggagcttttcaaaccaccaatgggtgtctcatttgccagcttttccttttaatttttttggctcatgtattatttgtttgtttgccccaactgttatcactgcctcagacagctgtgatcttaaacaattgctactacttttgacaaatgtcccagggaaaaggctatttgcactgagatctgagactggtcaaagataaaaactgtgagtgggtttttccagataacttccagggaggtaaaataatgacagtttatgtgaattaagatttggagaagctccaacctttttctgtgccctttagaggctgctaggctactgtttttcacaataattgtgtggctattggttttcagagcaaccaygagtatggggatagaggaatgagactaaggcaagtcaaaatgccacaaagcttgctgttgttactgaggtttaaccattttctttcttttcttttcctttttttttttatgagatggagtctcactctgtcgctcaggctggaatacagtggtgcgatctcggctcactgcaacctctgcctcctgggttcatacaat

SEQ ID NO: 760483 - DNA, 582 bp, Homo sapiens
agtttcccgagaatatttggagcttttcaaaccaccaatgggtgtctcatttgccagcttttccttttaatttttttggctcatgtattatttgtttgtttgccccaactgttatcactgcctcagacagctgtgatcttaaacaattgctactacttttgacaaatgtcccagggaaaaggctatttgcactgagatctgagactggtcaaagataaaaactgtgagtgggtttttccagataacttccagggaggtaaaataatgacagtttatgtgaattaagatttggagaagctccaacctttttctgtgccctttagaggctgctaggctactgtttttcacaataattgtgtggctattggttttcagagcaaccacgagtatggggatagaggaatgagactaaggcaagtyaaaatgccacaaagcttgctgttgttactgaggtttaaccattttctttcttttcttttcctttttttttttatgagatggagtctcactctgtcgctcaggctggaatacagtggtgcgatctcggctcactgcaacctctgcctcctgggttcatacaat

SEQ ID NO: 760484 - DNA, 615 bp, Homo sapiens
ttttttcttttcttgtgttcatatattcttatcctttagctcccacttataggtgagaacatgtagtatttgcttttctgtccttagttggtttgctaaggataatggcctccagctccatccatgttccttcaaaggacatgatctcattttttatggcygcatagtatttcatggtatatgtgtaccacattttctttagtctaccattgatgggcatttaggttgactccatgtctttgctattgtgaatagtgctgcagtgagcattcatgtgcatgtgtctttatggtagaatgatttatattctcctgggtatatacctaataatgacattgctgggtcgaatggtagttctgcttttagctctttgaggaatcaccatactgctttccacaatggttgaaccgatttacactcccaccaatgtgtataagtgttcccatttctccgcgatcttgtcagcatctgttattttttgaattgttaatcatagaattgacctaattttaatattcttgtgtttcagggaatacaggcctgaggagaggaatagtgatggggaatggtcagtggagcagtctgaatacacacatttaccaattaagttcaatg

SEQ ID NO: 760485 - DNA, 572 bp, Homo sapiens
gaatgggtcaaatcttagtcctttgtgaatgccataatttaagattttttagattatattttaatcatgttgcaatgaattgaatgtttactttttattcttatttttatttcttaacttttattgcagtttgggggcacatgagcaggtttgttatataggtaaactgcatgtcatggaggtttgatgtatagattattttgtcacccaggtaataagcatagtaccaaatagtagtttttytgatcctcaccctcctcccaccttccaccttcaagtagacctcagtgtctagtattcccttctttgtgtccatgtgtactcaatgtttaactctcacttataagtaagaacatgtagtatttggttagttcattagttctcttagaaaaatgacctccagctccatccatgttactgagaaggacataagctaactttttttaattgttgtgcagtattccatggtgtatatgtataacatttttctttatccagtctaccattgatggccatctaggttggatccatgtctttgctattgtgaatagaactgtgatgaagatacatgt

SEQ ID NO: 760486 - DNA, 620 bp, Homo sapiens
tccaactgctgggtaggtcctaagatgtccacagagatgggatactttccattttaaatacacagaaaggaaagagaacagcaaagatattcaaatcactttgtagatttgttttcctgaacgtatttatgaatcactaaatatgaaaaataagagtttatcctctagagttaggcctatttggatttgaagttctgttctacctcttgtttgtgtgcaagccttggcaattgcttaacctctatgtgcatcagtttatttatctataaaaagagggtaacaccatctaatgcctctgactataccaaaaacccatgtgcctggcatgtaggagacactgaaaaatgagtgtttatcaacatcgtaattatcatttacrtcattttactaaaagaaggtgctaaacctagatagagggcaccattggaaattggtgggtgaggaaggaatcatgacataatcttgggcatgatttaatgtaactgcctcagttcaaagatggccaaaggatatcttggagaacttaatcaggaaactcaggtgaggtcatattgttagaccgaggaaggactggacttaggcttccagtacctcaaattctggccatttttttttctttt

SEQ ID NO: 760487 - DNA, 565 bp, Homo sapiens
gctcacctgctcaggcatgcagaaaatacctgggtttgttctgctacgtgtacagggaagcttctttccacaacactaaagtctggtgcaggggtatgagtcctctgctcaccacatgtggctgactgccactttgactacttgagaccgtcattacagcagttactactgttagtgattragaccgtcattacaagactgaatgaagggacaaacttagaaatgaaaacttaagacaaaagaaactgctttaaggaaagggccaggggaagaagaagagagctctctgcttctagtgagcaaaggcaactgccgagcttctacagcccttcctatttattgggtaacaagagcaggtagactgcttaattgatcacaggtttgtattgttactgacaggcttcaattatacctaatcataagaaacatttgtgcctggatcattgactgctctcagcagtccttctgggtggcatacacagtttgttggtttgacaatgttctgcattaatgagaaagtttgtggcttactcatatagcctccagtgctataccgatgtaatca

SEQ ID NO: 760488 - DNA, 586 bp, Homo sapiens
taatgagctaattttcccttttgaggctgttcctttgataaaacaagaaactataattttttgactttattattttcaaagaggctgggcatggaggacaagtaaaagtccctcagatgcacttagtctattagacaccaataccactgattgctaattaattcactgcatccatattagggtgcctctataggttataaaggatgggatagtctctgtacaaacttgagaccacccacyccttctctatgtcttgttctgtttacctgtatctttatttcacatcttgtacatagttacactgctcactgctcctgtttaccttgaaaagaaatgtgatttcacaaactaagcttttcagaaacatcttcaaattaaacaccaattaatgttaaaagcagttgagggcatttccagtagctacacaacccacatgaggtcaaataaacatgcacagaataaatgaactacatgtcaaccgattatttttaggcatctcacctatcattaggaatcaccctatgacagatgtactgcaatagatatccatcatggggaggatcaaagtgatcaatcgatattgtag

SEQ ID NO: 760489 - DNA, 519 bp, Homo sapiens
ggcacacagtgtgaaaggccagccccaaagagcagcaagtctgatcatatcagcacaagtaagtttctcagattaatattttgggtaatctacactgtatataaatcattgttatgtcattattgagtgagatgagtcttagaacactttcttcatggaattttataagagatccactgcaatygaggtgtttttgaaagaggaagcactgagctttcatctaattacaggatccagtgtgtacattttcttttaggctgggagagtttatcccaaatttggggagttttcagaatgcacatctgctaacctagcataagcttttctttggaaatattcatcagctgaaaaagtcgcagatatcacaatggatgtgaaaatgctccaggaagaaaaataattccatgttttaattagagcaaagtgtattgtcttggaatgcatttcaatgtgtcttggggggagaaagacagactttattggttagtctgaaagagaagcaagttaacaagcaattct

SEQ ID NO: 760490 - DNA, 523 bp, Homo sapiens
tttgacataattattaattttatggctatatcaaaactatgcaaaagctatgcaagttataaaagtaaaacaaatattttcataggtacaaataaaataatcaaacctggactaacctaaatattctcaaagcaaatattttaattagttgttcagaactatacaattagttstgttgttaataatttacttaattatgtaatttatcattggaaaatggtgagtcatgctgtccatatgatgttttggccagtgattgactgcataggtgacaatggtcctataagattataatggagctgaaaaatccctcttgcctagtgacgatataattgtcagattgctgtagcagaaactcatgtgcttgtggtgatactggtgtaaacaaacctactgccctgccagtcatataaaagtataacacatacaataaggcacagtacataatacttgataatgaaaataaatggctatgttactggcttatggacttactatactatgatttttattgttattttag

SEQ ID NO: 760491 - DNA, 610 bp, Homo sapiens
tctacctcagtttttctctttcaatctatttattttccttttaacccagattgaatctctccatatgccggttcacattttaaaatagcaacacgttctcttagattgcttttatgttacgctaaaaatcctagggtaaatgtcattaactgtagttttarccattaatctcagcccctcattatacaatagattttctatagaattttctctatatttgtaattatgactaatttaactctcaataaggaaaacttttcagaatcctttaagtgtcatgatttatcttaagcaatactaaccagcaagagggaaacttgaagtagtaatagttggaggtcaagccaaatgttaatttgcctacttataacttttgttaaagttataacaaagaaattgtatttgaataaaagttatatatctgtttaaagtattgaagtctaagaaaagacagtaatgtaagcacaaaagagaataaaggaaaattacttttaatggcaaaaactacaataagttttgcaccaacctaatagctgttttgattgttatatgataatatcaaatgacattgaaataaaattagcaattttggaagtattgtgtgactaca

SEQ ID NO: 760492 - DNA, 621 bp, Homo sapiens
atactactgcatagcaagtctttttttaaagccacagtaattaggacagagtgtcttggtacaggcttgaaaaaataaagacatggaaaaaaaagagtccagagatagctcctctcagatacagacatttgatttaagacaaacttcagaaaactggaaaaagaatgatctcaaaaaatgattgaatatatacatagggaaagaaaaaaatctaagcacaacataaaatttggttttgggaggctgaggtgggcggatcacgaggtcaggagttcgagaccagctgtaccaacatggtgaaaccccgtctcaactaaaaatacaaaaattagccgggcgtggtggcacgagcctgtaaaccgatctactcaggagcttgaggcrggagaatcgcttgaacccgggaggcggagattgcagtgagccgaaatcgtgccactgcactccagcctgggtgacagagtgagattgtcccgaaaaaaacaaaaaataaaataaaataaatcttcatgtaaaaggtggaaatgcaaaaattagaataggattgctcaacagcaatattatttacattttacatggaataattctttagagagggagttgccctttgcattgtaagct

SEQ ID NO: 760493 - DNA, 577 bp, Homo sapiens
tttagaaatcaatgagtgtatctaataaacaagatttagaaaagcagttacatctttattttcatatctatatacgtatttatttttatcacagaaataagtttaaattttattgccttttgttggtaaatgactaagttaaatggccatgttacaatatcctaaagatgcttcaaactatgctctatggggtaacttataaaaggcccagggctatctctagcatttggaaatatcttgaaatgtttattaatggcctcataaaccatgttcatcctgtttttctgctgaattcttggcaattggaaaaaagacactcatttcattgctagatgtgatcacagaggattctaaaagcatataccttgctaaattctgatacatacatatgaattatgaatttttaaatcatcaacaaagatcagtrtacagaattgactataaatcactctctctgggattgagaatacataatttttatgtccacaggtaaaggaaattttaaaatgaaatcagtggcaatgtttgaatatgttgtcagcatttgtttatttagaaattgaaaatcaaatttata

SEQ ID NO: 760494 - DNA, 547 bp, Homo sapiens
tttagaaattgaaaatcaaatttatataatcatcatctcttctaatgagatgaaaggctgtttttacattttactgaaactaaaaaacatagacatgtgtagatagaaagaatattgatactttattcctattctagttgcatggatagctacatcacatataggcaattaattaagtaattaaataattattcactttatttttaacaactatttttggctatggagcgagatactatggatgcaacattgagcaaaagtagacatggtcccwccagtatcacgacaaggtctacacttaatggcgcagcaaatttggagaacatttttgaaaattttttcaatcgtttatgaattactacacaaatgacagatgtggttagaatctcagaagactagaaacatcataagcatagtgatgcgttaattagagttctcatatgtaaataatagtatttcagtttctagggagaaaatagtaatttttatgaagactgcattcagtctatagatcaattttgggaaaattgacatctgaacaatatag

SEQ ID NO: 760495 - DNA, 547 bp, Homo sapiens
tttagaaattgaaaatcaaatttatataatcatcatctcttctaatgagatgaaaggctgtttttacattttactgaaactaaaaaacatagacatgtgtagatagaaagaatattgatactttattcctattctagttgcatggatagctacatcacatataggcaattaattaagtaattaaataattattcactttatttttaacaactatttttggctatggagcgagatactatggatgcaacattgagcaaaagtagacatggtcccaccagtatcmcgacaaggtctacacttaatggcgcagcaaatttggagaacatttttgaaaattttttcaatcgtttatgaattactacacaaatgacagatgtggttagaatctcagaagactagaaacatcataagcatagtgatgcgttaattagagttctcatatgtaaataatagtatttcagtttctagggagaaaatagtaatttttatgaagactgcattcagtctatagatcaattttgggaaaattgacatctgaacaatatag

SEQ ID NO: 760496 - DNA, 547 bp, Homo sapiens
tttagaaattgaaaatcaaatttatataatcatcatctcttctaatgagatgaaaggctgtttttacattttactgaaactaaaaaacatagacatgtgtagatagaaagaatattgatactttattcctattctagttgcatggatagctacatcacatataggcaattaattaagtaattaaataattattcactttatttttaacaactatttttggctatggagcgagatactatggatgcaacattgagcaaaagtagacatggtcccaccagtatcacgacaaggtctacacttaatggcgcagcaaatttggagaacatttttgaaaattttttcmatcgtttatgaattactacacaaatgacagatgtggttagaatctcagaagactagaaacatcataagcatagtgatgcgttaattagagttctcatatgtaaataatagtatttcagtttctagggagaaaatagtaatttttatgaagactgcattcagtctatagatcaattttgggaaaattgacatctgaacaatatag

SEQ ID NO: 760497 - DNA, 630 bp, Homo sapiens
attttggtgtgtgctcatattttcccagatttagacagacagagcctcttcatgctggcttttataaccttttaccttgccttcagacacacacacacacacacatacacacacacacacgttttagtatactttattgctttctggcacaggtgctttccctaacctagtcataaaattagccatttctttaaaaatttctagcttattttaatgaggaatggaaactagaaaccaaaatatagggggcagatatgctcattacagtaaatatcttttaaataaaatttgaatgccattctctcttctcgtctctggaaaataaatcaaccaaccaagaaatagacaaacggaaatgttaattcttaaattgagctgatatcaaatkatacaatttaagtaaaacttattgagccctccttgcaaatattataggatattcattattatcatttagtagatcaaaaagtttataggcttattataaacttataattataaaaattatacttattttcaaagtgtggttaaatgggtagatgctgaaataattagaaattcaagactatgaaaattgcattccccttcatcttaactgaatttaaacaagtctatatatatttagatttt

SEQ ID NO: 760498 - DNA, 631 bp, Homo sapiens
tgggtcacatggcgaaagagggagcaagaaacagaggaggaagtgtcaagcctttaaacaaccagttcttatgtgaaatttagagtaagaactcattcattaccacgtaggggcatcaagccagtcatgagggaactgcctcctaacccaacacctcccactaaaccccacctctaacactggggcatcacatttcaacaggtgatttgaagggaacaaacatccaaactacatcaaccaatataaggtataaactctgaatgagatatgaataggaatttatgagtatagggaagcagaggaggtgagatacaagagaagacctggtagagaagagaaaattgttaggagtggctgagaaacgtttaatatgatttttaaaaactctattcaattttagtttattggtttctcatgcttgctttycaggtggaaaccaccaaccaattggaaggtgactagggtgaatatagcccaaggaacttgcaaaactctttggagggccaaggagtaaaggacttcattcagggtgtgacatggtgggccacacccatcaacagaatctcagccagggcttcagaactaatgtaaaaagttaccaggtttataatacttaaagagttttggtttc

SEQ ID NO: 760499 - DNA, 605 bp, Homo sapiens
tatactctagggagaattgtcacttgctgactattaataatcccactggagcatttatcactctagacttattggagtagatggcaacagcctccttattatgcaatagtttaaaaaatatccactcaattctttcctttttcctttgaaagttcaagttactccaggctgagaaattacaaagtatagatacactttcagtttgatattcttaaaacatcctaattttcctgcctaattaaggctcttcctttcttagcttattatgtaatatatcatatkgtatcctattattatattctggcttgtctggacaatactgcaataaattgtaatggctgacagagcattaagtgaatttcaataaattatgagagacttcattctgccagctatgcaaaaaacacttgacacctcaaaaaaaaaaaacagcaaaataggggctttaaaatgaatctctaaaatctgcatattatcctacgttgtttgcattctgtgccagttgttatatatggaaagaaaataaacattttccaatactctgttacgatagggtctatctttatataaagtccttgaaaactaagttcattcaaaattttaag

SEQ ID NO: 760500 - DNA, 621 bp, Homo sapiens
ttataacacagtcatctccctcccatcccccggcaatcacaaaactctcccattttataaacttttatcatttcaaaaatattctataaatggaaccatgtaatatgtaaccttttgggattgactttttcactcagcataattccttggagattcattcaagttgcttctttttattgcccaagagcatttattctgaatagtatatatgtactacagttttttatagtataaacccactgcaggacacctggcctgttgcagtttctgggtcttacaaataaagctgctgtcaacatttgtgtgtaagtgtttgcatgatcgcttttaactmttctcctagtgaagacttatctaagggagggcatgctttcattgaattgcatcttttcttttaaggcacttatcagaaatataatttttcatttatgtggttgtgataattcaattacagttaagatgttctcttggaccttgagctccacagggccaggatttatgtctgtttttttcatcattgtttttctagttgataatataatggcttgctagtgagtgaatatttgtgtaccctccaaatccatatgttgaaacctaattgccaatgtgatggtatatggg

SEQ ID NO: 760501 - DNA, 620 bp, Homo sapiens
agcacagtgttttacagtctcaccaggacaaaaccccttattcaaataatacaaagaacatagactttagaatctggcagacccttaatagattatttctagagccatgaccttaagctacaaatgtactacttgggtcgacaggtctgtgaacctcaaaatataaccattatcatgctcactcctccatgtgatggttctgttggagagtaggaaactaatgaagatatccagcctccagatagattaaacagaaacctcaacatcactgagtcctggaggaccctgtcctgaccactcctttaggaggtcactgagtccatgctgagaagactgacctagatcatgaggatgacttaagacaaatggtttaaagctatttgttggctaaggaaccmtagggtctgtggatcacacatacatagaaggaagcttctattattggtaaaatcagctttcagtcacttaataagaataataagtcacctatacatttgcatagacagttgacttccttcaaatagaattctctgattaataaggtaagtttacatttctgaacaagaggaaaagaaggttctaacaattccacatgttaacatcaagtctgatccacaatt

SEQ ID NO: 760502 - DNA, 620 bp, Homo sapiens
agcacagtgttttacagtctcaccaggacaaaaccccttattcaaataatacaaagaacatagactttagaatctggcagacccttaatagattatttctagagccatgaccttaagctacaaatgtactacttgggtcgacaggtctgtgaacctcaaaatataaccattatcatgctcactcctccatgtgatggttctgttggagagtaggaaactaatgaagatatccagcctccagatagattaaacagaaacctcaacatcactgagtcctggaggaccctgtcctgaccactcctttaggaggtcactgagtccatgctgagaagactgacctagatcatgaggatgacttaagacaaatggtttaaagctatttgttggctaaggaaccatagggtctstggatcacacatacatagaaggaagcttctattattggtaaaatcagctttcagtcacttaataagaataataagtcacctatacatttgcatagacagttgacttccttcaaatagaattctctgattaataaggtaagtttacatttctgaacaagaggaaaagaaggttctaacaattccacatgttaacatcaagtctgatccacaatt

SEQ ID NO: 760503 - DNA, 658 bp, Homo sapiens
tatgttgaaattaaagatgaaaataaaggcaaattgggccaatcaaccactttatttgtatggaagtaaaaatgtagagaccagcttttagtgcttagtgggtctgatttgaaagactgtttttttaatgcactttcctttccttagggttycagtctattttcttactctatactgaaaaattagttaggatgacctatttaaatctgaaagaattgtgcatatatatttctcttgattattactaatggctattttgaagcattaattttggttctccactggagtaaacaatatggtaaaaatatcaagtactcagaaaataaagcatactgatatttttctttgaatttagtcttacaagaaacagttttttatgtttttcaaagcatattcttttttctcattaaattcttacaaaataaattctgaaaatatgaatgcttatagtccaggaaactatgctatagagtgagatatttgaatatttttaaatatctgatgtaagcttttgattctttagattttcttcaatgagaaaagcacaacattttctatctaccatccataacatttattgactatgtcgctaatttggcccgtggcataagcagacgtggattactagctacagaaatactcatgttttatatgaccc

SEQ ID NO: 760504 - DNA, 680 bp, Homo sapiens
caaaataaattctgaaaatatgaatgcttatagtccaggaaactatgctatagagtgagatatttgaatatttttaaatatctgatgtaagcttttgattctttagattttcttcaatgagaaaagcacaacattttctatctaccatccataacatttattgactatgtcgctaatttggcccgtggcataagcagacgtggattactagctacagaaatactcatgttttatatgacccctccttgattttaggaagaaagcctttttttcctctgaaactctcataacacagaaaatatgtagtgtgctatagttgattccgtaacttgctcttttcaccytcaatatctcttggaatcaaaatcatacatcataaaaatggagtcatatataaggccaaaattccaaggaacacttttttttatggtttaattttaaaacccagaggagaaaaagttatctcttatatgaaggagttggatgggatatctatcctttgcataacaactgctttctttaatctgtggatcagaatcccactagcttactatataagtaaagtgcatatcattcataaaaattacactctcagtcaagaatgatcaaatgcttccaacaaaaagagggttataatagtgtattatcctggcatgaagatggtcagctgacagtatcat

SEQ ID NO: 760505 - DNA, 597 bp, Homo sapiens
tgccaagcctgcaattggcataatagaatttacaaaatggggcccaggtgtgtgagtgtgtgtgaatgtgtgtggtctttaaatacccataatgaaattgaaatactaactcgacataggctttctgccagctggtcttagacaaataacattcagctcttttatggttcaccttcaggtgacagacctttagattgcaagttttctgttttgttktgttttgatttttaaatttttatttagccactgcatcaaatctagcagtacaatggggtaacaactgaataataaaatcaattatattgtgtttcccaggcttttttagcacttttgcatttataagctcatttatttcttatatcatagaagatagatattaatatatgcataatttttcacacagaataaaacagagattaacttaattcagagatggatttcaagcttaaatcttgcatttatacagtctgttttcttttcattacaacatttatttttacaaaaacatgtatgactcttaacagaatattgtataaggccacaattctccagggatatgaatataataaaattttcagagatgtttatgaattttgc

SEQ ID NO: 760506 - DNA, 541 bp, Homo sapiens
gaaaaactgaacctataggaacaaaaataaacaatgttgagctatatttcataccatacaaaggtgacagggatgattgtaaatctaaatgttaaagtgaaaactgtatagcttcataaaggaaacatagaatacactaattactatgattaaaataaaacaactttttttcagacagaactcacaaacactgaaaataaagtaaaataaactaattgattcctctttttatcagaagaataggccagcttcagatttaragaaaatgttaataatacatatatctgacaaaaatcttcataaacgaaatacataaaataactcctggctgagtgtggtggctcacgactgtaaccctagcactttgggaggccaagatgggtgtattgcttgaacccaggaattttagactagcctgggaaaccccatctctacaaacaatacaaaaattagactggcatggcggaacgttctgtagtcccagctactcaggaggtttaagtcgaaggatcacctaagccagtagaagttgaagctacag

SEQ ID NO: 760507 - DNA, 640 bp, Homo sapiens
tctattatcttccttcatatttattattgtatatgtgctaagtcctctggatgttacttccaatctctgatctttcctcacactttcatattttttgttttgtacttttatctattttttgcatttaagattttaggcaactaaatctagtctcaccagtgatttgcccttgaatagtttgtagatttcatttgttaggtcccaaaaaacactggttgtgttattgggaatgtccttcaataatgtaacttttaaacattcaagttgcttttcatcttgtctttggtgtatatgccttgcttattctggatggcattattctttccagatgcaggttwagttctttcagagaagtttggaaaaatatgaaaaaaagagacatttattcatttcttactagaggtttcagaaggagaaaaaaataaagtggcaaaagacaatattcaacataatgatgcttataaattcttagtgataatcaaaagaaggtttcttagtgctggcataactgtaacagaatacagaacacacacacacacatacacacacacacatatgcatatacacacatatggctaaaaattattgaaagcagctggaaagatacatgtaaacacaaattccacaagagaaagaagac

SEQ ID NO: 760508 - DNA, 619 bp, Homo sapiens
attttaccttcattatacttgatgaagcctacattgatatatcattatcaaccagtctgtattttacattagagttcactctttgtgttatacattccagtgacatgaatccatcataatagtatcatacagagtagtgtcattaccctaacaatcctgtatgccacacatattcattccttcctccccaattcttatcaatcattgatctttttactgtcttcatagttttgctttcccagaatatctcccttatattgggaattaaacgatatgcaatctgttcaggctggtttctttcactcagtawtatgcattaaagaacactttcatggctttatagctcatatctctttggcactaattaatgtgccattgtctgcatgtaacacagtttatccattaacctgatgaaggaaatcctgattgtttcttagttttgacaattacaaattaaggcactgtaatcatcagagtgcagatttttacatggacataatttttttacttcttttggtaaatataaagggcataatttttggattgtaaggtaccagtatatttagtttgtaagaagcaaccaaatttctcccaaactggttggaccattttgcacttc

SEQ ID NO: 760509 - DNA, 614 bp, Homo sapiens
agtattagtcctttctcaaggtgctataaataacttccctgagmctgagtaatttttaaagcaaagaggtttaattgactcacagttccacatggttggggaggcctcaggaaacttataatcatggcagaacgggaagcaggtaccttcttcacaggttggcaggaaagagaagattgaaggaggaacttcaaaacacttataaaaaccatcaaatctgggtactaactcactatcgtgagaacagcatgggtgaaactgcctccatgatcaaatcactttccttccttgacacatgaaggttacactttgagatatgatttgggtggggacacagagccaaaccataccaaaaaccatctccacaaaagttttctttcttcctttgagccatattgtgtatatcaacttgtcattgtggtgacaggaagggacggccccttgccccatattaggacattttggtagggccatctcagtcccaaagctcccactgggatttgctgaggtctatgttagaactgtatcaaaattctgtaacacagttttttcctctgaccaatcctgcttccttaattggtaactaacaatagtattccttaatctatataatt

SEQ ID NO: 760510 - DNA, 566 bp, Homo sapiens
agtaaaaactcggacagaggtgccactggccacagagatttctgcctggtgaagtgacacccccaaggatcctgtgacactttttcctcagttcttatcacccagtacaatatgtctggctttcaacaaaaagctacmacttataccaaaaagtaattacaaatacagtctgaaaaaatcaagcaaacttcagagccagaatcaagcataacactgatttggatttatatcagacagagaatttaaaacaaccaacattaatatgtaaagaactctaaaaagttgacaacatgcaagaacagatgggtaatataagcagactatggaaactataagtaaaaatattcatgacttaggatctagcaatggattcttagatttgaacaagaaaataatagataaattggactttcttaaaattaaaaacttttatttatcaaaaaagtttatcaagaatctgaaaaggaacctagagaatggaggaaaatttttcaagtcataaatttgttaagaatttaataccagaatatgaggctggcaacaaagatggccgaataggaacagct

SEQ ID NO: 760511 - DNA, 609 bp, Homo sapiens
ctcctctgagacaaaacttccagaggaacgatcagacagcagcattcacagttcatgaaaatccgctattctgcagccaccgctgctggtacccaggcaaacagggtctggagtggacctctagcaaactccaacagacctgcagctgagggtcctgtctgttagaaggaaaactaacaaacagaaaggacatccacaccaaaaacccatctgtacatcaccatcatcaaagaccaaaagtagataaaaccacaaagatggggaaaaaacagagcagaaaaactggaaactctaaaaagcagagcacctctcctcctccaaaggaacgcagttcctcaccagcaatggaacaaagctggatggagaatgactttgacgagttgagagaagaaggcttcagacaatcaaactactccaagctacaggaggamattcaaaccaaaggcaaagaagttaaaaactttgaaaaatatttagacgaatgtataactagaataaccattacagaaatacagagaagtgcttaaacgagctgatggagctgaaagccaaggctcgagaaccatgtgaagaatgcagaagcctcaggatccactgcaatcaactgga

SEQ ID NO: 760512 - DNA, 561 bp, Homo sapiens
aaaaatgaaatatattatttttctaccacatgaataagatgaagcctctacttctaaattcattttcagctaaatctatccccatataaacgagaaatgctgaccttgggtgtcctttttgttggagctggaacaataattgcacatgcatattgatacctgacattgaaggacagattccgaagatccatttattgtagacacagcactgggatctttattaaacatgtggtggtggtraggcaatcttaaactgatataacaaattaaaagagaccgtattcctgttttccagttcagaaactagtcgctaactactattgtgcagaggaggtaatgcgttagagaggagaatgaagatcagtatactaaaaacttacaatctgtttattagagaaatgtaagtaaaagtttactttctgttcaaaccctctgacctttgtccttagctaagctacacataaaacatccatacggcccatagaaacccctatcacacatcctagtaagctttaaatatttatttatttaaacttacaaataaataaattgaatgtgctt

SEQ ID NO: 760513 - DNA, 570 bp, Homo sapiens
acaagggtttaatatctagaatatatttaaaataaaaactcttacaattaaatgacaaaaatgcaaacaacctaattttgaaaatgaataaaggatttgaatagacattttactaaagaacatatacaaatatccaacaagtacatgaaaagaagcacagtgtcattagccattagagaaatgcaaattaaaaccaccrtgagatacaactctacaccctttgggatagctagactaaaaaataaaacaaaacaaaataacaagtgttgccaaagacatgaagaaattagaaaactcatacattgttgatggaaatgtaaaattgtgcagtgactgtggaaaacaatttggcagttctacagtaaacagaattgccatatgactcagcaattccactcccgagtatatacccaaaataattaaaaaggagctcaaagaaaaatttgtgcatgaatggtcatagcagcattatacataatagccaaaaggtagaaacaaccaaatgtccatggactgatgaatgaataagcaaaatgatgtatattcataccattgaatatgtattattca

SEQ ID NO: 760514 - DNA, 432 bp, Homo sapiens
cattaaaaagatcattcatcatgaccaagtgggatttaagggatgcaaggatgattcaacgtatgcaaattaatcaacaagatacatcacatcaacagcatggaggacaaaaacatatgatcatttcaactgatgctaaaaagcatttgataaatttcaatatctcttcgtaataaaaagactcaaaaactgaggatagaagggacatacctcaayacaatgaaagtcatatatgatatacctacagttagtgtcattctgaaaaactaaaagcctttcctctaagatctggaatatggcaaggatgcccaccgtcaccactgttactcaacatagtactggaagtcctaactagaccaatcagacaaaagaaagaaagaaagtgcatccaaattggaaaggaaaaagtcaaattatccttgtttgtagata

SEQ ID NO: 760515 - DNA, 546 bp, Homo sapiens
ccttgagcccagcagtcaatcccagctctggcttgacttcaaactccatgccatttccaccacattgctctgccttcttaagaggagagattctgcccatggttctagaagattctcttcccagtaaacagaacaaggtggagagtgagacggggagcaggggaaaactttgagtcytgaggagaagcaacaacaacaacaaaaaaaggcaaaagatttttacctaaggtctacctttaggacactacctaatataatcagatttctgatacagtcaaagttcgtctccacttagcgtaattatactaaaagagtcactgtctttttcttagccccaacttgtattatcttaatctctctgtctcatagggactagcaggtagtgaaatttaaaaagaaaaaaagtccagtcatactttcaataacatcccctacagaatatcacagtaagcccattatttcttaagaagaaacacacatcacattttcattaagtatttacatgaaccttccctacggataataattctttggaaagttagagaa

SEQ ID NO: 760516 - DNA, 546 bp, Homo sapiens
ccttgagcccagcagtcaatcccagctctggcttgacttcaaactccatgccatttccaccacattgctctgccttcttaagaggagagattctgcccatggttctagaagattctcttcccagtaaacagaacaaggtggagagtgagacggggagcaggggaaaactttgagtcctgaggagaagcaacaacaacaacaaaaaaaggcaaaagatttttacytaaggtctacctttaggacactacctaatataatcagatttctgatacagtcaaagttcgtctccacttagcgtaattatactaaaagagtcactgtctttttcttagccccaacttgtattatcttaatctctctgtctcatagggactagcaggtagtgaaatttaaaaagaaaaaaagtccagtcatactttcaataacatcccctacagaatatcacagtaagcccattatttcttaagaagaaacacacatcacattttcattaagtatttacatgaaccttccctacggataataattctttggaaagttagagaa

SEQ ID NO: 760517 - DNA, 546 bp, Homo sapiens
ccttgagcccagcagtcaatcccagctctggcttgacttcaaactccatgccatttccaccacattgctctgccttcttaagaggagagattctgcccatggttctagaagattctcttcccagtaaacagaacaaggtggagagtgagacggggagcaggggaaaactttgagtcctgaggagaagcaacaacaacaacaaaaaaaggcaaaagatttttacctaaggtctacctttaggacactacctaatataatcagatttctgatacagtcaaagttcgtctccacttagcgtaattatactaaaagagtcactgtctttttcttagccccaacttgtattatcttaatctctctgtctcataggractagcaggtagtgaaatttaaaaagaaaaaaagtccagtcatactttcaataacatcccctacagaatatcacagtaagcccattatttcttaagaagaaacacacatcacattttcattaagtatttacatgaaccttccctacggataataattctttggaaagttagagaa

SEQ ID NO: 760518 - DNA, 609 bp, Homo sapiens
cctgaaactaactttgataaatctacctttaactatatacaacatggatttcactgcctactaatggatcataacccacaatttgaaatatcatctaaagtaaggctaagcattataggattttgaagcaagtaaattaraattgcttctgtttaaatagctacagttgaacaaagatatgtacataccatgaatgcatacttgtgtatagcttggataacagttttaaacagaagtttgcttgtgagtgtgtagccatgatatacaacaggttcattttgtgctccatcccagcagtcaatctccaaacaacggcatcctttcacaagggcactagcaaaatttcagcaaaataaaatgttactcctggaccattaaaaatatataccaaagtattaaaatattccaaagaccatttgattttataataaatgcataaatgagtccataaaactctataaaaacttgtctttgggacaagttttgagtctctagaaatttgcattaaaagggaagacacatactatctgtgtagtacaatactgtgtctttctcgctagtcaaatgttttactcttccgtgctctccatacaaggcttggttttcagt

SEQ ID NO: 760519 - DNA, 589 bp, Homo sapiens
tgtcacataccaatgagggatgaggctgaggaacttggcagcatttggaactataagatcataattcaaattggccttaataagacaccaaagtgatcaataatcatgtaaatgaaatgcaaggtcctggctgtgttgragagtatttgaggcaggtgaaggctcaaaagaggaaatggatgaacagtataatattgtagttaaaatgcaaacacaattccaaagtgtcactgcctccatcccaacatctcatttgtatcttttaatttaccacctgaagtttacagtgccaaagtaattgttttggtaatattctctagatcagtgctacttaaagtgctcatctgtaaactggttgtttccagttggcaatgacataaagagcttgagccagaacataaatcaattcactacttccttagagaaagtcttgctattaaaaaaaaaaaaaaaagtcatctgaactcatcagttctgcttagtgatatagtcgcttagtattcttgtgcaagctctttaccttgctgctaacctgcaaaaatttaatggtgctgagaccaaattgtcactaagactcaactcaatgaca

SEQ ID NO: 760520 - DNA, 479 bp, Homo sapiens
agtccaatcaagcagaaatttgaagtagtgtgtgtataagtgatgattttagtagtagtcattaggacagtaagaggtttctaatcatataaacaattctggcaaagaagctgggtgaattccaagagccaaaaggaaaaaaaggcaacaacgtttaatttaatttttttcattctatgcctgtatcaacacaacaagaatatttataagaaatgcaaagaagcacactagatgttaaytctgattttactgtctcttgccctcagttgtgatgtaggatcccatctttgtgtcaaactcctcgatcacttgtgtgcaacctcaagagcaccttactagatgtctttaccaataagcccagtgcttactagagagcccagtgagttatcacagggcatctaccttgttttaaacttttcctccacttccgccgcctcactgagtactgctgcatcaaccactcaccacagctgggattt

SEQ ID NO: 760521 - DNA, 532 bp, Homo sapiens
aatctaatgtccgtaatatgtgacgtttcgtagatgacaatgtaggaaagatatattttaatcacttttcatttaagtgaccttatgtaaaaagtaaagtaataatttagtagttccaagtctccagagggcattttcaaatgtacataaaagaaatggttacagagattttttttaasaagcatcttccatgtccacatcctcttgtaactgctgtaccattttctcttacaactgctttcctttgcctgcaagaggggctaggataagatggatgttttgcttgacttctttgaagtttctgtagcgctttatttttcttcaatctgttcactacaaatttagcttggcgtttctgtttgatctcttcaactctctttattgcctcaatagttttattccatagctctcactggtatttgataggttcatttctacgtttttcaaattcaaatgaattatccactgtaagctctttatcagctgctttccagaatgctttggtccacccaactttgcgaggattgcgctt

SEQ ID NO: 760522 - DNA, 532 bp, Homo sapiens
aatctaatgtccgtaatatgtgacgtttcgtagatgacaatgtaggaaagatatattttaatcacttttcatttaagtgaccttatgtaaaaagtaaagtaataatttagtagttccaagtctccagagggcattttcaaatgtacataaaagaaatggttacagagattttttttaagaagcatcttccatgtccacatcctcttgtaactgctgtaccattttctcttacaactgctttcctttgcctgcaagaggggytaggataagatggatgttttgcttgacttctttgaagtttctgtagcgctttatttttcttcaatctgttcactacaaatttagcttggcgtttctgtttgatctcttcaactctctttattgcctcaatagttttattccatagctctcactggtatttgataggttcatttctacgtttttcaaattcaaatgaattatccactgtaagctctttatcagctgctttccagaatgctttggtccacccaactttgcgaggattgcgctt

SEQ ID NO: 760523 - DNA, 643 bp, Homo sapiens
gtattcttccagcttccaccaaccaattccaaagtcacttccacatatttagttatttgttacagcagcatccaatttcagctcccccaatctatactagttttctatttttgccctaataaagcaccacaaatttattggcttagacaacaagcatttgtacttttatagttctctgagttagaagttcaacatggggtggctggcrggatggccgaataggaacagctccggtctgcagctccaagtgagattaacgcagaaggcaggtgatatctgcatttccaacggaggtacccggctcatctcactgggactggttagacagtgggtgcagccaatggagggtgagccaaagcagggtggggcgtcatctcacccaggaagcacaaggggttagggaactccctcccctaggcaagggaagtcatgagggactgtgccataaggaacggtgcactccagccagatactacacttttcccatggtctttgccacccacagaccaggagattcccttgggtgcctactccaccagggccctgggtttcaagcacaaaactgggcagccatttgggcagacactgagctagctgcaggagttttttttcataccccagtggcacctgggatgccagcaag

SEQ ID NO: 760524 - DNA, 643 bp, Homo sapiens
gtattcttccagcttccaccaaccaattccaaagtcacttccacatatttagttatttgttacagcagcatccaatttcagctcccccaatctatactagttttctatttttgccctaataaagcaccacaaatttattggcttagacaacaagcatttgtacttttatagttctctgagttagaagttcaacatggggtggctggcgggatggccgaataggaacagctccggtctgcagctccaagtgagattaacgcagaaggcaggtgatatctgcatttccaacggaggtacccggctcatctcactgggactggttagacagtgggtgcagccaatggagggtgagccaaagcagggtggggcrtcatctcacccaggaagcacaaggggttagggaactccctcccctaggcaagggaagtcatgagggactgtgccataaggaacggtgcactccagccagatactacacttttcccatggtctttgccacccacagaccaggagattcccttgggtgcctactccaccagggccctgggtttcaagcacaaaactgggcagccatttgggcagacactgagctagctgcaggagttttttttcataccccagtggcacctgggatgccagcaag

SEQ ID NO: 760525 - DNA, 555 bp, Homo sapiens
gaaaaaagaacaggataatagcaattgttcagggaataagagagataaccttaaactctgaccgccggtgagccgggtggaacagagccatatttctcttctttcaaaggcaaatgggagaaatatcactgaattctttttctcagcatggaacatccctgggaaagagaatacrcgcctgggggtgggtctctaaactggctcccttgggcgtggccgtcttttatggtggaggttgtaggggtgaaatagaccccagtctcccatagcgctcccaggcttattaggaagaggaaattcccgcctaataattttggtcagactggttgctctcaaaatcctgtttcctgataagatgttatcaatgacaatggtgcccgaaacttcattagcaattttaatttcgccctggtcctgtggtcctgtaatctcaccctgcctccacttgccttgtgatattctattaccttgtaaagtacttgatgtctgtgacccacatctattcgcacactccctccccttttgaaaatccctaataaaaacttgctggttttg

SEQ ID NO: 760526 - DNA, 530 bp, Homo sapiens
ttttccagatttccttgcacttggtgtggccatgtgattaaattctagtcaatgtaatatgaggggaattgatgtgtacaacttccaattagagtctttgaaaggaatggacctgacttcctcttatcttgacccattcttgataactgaggtatggacccagaaggaatgaygattttcaactatgtgaatgagatcaacaactgggggatgatgggtaacaagactgaagaaagtcagggtcccaatatcatcaggttgcttccagccatactacttctgagctgcctacttagactttttttgagagaaacgttttctatcttattcagctactgtatctttggatgtctttgctacaacaaactaatctttaccctagctaatacatgttatgcttaattaaccctattatcgctaagataacgtcaaaatttcacatcttggagtaagagaacatcttgctctacaccctattttatcactctagcttctcctcattctcttactcctactctttcattctgaat

SEQ ID NO: 760527 - DNA, 604 bp, Homo sapiens
acctttcaatgtcccacccatttcttgccccacccattcctatctcctctacttccagaattttctgccccgcaaccccccaccacgccccaacccgggaacttcccaggcttcttcccaaagcatttctgagaggaggtgttactgattttggacaattctaaggcttcaatccccttttcctatgcaactcccccacccaacagaatccatgactccctgctaatcttaggacctatgaagcaggcaaagtctattttgtagattctaagagctggataattttttaaggtgtagagaagcatcttttgctagaggktcttctttgtgtcttttatggtcatcttcattccaaagctgtgctactgagtccacattcctttgagggcagattggctttccaaatagattggtatcatgtgaactgtttttttctcagtgaataatggcaatacacatgtgtctcaagcaggtacttagtttgcaaagaaaaataaattcatttatactttaccatcatcttcagctataaagtgtattgtcaataaatttcattgccacggagttgatgcagttgtcttccattggttcagcagccatcttt

SEQ ID NO: 760528 - DNA, 621 bp, Homo sapiens
catttggtattgtctataatagttgaagtttcaggcagacctgctgaagagtagaaggactgggccatctttcaataatctgggagactgtgaaagcagtctagttaacagtcacctgcagcatagcacttagcagacaaagcctctgggtgcctccttgggggtagcagaaaaagcccaactggggatgatggagtatatgtgtctttaaaaataggggttttgaagtgaawaaaataattgttgtggctgggcacggtggctcacgcttgtaatccctgcactttgagaggccgagggaggtggatcatgaggtcaggagttcaagatggacctggccaagatggtgaaaccctgtctctactaaaaatacaaaaattagctgggtgtggtggtgggcacctggaatcccagctacttgggaggctgagacagggagaattgcttgaacccaggaggtggaggttgcagtgagccgagatcatgccactgcactccagcctgggcgacagagcaagactccatctcaaataaataaattaattaaataaaaaaaattgttatacaagattgagtaagactgtgaacaaataccacttacaaagccacataaggctctca

SEQ ID NO: 760529 - DNA, 553 bp, Homo sapiens
attcataccactcctccctgaggtgtgttgactctaatccttggtccagtttgcctgaaacaaatcaaactgtggggaaacacttcagcacttaatcaactccacaactggaaacacttttcttgcactcacatctaattaacagtactaataaaactaatgtgattatactgatactttggcccaaatacagaaaagtgtcaccaaattaagcaaagcagaarcttcccagtacctgtccatctctcatctcaatgactgccaataaaaaaatcatgagcctcacactccccagtcatgatgctctcctgcaatgaatttgcataatgaatagtaaaattgaaataaacactaattatgtactgaatgggatgtggagaggtgattcaagtaatttgactaactaatcaacaggagattatttctcagctatgtctgtacataccagaaattgactacctgataaaaatgcaaatcaagtggtccaatggtcaggacagtggcccagacagacatagacatcagggcagcatggttctgttattgtttgata

SEQ ID NO: 760530 - DNA, 602 bp, Homo sapiens
aaaaaccaaaccttagctcaggatagagaaagcatttataaaatccagagttgcttgaaatcaagatatgatgactcactgaccagggaatttaccctccttggaggtgcttcaagagaggctgcctgacctctctcaccacacttgcataggatgggaatttccagttgtgttggagtttttattggatgatctcaagttcttccaacaattcaacatacatactcaagactgctakgaaatatttagtatagtgctcacttaggctgaatacgtactaaagttggaacaatacggagaagactagcatgaccaccatacaaggatgacacacaaattttttaagtgtcagtatatatgtatataaaatacaataaaattataaaataaattgtttagtataacaaaagcatcattttctgaaacccatgaaatcctgatttcatgagatgtttcattaaaaatacagtctacctataagatactttggggatactctacctgctatagttcgtctagagtatgatgatacacattgttagattggaaagtctgaattctaacaataaagacacctgaaaaatatgtttggcccaattttt

SEQ ID NO: 760531 - DNA, 631 bp, Homo sapiens
cctttatctaaaaagcaattcgaaacagtgttgcccttatctatggacctgcaaatagcactctctgattatacaggccatatagagcatgccattcctgctaaaaaacttcttcagtttttacctcgtacctctgtggttttgcctacaaaaatagtccaatcccccatacctaatgttttaacactgtttactgatgactctggtaaaaatggaaaagcagctgtttggtggagattgcataattccctcactcgttctggatttattagaactcagagagctgaggtgggagccttaatattggccttggaaaactatttccactcagctcatcaatattgttagtgactctgcttactctgtttatttattgcagaacccagagacagccctcattaactccactctggagcccaccctgcgtgtactttttctttgatttcagcaattgctagatcaacgtacacatcctatttttaytacacacatttgggcccacatctcactgcctggcccattggtttatgtcgatgatcaagcaaacctacaagttatgacatcagtgcttggtcaagccacccagtcacatcaatttttccaccaaaactggagaaacttacctaacaat

SEQ ID NO: 760532 - DNA, 669 bp, Homo sapiens
agcttcatacagagcgtattttcatattgtagtaactattgccattgagaacaaatcaggataagctttgtgttattaccaactaccattgacccttaaataatgcaagagttagaggcaccaactcccacacaaaratctgcatatagcatttgactcccccacagcttaactattaataccctactattgacttaccaagaacataaacagttgattatcatatattttgtatggcgtatgtattatatatggcattcttacaatgaaataaactagagaaaaaatgttaagaaaaccaaaaggaaaataaaacatagttggtatttattaagtggaagaggatcatctcataaagactcatccccagccaggcgcggtggctcatgcctgtaatcccagcactttgggaggctggaacgggcagaccaattgaggtcaggagttcgagactagcctggccaatatgttgaaaccccttctctactaaaacacaaaaagccaggcttggtttgcaggcgcctgtagtcccagttactagggatgcagaggcaggagaatcgcttgaacccgggaggtggatattgcagtgagccgagatcccgtcactgcgctccagcctgggcagcaacaaagtgaggctcccactcagagagagagagaaaaaaa

SEQ ID NO: 760533 - DNA, 669 bp, Homo sapiens
agcttcatacagagcgtattttcatattgtagtaactattgccattgagaacaaatcaggataagctttgtgttattaccaactaccattgacccttaaataatgcaagagttagaggcaccaactcccacacaaaaatctgcatatagcatttgactcccccacagcttaactattaataccctactattgacttaccaagaacataaacagttgattatcatatattttgtatggcgtatgtattatatatggcattcttacaatgaaataaactagagaaaaaatgttaagaaaaccaaaaggaaaataaaacatagttggtatttattaagtggaagaggatcatctcataaagactcatccccagccaggcgcggtggctcatgcctgtaatcccagcactttgggaggctggaacgggcagaccaattgaggtcaggagttcgagactagcctggccaatatgttgaaaccccttctctactaaaacacaaaaagccaggcttggtttgcaggcgcctgtagtcccagttactagggatgcagaggcaggagaatcgcttgaacccgggaggtggatattgcagtgagccgagatcccgtcactgcrctccagcctgggcagcaacaaagtgaggctcccactcagagagagagagaaaaaaa

SEQ ID NO: 760534 - DNA, 548 bp, Homo sapiens
taacggatacctcaccaaggaagatgtcagtggcaggtaagcaggtgaaaagatgttcaacaataggtatcattagaaaaatgcaaattaagataatcataaaataccactctgtatgtattagaatagcccaaatctagaactctgacaacatcaaatgctggagaggatgtggaacaaggggaactatcattcattgtgggagtacaaactggtatagccacttagggagactggccatttcttacaaacatgcactcattatatgatgccacaatcacgaycctttgtatttacccaaatgacttgaaaacttatttccacacaaaaacctccatctggcagtttatagcaacttttttcattaatgccataacttggaagcaaccaacatgaccctcagtaggcgaagagataaataacctggtacatccagaccatgaaatattattcatcagtaaaaagaaatgagttaccaagtcatgaaaagacatgaaggaaacttaggtacatattactaagtgaaaaagccaatctaagaaagctac

SEQ ID NO: 760535 - DNA, 626 bp, Homo sapiens
tcagccacaggatacgagataaacactcaaaaatcagttgttagttttacacacaagcaatgaccaatctgaaagaaaattaagaaaaaaaaattcatttaattgccttaaaaagtgaagcatcccagcactttgagaggccgagacgggcggatcacgaggtcaggagatggagaccatcctggctaacatggtgaaaccccgtctctactaaaaaatacaaaaaattagccgggcgtggtggcgggcgccgtagtcccagctactcgggaggctgaggcaggagaatggcgtggacccgggaggcagagcttgcagtgagccgagatcacgccactgcactccagcctgggcgatagagcaagactccatctcaaaaaaaaaaaaaaaaaaaaaaggtaaaagtaaagcataaaatgcwgacaaaaacatttatccaaagagagtaataatcatacactaaaaattttatgacaattcttacataaatagagtgatagctcatgttcaggaacagaaagatttaatgttaagatgtcaataacactcaaagttatctacagattcaatgcaacctctaccaagattagaataacctttttttttttgcagaaagtaaaagcaag

SEQ ID NO: 760536 - DNA, 626 bp, Homo sapiens
tcagccacaggatacgagataaacactcaaaaatcagttgttagttttacacacaagcaatgaccaatctgaaagaaaattaagaaaaaaaaattcatttaattgccttaaaaagtgaagcatcccagcactttgagaggccgagacgggcggatcacgaggtcaggagatggagaccatcctggctaacatggtgaaaccccgtctctactaaaaaatacaaaaaattagccgggcgtggtggcgggcgccgtagtcccagctactcgggaggctgaggcaggagaatggcgtggacccgggaggcagagcttgcagtgagccgagatcacgccactgcactccagcctgggcgatagagcaagactccatctcaaaaaaaaaaaaaaaaaaaaaaggtaaaagtaaagcataaaatgcagacaaaaacatttatccaaagagagtaataatyatacactaaaaattttatgacaattcttacataaatagagtgatagctcatgttcaggaacagaaagatttaatgttaagatgtcaataacactcaaagttatctacagattcaatgcaacctctaccaagattagaataacctttttttttttgcagaaagtaaaagcaag

SEQ ID NO: 760537 - DNA, 626 bp, Homo sapiens
tcagccacaggatacgagataaacactcaaaaatcagttgttagttttacacacaagcaatgaccaatctgaaagaaaattaagaaaaaaaaattcatttaattgccttaaaaagtgaagcatcccagcactttgagaggccgagacgggcggatcacgaggtcaggagatggagaccatcctggctaacatggtgaaaccccgtctctactaaaaaatacaaaaaattagccgggcgtggtggcgggcgccgtagtcccagctactcgggaggctgaggcaggagaatggcgtggacccgggaggcagagcttgcagtgagccgagatcacgccactgcactccagcctgggcgatagagcaagactccatctcaaaaaaaaaaaaaaaaaaaaaaggtaaaagtaaagcataaaatgcagacaaaaacatttatccaaagagagtaataatcatacactaaaaattttatgacarttcttacataaatagagtgatagctcatgttcaggaacagaaagatttaatgttaagatgtcaataacactcaaagttatctacagattcaatgcaacctctaccaagattagaataacctttttttttttgcagaaagtaaaagcaag

SEQ ID NO: 760538 - DNA, 634 bp, Homo sapiens
atcttgctggtaggaaagcaaaataatggtgcagccactttaaaaacagtttggtggcttttttttcttttctttcttttttttagaaagagtctcactcctgtcatccaggctggagtggaatggcaaaaaaatagctcactgcagctttgacttcctaggctcaggtcatcctcctacctcagcctctggagtagctggaactacaggcacatgccgccacgcgtggtcaatttttatattatattgttagtagagaggatgtttcattatgttgcccaggctggtcttgaacccctgggctcatgcaatttgccttcttcggtatcccaaaatgctgggattacaggtgtgagccacccggcctgaacctggtggtttcttaataagttaaacatagaattaacacgtaagttcaaaatttctcttctagaaatatgtccaakagaactgaaagcaggcattaaaacaaacgttagtacatggagatttataagaccactattaacaatagtgaaaaagtagaaacaactcaaatgtccatgaacagatgaataaacatatttaatatgtctataaaatggaatttttctttttttcaactttattttagattcagaatgaatgtgtcagg

SEQ ID NO: 760539 - DNA, 666 bp, Homo sapiens
  misc_feature 643, 644, 645, 646, 647, 648, 649, 650, 651, 652, 653, 654,655, 656, 657, 658, 659, 660, 661, 662, 663, 664, 665, 666: n = A,T,C or G
gctgccttttgttcggctatgccctgcccccagaggtggagtctacagaggcaagctggcctccttgagctgtggtgggctccacccagttcgaacttcctggccgctttgtttacctactcaagcctcagcaatgacgggcgcccctcccccagccttgctgccgccttgcagtttgatctcagaccgttgtgctaggaatgagcgaggttctgtgggcatgggaccctccaagccaggcacgggatataatctcctggtatgccgtttgctaagaccrttggaaaagtgcattattagggtgggagtgacccgattttccaggtgccatctgtcacagcttcccttggctatgaaagggaattccctgaccccttgtgcttcctgggtgaggtgatgccttgccctgtttcggctcacactcggtgggctgcacccactgtcctgcacccgctgtccgacaagccccagtgagatgaacccggtacctcagttggaaatgcagaaatcacccatcttctgcatcgcttacaccgggagctgtagactggagatgttcctattcggccatcttggaactgtcctctttatagcaatgaatttttctaggcatcaaaatggagcattacatggagaatgcctnnnnnnnnnnnnnnnnnnnnnnnn

SEQ ID NO: 760540 - DNA, 601 bp, Homo sapiens
tatcatttagaaatttagaaaataaaatccatagattgggagaaaagatttgttatttatatttttttgttttttgttttttgttttttgttttgagatggagtctcactatgtcacccaggctggagtgcagtagcatgatctcagctcactgcaaccactgcctcctgggttcaagcaatacccctgcctcagcctcccaagtagttaagattacaggcatgagcgactgcacccggctaattttttgtatttttagtagagacggggtttcaccatgttggtcaggctgatctcgaactcctgacctcaaatgatcctcctgtcttggcctcccaaagttctaggattacaggcrtaagccaccacacctggccatttgtgatatatgtttctaactcaggattttatttagaatataagaacaactcttccacacaaattattaaaggaaagaatccatatgaattatcaaatcactttaatagacatgtcactaaaaaagatgcactatgcttaattagttattagatttgctctttatcattagtcattttggaaattcaaattaaaactactacaatgagctgctgctatatgc

SEQ ID NO: 760541 - DNA, 597 bp, Homo sapiens
gctgtatttgtttctattttagcgataataatggtacatgtatgagaaaataaaaccttgtaatacaccaaaggtgcatgctgagttatagctctatcttttcaaatgtgtagctcagtgaagaaagaatccatgttatatatttactcctagacttgttctcagcagcaaagtctatgtctggtgttagaaagagaattgcacataaacattattaagtatttgcagcaaaagacatttcttagtttctcctttcctgtaatgtctttctctacctttctattttatcaaaactaaactatcagtatctttcctaacacattyttagataataaagaaaattgctacttttcatgtcctagcagtttttacttttcttagtttcatttttagggacataggagaagtttattgtctagctgtccactttcattgttgttgatgttaaaattattttctgttttttatatttcttgaatgcctgcaaattactgagcgttacagagaatccacgcaaggctcaattgctgttgtctgagaattacctttgttaggaaggcagtgaattaacaccatggtgtctgacccaagttatga

SEQ ID NO: 760542 - DNA, 611 bp, Homo sapiens
ttatgtgatatcaattatcctagcagcttctctgcaatgagcagcctggtgtctgttccttgacaatatgttgagtggtatttgccagaaagaagctttatcagaaaaaaaaaggcaagggatgtgctaattcaccagttaccataatccacattcccataatgtacctcaargacattgtcccatatttttatctagaaacctttggcacatgtatcaactctgggtcaatgtacctgctccacggacatccctgcatcaacttggattgcacaaaggtacaattagcctacaggctgcatgtattctaattttgaattatgaatctcaaatggagcttattttgccagatttgactctgtgctcagattctggcttgacagtttctaggaacctgcatggtttccattacagcgaatgaatattatatgagatttgaggaatttctgcgtataatctggacaaaattgaggtttcagacctccatatgggtgagccttttggtgagccaggttctactgaagcaagggtatcttctattcgagccttcaaatttaggatttagggtcataacttaatgcttgtcactgaactaaaggcattgtctctga

SEQ ID NO: 760543 - DNA, 614 bp, Homo sapiens
ctaatgagccattcatatgtgtgggatttgtttctgattcgattaagcttcagagagaggaaagaaacagccactgattagagacataaaaaaagaaatactttaagtgagtaagtggttcatcttcatataggaaagtataaattaaacatggtccaggagatgtgctttgaatagcagctggatagcacaagcatgtccacaaggagacggtgcctcacagcaattgaaagggacttaacccccaaaaagggctctgaatatgctgagtaaatagrtgagcccagttagctgataaaaatgactctcagattagagatgggaaggtttttatttggattttagaaaattgctccccactccatcgccgccatattgtctgtgtgagcagaagggagagcggccacagccgctgccgcttccaccacagtgtgaagaaaacaggtctgaaacaaggtcttacccccaagctgcttctgaacacagtgactgccagatctccaaacatcaagtccagctttgtccgccaacctgtctgacatgtcgggacccgtgccaagcagggccagagtttacacagatgttaatacacacagacctcgagaatactggga

SEQ ID NO: 760544 - DNA, 614 bp, Homo sapiens
ctaatgagccattcatatgtgtgggatttgtttctgattcgattaagcttcagagagaggaaagaaacagccactgattagagacataaaaaaagaaatactttaagtgagtaagtggttcatcttcatataggaaagtataaattaaacatggtccaggagatgtgctttgaatagcagctggatagcacaagcatgtccacaaggagacggtgcctcacagcaattgaaagggacttaacccccaaaaagggctctgaatatgctgagtaaatagatgagcccagttagctgataaaaatgactctcagattagagatgggaaggtttttatttggattttagaaaattgctccccactccatcgccgccatattgtctgtgtgagcagargggagagcggccacagccgctgccgcttccaccacagtgtgaagaaaacaggtctgaaacaaggtcttacccccaagctgcttctgaacacagtgactgccagatctccaaacatcaagtccagctttgtccgccaacctgtctgacatgtcgggacccgtgccaagcagggccagagtttacacagatgttaatacacacagacctcgagaatactggga

SEQ ID NO: 760545 - DNA, 601 bp, Homo sapiens
atacccaaagttatctttaaaacactcacaacaaccatgccatcgccctgcttaaaatctttaaatgaggccaggcgcagtggctcatgcctgtaatgccagcactttgggaggctgaggtgggtgaatcacttggggtcaggagttcaagaacagcctggccaacatggtgaaaccccatctctactaaaaatacaaaamttagccaggcttggtggcacatgcctgtaatcccagctactcaggaggctgaggcaagagaatcattttaacctgggaggcggaggtcccagtgagctgagatcgtgccactgcactcactccagcctgggtgacagagcgagactgtctcaaaaaaaaaaaaaaaaaaaaaatctttaaatgactcctgctatgtacaaaatcaagcacaaagcccagtgtttggcatggcatcaaaagttcccatgctttctcctctgcctgtattttaaccccactgcctgtattttaatcccactgcctaccactccctgttttgaagtctgcatacgttgcgtggactatgggaactgcccattacataccgtccatgccatgctgtttctcacacctcggtgct

SEQ ID NO: 760546 - DNA, 601 bp, Homo sapiens
atacccaaagttatctttaaaacactcacaacaaccatgccatcgccctgcttaaaatctttaaatgaggccaggcgcagtggctcatgcctgtaatgccagcactttgggaggctgaggtgggtgaatcacttggggtcaggagttcaagaacagcctggccaacatggtgaaaccccatctctactaaaaatacaaaaattagccaggcttggtggcacatgcctgtaatcccagctactcaggaggctgaggcaagagaatcattttaamctgggaggcggaggtcccagtgagctgagatcgtgccactgcactcactccagcctgggtgacagagcgagactgtctcaaaaaaaaaaaaaaaaaaaaaatctttaaatgactcctgctatgtacaaaatcaagcacaaagcccagtgtttggcatggcatcaaaagttcccatgctttctcctctgcctgtattttaaccccactgcctgtattttaatcccactgcctaccactccctgttttgaagtctgcatacgttgcgtggactatgggaactgcccattacataccgtccatgccatgctgtttctcacacctcggtgct

SEQ ID NO: 760547 - DNA, 524 bp, Homo sapiens
gtgagacagtaattttctgtcgtttaagtctcgcagcttgtggtactttgttacggaagccctgggaaacttctgcaggggaaaaggtcagatggtcaggctgtgacccataagagtcactgagtcactagtggcctggagtgtccctcgaccttcaacaaactttgtgaaaagagtaagaaaaatacctgaaacctagaaataaggcaaaaacaaagaggggaagtggcctgtccttttaatattatcctgggacattaacgggcccatcmaagagtatgtaattttccaagagaatgtactcatgtttgactttgctatttaccttttgattctctctcagacactatgaagttgtatgctaactcctagatttctgtctgtgtagaaaagatcacatgaaaggctataattttatttccccataggacatgaaccacttttgcatttaatctctccattttattttgacgtttttctttagaaaatgcctacagatactcagttcctcaaatgcactcagt

SEQ ID NO: 760548 - DNA, 524 bp, Homo sapiens
gtgagacagtaattttctgtcgtttaagtctcgcagcttgtggtactttgttacggaagccctgggaaacttctgcaggggaaaaggtcagatggtcaggctgtgacccataagagtcactgagtcactagtggcctggagtgtccctcgaccttcaacaaactttgtgaaaagagtaagaaaaatacctgaaacctagaaataaggcaaaaacaaagaggggaagtggcctgtccttttaatattatcctgggacattaacgggcccatcaaagagtatgtaattttccaagagaatgtactcatgyttgactttgctatttaccttttgattctctctcagacactatgaagttgtatgctaactcctagatttctgtctgtgtagaaaagatcacatgaaaggctataattttatttccccataggacatgaaccacttttgcatttaatctctccattttattttgacgtttttctttagaaaatgcctacagatactcagttcctcaaatgcactcagt

SEQ ID NO: 760549 - DNA, 611 bp, Homo sapiens
ttgtatggcattttaaccctctgggtccctggtgttcaactttgcctttattgtactgcaatggcaactgggaaccatcccttcctttcaacatgactgaaatagtacataaatgttgaaccatttctgcaagcgactttggagatggacagggggctggaaatatcagcrttttgtgatacttaccagctttcagttcatttagtataaaaagttagccctatggagacagaatatttcaacctttaactgtaatttgatagttgtcaccagataccaaggtggaaaaccagaaaaggtacaataaacagctgagctgagtcattacaacagactcttatcttgtagaaactgcagacattatgatgattatcctcctacctaccaaaggagggttgtctacaacagccctggcagccactaacccaggctatatgcttagcccatagtaggtgcttggaaaatatggctattattttaaaattcaatgacatacaattgctctcacagatatatttttattaagatgatgatataagttacacagttcacaaggagaaaatcacaatagggagatacactgtgggggaatgtttatcctcatgtagctg

SEQ ID NO: 760550 - DNA, 621 bp, Homo sapiens
gagtcctgaaccttaaaagccgagaccacacaagggagtcattcatgagtctaggaagatggcagcaaaggcaggaaagaacttgggacctttgaaatgcagtatgaagtcacttttgtctgagtcttacagaataacactcaaatatcatcaaggtatacactgtcctgtggggtccgatcttgcctctcagcccctccacccctactgccgggggctgctggctcacttcccacttctagtgactttgaaccttctctgtgttcatgaactttgcatatgggtgtccattccccaacctrgccatcttctactcgccttcaaaaacaagtgaaaatgctgccctctgaaaagcatttccccgctttcaatgcagtttctgcctgcatggtagaataatgttcctattccaatgattttgtctgtcttcactagactccaggcttttggcagtgggaaccaaatcttcatcactccggatccccaacctggagcacagtggttggcgcccagcagacgtctcacagtgatgtgtgaaaatgggtcactttgaggctgtgaatggattctgagatcttcagagcctgtggcagtgactgaagatcagactgcagttccttt

SEQ ID NO: 760551 - DNA, 621 bp, Homo sapiens
gagtcctgaaccttaaaagccgagaccacacaagggagtcattcatgagtctaggaagatggcagcaaaggcaggaaagaacttgggacctttgaaatgcagtatgaagtcacttttgtctgagtcttacagaataacactcaaatatcatcaaggtatacactgtcctgtggggtccgatcttgcctctcagcccctccacccctactgccgggggctgctggctcacttcccacttctagtgactttgaaccttctctgtgttcatgaactttgcatatgggtgtccattccccaacctagccatcttctactcgccttcaaaaacaagtgaaaatgctgccctctgaaaagcatttccccrctttcaatgcagtttctgcctgcatggtagaataatgttcctattccaatgattttgtctgtcttcactagactccaggcttttggcagtgggaaccaaatcttcatcactccggatccccaacctggagcacagtggttggcgcccagcagacgtctcacagtgatgtgtgaaaatgggtcactttgaggctgtgaatggattctgagatcttcagagcctgtggcagtgactgaagatcagactgcagttccttt

SEQ ID NO: 760552 - DNA, 621 bp, Homo sapiens
gagtcctgaaccttaaaagccgagaccacacaagggagtcattcatgagtctaggaagatggcagcaaaggcaggaaagaacttgggacctttgaaatgcagtatgaagtcacttttgtctgagtcttacagaataacactcaaatatcatcaaggtatacactgtcctgtggggtccgatcttgcctctcagcccctccacccctactgccgggggctgctggctcacttcccacttctagtgactttgaaccttctctgtgttcatgaactttgcatatgggtgtccattccccaacctagccatcttctactcgccttcaaaaacaagtgaaaatgctgccctctgaaaagcatttccccgctttcaatgcastttctgcctgcatggtagaataatgttcctattccaatgattttgtctgtcttcactagactccaggcttttggcagtgggaaccaaatcttcatcactccggatccccaacctggagcacagtggttggcgcccagcagacgtctcacagtgatgtgtgaaaatgggtcactttgaggctgtgaatggattctgagatcttcagagcctgtggcagtgactgaagatcagactgcagttccttt

SEQ ID NO: 760553 - DNA, 594 bp, Homo sapiens
ttaataagcagttgcctagtaaacatttatttagtacctactatgtgcttgctaagtatatttgcactggctaaaattcgttttcttagaagtgctgcaatttgatacagtgattgagtatattttagtacctaatctgattcaatatattgttttgaaaatgcaagatggaaaaatmtttgcttatgcccgttgctcatactttaaggttagtaattgaagtcacatatcattaaaaaaaaaatcctctctttaaatttccaagggggtatgtgataaatggagtatgggttacagaaacaaattgagtttgaatccaaatttagacaagttgcttgatttccaaagtccttgtttcctcagctgtaaaactgaaatgaaagtaactatattagtcatagtattgctgtatatattcagtgagacaattgaagtgtaaactttccagcataaagttatggcccaaataaaagtcacgtgaaaagaaacagatgaacacagaaaatgaatattcattaactcttcaacttttcttcccaggaaagcattttttaaaaatttcctaacctcgctcaggaatatacatgatagtaa

SEQ ID NO: 760554 - DNA, 482 bp, Homo sapiens
cagacacgtatatatgtcacaattgtgagagttcttatttctttcatatggatctaattaaatttacttcaattatctgtgatcaaaaatagagtataatactcttgctttctatacagcatagtcattgataagcagttgctaatgaggaaaatcgatttactgaactgacatcctatagtgtagaaaaatcaggtgttctgtatcacactcacatgtgaaaaattaaattaaaaaactaataaatgattccaccgtgacattgaaagtagaatcatatcacaagtgggtatcatmttttttatactgaaactaaccagatactcacgctactattgaacattagaactgaaaagtagtagaaacataaaaggctttagaagttatgaagttcaacctatctcagtgggactcatgagctattaattacatggaattttttaagttgaagttgttgttactaaaattcagttattaacttt

SEQ ID NO: 760555 - DNA, 589 bp, Homo sapiens
tgaaatctttacctaggatatgtcagccagtattctagacatctggtatacatcatagaacaaaacagtcctgcccccatgaagtttcattctagcttacccctagtatatgccaggctctgaactaagtctaaaayagatgatccctgcccttccagctccctgcaaagccagcattaataataggagggctttttacagaaaatgaaactgtgacttgtttaagttacaacctgtgagtgttgaagtcagagtaccagtctttcctgtataccttaccacctatttgaaaaatgatggatagttatcttaaacggtgaagaattagtgtaagttcttaaacaaaatagtggcgatattaagatcatgcttgagaaacctaattcttgctgtctccttacatattttaagtttggcctaactctgtctctgtgcatagtgagctgtaatgtaactggatgtgtaaacagattgtagcctactcttgtgccaatctccaagttttggccaatcaaaggtggccaaccattcaaaccatgttcaagtaaggcaaacatcaagctgtaaccaacccaactatttttgtacc

SEQ ID NO: 760556 - DNA, 620 bp, Homo sapiens
ataaaagctttgaaatctttagcttttgctgttccattcactggtactttgatgaaagatttctagatgattttaaaacaatattcagccaaaaatgaaaagactgtcatgaaaacttcagtactattttaagacactcagaagaattttaaaagcacagaagattaaacactcatgaacgtttctaaaatccaaccgaagaaaggcagcagagagaaaaagtgaatcctgatattckgagttttttttgtagtcaacattaccttcctaacaaaatttcacagttcagatgatccaattgtatatgtacctatttcaaaaatttgaaacttacagcttttattttaattgagagactatcaacatttatttggatgtaagtatgaattatatgtacataaaaactatttccaagtaaatttcgtatctttaaatttcagagtgttaggtttcttcatgatgcagtactccaccaaaaactgtgttaatattagacaaatgctagaaatgtaggctaaatattaactgaatttaaaatagtatgaataatacattcaacagaattaatttcaaaaagctttagtttcttcctcggaattggatgagaaaacgaaaccatt

SEQ ID NO: 760557 - DNA, 606 bp, Homo sapiens
gtatagtgctaaaataattctactcataaaattagcttgtttatcttttgctcagtgaacagtttctacaaatggaatcaccagaccttagcaaaggtgaacctcaagtcttaaaattgagacacaactataggattataaagcctgttgaaggttccgttgacttactatctatctgtgattaacagagagygattcctaactcatttttaaatccataattaacctaactgttaagaccaaagctaacttgtaatctaatgtacttcttcacttttaaaagaatgtaacttctaacaaaaattgaggccaggagcggtggctcaggcctgtaatcccagcactttggaatgcagaggcgggcggatcatggggtcaggagatggagaccatcctgatgaacatagtgaaaccccgtctctactaaaaatacaaaaattagctgggcatggtgttgcttgcctgtaatcccagctactcaggaggctgaggcaggagaatcgcttgaacccaggaggcggaggttgcagtgagccaagattgcaccactgccctccagcctggtgacagagtgagactccatccacaaaaaaaaaaaaaaacctg

SEQ ID NO: 760558 - DNA, 667 bp, Homo sapiens
taaagctatatgttaagatagcatagacttgtctctttctgtttttccccattaagtacaaccctaaatccagaaaataatgcaagagacaccaaaggagaattttcaaaggtggaaaggagagcacagtctgggtagggatcccagcacgagaaraacagcaccacagaagagtgtcctataaccagcctcagaaatacctgaggctgggtaatttataagaaaataggtttcattggctcaaggctctgcaggctttacaggaagcatagtggcatctgtttctgaggaggcctcaggaagcttccattcatggcagaaggcaaaggggtagcaggtacatcatatggtgagaactggagcaagtaagagagagagttcacggggagatgctacacacttttaaatcaccaaattccacgtgaatttagagcgagagctcacttatcaccaaggggatggcccaggctagtcatgagggatctgccccattttccaaacacctttgaccaggccccaccttccactttagggattacatttcaacatgaaatttgggcaattgtccaaatgatatcagaaggtgatccaggcgggacatttcacaaccaccgacatagcaacacaaggtggttgagataggcctgtttcttaccctactgaatac

SEQ ID NO: 760559 - DNA, 691 bp, Homo sapiens
gagagcacagtctgggtagggatcccagcacgagaaaaacagcaccacagaagagtgtcctataaccagcctcagaaatacctgaggctgggtaatttataagaaaataggtttcattggctcaaggctctgcaggctttacaggaagcatagtggcatctgtttctgaggaggcctcaggaagcttccattcatggcagaaggcaaaggggtagcaggtacatcatatggtgagaactggagcaagtaagagagagagttcacggggagatgctacacacttttaaatcaccaaattccacgtgaatttagagcgagagctcacttatcaccaaggggatggcccaggctagtcatgagggatctgccccattttccaaacacctttgaccaggccccaccttccactttagggattacatttcaacatgaaatttgggcaattgtccaaatgatatcagaaggtgatccaggcgggacatttcacaaccaccgacatagcaacacaaggtggttgagataggcctgtttcttaccctactgaatacaagttctgccaactacaccaggtgaatctagmagaactggcaaggagactgaatgggaagctccactgacaataagcagccattgggaagcacacttcttcctcttggacctgacacctcttccccaaaccagaggaactctg

SEQ ID NO: 760560 - DNA, 522 bp, Homo sapiens
gattcaattatctattgagttatgcaatgactattactgactgtgtgctaaggagagtgaaaagctctgatgtcatagttatgtatgaaacatgccctctctgccctaaaagggttcaaggagtgggaaggagacctatacaaattgctaaaataataaaaaaatacaatggaggtatgaaacaaggtcactggtagcgcttatgtgtgcttacagattcagagcagtcttcacataggtggtaatgcttrtttcctcatgtagaagggtacaactcttctagctgacaggaatgaaaagcattgcgaacagaaagattagactttccaaaggtctaaggaacctgtaagtagttctgtataattacaggggagttatgtaggttttatgtcagaaaaaaaaaaaaagataggccacatgaaaagttcaaaatttttcctaaaagtaatgggtagctaaaatctagttctgagctgggaagtaatataaatatatatttttgcagaaacactcagacaaagt

SEQ ID NO: 760561 - DNA, 657 bp, Homo sapiens
tcactttgttcatttatgagagctatacgttcacttacatagagcacagtatttctctttgttgctcactatcaacttgaaaccgttgtgatttgcaaagaagtctttatgtatcattgcccagggaatgttttgaatgaatttttttttgttttcttcaaagacatatgtaaagcggtttggtgcttttaggaaattttattagtagatgttcaattttcattaagacacgatacacatgatggggcagaaggccacgtgccagctgcagagagagcaagcccttctctgtttcaggtgaaagctcgtgcttttgtttccatgagacttcaaggggaggttctgtggcagtatttatttggcttatggtaacctmtcagatgtattgcatctgctctgtagtaaaggatgtgggctcccttttggtgacttgctgcctgactcagacaacaggcatgtttgtattcctcagctttgatcttttctgcctggtatctaaatgaagcctttcttgtgccttcaaagctaaatggcttgtttggtttccagttactaaacagctctgctcctgctactactggggttcccctatccttgattctattctaacaccttcagttggagagctgcagggatccaagccaaagtataactaac

SEQ ID NO: 760562 - DNA, 622 bp, Homo sapiens
ctaaacccagctcataacattttttttttcctatttctttccagttggatgttttgggtgagattaaagcaattctagcaaatgtcaggggctcaactgcccagtgcattagaataaaatttcattttctccttagagttttaggggcagtgattctaaggctttaggggggaaacattgatgaaatctaaagaaccagcaaagagaaggtggggcaaacaattatcttctcatcttgcctgctgctgctgattgcattatcatttatcgcagtgcctgctctcacctaggaaaagcatcttgcaatatcgggttgaataaatatcccaaccatcggtgcgggaatacaagcccaaatcagccaaatcttcagtgcatttgcatctaatccctttataatcctttctatggaatrcagtaaaagctgagcaagacattccagccttccctgggtgcacaggacacacacacccttgctcaaactccataatgtaattatccaaggtgcctcctttgagggtttggggccccagcactcatgctaatgacgtagttcctgtccaagatgattttgtgcacttgcatgcgcatgcacacacagacacacacacccacacacaca

SEQ ID NO: 760563 - DNA, 497 bp, Homo sapiens
aaacggaaggcttggacagtcagtggccacgtgggggcagcatcgagccagaatgacagagggcacttcgtctggtgaatatcatgtgagtccatgtggagcctcctctttggaagatggggtgctcttgtgggatgaacrttggggagggacaatctctttaataactctgagaggtactgctctttttatgaaggggcagtataacgtggtgcttataaacgtgggctctggatagttagcctatttgtatttaaaacctgctgttatttattagataacttacttaagttttctgtgcctcagtttctccatggggttgatatgaggactaaatgaatacacattaggcactttttcagttatctattgctgcgaaacaaaccaagccgaaacaactacgtatttgctcacgattctgcaattagggcagggctcagtgggacagcaactcgcttcctcatgtgatgttggctgggcacttccagtagggctgg

SEQ ID NO: 760564 - DNA, 577 bp, Homo sapiens
gtgcctggaaatttcaaagatctgctgctcccaaagagagctcttaaacctaattctgtatggtccttttcacgtgaataacatatatctgtttccctccctgtcttctctaccagtctgtgggcttcagaagggaaccctgagcctttctcatcattccctcttcagtacacagtgcatagcagacacacagcattggatggaatggatgtgtctgtggcctgggaaggtgtcctggggtccttccatctggctgtcttaggctgagtggtgctggttatatatttctaaggacagctcccccttctctactctaattccttgttcastaaggaattaaagtatcttacagcaggaatttgtcttttacttcaaggaatccctgggttccaggaagtgccttgcacaatgaaagccctcaatccatgtttgtaaaagcctgaatgaccggaataatgccactgtttggtaaatagtgtgcatggattatcaccacagccatatgacgtgggtctaagcatatctttatttatcacatgaggaaactgaggctcagagaagttaagcagcttgtcca

SEQ ID NO: 760565 - DNA, 616 bp, Homo sapiens
aaaaaatacccacagctggttctgatgtgcctccatccagctggcccttcaaccctcaaactcatctagatattttggttttgggggagaaacacttagttgtctggcccagcaccacttaagatcctctcccaaggagagtaaaggaagatggactcctctgcactgatcctaagtgtatttaccgtttcctcttgtctgtgaaatgcaagctttatttctatctattttaaaaacatatactgcaggaaaataatggcttagtggaaatgtttaagtttctgggccccaaacaatttctaaatattatttaaaaaaaaaaaaaaaagaaagtcatgaaaagcwgcataagctctacttagctgagacctgtgcaagggagcatgtgaggatggaagggttagcggggaggagggtagacacaggcctccacaaagccttcctggcataggcagccgcactgcctcctggacctcatttgtttgcctagaaaggactctttctcaatgcagactttttctaagggcttctagcaagctccctgcaaaatgggtcatttcttttcatcagatttgggatttggaaggtcctggtattccaggccccagacaggatt

SEQ ID NO: 760566 - DNA, 668 bp, Homo sapiens
ctatattcccactgcctagaacagtgttaaggatgtagcaagcacccaatatattcttattggataattgttggtttaatcaatacagaatgtgtggtatgacacaacaaagtagatatttagttttaatgatcattttccaccaagagaagctaaaattacttcaataaaatgcaactatggtggttgtggaggtatgctgttttgatctcccttagaaaaataatttgcttatttatctccaaagtttacagttctaagtgtcttcaggttccacttcaacttttcagccagaccatgttcttcccaagtagcacccagacaaagaaagaacgggtctggccacttcttcaagtgtgagactcctctaacaggcagtctttgctttacagatcatgactgaatggttgaaaccttattagacctgtcttgtggtttaaakctctcactgcccaatcctgcttccactccactttcctttttagatgtcatatcttcatgcagtctgaaacctttactataattctcctgtttctccattattatctttcacagtttatatctactaataagtctcttgtaatcctagctctgtctcaacattttcttcctaaaggaccctgctgagagagaggaggcagagcctagtagtctccctgagttcacat

SEQ ID NO: 760567 - DNA, 562 bp, Homo sapiens
ccttttggctcctgtgtgtgcatgctcgcatgtgtgtttgtgttttcacttcgattttgtaagtgaaaagcaaaatgatttgtaaataggtacatctgtctaaatgatcagcctggtccatatttgtcctgaaaaaccaactggcagttcagttttaagacagacaacacacactagaaaaggaaagaactgggatccgggaaacctatgccagttccatctctggatattagctatttgtgggatcttgacaagtcttttaatctgtttgaatctaagtttccttaagtatagaacaaattatccagctacattatatctaagtccctwtttgctctaaaattctgtaattctaaggatgccatctgtataaatgttatctgttcttttgttaagaacagtacttgtaataagaaaactgaatacacagagaaatacataaacacgttgccagacaaaatacaggtaactcaactacattttaaatttcagatacacaataaacaaatttcagacattctaaaaatattagttgtgtacatgtgaaattcaaatttaactg

SEQ ID NO: 760568 - DNA, 623 bp, Homo sapiens
cattatgtttattgaatgacattgaatatacactgtagaccctcctatactccaaagcccagtttgagaaatgtatacaagtagcagagaaaagaagtctatgccagtgttgaaaactcaaacgctataaaaccccaggcaaaaacacaaatgagtagcatagggtggtgctgcagtaggctgtggaggggactatagcaatctttggatgacctaaaggaatagtcattactcaactccaacccaacggttgctcagtatggccaaatattctgattcttcagggaagacaaaatgatgaattttatatgaaattttcmggtttttttttgtttttttttttttttgagacggagtctcgctctgtggcccaggctggagtgcagtgatgcgatctctgctcactgcaagctccgcctcctaggttcacgccattctcctgcctcagcctcccgattagctgcaactacgggtgcccaccaccacatcggggtaattttttgtatttttcatagagacagggtttcaccgttttagccaggatggtctcgatctcctgacctcgtgatctgcccgcctcggcctcccaaagtgctggaattacaggcgtgagccacaacgcc

SEQ ID NO: 760569 - DNA, 574 bp, Homo sapiens
ataagttatgcatagtgttaactgggtccctaatttgtctcctctgctctacagtgtctcttttcatctcattctgttgttttatcatgttgtctttgcattcttttatttaattatttaatttatggttttttattcctttcttttttttctttttttggctcactgcaacctccgcctcccaggttcaagtgattctcctgcctcagcctcctgagtacctgggattacaggtgtgtacccccatgcccggctaatctttgtatttttagtagagacagggtttcaccaggttggccaggctgatcttgaactcctgacctcacgtgatccacctgcctcggcctcccaaagtgtagggattacaggcgtgagcccccgtgcccagtcatttaattcatgtttttttaaatttyttctatggcatgaagcactcatggacaattttcttttcctctggtattactttcaacactccactccttatctttttttttttttttttcactccatggttcctttccttctttgtttctttttccttttcattatgctatgttatattttcacattt

SEQ ID NO: 760570 - DNA, 472 bp, Homo sapiens
gatgggcccgagttgggggcaacaccccggggtgggtgatgctgaatggccccgccaagattgggccctggttaatgcatgcggggtgagggtcgcggtgcgcagaatttatgcaacctggggtgctggcccatgtgcttaccctggatgcttacttaatctactgagtaatgttctggcggagggggagcggggcagagctttgcaagacaggatgggtgagtttattaagggggttgacttactgggattactagagaagaaaaaggtttgacyagagaggctagaaatggagcatggagattgtgggtagaacattcccttgaccctctcgccaacacatgcccacacaccaggttagcagtttacctctttgtaaatctgaagcggtggtagtagtgatggtggaaggagtgaataagggcctaacctggctagctttctgtttgcctgtcttgcaaatggtccagca

SEQ ID NO: 760571 - DNA, 434 bp, Homo sapiens
tttttaaagagggctgaattccaaggcatggatctctgccgtcatttgcatttggattggggatatcaatgcagtatgataagtatttattttaaaaaatctgatagcatgcaaatacattttcctatttcccagctcctttctccttccctaacctttgcacccctgacaaaaacaagcaaacaaaagctcacccgctgtaaatgcagctgtggatttytcaaagacatgtcctttggaaattgctagaagtttcaaagttatatcgcccttggcattgtgccttgagtacatacgggacagtgatgggtgggttcaggttttgtgggatatgaaacaggtgatttggcagactccccttaaaaaaagaatacaacagtagcattaccagttagcagcaggatcttggaatgggtacttgcaagggaaggggc

SEQ ID NO: 760572 - DNA, 630 bp, Homo sapiens
ggcgagctcaacctccctgtctgccatggccaagaacccagtgttttgggtttctctggaatcccccttggttggccaagcagagggtccgctctgtcagtgggtggaggggcttgggattttatttttcatttagaagaggaaacaaaggcagatgtacaggctcagttttgaaaaggaatagaaagtaaaaaaggctgagtcttctgggctgggagaagaaggagtgggcagggtggggaggaacccaagaagcatctggaggcaagaattcccagactggatcggttayacatgaactgagagcacgccggggaggattaattcattcattcataggaacagaagccaggccagccaggttcatcttgacacatgggtctacacctgcggccctttggtctctccaaatccacaaatgctggacattcgtgtccctttgacgcctttttgcagccggacttcagtatttcccagttcaggacaagcgagcatttggatctttggaatggcagaattctgaagctaatgaggccattactcttcaaaggtttaatttgttttgatgggccaatctataatcatatttccaaacagcttctatttaattactgcacaaaacaaatgagg

SEQ ID NO: 760573 - DNA, 600 bp, Homo sapiens
tgcattgaaactcattcctgagtgtattaaatctgaagcaaattctcactctgatttagaataaataatttggagaggggagttggtgaggagtgggattagatactgatcttgcagctattacagtcaattcatagcattgaagcttcttgtggatcagcaaaatgaactatttgtgtttttaatagacatatgagaaagtaattaggacgtgaactactgataatgaatttaataaacattacctaatgtatgctatatgaaaagctttaaactagatattttggtatgtgacaacaattttaaagcattgaacttctttcacagtaaaatatattatgcattccattttgaaacacctattaaggaaagaaagacaaaaaagctttaccacaaagatcaggaactaagcaagaatgttccctctcactactcattttcaacattataytggaagtcttgactaatgcaataagtcaagaaaaataaattaaaaaatgtatagagaaggaagaaataaaactttctttgttgacagatgacataattgtctacatagaaaattcaggctgggcgcggtggctcacatctgtaatccca

SEQ ID NO: 760574 - DNA, 604 bp, Homo sapiens
tagattacttaatagtttaggtattttgtgcgggtaactattttcccaatgctacaaataaggaaaatgagaataactgaagacactggctcaaaagcacacattcagcaagtgttaaaattagatgtcaagttcagacatgtgcactgtcaatagcaagctctttcccctaaaccaragtcctcaactgtggctatacattgcaatcacctgaggaacactaaatacatattgagagagtctgatttaattctttcagggcacagcttgggcattgggattttagaaaccacccaggcaattctaatatataaccaatttaagaagcactaggtacatctctgagcctcccaaattttgttcatgtccaatggtacttaattacactctgtgtttgtcacctgattcttgaatttgaaaccaagccacttgaattctttctgaaaagaacagactttcaccaggacagaagaatctgttgagtacacattgtggggagaagcatttttaggtgaggaagaaacagaaggggaggaatcaactctgaccttgagttagttacacagtcattgaatgaggaagattttattacagaccaggacac

SEQ ID NO: 760575 - DNA, 604 bp, Homo sapiens
tagattacttaatagtttaggtattttgtgcgggtaactattttcccaatgctacaaataaggaaaatgagaataactgaagacactggctcaaaagcacacattcagcaagtgttaaaattagatgtcaagttcagacatgtgcactgtcaatagcaagctctttcccctaaaccagagtcctcaactgtggctatacattgcaatcacctgaggaacactaaatacatattgagagagtctgatttaattctttcagggcacagcttgggcattgggattttagaaaccacccaggcaattctaatatatarccaatttaagaagcactaggtacatctctgagcctcccaaattttgttcatgtccaatggtacttaattacactctgtgtttgtcacctgattcttgaatttgaaaccaagccacttgaattctttctgaaaagaacagactttcaccaggacagaagaatctgttgagtacacattgtggggagaagcatttttaggtgaggaagaaacagaaggggaggaatcaactctgaccttgagttagttacacagtcattgaatgaggaagattttattacagaccaggacac

SEQ ID NO: 760576 - DNA, 575 bp, Homo sapiens
cccccagcactcccttctctttgctctattttttctattgcttttatcatcagccagaatgtattttgttcaattatttatttctgtctcctccgctcaccttactagactgtaaactgcataagtaaagggtctttgtctggttctttttctactgtacccctgaggccaccctgaaggaggccctcaataaacattagttggttaaatgtataactaatagtaagatcttcaaatatgaaccatcctgagaatgaataaattcaatgtcaagagacacattcaagtacagggttcagttaccacctaacagagatcgagaaagtggtcttcagacacaaatgagaaatcaagtctgaagacttctaaaatcccttccaaaacggagagtctataatgtaaaagattacttctccaaacagratactcatggtttgctggaattttcatggattctttatataagcacttaattcattcaatatttttttgttcattcaagggatattcagtgagaagctgctttatatgtgttagatacaatttttgcatgaaaaatgcaagaatcaagtggt

SEQ ID NO: 760577 - DNA, 582 bp, Homo sapiens
attcttctcttctctccacaacattccttttcctgctccatgtgtgcaaacacactacaaaatgaatatccttcttttaaacgggaaagataaaaccatcctatgacacagaacatgtcatagtctaggttgggggttagtgaacatttcatataaagggccagacttagcttgaaggatatakaaacataggggtagttggatttgtcatgcacgccattctttgacaacacctaacctgggtagtaataaattaaataacgatagtggcaatatgaaagtataggcttttgattacgatgtaaaaaggagtaagaatctgtcactctcactagaagcagaataaactgcaaaattatagctgttaagatcaaagaacccattagaaatctgaggatgagaatgtctaaatgaactaaattccagagaataacaagcccttctaaataagaagagcgcctctgttgcttttatctgtattgtctggcaaaaggcagaattcaccatagatggagaaggagaaatcatctcaaggtttaatgaagttttaatggcagagtgagctgatgtggagatttgcaa

SEQ ID NO: 760578 - DNA, 582 bp, Homo sapiens
attcttctcttctctccacaacattccttttcctgctccatgtgtgcaaacacactacaaaatgaatatccttcttttaaacgggaaagataaaaccatcctatgacacagaacatgtcatagtctaggttgggggttagtgaacatttcatataaagggccagacttagcttgaaggatatataaacataggggtagttggatttgtcatgcacgccattctttgacaacacctaacctgggtagtaataaattaaataacgatagtggcaatatgaaagtataggcttttgattasgatgtaaaaaggagtaagaatctgtcactctcactagaagcagaataaactgcaaaattatagctgttaagatcaaagaacccattagaaatctgaggatgagaatgtctaaatgaactaaattccagagaataacaagcccttctaaataagaagagcgcctctgttgcttttatctgtattgtctggcaaaaggcagaattcaccatagatggagaaggagaaatcatctcaaggtttaatgaagttttaatggcagagtgagctgatgtggagatttgcaa

SEQ ID NO: 760579 - DNA, 555 bp, Homo sapiens
gaacctgtcttcccgatcggagcactttcctctgattggtccccacccttcgcttatttaacatatagctaccctttccgaattggtttttctacactgtcgtgcccacctttgagtggtatcttttatctttgcgctaatcttttttgcatactcacaaaccaatcagcatgcactccccattctgggtccataaaaggccttggacccagccacacaggagactttcccacctttagttaggggaaccaccctctgcctcccctctctgctgagagctgttccttcactcaataaaattcttctcccccctcctcacccttyaatgtccagcatatcctcattctttttgggcagggtgcaaaagctcaggaaccactgaacgtgggtacaagctatcacacaggcgagctggggcatgcagcgtggcagagcaaggcccgggcggggcgtcatcgatcgagggtccctggcttgcaaagtgactgagaagaaaaatcctacaaccctaaggaaacatagaaagcataatatgaaagtagggttaataggatt

SEQ ID NO: 760580 - DNA, 542 bp, Homo sapiens
aatatttatacttaaatattttgttgttgatgttattaaaaaccatattattctttacattctattccttttttattgctagtatataaaaatacaacttgtcaacttgtatattaatttttatcttgtcatcttgttaaactcatttataagttctacaagtttttgtagattttattgtatttccacatacatgatcatgtcatctacaaataaagacaatttttcatctgacttttaaacctggatgcaatatgtttctttttgttgttttattatactggctagaaactctcctaaaatattgaatagaagtgcttagagcaggcatccttaccttattkctgacattagaaaagaaaaatcaacttttactattaaatatgatgctaggtgtaggctgatcattgataccttatatcaggatgagaaaagttcattgtatttccacttagctgaataatatcaataacgaatgttgaatgttgtcattttttctgtttatattgcaattaggtgctttttaaacctataaatattta

SEQ ID NO: 760581 - DNA, 616 bp, Homo sapiens
attacacaggtaaatctgtgccacggtggtttgctgcacagatcatcccatcaaccaggtattaagcccagcatgaattagctattcctcctgatgctcctcctcctcccagccccatcctctgacaagccctatattgtgtkttttcttgtcatgtgtccatgtgttctcatcattcagctcccacttataagtgagaacacttattttgttttctgttcctgaattagtttgctaaggataatggcctccagctccatctatgtttctgcaaaggacacaatctcattctttttcattgctgcatagtattccgtggtgtatatgtaccatattttctttatccagtctattattgatgggcatttgaataagaatgtaagaataacatatacttttgggtatatacccagtaatgagattgcttgattgaacggtatttctgcttctcggtctttgaagaatcactatattgtcttccacaatggttgaactaatttacattcccatcaacagtgtaaaagcattcctttttcttcagaccatggcagcatatgttgtttcttgacttttcaataattgccattgtgactggtatgagatggtattttattat

SEQ ID NO: 760582 - DNA, 587 bp, Homo sapiens
aaaatactgtgctaagtgatgtaagttgcctgggaaaatattatgtgataccacttgtatgaattatccagacaaggcaaattcattgaaaaagaatgtacaagagattaccaggggaaaggcagaaatggaaagatattgcttaatgggtacagtgtttctgtttaggtgaggaaatttttggaaaaagatagtagtaatggtcgcacaacattgtgttataattaatgccaayaaattgtacacataaaaatagttgaatataacaaattttacattaagtatattttaccacaattaaaaaaaattaaatctgccgagagtttcactgaaaaaaaaaaccacattggaacactttgtgatagtatctattgaacgtatttataccctgtgtctcatatttgcaatcataccaaacataaatgtgtacataccttcaacaaaggacattttctagaattatcacttatgctctgtatacaataaaatgagcttatgaattgtggtatatttgtattctatggaagtgaaaacaaacaaaatacaactatgcacataaatttgtataaaattcacaaagatttttg

SEQ ID NO: 760583 - DNA, 471 bp, Homo sapiens
tggtatgaagaaataactgcacatgcccaaggactttccaggcctctcctttccttcccctaatcacccactcatctcagaacccaccagctgaacgttttataataaaaatactgccatgaagccagcccaaggagacagatttgagtttgactccttctccttgtgaatcgactttcaacataaagtgttwcttttctcaaaaaacctagtggcatagtgtttgcttttggtgcattgggcactgagtcccttttgtttaataacactcttaacagtaacaaagtgataaatgctacatgaaatttatctgaagtaaggtagtaatacttaagatgtaaatataaacaaacaaaaaatataacaataaaaagattcccttgaattaaactatgagcataggttgtcaagtgatgtgttgggggccaaattcaaagttttataggaacacagggccactcattagtatat

SEQ ID NO: 760584 - DNA, 646 bp, Homo sapiens
acctcccactgggtccctcctagaacacatgggaattttaggaactacaatttgagatgagatttgggtggaaacacagccaaaatatatcacagagaaagcaagatttactcctagtattattttatctactattaaaatgaaattgcacatttgtttctttaatacaatggaagataacaacagtgtcaaagaaagggaacttgctcaaggatgcagagcagttgagaacagtcaaggagccagagacacaaaccctsattaaggtaccttgctctctgctagttaagtggtggtcacaaagcaaaaaagaagaaaaaaaaaaaacaaaaaaaaaaaaaacagagaaacacggaagagtccatatagaatacaatgccacttgttcaccattcttccacttggcatttattcaagtgcttcttctgtgccaggtaaaggtcagagctacagaggtgaatagtacaatgctactgaagtaaaagtgcttgaagtcttgtgagcatttggagaattacattaggaatagggaaaatcactgctttgtgggtagtcagactgaggagtgaggaggaacacctagatcaaagaaacagttgcttaatttagaggctcaagctcaattattaaaattaatagctaaaca

SEQ ID NO: 760585 - DNA, 646 bp, Homo sapiens
acctcccactgggtccctcctagaacacatgggaattttaggaactacaatttgagatgagatttgggtggaaacacagccaaaatatatcacagagaaagcaagatttactcctagtattattttatctactattaaaatgaaattgcacatttgtttctttaatacaatggaagataacaacagtgtcaaagaaagggaacttgctcaaggatgcagagcagttgagaacagtcaaggagccagagacacaaaccctgattaaggtaccttgctctctgctagttaagtggtggtcmcaaagcaaaaaagaagaaaaaaaaaaaacaaaaaaaaaaaaaacagagaaacacggaagagtccatatagaatacaatgccacttgttcaccattcttccacttggcatttattcaagtgcttcttctgtgccaggtaaaggtcagagctacagaggtgaatagtacaatgctactgaagtaaaagtgcttgaagtcttgtgagcatttggagaattacattaggaatagggaaaatcactgctttgtgggtagtcagactgaggagtgaggaggaacacctagatcaaagaaacagttgcttaatttagaggctcaagctcaattattaaaattaatagctaaaca

SEQ ID NO: 760586 - DNA, 619 bp, Homo sapiens
atgtgtgtgagaaaacagcccaaatgaggagtaaaccacctgaaagaggtagaaggaagtgtctgatgtccatgcaaaacctggaatcgaggttgttctgtcgagtaagattggagcaccacatagttcatggggcatgtagaagtgaaaacaagtgaggtcttgattcagtaatgaggaataattagcccaaaattcaacactgctctggtctcacataacaaattttaaaagtaacatgtgaagctatcaaactgtttccaagtaatttttaccrcataccattgcaaagatcaataatatttttaagaattaaaaatatccagcacccaataagataaaattaatgataactgtcatctgatcacaaattaaatttaaattgacctacagctgacacagatattagaaataatagacaaggatattaggatagttataattgcattccaaaagctaacaaagacatggaagacatataaaaataaccccaatataattccaattctaaaactaccatttctaggatgaaaaatacaatgaaaggaattaaaagcagattcaatattatgaaaaattcagataacttgaagatacagcaatagaaactatccaaaat

SEQ ID NO: 760587 - DNA, 636 bp, Homo sapiens
gtgatgcatagacttctgtcatattaaaaaaattatcatttgaacagcaatccttttacctaatattgttatacatgacaattaaatccactttatgttttatggaaaattttatatatttatattctagactgatgaaatttgatgttaaagatcataattagaaactctcctagcatcaaatgtaccaacttgaaaatctatgtgacttgcttaagaaaataaaaatgtaggccgggcgcggtggctcacgcctgtaatcccagcactttgggaggcagaggcgggcggatcatgaggtcaggcgatcgagaccatcctggctaacacagtgaaaccccgcctctactaaaaagacaaaaaattagccgggcgtggtggcgggtgcctgtagccccagctactcgggaggctgaggcaggagaatggcgtgaacccgggaggcggagcttgcagtgagctgagatcacgccgctgcactccagcctgggygacagagagagactccgtctcaaaaataaataaataaaaataaaaaaataaaaaaataaaaatgttagtaagttcttaaagatgctacctttgaaaaaatttaatcatttcttcagtgaaaacacaatcggaagagttaaatta

SEQ ID NO: 760588 - DNA, 477 bp, Homo sapiens
ctgttccttttccattaaaaaatagcaaaaaaagttttccctgtaactacggagggttttgttgttattattgttgtcattgtcgtctctttcttttggcccaaactctagtgtattacgttctctgtattacactttcataggaaagactcctaccagtgttaccagaaataagtatcaacacgtgccccatcttgcccatgcagaaaagtacttgarattaaatttgcttacatttctggttgattcacttagcaccaacaacccaggtaactagtgaaatctcattccatggctgcagatgccccatccctaagtgtatgttgtcatgacaggaggagtctgaccagtcagggatcagcaggaacaccatgccaccactggaagaataatggcttgttggtgcaactggtatccatgatagagactctgagaggagactcctgcgtcagtcaacagaagctgagcatggctgat

SEQ ID NO: 760589 - DNA, 692 bp, Homo sapiens
agacctgatgcccagagctcttggatccattccccactcacccaggaacttctaaaccagacatgagcttgtaatgagtactttcttccccaacagaacttcatgcatcccagagatgcagaatgagaatgatctccatcctggtcagcgaaatacagcatacggtgggataaaggattgaaaaagatgcatgctccgtgaattacttccccatgtggtttctgcctggctgagttatgatggtcaaatcttacctctgcagcctaaactagatcagagatgcagcatgactgaggcagttttagttgttattgttgttgtatagttctttgctttagtctgtaggttgcctaacgctacacagctaatgaaacactgtcccctctccctctccctctccctctccttctccctccccctccccctccccctctccccacggtctccctctgatgccgagcsgaggctggactgtgctgctgccatctcggctcactgcaacctccctgcctgtttctcctgcctcagcctgccgagtgcctgcgattgcaggcgcgcaccgccacgcctgactggttttcgtatttttttggtggagacggggtttcgctgtgttggccgggctggtctccagctcctaaccgcgagtgatccgccagcctcggcctcccgaggtgccgggatggcagacg

SEQ ID NO: 760590 - DNA, 507 bp, Homo sapiens
atcctcttatcttttgatgtatttctgtcatgccagtataattatttactgagaaattcctagtgagtaattgcaaggctgcctgattttataaataaagtttgattgggacacagccacactcttaggtgttgtcagtggctgctttcacactatatgaacagagttgaatatttgcaacagaggccayttaatcctcaaaacctaagatacttactatctgtccctatagaggaaaagtttgtgacctgcctgctatagacactcatgacgtttttgtcctttcagatagatagaggaataattttccagactcaaagaataaattaacgtatttacctgtctctgaatcttcacaaataaaccacaccaccatccatcttgaaagttttaaggaaagaattgcctgtagcagcactactttatagaaacatagtacaagccacttaggaaattttacttttttattaaaaaaatctttttagacccagggtctcactttcactc

SEQ ID NO: 760591 - DNA, 545 bp, Homo sapiens
accaagaatgtaaccacacatgaacagaccctttcacaagatagtgcctgtctttccactcatttattattccaatgaaaactatttacaagttaatttctagtccccatcctatcattctccctagtaatcatttattgcccctcaacagaattctctttctccccactcccataacctgttttayaaggatcaagcccccatttttttctgtaacctcaagacggtatcaaagcttctgtatctcattgggaagctggatcttcattctgaaggcccttgtatacatgtaaccgtaataggttcattgcccaatgcccacgcaagtcaatataccgagacacctggttggagcagagaaagaggtttaatcatagggtcactgaacaaggagatgggagaaaaactcaaacacatctccaggaggaatttggagttagggttattaagggttttggagtgggccagtgtggaggtcatcagttggtagaagagtgtagcgtgacatcatgggacagggagatgaagcagctattcgctcatgc

SEQ ID NO: 760592 - DNA, 667 bp, Homo sapiens
gtttgctcatcgtttaaggaactcaagaatctaaagaatccattcagtcttccctggttcggacatgaagaacacggggctcttcacatatatattttttttattccaggcagtcttctttgacttataggtggctgggatcagttgatacaaaaagacgtagctagaaagtcaatctcaatcattctctctctttcactctatctctgtctctccctctatctctctatctctttctctctstgtctctctctctgtctttgtgtgtgtgggtgagtgagcctgaagacaagaagacacacacacactgtgtgtgtgtgtgtatgtgagagagagagggagagagagagagagagagcatcttcagacttcatgaaattcaacttttctgaagattaatttctcagcagaatgtatgtttcattctgggctctgatgattgttagtccactgtgaattgcctcacaagaaacaaatttaaaagttcaaaagcggctgtcaccttcgtgaacagacttctggtgagtttttggcttgtttccatcacactctcttcagcctccatatgacgatttgttacagaatcctggtacttctacattccggaaaggaaaaggaaattctccaggcgtaggagcaaaatctcggggatgtaaataggacttca

SEQ ID NO: 760593 - DNA, 640 bp, Homo sapiens
ccacggccaacggctattgtcatctgttgagggcaggcgaagttgaaacacttttacttttggaggaaagtattttccatctccgtgaaagttcacagctggctaggtatggtggctcacgcctgtaatcccagcaatttgggaggctaaagcaggaggatcacttgaggccaggcatttgagaccaacttgggcacatagcaagactccatctctacaaaaaattttaaaaattagctgrttatggtggggcatgcctgtagtcccggctactcaggaggctgacgtgtgaggatcccttgagcccaggagtttgagactaaagtgagctgtgattgcgccactgccctccaggctgggtgacagagtgtgaccctgtctcttaaaaagaaaaaggaaagttcctttttgctataggcccgaggggttgctgctgaaatgggcaagttcatgaaacctgggacggtggtgcttgttctggctggatgctattctggatgcaaagccatcatcgtgaagaacattgatgatggtaccttagatcgcccctacagccatgctctggtggctggaattgaccgctgtccccacaaagtgacagctgccatgggcaagaagaagatctctaagaggtcaaaga

SEQ ID NO: 760594 - DNA, 453 bp, Homo sapiens
ttgaagaaaaattgtgccactcaaatactctacacctatgtctagccatgtcacaaatacctgctcttcagggggcctagatacagtatgtcgggagacaatcatgtcatttccgcagtccgtatagaacaatgctgttmccggcctttgtaataatgtgtgaacctggactctgcaaactcaaaacctcatgtgttacccgcttgcaacacatgatttttcttaccacattcaatctgttaatctgttttattttcatcataatcctaaacctattctcaatagcacattgagcattctgaattgtttttgcaattatcagacactgaggttaataatgttacaaaacacctaagattaaatacagcaaatctgctggtaatggaaaattagctggccaaggctaagatgaccacggctaactgctattggccatgcttctatccattaaca

SEQ ID NO: 760595 - DNA, 610 bp, Homo sapiens
tcctcttgtttcttaatttactagtttcctatctgcctctcccactagaataaaagcttcatgagaatagtcttagtcacagctctagcctcatgtctgaaacagtgtctggcacacagtaaacactcagtaatatatgttggatgttggatgaatgaaaggtggctaacctccaagtttcacttaayctctctcaatcttcatttcctagctacaaagtggcattataataaaaattacatttagtccagaggattggtttaagaattgaataacagtgcatgcaaaaacatacctcataggccaggcacaatggctcaggcctgtaattcatcactttgggaggctgaggtgggaggatctcttgaggccaggagttcgagaccagcctgggcaacgtagtaagaccctgtctctacaaaaaactaaattttaaaaattagctgggcatggttggtgcatgcctgtagtcctagctactggggaggctgagctgggaggactgcttgaggccaggagttcgaggctgcagtgagctatgatctcaacagaatgacaccctgtctcttaaaaaaaaaaagttcatagtagacattcaataaatgttaat

SEQ ID NO: 760596 - DNA, 610 bp, Homo sapiens
tcctcttgtttcttaatttactagtttcctatctgcctctcccactagaataaaagcttcatgagaatagtcttagtcacagctctagcctcatgtctgaaacagtgtctggcacacagtaaacactcagtaatatatgttggatgttggatgaatgaaaggtggctaacctccaagtttcacttaatctctctcaatcttcatttcctagctacaaagtggcattataataaaaattacatttagtccagaggattggtttaagaattgaataacagtgcatgcaaaaacatacctcataggccaggcacaatggctcaggcctgtaattcatcactttgggaggctgaggtgggaggatctcttgaggccaggagttcgagaccagcctgggcaacgyagtaagaccctgtctctacaaaaaactaaattttaaaaattagctgggcatggttggtgcatgcctgtagtcctagctactggggaggctgagctgggaggactgcttgaggccaggagttcgaggctgcagtgagctatgatctcaacagaatgacaccctgtctcttaaaaaaaaaaagttcatagtagacattcaataaatgttaat

SEQ ID NO: 760597 - DNA, 613 bp, Homo sapiens
tgaattgtggggaggacacactaggttcattgcagttaactagtgataactgctaagaggaaaaaccaatgcagagtaggtatctgggagaaggaaaggttgaactttttggcagaatacgaaagacagatcctaactaagagggtgatatttgagtacagaaaaycaaacagagacctggagaagagcactcccggcagacagtagagtcagtgccaaggtcctgaagtagaagcgtgcttggtgtttttgaaacatagcaaggaaacctgtggagctggtctgtggtgagtgaggggagagaagcacaataagaggtcagagacctaacaagagatcagatctggtaggactatggtagtaaggacttgggcttttactctaagtgagatggaagagcccctctgaatctcacagattgacgtgatctgacaggctgatgggcaggaaatagactggagggagagcagcagtgaaggcagggagagcattcaggagctttgcattaatccagtgagggctgacggtggcttgggccacagtatataagatagtcatcgttattattttcagaggtgttcttatttcagttttacaggttaagaaactgaga

SEQ ID NO: 760598 - DNA, 613 bp, Homo sapiens
tgaattgtggggaggacacactaggttcattgcagttaactagtgataactgctaagaggaaaaaccaatgcagagtaggtatctgggagaaggaaaggttgaactttttggcagaatacgaaagacagatcctaactaagagggtgatatttgagtacagaaaatcaaacagagacctggagaagagcactcccggcagacagtagagtcagtgccaaggtcctgaagtagaagcgtgcttggtgtttttgaaacatagcaaggaaacctgtggagctggtctgtggtgagtgaggggagagaagcasaataagaggtcagagacctaacaagagatcagatctggtaggactatggtagtaaggacttgggcttttactctaagtgagatggaagagcccctctgaatctcacagattgacgtgatctgacaggctgatgggcaggaaatagactggagggagagcagcagtgaaggcagggagagcattcaggagctttgcattaatccagtgagggctgacggtggcttgggccacagtatataagatagtcatcgttattattttcagaggtgttcttatttcagttttacaggttaagaaactgaga

SEQ ID NO: 760599 - DNA, 613 bp, Homo sapiens
tgaattgtggggaggacacactaggttcattgcagttaactagtgataactgctaagaggaaaaaccaatgcagagtaggtatctgggagaaggaaaggttgaactttttggcagaatacgaaagacagatcctaactaagagggtgatatttgagtacagaaaatcaaacagagacctggagaagagcactcccggcagacagtagagtcagtgccaaggtcctgaagtagaagcgtgcttggtgtttttgaaacatagcaaggaaacctgtggagctggtctgtggtgagtgaggggagagaagcacaataagaggtcagagacctaacaagagatcagatctggtaggactatggtagtaaggacttgggcttttactctaagtgagatggaagagcccctctgaatctcacagattgaygtgatctgacaggctgatgggcaggaaatagactggagggagagcagcagtgaaggcagggagagcattcaggagctttgcattaatccagtgagggctgacggtggcttgggccacagtatataagatagtcatcgttattattttcagaggtgttcttatttcagttttacaggttaagaaactgaga

SEQ ID NO: 760600 - DNA, 613 bp, Homo sapiens
tgaattgtggggaggacacactaggttcattgcagttaactagtgataactgctaagaggaaaaaccaatgcagagtaggtatctgggagaaggaaaggttgaactttttggcagaatacgaaagacagatcctaactaagagggtgatatttgagtacagaaaatcaaacagagacctggagaagagcactcccggcagacagtagagtcagtgccaaggtcctgaagtagaagcgtgcttggtgtttttgaaacatagcaaggaaacctgtggagctggtctgtggtgagtgaggggagagaagcacaataagaggtcagagacctaacaagagatcagatctggtaggactatggtagtaaggacttgggcttttactctaagtgagatggaagagcccctctgaatctcacagattgacgygatctgacaggctgatgggcaggaaatagactggagggagagcagcagtgaaggcagggagagcattcaggagctttgcattaatccagtgagggctgacggtggcttgggccacagtatataagatagtcatcgttattattttcagaggtgttcttatttcagttttacaggttaagaaactgaga

SEQ ID NO: 760601 - DNA, 594 bp, Homo sapiens
tcaaaccttctatcttggtcatgtgcctgcagccgcttccagaaaataatgacccctttctcttccaaatcttgtgcacgtgcttcccattgcaatgggtttctgggaaatgtcgttctcagcttctcctgcagtggagaccttagagaggggtagcagtgatgccaagttgaccctaggtaatccagcacaccaactatgcacagccctgtgctcagtgttgtgaggaatacaatggtaatgcacatgtggatcttgtttccgtcctgctcccagtgggaaagggagsataagacatgtaaataaaaccagtagcccaaggcagaagactcaggtggaggcagatgcaggaacaatgctgggcaaattggtgaaagaaagatgtttttcagtcagggaagggagaatcagggaaggcttaatggaataggtggactttgggttcaacttggaagaaccagtaggtttggagtataagtaaatatggaaaagcagggaattccaggaacatgaaaacattacaaagagaaacacagaaatagaaaagagtgtagtgggtactgagaatattattaaactgaagaaaagtattac

SEQ ID NO: 760602 - DNA, 599 bp, Homo sapiens
tgtaccctctgaatctaaaataaaagttaaaatctttttttttttttttaatttcagcagggggccagaggtctgttttggtttatcacctctacaagttaaattaagatgcttgatcttatataaaatcctgttatagagtaagttttaaggtggcctcagagtagcatcwgcttttaactataacttgaagtataccataaatggatcagaacaatcactttattttagagaatatagggaaaaggttgaatgtgcaacccagtcagttccccttccattttaccttctagaaacttcctctcaacatagtaactcacagcagtttatccttcaaaaaattccccagaaaaagtgttaattggtttgggaaaatattttttgacatattatataaataggccctatatccaggggttgaagacatatatctaggggttggatatatgccctatatcgagaggtttgagttggaattcgagtagacagaaatctccttaaaacaaaggttattgaacagtcatgagactcttaaaatgacatttatttatctatatattattttggtgagagaaggaaacaaagagagagaagctagt

SEQ ID NO: 760603 - DNA, 599 bp, Homo sapiens
tgtaccctctgaatctaaaataaaagttaaaatctttttttttttttttaatttcagcagggggccagaggtctgttttggtttatcacctctacaagttaaattaagatgcttgatcttatataaaatcctgttatagagtaagttttaaggtggcctcagagtagcatcagcttttaactataacttgaagtataccataaatggatcagaacaatcactttattttagagaatatagggaaarggttgaatgtgcaacccagtcagttccccttccattttaccttctagaaacttcctctcaacatagtaactcacagcagtttatccttcaaaaaattccccagaaaaagtgttaattggtttgggaaaatattttttgacatattatataaataggccctatatccaggggttgaagacatatatctaggggttggatatatgccctatatcgagaggtttgagttggaattcgagtagacagaaatctccttaaaacaaaggttattgaacagtcatgagactcttaaaatgacatttatttatctatatattattttggtgagagaaggaaacaaagagagagaagctagt

SEQ ID NO: 760604 - DNA, 618 bp, Homo sapiens
ttaagcccacagactctagagccagactacctggctttgtgtcctggctgtgccacgtacagcagtgtgattttggatgagtacttaattgttccgtgcctcagctttgtcatctgtaaattgagggataataatattattaagattatattttaatatatgttttatattctattactatataatgttatgaggattaaatgacttaactgcttttgaagtgcttagaacagtatttgatacacaacattccttggtaggcatttaagttattaccacttttctcctacaatagccaattttgtaatgsatagtttttttaacatatgtccttgcacacttactcaattattctgttagataaattcctagaaatggaatggctgtgtcaaaggatgcgtacattttaaattctggtaaagagattgcatgaaaagtgggcacattataaaggatacgccaatttttattccctctaaacagtactgaggctaagtatagttgtatgtttcaaaatctagttctcaaactttggttttcataagaaacacctaagtgcttattaaaatagtaaattatcaggaacctcctgcagagattcagtacagccagtatgaa

SEQ ID NO: 760605 - DNA, 618 bp, Homo sapiens
ttaagcccacagactctagagccagactacctggctttgtgtcctggctgtgccacgtacagcagtgtgattttggatgagtacttaattgttccgtgcctcagctttgtcatctgtaaattgagggataataatattattaagattatattttaatatatgttttatattctattactatataatgttatgaggattaaatgacttaactgcttttgaagtgcttagaacagtatttgatacacaacattccttggtaggcatttaagttattaccacttttctcctacaatagccaattttgtaatggatagtttttttaacatatgtccttgcacacttactcaattattctgttagataaattcctagaaatggaatgsctgtgtcaaaggatgcgtacattttaaattctggtaaagagattgcatgaaaagtgggcacattataaaggatacgccaatttttattccctctaaacagtactgaggctaagtatagttgtatgtttcaaaatctagttctcaaactttggttttcataagaaacacctaagtgcttattaaaatagtaaattatcaggaacctcctgcagagattcagtacagccagtatgaa

SEQ ID NO: 760606 - DNA, 608 bp, Homo sapiens
cagtgttatgagacctaaaatgcgagagagaattctggatggaaagggatgaacaagagactcttattaattgcaaaaatatgttttcccccaataatacatgtctcacttagtggtcatcatctggccactggaagccagcacagaacatttccyccccataaacagcattgatcagcacagtgatttttgaaatttgaattatctatgagcattttagacataaaaagatatggagtccttcctgaaaagtcagatcggcaataattggttatcactgagtagtagacaccccctttagatgggtatttgcagttgattttacaatatccccaacattctctcttctccccatgagagtgccacttgacatttatcaataagcttatgctggttttgttgctgttcaattaagaagaaagtaaaagagcaacacgagaaagatggtggagcaagagcaaagaaaaactcctttggttctagaaaatctcctgaaaaagaggaaggcttatcaagcccgcaaagccacccaggcaaagcaggcagtttggcaaagaaggagcagaggaaaggaaaagggctccgatttaaacgactggaatcattcc

SEQ ID NO: 760607 - DNA, 608 bp, Homo sapiens
cagtgttatgagacctaaaatgcgagagagaattctggatggaaagggatgaacaagagactcttattaattgcaaaaatatgttttcccccaataatacatgtctcacttagtggtcatcatctggccactggaagccagcacagaacatttcctccccataaacagcattgatcagcacagtgatttttgaaatttgaattatctatgagcattttagacataaaaagatrtggagtccttcctgaaaagtcagatcggcaataattggttatcactgagtagtagacaccccctttagatgggtatttgcagttgattttacaatatccccaacattctctcttctccccatgagagtgccacttgacatttatcaataagcttatgctggttttgttgctgttcaattaagaagaaagtaaaagagcaacacgagaaagatggtggagcaagagcaaagaaaaactcctttggttctagaaaatctcctgaaaaagaggaaggcttatcaagcccgcaaagccacccaggcaaagcaggcagtttggcaaagaaggagcagaggaaaggaaaagggctccgatttaaacgactggaatcattcc

SEQ ID NO: 760608 - DNA, 639 bp, Homo sapiens
ctcctgaaaaagaggaaggcttatcaagcccgcaaagccacccaggcaaagcaggcagtttggcaaagaaggagcagaggaaaggaaaagggctccgatttaaacgactggaatcattcctacatgattcctggtggcagaaacgtgacgaggtgtgtctcaggtgactagtagtaaaaccycacatcttggaattgccaaataaacattccttggcctttgctgtacacatagaaaggactgatagcgtgagtttactgctgcagagaaccattgcaagacttcgcctgaagaaaattttagtgtgtctttgtaaaagtcaccccctagaacctaaaaatgctgtgtatagtggaaccttatgtgacctggggatttccaaatctgaagtgtgtccgggaactcactttgaaacatggacaagccaaggtcaagaataagaccatccctctgacacacaacacagtgattgaggagcacctggggaagtttggctcatttgtttggaagacctcattcatgaaactgccctcccagggaagcatttccaggagatctcatggttcttgcgccctatccacctctcagtggcccatcatgctacccaaaatagagtgggcttcctcaaggagatgggca

SEQ ID NO: 760609 - DNA, 608 bp, Homo sapiens
ctagacccaggtgccaaactgcagtaaatttttatcaatgaagtagaagcatgtgtttttgtgttttgggaggaaatttttatcaagtatcttcagagattatttcctgctttatcttcaaaaactggaaaggaagggtcaaagaaaagacaatagatggccagctgtggtggctcacatctgtaatcccagcactttgggaggctgaggcgggcggatcacctgaggttgggagttcgagactagcctgaccgacatggagaaaccctgtctctactaaaaatacaaaaattagccgggcgtggtggagcatgcctgtaatcctagctactcgggagactgaggcaggagaatcgcttgaacccgggaggtggaggttgtggtgagccgagatcgcaccactgcattccagccctggcaacaagagtgaaactcagtcttgaaaaaaaaaaaaaaaagaagacrgtagcttatgttcatggcaagcacctctcttcacagtccagttccaaggaaaaatgccagcgttttctacattggctgccgcctcgtctgaaatcagcacattccatggaggaaggcgatctgctttgttgcatcttctatcc

SEQ ID NO: 760610 - DNA, 468 bp, Homo sapiens
ataatggtgaaaaatccaaaatagctgaaacatttaccagtatggggaggtggtcattacataaattatggtataggaactcaatggagtattatacacatcccaggactccaggcaatgtgttaattacaacaagcagaattacaaattaaatgtactttatggttrtataattaagtatggaaagggaccacgtcaggaggaacatggaaatatgaaattagttaatttgttaagatggtggaatagtgagtgatttctcttctatgttttgttattgaatgtttgtgcacttcaaaaacttcagagcatttctaaaatgactgcttaaacagagaaaccccacagtgcttatcacactggcttacattttccatgctgctttcacagtgcgtctcctctcaattatctccctccgcagcttcaccatctccctttgaatctcctcttcctctttcttggcctcca

SEQ ID NO: 760611 - DNA, 500 bp, Homo sapiens
aaccaaggttgcctctcatgctttgtctctttcaaacgtgttcccaccatgtgatggcatccatcatattatgatgcaacatgagaccctggccggatgagaccacctgatcttgaactttccatcctccagaaccatgagccaaataaatctcctttctatataaattacccagtctaggtgttctgttatagcaacagaaaacagggtaagacagaaaattgggaccaagaagtagggttgttgctattacaatacctgaaaatgtggtagcagctttggaactgggtgatggttagaggctggaagaatttggaggagcaggctakaaaaagcctagattgctataaatgggtcattaagagaaattctggtgatggcttagaaaacaagaagattagggaaagtctgaaacttcttagagattacttaagtggttgtgaacagaacgtctgtagaaatgtgcacagtaaaggccattctgaagaggtctctgatga

SEQ ID NO: 760612 - DNA, 612 bp, Homo sapiens
gtctctacaaaaaaaatgaattttaaaaattagccagatgtggccaggtacggtggctcatgctgtaatccaagcactttaggaggccaaggagggcagatcacttgaggtcaggaattcgagaccagcctggccaacatggcgaaacatcgtctctactaaaaatacaaaaattagccgggcatggtggcaggtgcctgtaatcccagctactcgggaggcctcagcaggagaatcatgtgaacccagaaaggcggaggttgcaatttctttgcaacttgaatttctctgattcctagttaattatctgtttgggattcctcaatctgtgaattatgtttttatatcctttgcccatttttctattgggttttctttttcccttgctaatttctaggtgttctctttttattccagccattaaataccatcagctttggacacasaaaatatctccttccactctcttatctatctctttgtgtatatttttttcattgaatagaaattctcaattatgagtaatcaaactcactgttttcctcccttattgtttaagctttttagtcttgttcaaaaaatctttcttcactccaaggtaacacatatttt

SEQ ID NO: 760613 - DNA, 604 bp, Homo sapiens
gcctctgaaaaaatctggtgtgccatagacacagtcttcacatagatttggcaaaccatcctagtttaaggtaggaattaaaaggtaggtctgcatcaatacaactaaagattcaaagataaatctctcacccagtgtgtctttggttaatgtgcttctagaatcagagcaacctcagaggaaaagagcccctgtgctcttccttcccatcacttagaatgctctctggccccakacctcatctgggagtccttccagaaactctggccttacatagtgccatctgctcattccctatctacctttccctttggtttcctgctgtcctcaaccaaggaaggtccctaaatgctgtttctacagcccattctgtttagagaattagaccttttagtctgagacagttttctatttgcagctccatgtgttgttaagagataaagagaaatggtaagttgcatctgaaattaagttattagcaaaatttgaatcacaaacttgctcaggataatttttctctttctgttttcaatactggtgaagacctcagaatgcatagggcatgatcactaatcaagaggagagggcaaccacacattgattg

SEQ ID NO: 760614 - DNA, 629 bp, Homo sapiens
tctgcacctcaagttctttatgtaaaaagtggaaataaaattgttactgacctcaaaggggtgtttgaaaagcctagttaataaaacaactggaaagcatttggcaagagtaaatgcttaattccagaaatagaaatgctgtattaaatcatccggatcaatgcctggacactaaakgattttttgataacctcctatttccaaatgctccccttagtctagtttgaaaattactcaacctggagaaaggagttcagccattttaatggaacaaccataggaaccactgaccttgctgagaaaaaatttattccaatacccagcataaattttcctgtgcttaattttattccattactcctaattatacccaccttatgataccttctcttattttctgtgcagccacttgaaataattgcaagcacttagcaatcccctctcttgtcattttttaaaccgcatatatttcttttatacgcacaccaaatgttcattatacagaatgtgatattggcaaattggtgtttttgtaagttgtttgatgaggatggaaaagttgtctaagcactttttctgcctgggaataatcccagtcctgagacaaacacagggaccgttgtgatagg

SEQ ID NO: 760615 - DNA, 575 bp, Homo sapiens
ttagagcagcactgtgcaatcggactgtctgcaatgataaaaatgttctgtatctgcaccatgcaatataatagccacttgacacaggtgtctactgaacacttgaaatgtggctagtgctactgaagaaccaaatgtgtacttttatttaattttaattaataaatgtagataaccacatctcaccatattggacagcacagacatagtgttttctcatctataaagtggrgattgtaagatttcttctctcttatattattttttcttttattgagatggagtttcactcttatcacccaggctggagtgcagtagcctgatctcggctcactgcaagctccgcctcccgggttcaagcgattctcctgcctcagcccgccgagtagctgggattacaggcacccgccaccacccctggctaatttttttgtatttttagtagagacgggtttttatcatgttgggccaggctggtctcaaactcgtgacctcaggtgatctgcccgtctcagcctcccaaagtgctaggattacaggcgtgagccaccgcacccagccatctcttacattat

SEQ ID NO: 760616 - DNA, 630 bp, Homo sapiens
cctaatgtttttgttgttgtatctttggtatcaggatgatgctggcctcatagaatgacttaaggaagagttcgtccttttcaattttttggaatagtttcaatagaaatggtaccaactcttctctgtacctctggtagagtttagctgtgaatctttctggtccttggctttttctggttggtaggctatctattactgcttcaacttcagatcttgttattggtctattcaggaattcagtttcttcctgattcagtcttgggagggtgtatgtgtccaagaatttatccatttctcctaggttttctagtttatgtgcatagaagtgtttatggtattgtctgatgattgtatttctgtggggtcrgtggtgatattccctttaacattttttactgtgtctatttgatcttctctcttttcttctttattagtaaagctagcatctatctatttttttttcaaaacaccacctcctggattcattgatgttttgaaaggtttttagtctctctgtctccttcagtttggctctgattttgcttatttcttttcttctgctagctttggggtttgtttgctcttagttctctgttttttttagttaagatgttagtttgttaactt

SEQ ID NO: 760617 - DNA, 612 bp, Homo sapiens
ttgaaaagactttcctttcaccattgctcagaagaactagctttttataaatcaagagtttcatattgtgcaagtctgtttctagatcttgaaaattatgtccactagtctgttttatattcttcagagaatatcaaattgtttyagttgctatagattcaaaaaaattttgataactagtagaataaattcttctatcttgttttactcttattaagaatgccttgactatttttgaccatttgcatttccaaataaatgttaaaattaatgtattttctgttaaatagataataagtggaatatcatttgagattgcctggcatttatagatcagtatggtaaataattacaattgcttcaacatagccttctcatgcataaaaattacatatgactttatttgtttaggtcttccttaatttctctcgataatattttatagatttttctataaacattgtgtatcttttctcttagaattatttttatgaattgaatatttgttgttttataaatgccatctttttgtgtttcattttggaattgtttattccttgtgtagagaaatattgttaatttttggatattgaatctgtgtccagaaaactt

SEQ ID NO: 760618 - DNA, 646 bp, Homo sapiens
tcatcattattcacatactgccaccaaaacaagtttgactgtggcacagttcataagtgcaaaatatttcatttgtggctggaataaatgagacatgtaatctcatcaaatgtatattcagtaggaattctactctgccatctgtgggttttcacatacttcagtgtaactgaatttctaacagaaaatccagctctcaatgacattatgtgaatttgtgacaccactgtaggacacttgctgggaaggtaaaataatgaacatgctacatttttttcatctatcgaggagattcatccrtgacagatgtaacagtgataataatttaatcataattatgctattatgccatattattatgacagttaaggttataatttaatgtcactcccttttaattcaataaagttattaatatattagaaatattttactagtaaagatttactcgagccaagtcttttctttctcttgatggtgtaaaaattatctgctcagataaaaagtaacctcatggcttgagcgacaaaactaggtattaaatttagattctaaacagatatcaattctcaggggtcttggtaattctcttaaattttgacccgtgcatattctctctctctctctctctctcagtctatccttc

SEQ ID NO: 760619 - DNA, 624 bp, Homo sapiens
ggaatcattcctgacccatcccttccctgttgatcttaccttttaagaataggtaacttctatttaacatcattaagaattcctgcgcatcgaatgttctgcaccaaaacacgaatcagcagcctatttcacattatttcaagtgagaaaaatacaatgagctacatcaaaacaaaagtccccaactaaatttctaaaggactaaagcatacctaaaatacagcaaaagttgttagattttgaaatctttcatggtaaataatatttatccaaaatatgcagggaaaaatgtacaataaaaattagacaattctctaatacatacttaccaagtgagttggacacttgaggcttggcaaatgttgagaaggaaaaagggtaaaagattaaagttatctttgtcacttactttagaaggtggtggtactgacaatttgggtaatgaatggscaatttcaggcaaattatcaaactcagaggaactggtagagattctctgtcatttgggtatttgtagagacatttgaaaagtcaaaacttgaaaaacagatttgatatgtttagataaaaaatgcaaaatcgatttttatttacatttccattattttttgaacaaagctataa

SEQ ID NO: 760620 - DNA, 548 bp, Homo sapiens
ccgttttgttgttgttgttttttctttttttttttttgagacgaggttatgaaacttgtccaagactacactgcagataaattgtgaatccacaccacaaacccaggtctgtttgagtccaaagatcttttatttttttcagtttttwaattttatttattttttttttctgagacgggatctcgctttgtcgcccaggctggagtgcagtggcgccatctcggcttactgcaagctccgcctcccgggttcacgccattctccttcctcagcctcctgagtagctggggctacaggcacctgccaccacgcccggccaattttttgtatttttagtagagatggggtttcaccatgttagccaggatggtctcgatctcctgacctcgtgatccgcccgccttggcctcccaaagtgctgggattacaggtgtgagccaccacgtccggccctcccctgttttttaaagaacttgttgcataccaagttatccccttttacagatggagaaattgaggcacagagaggcaaagtcacctggtcaagg

SEQ ID NO: 760621 - DNA, 578 bp, Homo sapiens
agctcggccagcggtaactgaagcctcccagaatcctggatccgggcccctagtaccctctttcccagggacccaggagtcctgcctccagtcgcctgcacttgtaactgagagctggaggtcgtccatagcagcatagtgagagtgtttttgatgagggtatgcagagtgggggtgaccatgttcccacctggggcctcaggtgggccaaggcctmcccactttagccagcgtcccctccagcagccatcagcaagccaacccactccaagccagggccccctttggtccttgcacttgaggtgctttgttcagggctgggtcaggagtggcagagacgatgtccaccacctcagtactggggaaagtagcctggttcctcctcgtgggtcctggagagacagagagactgatggagaggcaggccaggaagagggagagtgagagtgggacacaccgaggtgcagacagaaaccggtgggcagaagtgggagacagggggcaggtgtttccgggccccgaggccagggggcaggagggcatttagacagagacattggatggacagccagacaatg

SEQ ID NO: 760622 - DNA, 566 bp, Homo sapiens
tcttcaaataatcatagtataaaataatgctctaatagcaatctacaagaggtgcctttctataactcttcagtgcatcataatgcactgaagtatttgaacaatttgccatatgaacaggtgggtaagaattgtggagaagaacaatagggggccactgggaggaaatatgtaccagcatggcgggtcatgtaactgggaaaacccagtcaagatatttcaggccwaggaaagaaaatgttctcatgacctagaagcaaaggtaattgtatgtgtatgtatttaaaaagtatgtataaaaaacctcacctgaaccttgatttctaaacatgcaaaaatccttttctcctcttcaaactccttcttagaaatctggcaacctggcagcactgggggaaaaaacagtaacatgagacatcagcatttctagcgcgtcacagacttaattaaaaaagaaaaagaagagcaaaacaccctctggggccacttctgccttcatccacacaaaaccaaacggaatgaaaagggaggctagagtctgtctctgtgttgagggcaattcttgg

SEQ ID NO: 760623 - DNA, 566 bp, Homo sapiens
tcttcaaataatcatagtataaaataatgctctaatagcaatctacaagaggtgcctttctataactcttcagtgcatcataatgcactgaagtatttgaacaatttgccatatgaacaggtgggtaagaattgtggagaagaacaatagggggccactgggaggaaatatgtaccagcatggcgggtcatgtaactgggaaaacccagtcaagatatttcaggcctaggaaagaaaatgttctcrtgacctagaagcaaaggtaattgtatgtgtatgtatttaaaaagtatgtataaaaaacctcacctgaaccttgatttctaaacatgcaaaaatccttttctcctcttcaaactccttcttagaaatctggcaacctggcagcactgggggaaaaaacagtaacatgagacatcagcatttctagcgcgtcacagacttaattaaaaaagaaaaagaagagcaaaacaccctctggggccacttctgccttcatccacacaaaaccaaacggaatgaaaagggaggctagagtctgtctctgtgttgagggcaattcttgg

SEQ ID NO: 760624 - DNA, 624 bp, Homo sapiens
atattaaaaaccaaaagctgacaataaaaagagaagtttggcctttctaggctaataagttacttgttattaaaaggtacctgtcccagcaataatgtacttgtcaagttggagaagatgtatattcatattcatgtacccacasgttatgactttctataaattaattttaagaaagattgtgtacctaggtttaaatacccttgtcaatttggaacaatcgtaatactctttcattgtccataatgtgttttgacttcaaggtagtcacttactttatccttataaattaattaggttttatacctcaatagaggatttaatttttttccattatgaagttgttgtttattatattaaattaaccagagccattgagccttaacaactacaagaaggtttttccaaactcaaatctactgacatttgggcccaaatcattcttggttgtgcggggttttcatgtgccttgcctgttgatgactgtataacattttggttgagctattaaatgatggatgattattgtgatgtgaatgtgggaagtaagtttaatcatatatagttggtcacaggtctaaactgcactattgctgtttcatttaacaatgtcttgctgctttt

SEQ ID NO: 760625 - DNA, 576 bp, Homo sapiens
tctttgaaatttgtcacacaacctctgattcaaaatacttccagtcctttggacctcctataaaagaggtctccatctggaaaggactttgtgtcatttctgttttttctcatcaaacatccagaggacccctagtgtaagtaatgccctgagtcaagggactaagtgtctatgggtattgtcatgaaaggaagaccttcctggactacctagataacacacttttctcccaataccttctctctcattcataattgacctttggatttattttctgccttarcttcatacctttgaggtctccacatatcttctccgcaattttattaacaccacccaataacagggtattcaatgagcagaagatgaagaatcttagaagaaatcccagcttggcagacttcatggtgcagcaagcagcaggcaggatagttgtggtatcacctgatgttatattttgggcttgatacttgagacggttcagctcacctaccccaagggccaggactggacattactaggtgttgagttgaacagtgagtgcttgggtacccagccatgaagctgaaggcccca

SEQ ID NO: 760626 - DNA, 517 bp, Homo sapiens
tctgattacagattatagatgtgagccaccgtgcctggctggtattacagatgtgtaattgttgggattacagatgtgagccaccgtgcctggctggtatcagcttttctttgtgcccctggtagaattcagctgtgaatccatctggtcctgggctttttgttgttgttgttgttgataggctgtttattactgtctcagtttcagaactcgttattggtctattcagtgtttygatttcttcctggttcagtcttgggagggtgtatgtgtccaggaatttatcagtttcttctggattttctattttatgtgcatagagatgtttatagtattctcaaatggtagtttgtatttctgtgggatcagtggtgatgtctcccttatcatttctaattgtgtttatttgattcttctcttttttcttctttattagtctatcttgcagtctatcaattttattgatttttttttcaaaaatcagctcctggacttgttcattttttgaaggggtttt

SEQ ID NO: 760627 - DNA, 597 bp, Homo sapiens
caatatagatagagacagaacactgtggacctgcagaatcctctgctcccctaacacacacacaagtctggctgattgtggacactcagacacaagtctgggtgattgtggagtggaaggaggatctacatatctattttttttctaacattgtgtgaggaccttcataaagtctcatccatctttatattaatttctccattgstagcatcagcctaacaccaccttatcagcaatctcttgtgacttttgtgaggaaaagagagatctcttccaagagggcttcgaaaatatcacataacatgtagattttaaatatatagacttaaactatactcaaatcctacatcccacttactctaggaaagtcactaatcatctctgtgcctcaatttcctcatttttaaagtgagaatagcagtactttcttcataggatttttgggaggattccatgagttattttgtgttaaacactgagacccaatgtctggcatataagcagtgctatgtatggtttgctaaataaaccaataaaacacttattgaagtgttcagaatcacccagttggacaccaaattcactatgagtcaaata

SEQ ID NO: 760628 - DNA, 588 bp, Homo sapiens
cggagatattgcaggttcagtttcaggctaccataaaaaaggtaatattgcaataaagtgagccaagtgcacttttttggtttcccagtgcatatgaaaagtatgttttcctgaagtcttttatttatatatttatttaaactagaaaatgaaatatttaatagttgaaagttgtttctctgaaaaagctagtaaaatttgcaaacttctgatacaaatctgtatatgtttcagtatacaactgtacctctttcatattctaaacagattctaatagttttcttatgatgaatttcattattactcattaaaatattaaaaaggtgtgtttacactatgctgtatctgtcaagtgttcaatagcattatgtataaaaaayaatgtgcataccataattttaaaatactttactactaaaaattgctaatgattatctgagccttcaacaagtcatcatctttttgctggtggagggtcttccctcaatgttgatggttgttgactgatcagggtggtggttgctgagggttggggtagctgtggcaatttattaaaataagaacaatgatgtttgccacatcaattga

SEQ ID NO: 760629 - DNA, 624 bp, Homo sapiens
ataaaagaaataaaaaataaatgcttgaaaaatattaatgctacaacacaatgattaggaaaatacaggtagcattatttgtgctgttcattataagcccgtaatagctgacttgcgttaacaatcctcctctattatgcatttcatacttttgtgtttagccaataccacaaataagctgtgttctttatgtaaaacttcatttctgtgtgatattagcttttgagagaactgcctgggcaggctttacattttcccatcttttggactttaatggctcccattatattttacaactgagatggggtacaattatatgtatatatttttcaaggtagctaaggtgaaaattaaccctattttatcttcacagtttcaaaaattgcaggcaaactgtaatacccatcttttrtcaatttttttattcttatgaagagactgaagtggccagatataaatctcaactctgaattgaacaggtccattttttaattgcttgatgaaagtattcccccatttagacacaaaaacaatcaaaccagtagagtgcataatcataagaatgggaagcaaaactattacaaagtagaatcttaaatactacatacaccaacttggtcccca

SEQ ID NO: 760630 - DNA, 527 bp, Homo sapiens
tactaatctctatcacggaaattcatgtctttgctagtataatatatgatgcataataaagattagtccattttctccatacaattctactctgtgtatttcattaccgttttctcaaaaaattccatatttaaatttcacaattgtttttactatacgtatggttacttgagtratgaaagacaatatttggtaattttttgttggtatttttactgcggtgattgtttatgctgagaccttattgaatagttttggatgaacatacagatataagaaagaatagcttagtccagtttctttgaatatcacaatcactatactgatattgacgcactccacctaggctcactcagattttacttgtactcatgtctgtgtatacatgtacttacttccaaacatttttcactatttgcatcatttaaaagtggcttctagtatattcacaatattgtgcaaccatcaatgcgatgtaatactagttctatacaattttagtgcatgtgtaggttgctgtatccacc

SEQ ID NO: 760631 - DNA, 646 bp, Homo sapiens
gaaactggataacattcattgctactgggacggtaaagtgcagtcagtctggaaatgtgtctgggagttccttacaagattaaacattcactttacatcattagacaatttaacttttgtgtatttaactcagagaaatgaacttattttacacgaaatcctatacccaaatatcttagaatctttattagtaataactgaaaaactggaaacaactcagacagccttcaaataaagaatgcttcaacaaactgaaatatccataccatacaacaccacgctgaagaaaaaaaagatcatatgactaatagacacaactatttcatggatcccaagtscattgtactaagcaaacaaaagccaacttcaaaacaaatgttatcatatatatgacataatgccatttgatgcgattaatgcacttatttaaatttcttgaaaagataaaattagagagatggagattatatcagtggttgccgaggagggaagacagaagtgcctgtgcctataacatgagtgagtgcaggttaaactgttcaaatctgaataagattggcgaatcgatcgatgccattttcctggttgtgatattgtcctatattttgcaagacattgcaattggggaaatctgaagagttcaggg

SEQ ID NO: 760632 - DNA, 636 bp, Homo sapiens
aactctgcctcggaaacagcgaggagacccaggcacccggagtgcagggagtcccaggaggatggaaatgaacaaggaaagtgaggaaggaggttgattatctagggaatcttcagatttgataacgccttggcttttactctcagtgagatggaacactgtcagaaagtatttgagcagaggaatgtgttgagctgacttattacttcctaagattaatgcctcagctgaagtcaaaggtggaattagggtgacaagataagagggtatttaaattatctgggcagaagtggtaacaatgattttgtacaaggtggaagcaacagatgtatataagttgtcacagaatcaggtcctgggaatattttgaattagaaccagcaaaaattattgatgaatgattggagtggtagtagagaaagaagaagtcaagggctgttctgwgtgtgtgtgtgtgtgtgtgtgtgtgtgtgtgtgtgtgtgtgtgtgtgtgtgtgtttggctactgtaaaaatggggatgtcatttcctgaagtggaaaaatgatctgaggagcagatttggaagtcagtgtaggaaatatcaggaccacagtacttgacatgttcaatatgagatgcttgttacatatccaag

SEQ ID NO: 760633 - DNA, 624 bp, Homo sapiens
gtaaagtgctgctccccctttgtcttccaccatgattgtaagtttcctgaggcctcaccagtagctgagcagatgccagtgccatacttcctatagagcctgcagaatcatgaatcaattaatctcttttctttataaattacccagtcttaaacatttctttatarcagtgtgagaacagactaatacaaagttccaagagtgggcatcttttctttatcttgatcttataagttaagccttcagtttttcaccattgaggatgttggctttgggcttttcatgtatgctttatattattttaagaaaatgccctctattcctagtttattgagagggtttatcctgaaagatagttaaattttgtcaaatgttttttttctgcatcagctgagatgacgatgagatttgtgtttattctgttaaggtggtatatcacatcaatagatttgcatatgctgaaccatccttgcatcacagggataaactatactttgtcatagtgtttatttctttaatgagctgttgaatttatttagctagattttgtttcaggtttttgcatttgtcaggcttaattttattttcttttagtgtcttttttctggcttttgtatcactgca

SEQ ID NO: 760634 - DNA, 651 bp, Homo sapiens
gaaagatagttaaattttgtcaaatgttttttttctgcatcagctgagatgacgatgagatttgtgtttattctgttaaggtggtatatcacatcaatagatttgcatrtgctgaaccatccttgcatcacagggataaactatactttgtcatagtgtttatttctttaatgagctgttgaatttatttagctagattttgtttcaggtttttgcatttgtcaggcttaattttattttcttttagtgtcttttttctggcttttgtatcactgcaataggagcttcataaaataagtatagaagtgctcccacttgagttatttttaaggttttaagaaggattggtattaattctattttaaatgctgaccggttttaccagtgaagtctactggatttaggattttctttgccaggaggtttttgattactcattcatatctccctactaattaaaagtctgtccaagctttatatttgttattctgtattatttggttgtatgtttctaggttatccaacttgttggcatatgattttcacaatagtctcttggtattttttttttcatttcttcagtatgagctgtaaggtcgtctttttcatttctgattctatttgaatcctctctttaaatctagataaggg

SEQ ID NO: 760635 - DNA, 509 bp, Homo sapiens
ttctatcaaacatattttactgtattacatctagtaacttagtaaataagctatgattaaagtagaattttgataatgctatgaaatcatatatgaattttgtacaaaaattaaattctgtgattttaagactaaattctatgaagaagggaagtytagaaactgactttttataacccaaaccttaattatctgattcaattaaatcatattgaaattgtgtgttttaaataacaatggattattagcgtgagaaaaactattttggggaaaaagatgttcttaattaccattaaacaggaattaatctgtactactataaatgtataaatatggtgctacggccttctgaacttgatgttgttatactatagggagaaagctatttttacatgtactggtggaattacaaaaacctgaagtcaataataaagtccatctgtatgtcacatccactgcacggctggcagcatggttttctccattgtgcgaattgcaaaaatcaaatt

SEQ ID NO: 760636 - DNA, 608 bp, Homo sapiens
ctctttatagaaaccatcagattttgtgagacttatttactatcactagaacagcatgggaaagacccagccccatgattcaattatctcccactggggccctcccacaacacgtgggaattatgggagctacaagatgagatttggatggggacacagagacaaaccctatcactgtccttcccccaacacacataaacattatctgcaccatgccgctgctgttgggggcgggggcggtggtgtcagcaattcaaggctgttttctctatctcttccatgtctctttcagtgatatgaagttaaaactaggcactgtgagtgctcacttgatttttggytctcattaaagtccttttttgtgtacatagttgttaagttggtgtccttgcaggagagatgattggtggagtcctctacccagccaacttgctccacctttctcctgcatcaagatcttttaaaatccattctgtcaatctatatcttttaaaaggagcaatttatgttcaaggttaatattgacaggtgaggtatttttcctgtcataatgttaattgttatctagttgctttgcagtctcatttgtctaattgtttattagagct

SEQ ID NO: 760637 - DNA, 608 bp, Homo sapiens
ctctttatagaaaccatcagattttgtgagacttatttactatcactagaacagcatgggaaagacccagccccatgattcaattatctcccactggggccctcccacaacacgtgggaattatgggagctacaagatgagatttggatggggacacagagacaaaccctatcactgtccttcccccaacacacataaacattatctgcaccatgccgctgctgttgggggcgggggcggtggtgtcagcaattcaaggctgttttctctatctcttccatgtctctttcagtgatatgaagttaaaactaggcactgtgagtgctcacttgatttttggctctcattaaagtccttttttgtgtacatagttgttaagttggtgtccttgcaggagrgatgattggtggagtcctctacccagccaacttgctccacctttctcctgcatcaagatcttttaaaatccattctgtcaatctatatcttttaaaaggagcaatttatgttcaaggttaatattgacaggtgaggtatttttcctgtcataatgttaattgttatctagttgctttgcagtctcatttgtctaattgtttattagagct

SEQ ID NO: 760638 - DNA, 524 bp, Homo sapiens
aaatttgatttttgcaattcgcacactggagaaaaccatgctgccagccgtgcactggatgtgacatacacatggactttattattgacttcaggtgtttgtaattccaccactacatgtaaaaatagctttctccctctattataacaacatcaagttcagaaagccgcagcaccatatttatacatttatagtagtacagattaattcctgtttaatggtaattaagaacatctttttccccaaaatagtttttctcacgctaataatccattgttatttaaaacacacaatttcaatatgatttaattgaatcagataattaaggtttgggttataaaaagtcagtttctaracttcccttcttcatagaatttagtcttaaaatcacagaatttaatttttgtacaaaattcatatatgatttcatagcattatcaaaattctactttaatcatagcttatttactaagttactagatgtaatacagtaaaatatgtttgatagaaaaactcaaaataag

SEQ ID NO: 760639 - DNA, 621 bp, Homo sapiens
aatatagataacaccaaaaagcagaaaaaaatattaccccttggattaccttttctcacctacccctgtaatttgggcaagttcaggacctccagattttttcccacaattgcctactgggccccttgaagtcctgaacacttgttcttactcaccaggttttgggtctcaaactaggatctgatcttgtttcctggtgaatctgtctcaaccaaacagacgccatctgcccaggctggcagctgtccatgcttcctctctctaagtcctccccaggttcctagtttttctttttgttggcacagtgataaatgtcaggaaatcttgggttcaaaaatggtgggcaaccactgttccatamgtattatatatgatcagtgttatttctggtggttcacatcagcttcttctggctgtgttaaaagctagtctcttattactaaagccaccaaccaaatacagacactttaaaaatcagcatacggaaagtatatgtgctcagcaagcagtctaagaggagattgcttgcttagcagaatatgtctattcagaagcaaaacttaaaggcacacattttctgactattataacccgaaataaattctccagatttttcaaaga

SEQ ID NO: 760640 - DNA, 646 bp, Homo sapiens
ttttgccacgttgcccaggctgcaccttgaagtctttcaagaaccaacagaaggccagggaggggagcaaagtggatgagtgggagaaggatacttcctgagctctttcaaggaggtcagggcaagtcgcatagggttttgttaaccctgacgtggatttgagaaacatcagcacgcaaggaggtatctaaagctggaggcctggatgaggttgcctttgggaagtgaggaaacagcaaaaggaggggcttggtacagacctggatggctcaacctttagaggttgagcagagacgaggggactgcaaagaagcagccaggcaggtaagagttcagatgtctgggaagccacacgagaaagtgtttccaaaagcaacacatgctgttgaagaagcccagaaagaggaagatacagaggtggccaccgatccaatgacaacgtgcaagttgttgatgactttgacgagaccaggttcagtgttctttgggargattgaggaggaatgtgatttaagaatagatgttcatgaccgtagaagtggaaatatgaatataaaggttaaggtttgtttgttttaagatgggacttactgtctttaaactgtctgcagtagaatggaagcaactaatgaaaatgaaggtgggg

SEQ ID NO: 760641 - DNA, 622 bp, Homo sapiens
tattgtttttactttccttgccccactattctgcattcatcaaatattcattgaacactgtctttttgccagagactgctgtaggcacaagagatacagcaaaaaacaagacaaaacccttgctctcatgaaacttacagtcaagtgtgtgagatggacataaacatagtactgtgctgtcatgttgtaaaatgggacctctcattgagaagctgggttggtttgggggtggggagtatgacatcaatagttctgttttgatcatgtttagttcaagatgcctgttatggtcaggcaccgtggctcacacctgtaatctagaactttgggagactgaggtgggtggatcccttgagttcaggagtttgagaccagcctgggcaacacagcaaaaccttgtttctacmaaaaatacaaaaattagcccggtatggtggtgtgtgcctgtagtcccagctactagggaggctgaggtgggaggatcacttgagtcatggtaacagactcgctctgggtttcgctctggatgacagagcgagaccctgtatcaaaaaaaaaaaaaaaatgcctattagaccttcaagtggtgaagacaagtaggtaattggatacacaagtctgg

SEQ ID NO: 760642 - DNA, 591 bp, Homo sapiens
attgttagtagagatggggttttgctacgttggccaggctgggcccaaactcatgtgatctgtccacctcggccttccaaagtgctgggattacaagcgtgagccaccctgctcagcccgatatgataattgtgaatgatcatatgtgtgggacccgagatattaccaggccaaaacaaaccaattttaagcaaacataaaattaagccatattttaaaaactgaaagcaacaattttagcatatattcctaatgggtgatcgaccagtgtctcagccgtcaggtttataatggcatcagaaagcaagttataacccagagaacttaaaatttcatctataaaactgttgggaatactacaatgattccttaaatatttacctatctttttgattttagcatttcttactaaaatcatttctctaattctcttcctttyggataaaagcaaatttgcaagttgttaagtacagactagtaaaaatgcttttttgcatatggagaattactgttaaagttctcacttaatagttcctatacagtacttaggcctgaggaagaatatgctctaagttttcacaatgtaagaaa

SEQ ID NO: 760643 - DNA, 640 bp, Homo sapiens
gcttggtacgtggtttaatcatccagtttcagcaatgtgacgggggtataatggcttttctgtacacttgtatcttggcttccctgaaaacagatatcatgcatgcatcttggtggttcacacccaaacacagagcacayccagtgagcctgaggaaaggcgctgcttgcaggagtctcagccccctctgtgtctgctggtacttgctttctcccgctgtaccttatcctccagtttatactctaccagtataccctttggaatcttgtgagtcttttcaatgatctgactctgtgtcactactccaatttcagtaaaagcaaacaaaaacagaaatcgaggctatgagagtagagtgcaataatgatgaattctggcagccacccaggaagacaccattgaaaagacaaggtcctgcctcccttacgtcttgcacactcatgatgctgagcctgtcagtgaccaaaaatcagactacacaagtcagccaaaagtgaaacagaggtgtcaagcatatgaactgcatctgaaagtttttgccttcctaagaatattcttaggcctcttcttcacacactccagagcaatgagaaacatttggaattgaattttcctataaactatatctttgcagatagac

SEQ ID NO: 760644 - DNA, 650 bp, Homo sapiens
gcacaaacccagacagtgaagactacaataaatacctaactcttcaatgcccagacatagacaaatatctacaaggatgaagaccatccaggaaaacatgacctcgcccaaagaactaaggcaccagggccaggcgcggtggctcacgcctgtaatcccagcactttgggaggcagaggcgggcggatcacgaggtcaggagatcaagaccatcctggctaacacagcgaaaccccgtctctactaaaaatacaaaaaattagcygggcgtggtggcgggcgcctgtagtcccagctactcgggaggctgaggcaggagaatggcgtgaacccaggaggtggagcttgcaatgagccgagattgtgccactgcactccagcctgggcggacagagcgagactctgtctcaaaaaaaaaaaaaaaaaaagaactaagacaccagggaccattcctggaaaaaaacagagatatgtgacctttcagacaaagaattcaaaagagctgtggtaaggaaactcaaagaaattgaagataacacagagaaggaattgataattctatcagataaatgtaacaaagagactgaaataactaaaaagaattatgcagaaactaaaaatggaattggcatactgaagaatgcatcaga

SEQ ID NO: 760645 - DNA, 645 bp, Homo sapiens
ccaggactcgctggtttttcacgttgatttgattaaatcctgattcaatgggcccagacttatccagaagagagaagttcctgctgcacggagtctgggggaaaacaacggagcgctgctgggtggtaggggcgagtttgctgcttttgttgaagggctgcagggcgtcttgtctgcacatggcttccattaccgttgaagggacatttactaggagaatagcaacagtttagaagaacagttttattagcctttaaaataagcacaataacacatacttttaaaaaatcaaataaatcaaccttttaagaatttgtgtttctggactcagaattaacataacaaaccatctgatttgaggggaaaaaactattatcacagattaataactcatctgatgcctatttatgaagcaactgtatgctcaggattrttttacatggtctttgccctcatggagttcacttatgacttcagacatacaggagtccatagtgagcaccacactgcacctatgcctggagggagtttagatgggaggcacagcaagagagagggagtgagcaggggatgttgcccagagagggtagccctgagcagtgcagagaaaacggattcagcttgactgatggagaatttcaggct

SEQ ID NO: 760646 - DNA, 575 bp, Homo sapiens
gatcctgcgaaaacttattttgtatatagtgagttcacattaaaaaaacagacattcgttcacgcgttcatttgagcagagagagctctgtaaaaataaagaaaactctcatgaaagcttgagtaaacatttatatctaactaatcaagaaaacctgtatcttcttttatttattaagtgccatttgggggcttataaagattgctgccacaaactgtgtgtattgtaaacaaagggcagctttcattattaccacgtttgtatccatatcctgagatgaacgagtaagcaccacagtttccagsttccctcctattctggcttttctctctcttctctctcatatacacttttgctgagatggaaggggatcagtaaactagacctcagcccttggcatcagagaatcctgccttgcaaataatctcagactgtggctagcaaatgtgaagagctactcagcatcccttgtcgtgtcagtgaaagatggattttggaaacaacaacaacaacaacatgctacatatgagaaagtatcaattttggaaaataaaccacagagaaatgtgtattaa

SEQ ID NO: 760647 - DNA, 587 bp, Homo sapiens
tttggaaacaacaacaacaacaacatgctacatatgagaaagtatcaattttggaaaataaaccacagagaaatgtgtattaacatcttcctccacttttaaaaataaagccttagttttataccaaacaggaaatkgaactattattttgttaaaataatcctacaaataatagtagtgtgaactgatgggatttgcatgttacatacaatcgtacaccaaatagttctgcactagagaactataaaatgacacatttaagttaatgctcacactgcgatgcacacttgaaatctccatatgcctcgtgcaacacgtcttatggagtactatttaactctttattgtagcagaaattttggtttatatagtctagtgggtacaataccgaatagaccttgctgaaacctgactatacctcagttactgactacacctcagcctggtagctactgaaaaatatgatttccaagaagcagcttggaccaaagcataggtgcaaactgctatgttagacagcaatcgtattaaatacttacaaagtattaagtgggaaatgtttgtaaagggaacatctctaaaaaata

SEQ ID NO: 760648 - DNA, 669 bp, Homo sapiens
aaagttttccttaattcgttagtcatcaccttagcctctgcatttaaactgggggaaggctttttcatgaaatacttagaactgctaaggagaataaatttgcctctggcttttgctatacattttctccaggttgggagaaactagagaagtgtactagattgttcagagaaagtaagtctacaagtgctgattttgttaacattagacaatgcccacatgtggatcaacagggactgtgggttggcagacttttgctctaagatggctgctttccccaacatgtggcaatcacctgatacggcataattgcttttaaacatgaaagagttgtgctgtagaaatagatctccarcttgttaaagtttatatctagactgttttcagttgggagtgatgtaccaaagtgggagaaaggcaccaacaaggatgtttttcaaggcaggaaacaggagatatcaaccaggacccaccatgtttgacaaggaaaatatatttatcatttcaacaaacaaatgtgcccattagaatcagaatctggaggaaagtagtatacattgtggtttcaataaaccatggtaaagagttgtaataaagccagttcatgatgaaattttgtacacttactttttgaacaaacctcacagtttcatctagattgtgccccag

SEQ ID NO: 760649 - DNA, 576 bp, Homo sapiens
ccacacacaaggtttttcttagatattattctcaagccttcatattcctttgccttgttgtctccttacctccctattaattaaatggcagctttgttgaggtcacagaatgtgacctttaatctggtttttactctagagcagcatcactttgtttaactgacaagtcttactgggccattatcaccaaagcattctttgcactcttggattacaaagcatttcttactctttggaggcccagaaaaaattgaccctttcaagtttgtaagattctttctttgttcctgcccaaccttgcttgaaaattggccaattcttttctgagctcatctctttcttgtaatactgtgctaaagccagccagtagctaataygcaacatcactctgaccctttctactaattccagagcttctgggactagctgccaagccattgccacacatttcaggtttttgtaatggcagcatctgacttccactaccaatttctgtattagttaaggcaacaccagttggtgtacagaaactttaaattctcagtggtttaacatggaaattttatttcttactca

SEQ ID NO: 760650 - DNA, 514 bp, Homo sapiens
aaaaggagtaactaaggtgaatctgattgtttctgtaataagccttcatgtgtataataaagtacaaccatactaaaaacaatgaagtgtaaactgaaacaaaaatccatcatctacttggaaatagtgacaggaaaagattagcaatccatttattgtactgaaataaagataagtaaccctggtaagatccatcaggacctgagtattgaacttgaaataaaaagacwtttcttcatcagcaaatgacttgaaaaaatgtgaggaagagaaatgattacagttgccttttaaaataaaataatcatgattcaactgcttttaatttttttaatacattttgttgacttgctattctggaagacatctaaaagaataagtttttgaaatggataattattacatgagtcattaaacaattattgccaaacatttccgatagacctacaatgtattctacttactgattctaatgtgaataatatgatgatttttttaaatttcagaagaaaat

SEQ ID NO: 760651 - DNA, 609 bp, Homo sapiens
atttgttgttgttgttgttgttgtttataaccattctgaaaggatataggaatgactccaggtagaactgttttggaaagtacttaaggcagcatcctgaggcatcatatctctggttgggaaagaaaactattgatgtgttcgtatatattgagaaccaaacccaccatgggtgctcaataaatatcaagcaatcaatcaattctccagtcacagagaagcttcctgttccaaacatgtagtcacggaagagagcttggcccaagacccatctccctcttccaaatgatgtgactccaaactccaagaaaagttctgggtaatttttttttcttcatcccacagcaactgatggcacaatccttggcagcactggaaacagcgatttccagatcaagacaccaaagcaatgagatcttgccgtacawtggtcaagtttctacaacgcaatggaaacttaatggaaagagaatcttaaattatagccaggcagctgattggaagtggcggcacctgttttcagaaatgctctaagtaaaaattgatgtgattttgaaaatggaaatctattgtatggaactctttagcatcaaaagcacttgctggaag

SEQ ID NO: 760652 - DNA, 510 bp, Homo sapiens
actcattcctgaattctaaaatgggctgaaatataacaagtaatcaataatcatttgttcaactgaagtcaatttaatatatggcacgatggcttatgtttgaaaaggaagaaattctaccatcaccttaaaggtgatgcctaaattttatgttaataggtatatttcttcttaagtaatacaagatatattcttctaacagacgtctactgactttccaaatgataactgataaccatggcaacctgaacactcctggttgatagggcaattctctagggcttcaaggcatgttggttgccttcagatggaaatgccttctcaaaattgctaatgtaggtatgagatactcccttaayaagattactctcttatctgttcattatttactttgattaaagccactaattgagttttttgatcaactcaggctttattgaagaagtgatgatggaatgtcaaagctctctgtattctactccctgactttgcctgaaaatgaatttggaa

SEQ ID NO: 760653 - DNA, 510 bp, Homo sapiens
actcattcctgaattctaaaatgggctgaaatataacaagtaatcaataatcatttgttcaactgaagtcaatttaatatatggcacgatggcttatgtttgaaaaggaagaaattctaccatcaccttaaaggtgatgcctaaattttatgttaataggtatatttcttcttaagtaatacaagatatattcttctaacagacgtctactgactttccaaatgataactgataaccatggcaacctgaacactcctggttgatagggcaattctctagggcttcaaggcatgttggttgccttcagatggaaatgccttctcaaaattgctaatgtaggtatgagatactcccttaacaagattactctcttatctgttcattatttactttgattaargccactaattgagttttttgatcaactcaggctttattgaagaagtgatgatggaatgtcaaagctctctgtattctactccctgactttgcctgaaaatgaatttggaa

SEQ ID NO: 760654 - DNA, 599 bp, Homo sapiens
aagcaccacatggttatcgactcactgcccttcaatgggattacaaattctgtgtaagcagcagaaagactcataactaatgttttctttaaaactatgaacatactgaccacagagcactttatagaacaagggaaagaacataaagtcaaaataatgacaagctttataagcttcggtttttaaatctggcaaacatatgtaagtacatgttgagtatcccttatctgaaattcttgggaccagaagtatttcagaattggggttttcttcagattttggaatatttgcattatacttactggttgagcataccaaatctcaagaaccgatatctgagatgttcccctgagcatttcctttgggcatcatgygcatgctcaaaacgtcttggattttggagcattttggatttttggactagggaggctcaacctgtatgtaaggatgcttttgcaaattgtattctaaatataaggcattatgttgtggtagtatataccatctagctaagtcataatcataacagcaagtaaatcagcaaattggtacagtatccactatctgacttatcttaataaaggttggatttcattata

SEQ ID NO: 760655 - DNA, 510 bp, Homo sapiens
aattcctacctcaccagcagcaaagaaagaacacagaagaagtttatatatttccaagtatcatttcctactaaaaagaaccagaactacttggagaaattgctaatttttatttcaggcttgaggtaggagaagtagaagtctgggataccttgttccagaaaggaaaatgataggaatccctcaaacaaacacaacagcctgtktgaagaggccctcagctgccaaaactgagaaatttgtgcaccaaaatgaataataatagtactaaattataaaccactgaataagtacacatctataatttcattttgatatttattgtgccacataaataaaagcacaaatggggagaaaaaggagcattacagactaccaaatacaagtgtgaagttctagaacactgggtagtataccacattttcccaccatcattatcataaattaatccgacaaaaatcaatagatactacaactactgagtgaaagctggctagcgaataggactat

SEQ ID NO: 760656 - DNA, 510 bp, Homo sapiens
aattcctacctcaccagcagcaaagaaagaacacagaagaagtttatatatttccaagtatcatttcctactaaaaagaaccagaactacttggagaaattgctaatttttatttcaggcttgaggtaggagaagtagaagtctgggataccttgttccagaaaggaaaatgataggaatccctcaaacaaacacaacagcctgtgtgaagaggccctcagctgccaaaactgagaaatttgtgcaccaaaatgaataataatagtactaaattataaaccactgaataagtacacatctataatttcattttgatatttattgtrccacataaataaaagcacaaatggggagaaaaaggagcattacagactaccaaatacaagtgtgaagttctagaacactgggtagtataccacattttcccaccatcattatcataaattaatccgacaaaaatcaatagatactacaactactgagtgaaagctggctagcgaataggactat

SEQ ID NO: 760657 - DNA, 510 bp, Homo sapiens
aattcctacctcaccagcagcaaagaaagaacacagaagaagtttatatatttccaagtatcatttcctactaaaaagaaccagaactacttggagaaattgctaatttttatttcaggcttgaggtaggagaagtagaagtctgggataccttgttccagaaaggaaaatgataggaatccctcaaacaaacacaacagcctgtgtgaagaggccctcagctgccaaaactgagaaatttgtgcaccaaaatgaataataatagtactaaattataaaccactgaataagtacacatctataatttcattttgatatttattgtgccacataaataaaagcacaaatggggagaaaaaggarcattacagactaccaaatacaagtgtgaagttctagaacactgggtagtataccacattttcccaccatcattatcataaattaatccgacaaaaatcaatagatactacaactactgagtgaaagctggctagcgaataggactat

SEQ ID NO: 760658 - DNA, 622 bp, Homo sapiens
tcatcagttgttggactgaataaactttttttctactaagactttgctggagaatgaataaactttttaaagcatgtttgagtaaattaccctaatccttagctataaaagagtttactgtagaagcagactcatctacaatacaaaattaaaataaggccgggcatggtggctcatgcctgtaattccagcactttgggaggctgaggtgggcagatcacctgaggtcaggagatcgagaccagactggccaacatggcaaaaccccatctctactaaaaatacaaaaattagctgggtatggtggtgggtgcctgtaatcccagctactcaggaggctgagacgggagaatcgcttgaacccaggaggtggaggttgtagtgagatgagatcatgccactgcacaccagctgggtgacagagtgagactctgtctcaaaaaagaaaaaataaataaaattaaatcagttaattmccaaaacaccttttgatttgaatgggttcaaaagagcttgtgtaattaaaatttctggaagaatattttctgtacaagatctgggatactgtggcttctaaaatatgtcacttcatttcagagggttgatgtgaggatttaatata

SEQ ID NO: 760659 - DNA, 622 bp, Homo sapiens
tcatcagttgttggactgaataaactttttttctactaagactttgctggagaatgaataaactttttaaagcatgtttgagtaaattaccctaatccttagctataaaagagtttactgtagaagcagactcatctacaatacaaaattaaaataaggccgggcatggtggctcatgcctgtaattccagcactttgggaggctgaggtgggcagatcacctgaggtcaggagatcgagaccagactggccaacatggcaaaaccccatctctactaaaaatacaaaaattagctgggtatggtggtgggtgcctgtaatcccagctactcaggaggctgagacgggagaatcgcttgaacccaggaggtggaggttgtagtgagatgagatcatgccactgcacaccagctgggtgacagagtgagactctgtctcaaaaaagaaaaaataaataaaattaaatcagttaattcccaaaayaccttttgatttgaatgggttcaaaagagcttgtgtaattaaaatttctggaagaatattttctgtacaagatctgggatactgtggcttctaaaatatgtcacttcatttcagagggttgatgtgaggatttaatata

SEQ ID NO: 760660 - DNA, 569 bp, Homo sapiens
catgcctggataactttgtattttttttagagatggggtctcactatgttgccccagctctgccttggcctcccaaagtgctgggataacagacgtgagccactgctcctagcccaggagtatatattctttgtttttttgagatggagttgcccasgctggagtgcaatggcgtgatctcggctcactgcaagctccgcctccctggttcatgccattctcctgcctcagcctcccgagtaggtaggactacaggcgcccgccaccacgcccggctaattttttgtatttttagttgagacggggtttcaccgtgttggccaggatggtctcgatctcctgacctcatgatccgcccgcctccacctcccaaagtgctgggattacaggcgtgagccactgcgcccggccaggagtatatattcttaagctaacatttccatcaagataggtgaattatatgcaaaagaaaggaaatcagtgtatcgaaatgatatctgcattctcatgtttgttgcagcactattcacaacagccaagatttggaagcaacttaagtgtccattaac

SEQ ID NO: 760661 - DNA, 591 bp, Homo sapiens
ttaaaattataaaaatagacctaatttttggagaactggtgcatacctgaggaaaggcctattaggacagaggagagttcttttcagaatggttgagtcggaaggcctgtgacaacatcactggagccagggttcattaccctcatctcttgttcccccagcacctgacatggccagtcacagcaatcccattgcccctcaccctaggccaggtagccatcacctttttcccggacgcctacaatccccagttccgcttttacctcttccatccactttccacacccagccagactccgctgatccccggctttcagggctttccattggaacaaagctcaaaatcctttcagggccccacatgatcgggcctctagccacctcctaatctttttatcttttttttttttgacagggtrtcgctccagttgtccaggctggagtgcagtgatgagatctcagccagcctcaggtgatcctcccacctcagcctcctgagcagctgggactttcaggcacgtgccaccatgtctggctaattttgttgttgttgttgttgttgttgttgttgttgttttgaggctgagtctc

SEQ ID NO: 760662 - DNA, 647 bp, Homo sapiens
ggcggtgagtgagagtgctacacagccggggaaactgctttttccatggaactgtgcaacctatggatcggaagatcccactcgtgaacccatgccactggggcctagtgttccaaccccagaacgtgcagattcttacagcctctcagctggaatcagcttaagcctaccaaactcccaggaggaggggtgaccagcaccatggctgtggctgcctgctgtctaaactgtttgagcaccttgrgggaggggcagcagccagcattgggactggcaactacctaatatggtaagcttcctgggtgggggaagggtggaacccatttctatagctccagtctgcgcctttcccctgctggagccagggaggctggatggcttgatcccaagacttgtccccacagcccaacacactggatgtggtagtttgcagccagagtatgtcttcaggcctgaccctgcctgacccatccttccccattaggtgggggtttcctgcaggaatgccaataactccagccagaggctcagggacagaatccgaatctccctgggcctgaacccctaggggaaggggtggctgcagtctctgtggacccgcagacttatcctctcctcctggtagttctgaggaatccgggcagcct

SEQ ID NO: 760663 - DNA, 567 bp, Homo sapiens
atggagaatatttagtaataaccctgctcaataatattctataaaaccacatagtggttttataagtcgcatgccggttactttcctaattgcgccatatcacaggaggctccatttcccaggctccctgtgccaacacacttcctgctaggttcaaccaatggaaacactgcaraaaatgagtgggcgggaggaaggcagagaatttcttcatctcccaccccattccacagtcccagtacttgcccccttaccccagctttgggactcggatccagccagtgggattgaagctacttttcttgatgttgctaatccctgggttgcttctctgtactgcttggcttctcagcattgccgtcaccctatgcaaccaagtcacagtattaaaatgtttacaatgactggaatggattgttttcctgactgtaccctgataaagggtgagtgggtctattatatagagacggtttctctctttagctattataagccatatgatagtcaatatccttaaagttaaatcttagtcctcaactatatgtatttccttagcacaaatttcta

SEQ ID NO: 760664 - DNA, 578 bp, Homo sapiens
ttcttgtctcctcagaagatgtcgactgaggggcataaggcaaaagaagagactgaggcaagttttaaagcaggagtgaaaatttcttaaaaagctttagagcaagaacgaaaggaaggaaagtacactgagaagaggcccaagtgggtgacttgaaggacaagtgcaaggtttgaccttttgacttgggtttttatgtgttggcatacttctggggtcttgcatcccttctaccctgattcttcccttggggtgggttgtcgaaatgcacagtagcctgctagcgctggggaggggagcaartgcagtgtatttattgaagttgtaagcatgctcacctgaggcgttcttccctttttcagtagaatgcccccagaaggtcatatatcagttaaattccaccattttgcctcttagtgtgcatgcgtgagcccgctcgcccaactcctgagatctcatcaggaagctcctgatcatcagtttcagggtttttctatctatagggaaactgcctttccctggcgctggctatgagcaattattattttagagaggcggtgtgaccactgtctgaccat

SEQ ID NO: 760665 - DNA, 565 bp, Homo sapiens
cagcaaatgcaaaagaatgggaaccataacaaacagtcactcaaaccacagtgaaatcaaattagaactcagaatttaaaaactcacgcaaaaccacaaaattacatggaaattgaacaagctgctcctgaatgactcctaagtaaataatgaaattaaggcagaaatcaagaagttgtttgaaaccaatgagagcaaagagaaaacgtaccagaatctstgggatacagctaaagcagtgttaagatggaaatttatagcactaaagtgcccacatctgaaagctagaatagtctcaaatcaacaccctaacaacacaatgaaaggagctagagaagtaagagataactaatccaaagctagaagaagacaagaaatatctaaaatcaaagcagaattgaaggagatagagacatgaaaaactttccaaaaaatcaatgaatcctggaactgtctttttttgaaaaaattaacaaaatagactgctagaagaataataaagaagaaaagagagaagaaccaaatagacacaataaaaagatgatcaaggggatatcacaactga

SEQ ID NO: 760666 - DNA, 529 bp, Homo sapiens
ttgttttctaaggaacaaagccacttatcaacagggttttaggcaggctcaccttttcctcccttcaagtttcattccctgaaatgattttgaaatggcttgttattgagactgataggaaacagctgatgaagtacacacacacacacacacacacacagagagagagagagagagagagagagagagagacagagttctgatacctttttacagtacttgyttaggaactgagatgttatcagtagaggctaccattttcccattactttttaaaaaaaattttatttttaatcaggcagccccaaactagaataggttcagagactccccattttcacattacattttaaagtagatatttttgtttttaaaacaattagatttttgaagagtatattatatgcatcttttggctaaccagctaatttacagaataattaaaatacacaagcagaaatcatgcaaaaataccttcctccttgtacttaacaaaaaactgaaaccaaagtaaaacaaaaccttgaag

SEQ ID NO: 760667 - DNA, 597 bp, Homo sapiens
ttcctatctggtgttgtcaatgcttttgattttagtcattctaatagatgtgtagtggcatctcattttgctttattttgcaattccctaatgatatatgatgctgagcatctttttatatgtttatttttatatggayacctcttttggtgaggtgtttgttcagatcttttgtccattttgtaattgggttgtttatttttcttttgttaagttttaagtgttctttgtacattttgaatacaagtcttttatctgatacgtgtttctgcaaatatttccttccagtatgtagcttgcgtttgtattgtctaaatactatcttttgactgagtgcagtggctcacacctataattccagcactttgggaggccaagggaggaggatcacttgacaccaagaattcaagaccagcctgggcaacatagcaaaactcccatctctacaaaaaatgtaaaacaaacaaacaaaaaatggtcaagtatggtggtgcacacctttagtcctagctacattgaaggctgaggcaggaggatcacttgagtccaggagttgaggctgtagtgagccatgataaagccaccatgttactggtg

SEQ ID NO: 760668 - DNA, 603 bp, Homo sapiens
agaatacatttaacaaactttgacatcatagatggatttggcatgtaaggaaaatttgtgcaatacagttgaatttttcgtatccacttccaggtatgaactatttctcaaagcctaaataagtgcatactgactctagtgttagaattctttagtttaaccaatatacttcttgctttccaaatatgaacttttgcaggrggagaatgattagttttataaaatgttgtaagttttgatgaccatcagctaacaaaagcatgaatttctatatgaattcaaaccaaaagtgaacttattaaatttagaattatgcaactttgatatgaactccttttccatactctcatgagcttaatatataacttaaatacaatacaattgtgagtaaaaactgtgacactaagtacagaaattcattgtgtttagtcacacaccacatctgcaacagaaaacagttatttctcatagttaattgtatagaaaatgtaatgaaagagttggactaatctagaccaccttaaaagggatcaggctgctattgtgcaagaaatatgcagtttttttgtttgtttgttttgtttttgagatggagtcttgctt

SEQ ID NO: 760669 - DNA, 603 bp, Homo sapiens
agaatacatttaacaaactttgacatcatagatggatttggcatgtaaggaaaatttgtgcaatacagttgaatttttcgtatccacttccaggtatgaactatttctcaaagcctaaataagtgcatactgactctagtgttagaattctttagtttaaccaatatacttcttgctttccaaatatgaacttttgcagggggagaatgattagttttataaaatgttgtaagttttgatgaccatcagctaacaaaagcatgaatttctatatgaattcaaaccaaaagtgaacttmttaaatttagaattatgcaactttgatatgaactccttttccatactctcatgagcttaatatataacttaaatacaatacaattgtgagtaaaaactgtgacactaagtacagaaattcattgtgtttagtcacacaccacatctgcaacagaaaacagttatttctcatagttaattgtatagaaaatgtaatgaaagagttggactaatctagaccaccttaaaagggatcaggctgctattgtgcaagaaatatgcagtttttttgtttgtttgttttgtttttgagatggagtcttgctt

SEQ ID NO: 760670 - DNA, 603 bp, Homo sapiens
agaatacatttaacaaactttgacatcatagatggatttggcatgtaaggaaaatttgtgcaatacagttgaatttttcgtatccacttccaggtatgaactatttctcaaagcctaaataagtgcatactgactctagtgttagaattctttagtttaaccaatatacttcttgctttccaaatatgaacttttgcagggggagaatgattagttttataaaatgttgtaagttttgatgaccatcagctaacaaaagcatgaatttctatatgaattcaaaccaaaagtgaacttattaaatttagaattatgcaactttgatatgaactccttttccatactctcatgagcttaatatataacttaaatacaatacaattgtgagtaaaaactgtgacactaagtacagaaattcattgtgtttagtcacacaccacatctgcaacagaaaayagttatttctcatagttaattgtatagaaaatgtaatgaaagagttggactaatctagaccaccttaaaagggatcaggctgctattgtgcaagaaatatgcagtttttttgtttgtttgttttgtttttgagatggagtcttgctt

SEQ ID NO: 760671 - DNA, 633 bp, Homo sapiens
accatctatgcttttaaaatgtgttattttcactcataataataactggaggcctataacattttcagtttgaattaatgaatattgttaaattattttaaatcatgattctaactatactgatgtagtaataatctttgactttcatatgtatcttttccttgccttgcctaaatttgcccttctttgttaatataaactcaagagtcttcacaatttttccctcctttttgaatttactttaagtttgttggcaaagagaatcattctgactgtgatactttagtagcacaatttcagactcctgaaatgtcagatactgaaagatgttccttagctatattttttaactgctggtataatgttaaatattcttaaaatttggtgcttttcaaattctatattctacaattttcaaactcagactacaaatattttttatatatataaaatattcctgttatacatacacacacacacacacacacacacayacacacatataaaacagaccaatgttgcagaggtgtatgtctctaaatgggggtgggggtggaagaaaggagataaagagaaagaaggagaagatagaaactgactcaccttgaatctcattacaacttcagccagtaa

SEQ ID NO: 760672 - DNA, 600 bp, Homo sapiens
ttctttaatttttttgaaaaaaggaaaaagaaaaccttcagattctcatactacctggtgtttccttttagagactctgattgcctactggcagagagctcccagcccagaggtgtccgacttcttcagcatcttggagtaagttttagagttgatgacttaacacttttttctggaaatttctaaatagtccactataccatgtttcatttcaagaaccccatatagtaagttatcaataatatatgaactatttaaagaaaatttaatatttttctttcaatatacttagatgaacagtttgtrtaataaaagaatatgaataattaaaatgtggtttttttctcctttctagcgtttgtcttcaaaatttcagatacctaggaaaacgcaacataataaggtactaattttaaattccaataggttaatctggtcttttaaaaagcatatgacatgtattaatgtgtcaggttagagttacaaatatatattagaaatcttaaaatgcaaataaggattgttaggttgacgtcacattagacacagtaagtttgaagattgcctcatacgcattgtagatctaggaatagttcatgt

SEQ ID NO: 760673 - DNA, 541 bp, Homo sapiens
cccaatggttatattttgtataactacagtataatctcaaagctgagaaactgacactggcaaaatgtatgtgtctagtttaatgccattttatcacatgtgcacactcatgtaacaaccacctctgtcaagatacrgggctattctatcaccaggaagactgccctcttcttacctccccacaccatccctcttgctacctgcccctctcccaacccctaaactctggcaaccacaggtctattttccatttgtataaacttgtcattttgagatagttaaataaatggaatcatatggtatgtgctcttttgagattgggcttttctcacttagcataagcctttgcaatccttccaagttattgcgtgtatccaaagttcatttctttttattgctgggtagtattccactgggcggatgtgtcatagtattttggctatttcaaatcaagttgctgtgtataaccatgtacaagtttgtgtggctttacgtttttatttatctgggataaatgcaattgctaggatatgtcgtaaga

SEQ ID NO: 760674 - DNA, 547 bp, Homo sapiens
tatgaattgattaaactaaataaattactcttgactttgctaccttgaagactctgtctccttgtagtcaaaattacatgtaatgtttccttggtttcatgtatgtgtatggttagctaaaaagacctattagtatgcttcatgtatgctctctgtgtatgtgtgtgtgtgtgtgtgtgtgtgtgtgtgtgtgtgtgtgtgtgtgtgtgtactaatagccctctcttctatagtatgygggatattaggaagataacttctagttaggtaacagctgaatcttcatggcctaaaagccaaaggagacttcatatatctccagcattatttgtagattttatttatttttgaatgttatattgtaatcttacttcccctgatggaagtaagtaatggatggcaataacttttcatttcttctccacaaattgtttgcattatgtacttctcaaccttaatcctaatgccaaacttttttggcaaataaaataatttgcttcaaaatatttaaatcctttccccacaaattgcttgcattttgtgtatc

SEQ ID NO: 760675 - DNA, 637 bp, Homo sapiens
tgttaaatacagtgttcaatttccaaatacgtaagactacactgcaatgtaaggagtgttcataccaacaaggaaactttttctcttacaagaaactgaaaataatattaaattcaattatgtaagaacttattcctgtttgccccaaatcaaattatgtaacattctaatttagaaatcacaagtttcatttgaatttgacatcttgtaatacattagtccttgagcaagaggtttaatttaatgtcatttattctgccttacatcaagcaaggtatagtaacataatgtaccccattttatatayctggaagctaatggtttaaggaaattacttaaggtcacaaagcaagtaagtgttggaatcaggtttagattctaagggtacatgactccattgtactagttcacactaatgttaaatacttcataacagagggttgaaaagcagctgaaagaaagatgtgggttgccacgggctgggaggaaatggaggggtgatggttaaatggtacaaagtttcagttatgcataataaataacttccggagatttgttctacagcatagtacctatagccaatgatactgcaggtttatacttaaaattttgtaagacgataggtcttatgttaagt

SEQ ID NO: 760676 - DNA, 637 bp, Homo sapiens
catcctccaaggcttgccaagctcctttagctggctttagcttttgggtagtgttagacctggacagagcatggccgtcttgcccaggggataaggcctgtcctatctgagtggccccctgtctgctggcctttcctggggccccaacctgcccacgcatgcttgcagggcatatttgaatgcccaagcagggtgcttcctggaggccctcatcatagctcctttcctggcagaccacacctgaccatcagagaggtcagcaaactgacctttgttgactcaacmagcccactttcagcatcccccccacagtagccttccccttttgccttgccggcacacacttgcccactttcttgaaatcccatcactttgtcagtatacacacttgggtggaccttgcctcccctcctccaatggcatgtgtgcaccctgctcccccactgtactggcagtgtcagtgcgtgccgccatccagatgtcaccaccaccagcatgctaaccccatggaggcacaggcagccagccatggtgctcccgccactactaccagtacaagtgcatgcatacattttggcaccctaccccccccaacatgtgggcactctgcctcaccattgttgcaggcataagcatg

SEQ ID NO: 760677 - DNA, 584 bp, Homo sapiens
aattttagactatttcgtcacctcaacccatattcatactttatttttttttgagatggagtctcgccctgtcgcccagtctggagttcagtggtgcggtcttggctcattgcagcctccacctcctgggttcaagtgattgtcttgtctcagcctcccaagtagctgggactacaggcatatgccaccatgcccggctaatttttgtatttttagtagaaatggggtttcactacgtcggccaggatggtctcsatctcctgacctcgtgatccacctgccttggcctcccaaagtgctgggattacaggcgtgagtcactgcgcccagcgccatatccatactcttaatccacacctcctttcactcagtactgagcaaccattaatttgttttctgtttctatccatttgcctatcctggatatttcatagaaatagaataacaccgtatgtggtcttttctggctggtttatttcacttactgtgttttcaaggttcatcaatgtcgtaacatgcatcaatctttcttttttattgccaaataacatctaattttgtggatagaacacatcgtgtttatc

SEQ ID NO: 760678 - DNA, 615 bp, Homo sapiens
aacctatacaggaagtaggagcatcacaacaaccaaaatctagccagaatggggaaaatagattagatatcttattttgttcccaagatccactgcatagtcccagagctaaagtgagagcctttattcctggttacattcacttccctatgaatctctccaaaaaacctacaatagtgtgacagctagtagctatgcacagtctatcagcaatggctcagtgaacctctattcaaaatagtttgaagtaagaatatggagtaaggtagaaaaattatcttctctcctcccacagttctacaagatatatactgttgcactttagaaggcagaaagcaaaaaaaaaaaaaaaaaaaaaaaaaaaaaaataagagtattacacattctttatctgttttatgaaaatgttctaaccayagacaaaaattccaccaaaaacaatttttcaagttcacactaacattataaaaagctactagttgtttaattggttccattcacttaactaggcaaagttctattgatcttacagtaatatggtttataaaaacaaaagtgaacatttataacattggggaggtagaaaccaaatctggtctaacactgttacagata

SEQ ID NO: 760679 - DNA, 633 bp, Homo sapiens
taaagatatttaaaagacattctcttaccgttttctttaaagttttaaagttttgtcttcaatgttttcttttccatatggataaccaattttcctcacaccatttactgaatagtctatcctttttccagtgatctctaatgtmggatctgatataaattaggtttttatagacgcctggtctgtatcatattctgttgattcagttgtctgttctcacaccaataccacactgtcttaataactttcactcaaagttttcccatgtggtaaagcactttgttcttcctttttaggagcatctgggcttttcttagctattggcttttccaaatgattttcaccccaccgaaacattttgctattaaaagtccaaaagtagagttaaaaggattttacagtaaacaaacactcatgaacccaccacctagattctataattcacattttattatttttccttgtcacataactatccatctttctatctgtccattaattctacgtgagatttttttaaattagcttttaatgtcccttaaaaaccttattggactgtgactgaaattaaattgaatgtatagaataattaggggtaattgacattgttataatatatacctattcatataa

SEQ ID NO: 760680 - DNA, 633 bp, Homo sapiens
taaagatatttaaaagacattctcttaccgttttctttaaagttttaaagttttgtcttcaatgttttcttttccatatggataaccaattttcctcacaccatttactgaatagtctatcctttttccagtgatctctaatgtcggatctgatataaattaggtttttatagacgcctggtctgtatcatattctgttgattcagttgtctgttctcacaccaataccacactgtcttaataactttcactcaaagttttcccatgtggtaaagcactttgttcttcctttttaggagcatctgggcttttcttagctattggcttttccaaatgattttcaccccaccgaaacattttgctattaaaagtccaaaagtagagttaaaaggattttacagtaaacaaacactcatgaacccaccacctagattctataattcacattttattatttttccttgtcacataamtatccatctttctatctgtccattaattctacgtgagatttttttaaattagcttttaatgtcccttaaaaaccttattggactgtgactgaaattaaattgaatgtatagaataattaggggtaattgacattgttataatatatacctattcatataa

SEQ ID NO: 760681 - DNA, 658 bp, Homo sapiens
ttgaggcttatgtccgttaagggagacccattatttatttgtactattcaaaatttcattggtgatttttggaaatgttcccaaattctttgacacttttttcactccaagaaatgaaagtaaattcttctcctcttgtgggtgggctggacataacaacttgcttataacaaattgaatatggtggaagtaatggtatasagcatatatggcgagatcatagaagacatttatctttctccttactctatattaaatcacttgttctgagagaagtcagaaaccatgttgtgaggacactcaagcagcctaaacagtgagaaatggaagcctcttgtcaacagctactaaggaactgaggcttctagcccacagccatataagtcagtcatcttataaagagatactccagctccagtcaagctttcagataattacagttcctactgacatattttcttgaattttcaccaaagactttaccataccactcagctaagctgctgactgaattcctgaaccactataaagtatgaaataatagatttttgttttctaagctgctaagttttggagtaatttgttgcatagcaattaatatttaatataagccctcataaaaattgtcctctcttttggaaggtggaaaagtaaattt

SEQ ID NO: 760682 - DNA, 579 bp, Homo sapiens
tgaaatttagagcaaggaatttattatagtgaattctgaaatctattttataaattctgagaagatagtatgaatgggaaaggatttctaaggtggtgaggtgattaaaaatgctaccaagaagcccacatttcataaacttaaaactagagatgaagcaagtccaaaatagatgtcaaaggtgaacccagatactgtaaaagattatgatggtacattgaattctcttccatccatgtgaagctactccctggcaataacttacacaggttcagaaattacattaactcttcaaacctccagggtactgttgagtaagttattatctgatgtactaaattttcttagctcctaaattactctcagaacttcatttattccctgggctcakgttatggcttccagaaaccatatagtctcctgatcactcaagagttcctgtgactcccaatagtgctaatcaatttattgacaaataatttaggccacttggaaaatccaactaaacaagtggaagtcactcttaggccactgtgttcacctgcttaaagacaaaagagtggaaaagggtcaatctga

SEQ ID NO: 760683 - DNA, 638 bp, Homo sapiens
ctccttgaccctgggagctatggtaccacaaggacttctttcgtaggacacgtctaacaatttaggatagtattaagtggcaacattagtatatttgaaattttaaaagaaaccacacttttggggaacattctaaagcctttatttagcatcaggtagattatttcattataacacttgttaacttcaagacagcaattaaaatcacggactggcagctacctakgcccctgggagcagtatctcagtctggggtttgggtggataaatactataagatttaagatgaatgtgccccaattaaaggggcaaaactactgtacagtaggtctccacacatattttaagtacacaggtactttgcaaacttgaaatgcacaaggcctccttttatatagtttgatacttacatgagtgcaacttactttccctagtggcatttgccactggaagtggaagcatttaacaaggtttgtcattatgtaatggtgattaaaatctatatttctagggcatttttgtgaattgctagattttatacatattttcagttcaaatgtaaacttaaccattttaatgatactgactgcagaaaactgtaaaagtaaattcagagcactaagtaaatgaaatacttt

SEQ ID NO: 760684 - DNA, 427 bp, Homo sapiens
gggtttttagtatattcacagaatcataacatttgaaagttggaagagatctcacaaattatctagcctactgcttcccaaagtatgttctaccgaacgcttccagtctcacaggctacagtataaataggaattttcctggtcaaataagctggttaaacatagcatrcctgcatattcttatcttccccttggagaatcacagtgcaaaactaaagcctgggagaagtcccaggatatcccaattaacccaacacagaacctcttttcatgggacatgtactaacaggccatcaaatcagtgagactgggctggtgcttcagaaaaccctgacttattccaaccctctaacattcctggtgaataaaaagaacaccagagaaggtccactggcttgaggtctcccacctctttcaaactgcctga

SEQ ID NO: 760685 - DNA, 480 bp, Homo sapiens
agaaattcaaaattataactaccaattcacatttgaaaattgagattcctatataacccattggtcagcctcccaaacattgtttgcattgtggaaattcagggataagtaaacagctgtatagtacatacatctcctatagctacacccataaccaattttgccaatcacaggccttgctttattgacagctctcaacaccaaacaagttctttttccccaaaagaaaaaaaaaaacaaaacacgaaaatgtgatacctgacttcccatgcttaagcactcagyaggaataataaacaccatcacacccttacttagacagcgtttgccacatgctaggtactgtattcacacattcattccccccagcaatgtagtaagtcacatgggaggagtcaaggaaaataggatcagctgtaaggacaacacaagtgggcagagaaggttcgaggcacagtactatagacacgcagtggggag

SEQ ID NO: 760686 - DNA, 533 bp, Homo sapiens
atgtttttaaagaagtttataagcaggggcatggtggttcatgcctgcaatccaagtgctttgggaggctgaggtgggaggatcacttgaggccacgagtttgagaccagcctcagcaacacagtgagaccttgtctytacagaacattttttaaaaattagctgggcatggtggcacacacctgtagtcgtggatattcaggaggctgaagctgtgatcacaccactgcacttcagcctaggtgacagtgcaaaaccatgtctcaaaaaaaaaaaaaaaaaaaagcctataggcaagtgaggaatacaagggaacttcctaaatctaggaatgggtacacacacaaaaacttacagatgatccaattgacccattgtacccaatggtgaatattgaatgccttcccctcaagattgggaccaggacaaagatctccaatgttacgatttctatttagctttgtactgtaggttctaatcagtgccataaggcaaacaaatttttttaaaaaaggaaaggcatattaagaaat

SEQ ID NO: 760687 - DNA, 647 bp, Homo sapiens
tatttagtcttctcagctaacatcttatacctagataactgttgaggtttataaaggccttaaaacatgaataatacttacacaactgtgggatgctttttttttaactgaatgtattgtaagtcaaattcagtccatatctaaagtctgaaaattttaatattcagatgactaatagrtataactctttaccttctagtctgcattctgtagtatttgccatacttctataactgcaacttctattttatttattttaattttttatttgtttgttttgagacagtcttcctctcttacccaggctggagtgcagtggtgcagtcacagctcactgcagccttagtctcccatgctcaaacaatcctcccacctcagcctccagagtagctgggacttaaggcacatatcaccacacctggctagtgttgttgttgttgttgttgttgttgttgttttctagagacggtttcatcatcttgcccagcctgctctcaaactcctaggctcaagtgatcctcccaccttgacctcccaaagttctgggattacaggcgtgagccattgtgcctgaccgcaacttctattttagagaaagctgcaactcaataattagtggaatatttcctatgtatattatatacaca

SEQ ID NO: 760688 - DNA, 647 bp, Homo sapiens
tatttagtcttctcagctaacatcttatacctagataactgttgaggtttataaaggccttaaaacatgaataatacttacacaactgtgggatgctttttttttaactgaatgtattgtaagtcaaattcagtccatatctaaagtctgaaaattttaatattcagatgactaataggtataactctttaccttctagtctgcattctgtagtatttgccatacttctataactgcaacttctattttatttattttaattttttatttgtttgttttgagacagtcttcctctcttacccaggctggagtgcagtggtgcagtcacagctcactgcagccttagtctcccatgctcaaacaatcctcccacctcagcctccagagtagctgggacttaaggcacatatcaccacacctggctagtgttgttgttgttgttgttgttgttgttgttttctagagacrgtttcatcatcttgcccagcctgctctcaaactcctaggctcaagtgatcctcccaccttgacctcccaaagttctgggattacaggcgtgagccattgtgcctgaccgcaacttctattttagagaaagctgcaactcaataattagtggaatatttcctatgtatattatatacaca

SEQ ID NO: 760689 - DNA, 632 bp, Homo sapiens
cattgccctgaaggtcctaaaaggcagccataaaagaaaataagaagcaaaattggaattatgaaatgattgcatgaaagtacactaaacggattacaaatagtaattgatggattacaaaagttcaatatacaaggccattgtatttctacacaccagcaacacacaacaacaaacaaaacaccatttaaaatagaacacaaaaccatagacagtctaggcgtagatctaacaaaacatgtacaagagctatatggagaaacttacaaaattttattataaaaattgacctaagtaccccaccaagaaaagatttatctaccagtcactctaccatgccytaaatcactatatcatgtgaatgacttcaatgctcacaacagccctctgaattagattctcttattttgtgttaaaaatgagtaagttcaagctcatacagataagcaacttttgcaagatccaaagttattaacataatgctgccccccgggaagccatttgtgttccattgaatatgataaaatttatggtaaatacctggcagttcaggaaaaacaagtaagtcatggggacacttttctgctcagacctgtcacactagcactgattttaggagatagcgtttcact

SEQ ID NO: 760690 - DNA, 610 bp, Homo sapiens
tctccacaatgatgcttcccatgacacccagagttatagacaatcatcaatttctccatgttactgtcataaaatatacctgattacatttttgctcttttcataatgtcttggctttagatttattacacgtccytcctattagtcaaaaaacaggaaactatgtcatattcagcactgatctccaatgccttgctaagggcttagctcatacaggactcagtaaatatttgagatggagttattgttgaatacatattcaagcaactgattgaaatgaaaatggtttcacttgatacttatatgctgttggctcccagatctttgttgccagtcctttcctgaattctagacctatgtgcagctgttacctaaacatttccacttggatacaataacttccactcaacctattcaaacttacctcatcaaacctgctccttcaacttatgtaggtaaatggcatcacctagaaacacaagttcagaatctgaaacttattttaaactttccacaaccctgcccttcagcttctgtcacctcccctccaatctgtcacaaggtccccctgattccaattccataacttctcttatatgtgttcccccat

SEQ ID NO: 760691 - DNA, 623 bp, Homo sapiens
ccctccacagtccactccagaaaaaccctactaagaccacagtaacagaacagggaagaggccaggcacggtggctcacacctgttatctcagcacactgggtgtggatcatttgagtccgggaggtcgagaccagcctgggcaacatgatgaaatcccgtgctactaaaaaacaaaatgccaaaaaattagccaggagcctatggtcccagctacactggaggctgaggtggcagaatcacctgagcctgggaggcagaggttgcagtgagctgagatcccaccactgcactccaccagcctgggcaaccagagtgagaccttgtctgaaaaaaaaaaaaaaaaaaaaaaaggacaggaygagaggagctcacagaaacaaagaaattgggcaagaggcagtagcaacaactgataaatagatggaaaggttgtaactgatttaatagacctgaaaagctgaatcctaaattagctgtgggacaagccaagaagcaacctcacttaaattgtactgaaaaattctcagaaggctcagaagctgggtgatacttctgaaagcattttagcatggagctaaaaatttttaaaaatggttaaaagtttatttaggaagcaagatt

SEQ ID NO: 760692 - DNA, 673 bp, Homo sapiens
cactggtcattagagaaatgcaaatcaaaaccacaatgagatactatctctcaccagttagaatggcaatcattaaaaagtcaggaaacaacagatgctggagaggatgtggagaaataggaacacttttacactgttggtggaagtgtaaattagttcaaccattgtggaagacagtgtggcaattcctcaagcatctagaactagaaataccatttaactcagcaatcccattactgggatatacccaaargaatataaaccattctactataaagacacatgcacatgtatgtttattgcagcactgttcacaatagcaaagacttggaaccaacccaaatgcccatcaatgatagactggataaagaaaacgtggcacataaacaccacggaatactatgcagccataagaaaggatgagttcatgtccttcgcagggacatggatgaagctggaaaccgtcattctcagcaaactaacataggaacagaaaaccaaacacctcatgttctcattcataagtaggagttgaacaatgagaacacatggacattgggaggggaacatcacacactggggcctgtcagggggtggggtgcagtgggagggatagcattgggagaaacacctaatgtagatcatgagttgatgggtgcagcaaagcaacatg

SEQ ID NO: 760693 - DNA, 673 bp, Homo sapiens
cactggtcattagagaaatgcaaatcaaaaccacaatgagatactatctctcaccagttagaatggcaatcattaaaaagtcaggaaacaacagatgctggagaggatgtggagaaataggaacacttttacactgttggtggaagtgtaaattagttcaaccattgtggaagacagtgtggcaattcctcaagcatctagaactagaaataccatttaactcagcaatcccattactgggatatacccaaaagaatataaaccattctactataaagacacatgcacatgtatgtttattgcagcactgttcacaatagcaaagacttggaaccaacccaaatgcccatcaatgwtagactggataaagaaaacgtggcacataaacaccacggaatactatgcagccataagaaaggatgagttcatgtccttcgcagggacatggatgaagctggaaaccgtcattctcagcaaactaacataggaacagaaaaccaaacacctcatgttctcattcataagtaggagttgaacaatgagaacacatggacattgggaggggaacatcacacactggggcctgtcagggggtggggtgcagtgggagggatagcattgggagaaacacctaatgtagatcatgagttgatgggtgcagcaaagcaacatg

SEQ ID NO: 760694 - DNA, 528 bp, Homo sapiens
attataagcggtaatctcattctcttaaacttaagttttagaagtaaaattactccatatcacaagtccgtattggaacttaaagaaaatttcaaatgcatgtccacctccaagaatccacccctgccattcacacatacatttagttctgtatttctgtataagtaaatatgaaccaatttagatggaaaacagaattcacaacgagtatatggatcagaaagaaagatgatatcatagatgtactaaaaggaacgacttttatttatgaaaacccaggatgatttaaagtaaattataaagataaaaactgtagaaacattaagctggaagagaatttcataataatgcattgcaaaccgtataagagtctaarccatttcttaaagttggaggttgggaataaaattttaaatttataatagtgtgaagacattatggaaataagagacagcaaactttatgtggaaatatatttaattttacattgcaaagcagaaataaaaaatcagaatatactggacagca

SEQ ID NO: 760695 - DNA, 493 bp, Homo sapiens
gcaaatcagcatcttttctttctataggagatgcctactgggcgttctgaatactcagaacactggttgctgaatctgtggcacctttgaaacttttgaaaaataaattcacctctctgggtttcagtttcttcaactataaaatgaaacatttgaagaaacagtctgtaaattttttccccactataattctgtgatttaattcttctaaggtagctatctgaatgatctaatggaatctgtttagatcatgaaaaataggagaatagaaatcttcaatattccactgcttttttcttctaaccctgatacccaygccacctttgaagctagagtttaatcagagtaaaacatgaatatggcagatatatttggttgttgttgcttctgtaactaacactgatttagtagcttaaatgaacacaagtttaccttacagtttaggagattcaaatttcaaatcagcctcactgggataaagtcaaaatgtcaa

SEQ ID NO: 760696 - DNA, 624 bp, Homo sapiens
cctcctcattcttgaccaaatgttaaatattggatttttttaatacccagtcattagtcttattttcttaacatatgctttctcattgtctcttccactttaaataatttaattgtaatataatcacaggcaaccctcaaatgtatgttattagtccagacctttcctcctctcctctaaaagtcattaatatacgtaacggccttactgaggtcaccacttgaaaatctttttgggattgcaaacccaacatgtacaaaccctaattggtaatctattcctcattcttccactttaggrttcttttttttagttcagtaaatagtaccactaaatgtctagttgcacaaaccacaaattcatgaatcatgcttaataactgcatcttcttacaacttaggcccacaatattacacaaaattccacccgttttacctttaaaatatctccgaatttcatgtagtttcctctgtctctaccactacagcctaaggaattactgtcatcattctcacaaacattagaataggatacgacaggacaggacaggatagcacagaatagaatagaatctttacttcttctcctttggatccctttttactttctatccatgttgcctga

SEQ ID NO: 760697 - DNA, 624 bp, Homo sapiens
cctcctcattcttgaccaaatgttaaatattggatttttttaatacccagtcattagtcttattttcttaacatatgctttctcattgtctcttccactttaaataatttaattgtaatataatcacaggcaaccctcaaatgtatgttattagtccagacctttcctcctctcctctaaaagtcattaatatacgtaacggccttactgaggtcaccacttgaaaatctttttgggattgcaaacccaacatgtacaaaccctaattggtaatctattcctcattcttccactttaggattcttttttttagttcagtaaatagtaccactaaatgtctagttgcacaaaccacaaattcatgaatcatgcttaataactgcatcttcttacaacttaggcccacratattacacaaaattccacccgttttacctttaaaatatctccgaatttcatgtagtttcctctgtctctaccactacagcctaaggaattactgtcatcattctcacaaacattagaataggatacgacaggacaggacaggatagcacagaatagaatagaatctttacttcttctcctttggatccctttttactttctatccatgttgcctga

SEQ ID NO: 760698 - DNA, 624 bp, Homo sapiens
cctcctcattcttgaccaaatgttaaatattggatttttttaatacccagtcattagtcttattttcttaacatatgctttctcattgtctcttccactttaaataatttaattgtaatataatcacaggcaaccctcaaatgtatgttattagtccagacctttcctcctctcctctaaaagtcattaatatacgtaacggccttactgaggtcaccacttgaaaatctttttgggattgcaaacccaacatgtacaaaccctaattggtaatctattcctcattcttccactttaggattcttttttttagttcagtaaatagtaccactaaatgtctagttgcacaaaccacaaattcatgaatcatgcttaataactgcatcttcttacaacttaggcccacartattacacaaaattccacccgttttacctttaaaatatctccgaatttcatgtagtttcctctgtctctaccactacagcctaaggaattactgtcatcattctcacaaacattagaataggatacgacaggacaggacaggatagcacagaatagaatagaatctttacttcttctcctttggatccctttttactttctatccatgttgcctga

SEQ ID NO: 760699 - DNA, 527 bp, Homo sapiens
gctgaggtgggaggatcacttgaggtcaggagatcgagatgagcccagccaacatggtgaaactccatctctactaataatacaaagaaattagatgggcrtggtcatgggtgcccgtagtcccagctaattgggaggctgaggcatgagaatcacttgaacccgggaggcagaggttgcagtgagcagagatcatgccactgcactccagcctgggtgacagagtgaaactgtgtcaaaaaacaaacaacgacaagaaaagcaacttggatgaattgcaagagaattgtgttaaattttaaaaagcaagtatcaaaaggttatatactttaaatactgtacatatgacttcatttatataaaatttttgagataacacgttagaaatttggagaacagattagtgatagccagggtttaaggaaggtattgggttttatgttaagcaaaaaagaggtagcacagacagcggggatgtgatagttacatgcacacacatgtaataaaactacataggtatgtaaaaa

SEQ ID NO: 760700 - DNA, 645 bp, Homo sapiens
tgaaaagagatgtaagactgcagatttgcatattaaatgcctgcactataaatctcaaaacattcagttctccaatactaattatttcattatgaaaccatagcataattcctaaaactttgaatattcacaaagatgtttaagttttgcagagttgagctggatatcaattagtcaacaaataccacttgagaataataggtagaagtctctttcttagaaaccagratgaattaaagaggcacaagacaagataaacctttaaatggctttcaaagtacttggggaaataagacacattaaaagaaataatgataaaaagcagcaaatatttattaaattaaccatttagaaatctagttacaatgtccatacattttaaacatgggcttttatattatttatgatttgtgaaagatgtattaaaactcaaaagatttgtttttgagttttcaaaaggtcatagagcagtacagacctggattcaaattctggctgtactacttagtagctatatcttatagggaaagtagcttaacattgtttaatgttggttttcttaactgtacaaggggataataacataaggtttagggttaattagataaattaaatagtacactgcttggtccacagtaacggttc

SEQ ID NO: 760701 - DNA, 611 bp, Homo sapiens
aaaagcaggttgctgtcttctccactcgaggctgatcagtggtaaatagagcttgaccagggaaaggcacataccatattaaaatagagtgataaacccctcctcaagggaactgactttattttgaacaaagtgtagagaagttcaagcttaagggcactctcaaaaagaatggagatttaatggtaagcaatgaagataaggccagaagcttcatcacagcagcaacttatagtcagttactttgcttctttactatttgctagagtgaatcaggaaattagacatttaggaagacattttatgaagcaaaaacaaaacaaagtaaaaacttaarccctggcttcaacataatcaggtaaagagacagagaaccttttaaaagccactatcatttttttaaaagacatataaattatataaagtaataatcataataatttattgagtttggatcttacaaacacttaagatgcataataataatggtacacaaaatgaaaggaaagaaatatttgagtaatattttgatatctcactggaattaaattaatttaaatctgagatagcttctgataaattgaaatgcataagataaaccctagagcaac

SEQ ID NO: 760702 - DNA, 611 bp, Homo sapiens
aaaagcaggttgctgtcttctccactcgaggctgatcagtggtaaatagagcttgaccagggaaaggcacataccatattaaaatagagtgataaacccctcctcaagggaactgactttattttgaacaaagtgtagagaagttcaagcttaagggcactctcaaaaagaatggagatttaatggtaagcaatgaagataaggccagaagcttcatcacagcagcaacttatagtcagttactttgcttctttactatttgctagagtgaatcaggaaattagacatttaggaagacattttatgaagcaaaaacaaaacaaagtaaaaacttaaaccctggcttcaacataatcaggtaaagagacagagaaccttttaaaagccactatcatttttttaaaagacatataaattatataaagtaataatcataataatttattgagtttggatcttacaaayacttaagatgcataataataatggtacacaaaatgaaaggaaagaaatatttgagtaatattttgatatctcactggaattaaattaatttaaatctgagatagcttctgataaattgaaatgcataagataaaccctagagcaac

SEQ ID NO: 760703 - DNA, 646 bp, Homo sapiens
tacacactaattccttatctgtaaaatagatacattcaaagtgaatttaatgagaataagtattatggaaattaatgatttaattgattttaaataacagtacactatgaagatcactgtgtccacgatatttggatataaattttagaattaaatgtgagtactaaaataacttagaatatgtgcaccacttccttgaccaatgcatgcgctggggtctcatcaaaatcagatatawttcatactctagaaaaccattagcgttcctagccagagactataacattaaccgcatcagtgatataaagagagaaaataaatactagaacaagagaagagcttatcatttttagtttgactaaaatgactaatttttctctagaagtttacattcctataatcttcaacttaaattggtaaatattttctattgagaagctgaaaaatatttaccctatacaaacttcttcaagatggtatttaaaatacttatattttctggaaatatttggaaatgagtaaagatatcacaattttccaccaccaaattcctgggtctttcttggagtacccttttcctctcagattccataacatatttcaacctgaaatcaaatagttttctttttattcttttgtggttcag

SEQ ID NO: 760704 - DNA, 606 bp, Homo sapiens
catgcgacttctacttactagtagcttaaacacataggtgtttattttctcaccttacaagaagcccagatttagggaatccacactactcaacatcacaaagaacaccggctggctccttctaaattcctactccactgaactgagcaaatgacttccatcttaatgaaaamaagttgttataactgttaggattacaccttcatgactggctaaacaaaggggaagaggaagggcatgtactcatatcataaaagcaaaagctttccccaaattctctagatttccacttatatctcactgaccaaactacattattgggccacacctaattgaaagagagatggaaaagcaagttttttttaagtgaacacattatgatcccaaacaaaaattagtgttctcttaataagaaagaggaagacaggccatattagcaagatagcctaaagtgtctgctacagttggaaaccaatagtatcaaacacacacagtcagataaattttacttaaaattcttctaattcatgattttgcctccatctttcccacactaaacaaacaataaaagcaggggcagttcactctttcaaatcacagctccca

SEQ ID NO: 760705 - DNA, 606 bp, Homo sapiens
catgcgacttctacttactagtagcttaaacacataggtgtttattttctcaccttacaagaagcccagatttagggaatccacactactcaacatcacaaagaacaccggctggctccttctaaattcctactccactgaactgagcaaatgacttccatcttaatgaaaacaagttgttataactgttaggattacaccttcatgactggctaaacaaaggggaagaggaagggcatgtactcatatcataaaagcaaaagctttccccaaattctctagatttccacttatatctcactgaccaaactacattatygggccacacctaattgaaagagagatggaaaagcaagttttttttaagtgaacacattatgatcccaaacaaaaattagtgttctcttaataagaaagaggaagacaggccatattagcaagatagcctaaagtgtctgctacagttggaaaccaatagtatcaaacacacacagtcagataaattttacttaaaattcttctaattcatgattttgcctccatctttcccacactaaacaaacaataaaagcaggggcagttcactctttcaaatcacagctccca

SEQ ID NO: 760706 - DNA, 634 bp, Homo sapiens
ttgcctgcacacttaaatgtaaccatgcacctgtatatacacacattcacatatatctgtgttttgtttctaaagaaaaggtgagagtgggtgtttgtataagcatctagctatttctgctttaataggcttttggtatttgtaaactgtctttacctgtaaaataaggacatttctaaccattatttcacttctagaataattaatttatctgatcattttatataacattttaagtgtcttgttaatttttttgttgaagytattcaatatgtattgaatataaaaacacatcattcctagtaaattatagggagataattttgtctttgtttaaaaaaataagcttgctttctcaaggggggcttaatatttcaaatttcatagcagccatttattgtcagcaacttaaagactgtttctgttttaagaatacatttttcttcgaaataaagtcagaaattggagcatcagccatcttacatatctccccatgcagtataaattaatttccagactttcggggacaaactttcatcctagaagaccggagtgtcagcagtgagctagggagagcagtgggctgttacatgacaccactgttcaaagtgtcaggtcacatgtagcactttat

SEQ ID NO: 760707 - DNA, 574 bp, Homo sapiens
agacccttgagaagtttcagtagtaattccagagagaattaaaggaccttaaactaaagtctgccttctagtggatcatgttacagtaaggctccagagtaaatctccaaccataataaatacagaagagttaaccttctatgtatttttacctgaatgcaagccatttcatggtaatccataagtgaatttcacttaaatataacaatttgacaaaaagataaaatgyctaacctctaaacactgagatacccttaaatgcgaatagaggttttattttacttactgaattttgttgttaaatcttaaacaggacacaattttataatcaagttaattctctcatccttttaaaactaatgtatgggtcgaaaatactgatatttaaatatgtgaactacatacacacatatgcacttttatctgattctgcttaaaagttagaaccgtcaactgctgactcccactttattattcagaactcaatcactgtaggaaggcagataagttcaaagatacaacaggattctggagccaaaatacactaacttcatcctactgaaaggagacagtt

SEQ ID NO: 760708 - DNA, 644 bp, Homo sapiens
ttttgtaagcttctttttcatttaataataaatgatgaaaaatttccatgctgttaaattgtctcctataacatgactttaatggctacatagtgttccatcacatgaacgtgccatattttatttaatagcattttattttgcatatgagttgtttatgatttttagctgttacaaatagcagtgatgatcattcttttatataaacctatgttcacctgatttattataactaaagggtataatataattcctaggagtggaactgttggattaaagagtattaatgcttttttaatagcattgaatatgtattcccaatattccttccataaaagttgtaccaggcatgaagtgcctatttacttcttcccctgcctagaaggctactcagggaggatatatttacacacagataacacaataataatgtgttttatgtgtttagtgtttgcctttttccaaagtattttctaatttgattctaatgaaaacttacacamagtatatcacacatcatggccaatcctggaaagctagttaatgttttttgtagggaagaataatatttaagtgaaagaaatttccatatttgacacatctagaaacaatctatgcatctgagccagggccatgtagttaca

SEQ ID NO: 760709 - DNA, 568 bp, Homo sapiens
aaagttcttcaagtccccacccaacccagaagcccagccagcttcacctctcaataccaggcttagcacatttctagccaggttacacagagatttaatgttagttattagcctggcagccagagaggatgtgagagcagctcccrggaagggagagatctattgccatttgggaaagtggaagtactagcacttactagggaagagtgaggtacttctgcaagacccaaagatccaggggagttagagtcaatgtactcaggacatttaaccagatatacttgtcccatgtttcaagatctcaggctttctctaggaggtagataaactttgcataacagacttgatttagtgagcatttaaacatctcagaagctccagagttcattgttaatgaggccttgagcctgcagctcaactatatattattctactgttggaaatattgacctcattataagccaccacagggactttatggctttcataattagccataaactgtttgataaaagccctcagaatcccattatccttatgcagggtgtgaacataatttagcagtaac

SEQ ID NO: 760710 - DNA, 419 bp, Homo sapiens
ttttgagtggatgacctttctgtttgttagttttccttctaacagtcaggaccctcacctagaggtctgttggaatttgctggaggtccactccagaccctgtttgcctgggtattagcagcggaggcttcagaacaacagataatgatgagcasaaattgttgctgcctgatcgttcctctggaagctttgtctcagaggggtacccggccttgtgaggtgtcagtctgcccgtaatgtgagttgcctccctgttagcctacttgggggtcagggacccacttgaggaggtattctgtccgttctcagatctccagctgcatgctgggagagccactactcccttcaaagctgtcagacaggtacatttaagtctgcagaggtttctgctgccttttgtttgtctgtgccctgcctcc

SEQ ID NO: 760711 - DNA, 627 bp, Homo sapiens
ctgttcttcatgctgaaaatacagaaatgaataaagtttatgtcattgtaaagattactttctagtatgggaaagggagtcagatttcaaaccagtaatctaaaaaacatgtaatatatcaggggaaatacatgctatgagtaaaagtaaagcagtttaaccattcaaggccacaaatgaaaataaccagtatgctgaaattaggataatctaagatgacgctgtggttccaagaaaatggggcatttttatgcttcctattctcccatcagttggccatagacagttggctggtrcagttgtaagaagtgtgccacagagaagggcagctaaagttccagttttctgtttggaagaccagaaagaagatcacgccagagaagaagaaattgctggagaaattatgaagtaacaggagcctgggaaaacaaccttataaatgtatgttctcttgggctcagccctgtaattcttcaatttatttaggcaaggttagagaaacatctcagagcaagatggccaagcagagaaggcggcaacatgtgatatcttggatacattccggcagcctcttttgttttctgttttctaaaaccccagcctccagacaagccaacaaaggcaatg

SEQ ID NO: 760712 - DNA, 627 bp, Homo sapiens
ctgttcttcatgctgaaaatacagaaatgaataaagtttatgtcattgtaaagattactttctagtatgggaaagggagtcagatttcaaaccagtaatctaaaaaacatgtaatatatcaggggaaatacatgctatgagtaaaagtaaagcagtttaaccattcaaggccacaaatgaaaataaccagtatgctgaaattaggataatctaagatgacgctgtggttccaagaaaatggggcatttttatgcttcctattctcccatcagttggccatagacagttggctggtgmagttgtaagaagtgtgccacagagaagggcagctaaagttccagttttctgtttggaagaccagaaagaagatcacgccagagaagaagaaattgctggagaaattatgaagtaacaggagcctgggaaaacaaccttataaatgtatgttctcttgggctcagccctgtaattcttcaatttatttaggcaaggttagagaaacatctcagagcaagatggccaagcagagaaggcggcaacatgtgatatcttggatacattccggcagcctcttttgttttctgttttctaaaaccccagcctccagacaagccaacaaaggcaatg

SEQ ID NO: 760713 - DNA, 567 bp, Homo sapiens
cccacaaacccaggttttaatactgctcatatgtacccatgactcaggtgtgccaattggaaccatgcctctagaccaacccagctccaggctaacctccacagactcatctttcagaatagcctctgaagagccaggctttaggccagttcccacagggacaggctccaacagatccagagtccaggtgtacactggtagatcctgatgctgggctggcccctgtagatmtaggttccagataggtcttcatggacccagaaccatggcatgcccatgcaactcaggcttcaggttcaaccactcactgatcaccccaagacatcaggctaccctgcataaggactgcagaagcaatcttacccacaaacccaaacagaggcccaccaagaatttctggatgaagtgactggtgaagggattttgctgcaaagccaatctgtaaaaacttcaaaagttgtctgcctcaaatgtgcagacccaatggaaagccataatgatcataaaaaattgaataatcagggaaacatgacatcaccaaaggaacataataaatcaccagtaact

SEQ ID NO: 760714 - DNA, 610 bp, Homo sapiens
ttcttttagagtatggaaccatgcatattatcttttaattagatgatttagttagatatgtttttaaagaactagaaatataattgattttcttgttttggctctggagtggagtggggatgaaacagaatggattcacactgtttagatttactaaaatggaaggattgcagcaagatcatatccctagtctccccatagcaaatgtcacctgctagctgtttttttttttttttttttttggagggggaagttttgttctgtcrcccacgctggaatgcagtggtatgatctcagctcatggcaagctcacctcctgggttcaagcaattctccctgcctcagcctcctaagtagctgggattacaggcctctgccaccacgcctgcctaatttttgtatttgtagtaaagttggggtttcaccatgttggccaggctggccttgaactcctgacttcaggagattcacccgcctcagcctcccaaagtgctgggattatgggtgtgtagcactgcacttggatttaatgggatatttcactacagactttggtaaacagaatattatcatttttggggtgctttttattttactcatactatttttc

SEQ ID NO: 760715 - DNA, 603 bp, Homo sapiens
taatgcattgaacaggttattattgaagtctacaccagtcaactgaataagcattcatcaaatgtccatgatatgcaggacataagttttcttttagagtatggaaccatgcatattatcttttaattagatgatttagttagatatgtttttaaagaactagaaatataattgattttcttgttttggctctggagtggagtggggatgaaacagaatggattcacactgtttagatttactaaaatggaaggattgcagcaagatcatatccctagtctccccatagcaaatgtcacctgctagctgtttttttttttttttttttttggagggggaagttttgttctgtcgcccacgctggartgcagtggtatgatctcagctcatggcaagctcacctcctgggttcaagcaattctccctgcctcagcctcctaagtagctgggattacaggcctctgccaccacgcctgcctaatttttgtatttgtagtaaagttggggtttcaccatgttggccaggctggccttgaactcctgacttcaggagattcacccgcctcagcctcccaaagtgctgggattatgggtgtgtagcac

SEQ ID NO: 760716 - DNA, 565 bp, Homo sapiens
aggtcttgctttattgcctaggctggagtacactggtgcaatcacagctcacagcaacttcaacctcccaggtttaaacaatcctcccgcctcagccaccctaggaactgagactacagctgcatgccacaacacatgggttttttttttttttttttttttttttgagacggagtctcrgtcgcccaggctgaagtgtaagggtgcgatcttggctcactgcaatgtctgccttttgggttcaagtgattctctgcctcccgagtagctgggattacaggcacccaccaccacacctgggtaatgtttgtatttttagtacagatggggtttcaccatcttggctaggctggtcttgaacttttgacctcgtgatccaccctcctcggcctcccaaagtgctgggattacaggcatgagccactgcgcctgggcttttaaaaaaaatttttttagacatgaggtctcattatgttgcccaggctggtcttaaactcctgggcttaagcgatcctcccacctcagcctcctaaagttctgggattacaggcgtgagcaactgtaa

SEQ ID NO: 760717 - DNA, 565 bp, Homo sapiens
aggtcttgctttattgcctaggctggagtacactggtgcaatcacagctcacagcaacttcaacctcccaggtttaaacaatcctcccgcctcagccaccctaggaactgagactacagctgcatgccacaacacatgggttttttttttttttttttttttttttgagacggagtctcagtcgcccaggctgaagtgtaagggtgcgatcttggctcactgcaatgtctgccttttgggttcaagtgattctctgcctcccragtagctgggattacaggcacccaccaccacacctgggtaatgtttgtatttttagtacagatggggtttcaccatcttggctaggctggtcttgaacttttgacctcgtgatccaccctcctcggcctcccaaagtgctgggattacaggcatgagccactgcgcctgggcttttaaaaaaaatttttttagacatgaggtctcattatgttgcccaggctggtcttaaactcctgggcttaagcgatcctcccacctcagcctcctaaagttctgggattacaggcgtgagcaactgtaa

SEQ ID NO: 760718 - DNA, 621 bp, Homo sapiens
acagaactgatgaagatgttaaaattagcagacaagaacatttaaacaatgattctaaaccccgtctctactaaaaatacaaaaattagctgggcgtggtggcggatgcctgtagtcccagctactcaggaggctgaggcaggagaagggcgtgaacccgggaggyggagcttgcagtgagccgagatcgtgccactgcactccagcctgggcgacagagcgagactccatctctaaaaaaaaaaaaaaaaaaaaattacagagagatatgagagatacagagcagacccaaatcaagtttctagaggtgaaaaatacattgagattacacacacacacacacacacacactcaatggaatgaatggctggctagacattacaaaagaaacaattcatgaactaaagacatagcaatggaaactacccaaaataaaacacagagaaaattttttcacataaatagatcatcagcgaactatggaacaactttaagcagcccaatatacatgtaattagagcctctgaataaaaggagagaaggagtggggacagaggaaaacacatttgaagatataatggccaaaaatgttccatatttcttgccagctataaattcaca

SEQ ID NO: 760719 - DNA, 621 bp, Homo sapiens
acagaactgatgaagatgttaaaattagcagacaagaacatttaaacaatgattctaaaccccgtctctactaaaaatacaaaaattagctgggcgtggtggcggatgcctgtagtcccagctactcaggaggctgaggcaggagaagggcgtgaacccgggaggcggagcttgcagtgagccgagatcgtgccactgcactccagcctgggcgacagagcgagactccatctctaaaaaaaaaaaaaaaaaaaaattacagagagatatgagagatacagarcagacccaaatcaagtttctagaggtgaaaaatacattgagattacacacacacacacacacacacactcaatggaatgaatggctggctagacattacaaaagaaacaattcatgaactaaagacatagcaatggaaactacccaaaataaaacacagagaaaattttttcacataaatagatcatcagcgaactatggaacaactttaagcagcccaatatacatgtaattagagcctctgaataaaaggagagaaggagtggggacagaggaaaacacatttgaagatataatggccaaaaatgttccatatttcttgccagctataaattcaca

SEQ ID NO: 760720 - DNA, 586 bp, Homo sapiens
agaaaaatagtggaaggaaatatcccaaagtgctaacactagaatgtgggtttataatttttattttcctcatgatgactttctatagtttccaaatttagtattctatgtaaaatggtgggggggggggggctattatttaaaaaaaataaaaataagaaagtcaayactagaacttagatgaaaatttaacttccaggctagaatccattttataatttttcattcccatctcttcaatgtaaaatgcaatttataatatctcatatcaatcagatactaacagctatttaaaactaatttgaaaaacacacacaagtaagtatgcgtaaaactggtgaaataggaataaatcatgtggattatacctatttcaatttactggttttgatactgtatatactacagttatgtaaaaagttaccactgggggaaactgggtaaatggtagggacctctctgtaacatttttgcaaagtcctgtgagtctgtaactatttcaaagtaaagagttaataaaactaacttaaaggtttatagggccaatattcaaaggaaactatactactctaactcagacaaggga

SEQ ID NO: 760721 - DNA, 538 bp, Homo sapiens
cctgtcccagctagctcttgcctgaaaagtaggtgcttaatgatacaggtaggtctaaatagtaaaaagatttattccgcaagccactaattaaaatcagtctggtcttgatctatttagcctagagagattgacgattttagggagaggattgtggggccccaaatccagaaaactggaaaagatcggtagcttaaaaccattcattcatttatttattcacttattcattatttcmatatatatttataaagaacccctagcttcctgggcaaggaacttatagtttagtaggggagacagacaagattaaggaaaaaaaaaaaaaaacacaggactttgcttagagaaaaagagaaagttcatcatttgagattggagagagttctgagaggatgatgtgggaatgtgcgatgtgatgaactgaaaaatgctggatgacttcaaactttcccattaaggtggcatgatagcatcattggaagaggagagggagagcatatggggattgaaagagagaataactccagtgggaaat

SEQ ID NO: 760722 - DNA, 538 bp, Homo sapiens
cctgtcccagctagctcttgcctgaaaagtaggtgcttaatgatacaggtaggtctaaatagtaaaaagatttattccgcaagccactaattaaaatcagtctggtcttgatctatttagcctagagagattgacgattttagggagaggattgtggggccccaaatccagaaaactggaaaagatcggtagcttaaaaccattcattcatttatttattcacttattcattatttccatatatatttataaagaaccmctagcttcctgggcaaggaacttatagtttagtaggggagacagacaagattaaggaaaaaaaaaaaaaaacacaggactttgcttagagaaaaagagaaagttcatcatttgagattggagagagttctgagaggatgatgtgggaatgtgcgatgtgatgaactgaaaaatgctggatgacttcaaactttcccattaaggtggcatgatagcatcattggaagaggagagggagagcatatggggattgaaagagagaataactccagtgggaaat

SEQ ID NO: 760723 - DNA, 538 bp, Homo sapiens
cctgtcccagctagctcttgcctgaaaagtaggtgcttaatgatacaggtaggtctaaatagtaaaaagatttattccgcaagccactaattaaaatcagtctggtcttgatctatttagcctagagagattgacgattttagggagaggattgtggggccccaaatccagaaaactggaaaagatcggtagcttaaaaccattcattcatttatttattcacttattcattatttccatatatatttataaagaacccctagcttcctgggcaaggaacttatagtytagtaggggagacagacaagattaaggaaaaaaaaaaaaaaacacaggactttgcttagagaaaaagagaaagttcatcatttgagattggagagagttctgagaggatgatgtgggaatgtgcgatgtgatgaactgaaaaatgctggatgacttcaaactttcccattaaggtggcatgatagcatcattggaagaggagagggagagcatatggggattgaaagagagaataactccagtgggaaat

SEQ ID NO: 760724 - DNA, 612 bp, Homo sapiens
acaatgtgaaaccctttgttaaaaatttttaaatatttcaatatgacaacgacagagcattaaactgagtgtgggccctcctaagcacatggctgtgtgtggctgcacagggtggcatacccatgaagtcagcactgctcatagctaccacagcctaaatgagaaacaaatgttaaactctcaacattgaaaagctaagaaactgttgtcattttacaaatgcaagtatttgcacattgaaataccattttcctgcacytattttaagaatagtttttaaaaggtgggctaagttgaaaagacttgaacagttgaaattgattgaacttggtgtattatttttgtacaggttgagggatttttttatgtgtgcatgaaggatgtgagaggagattcttgctgaacataaattggtacctacagcagagatagataattcaggaaaagaaacaggttggaggcatggatcctgagaatacttttggacatgctgattttgaagtgcattgggacgtctaactcaagatctgaaggacacagctgggtgcatgagtcagaagtttgggtgagaggcctgggcagaaatgaaaaatgtgtacaatcagcacatta

SEQ ID NO: 760725 - DNA, 629 bp, Homo sapiens
acagatggggttttcgtgtgatgtaatttctgtttgtcagttttccttctaacagtcaggaccctcagctgcaggtctgttggactttgctggagttccactccagatgctgtttgcctgggtatcaccagtggaggctgcagaatagcaaatattgcacaatggtaaatgttgctgcctgatccttcctctggaagcttcgtctcagaggggcacctagctgtatgaggtgtcagttggcccctactgggaggtgtctccaagttaggctactcaggggtcagagactcacttgaggaggcagtctgtccattctcagatctcaaactccrtgctgggagaaccactactcttttcaaagctgtcagacagggatgtttaagtctgcagaagtttctgctgccctttgttcagctatgccctgccccaagatgtggagtctacagaggcaggcagccctccttaagctgcagtgggctccacccagttcgagcttcccagctgctttgtttacctactaaagcctcagcaatggcagacacccctctctcagccttgctgccaccttgcagtttgatctcagacttctgtgctagcagtgagccaggctccgtgggcgtggaaccctc

SEQ ID NO: 760726 - DNA, 608 bp, Homo sapiens
gggatttatgcaggataacatatttccaagagaaattctacatgtgaggaaacaggcacagagcttgcacaaatcactcaacatcatctaccgagtgacagagcctgggtttgaatcatgattccttcccgcatgatgctgccctaccgcggaagctcgccacctcagtgcagtaccttaagtgctaataaaayctgtgggcaaactacctgagcccagaggatgaggaggctagttgggaatggaagaggaggggatgggaatataaaaggttcccgtggacaggaagccctacccaaccaacactcagtggcccgtatcatctaagcgttccaatacagtgcaagtgatagcaagcaggtcttttaggcgatgccccaagagaactgtccatgacacacaaagcaaatgcatttctaatgtcatcagcccagaaaagaacaagctgaaggtgtttatgattgaagaagcaaggtgctctgcagctcagctttcactttccggcaaatcaaatcacccaagttagagtgcactgtgagcctgtttacagagcagtttcgttgctggtgaatttttctgtattctcttcctgttaaaggggatcccac

SEQ ID NO: 760727 - DNA, 608 bp, Homo sapiens
gggatttatgcaggataacatatttccaagagaaattctacatgtgaggaaacaggcacagagcttgcacaaatcactcaacatcatctaccgagtgacagagcctgggtttgaatcatgattccttcccgcatgatgctgccctaccgcggaagctcgccacctcagtgcagtaccttaagtgctaataaaatctgtgggcaarctacctgagcccagaggatgaggaggctagttgggaatggaagaggaggggatgggaatataaaaggttcccgtggacaggaagccctacccaaccaacactcagtggcccgtatcatctaagcgttccaatacagtgcaagtgatagcaagcaggtcttttaggcgatgccccaagagaactgtccatgacacacaaagcaaatgcatttctaatgtcatcagcccagaaaagaacaagctgaaggtgtttatgattgaagaagcaaggtgctctgcagctcagctttcactttccggcaaatcaaatcacccaagttagagtgcactgtgagcctgtttacagagcagtttcgttgctggtgaatttttctgtattctcttcctgttaaaggggatcccac

SEQ ID NO: 760728 - DNA, 608 bp, Homo sapiens
gggatttatgcaggataacatatttccaagagaaattctacatgtgaggaaacaggcacagagcttgcacaaatcactcaacatcatctaccgagtgacagagcctgggtttgaatcatgattccttcccgcatgatgctgccctaccgcggaagctcgccacctcagtgcagtaccttaagtgctaataaaatctgtgggcaaactacctragcccagaggatgaggaggctagttgggaatggaagaggaggggatgggaatataaaaggttcccgtggacaggaagccctacccaaccaacactcagtggcccgtatcatctaagcgttccaatacagtgcaagtgatagcaagcaggtcttttaggcgatgccccaagagaactgtccatgacacacaaagcaaatgcatttctaatgtcatcagcccagaaaagaacaagctgaaggtgtttatgattgaagaagcaaggtgctctgcagctcagctttcactttccggcaaatcaaatcacccaagttagagtgcactgtgagcctgtttacagagcagtttcgttgctggtgaatttttctgtattctcttcctgttaaaggggatcccac

SEQ ID NO: 760729 - DNA, 564 bp, Homo sapiens
tcagggcaaggcaggtagcgccctgccccgtcttgactgcagtggctggaggggaacgcagagcatctttcctgctcccctgcagctccatccccatcctttccctctggtctccttttccgtgttacgttctgcatctgcagaggctcccgtctctgtcatcaacstaactctccttgtgagatgaggaagctgagccctgtgcccttgtcacttatttgcccctgggcggacagtggctggggtgcattatttctctcctttccatcatcgtgatatctgtgtctccatcctagctacccttttccttatctcttccttttctctcattctttctctctctcatcctggcgtgggtgggtatgcagggaattctagggatataattagtagccagggagaaagcaactccagcctgccttcattttttcttggaccagttgtgccgagataggaccagcactgtctgtccatgggatgccatgagtaccccagggttgtggaaagggatcaggatcctgcccatggacccttcctactgcctctgaccccagatatattgtg

SEQ ID NO: 760730 - DNA, 601 bp, Homo sapiens
atgcaaataaatgtacagtgacacctggtgataagtactgtgagggccaagggcagagggctcaagagcacagagcaggagggtcagggaggcctgggagaaagtcacccttccacacacgggagccagcagcacgcagacacggccgcttccctctaggactgcacagcctggcaggaaagccagacgcattccaggatcttagagcatgggttgttgagggccagtctagggaccctggggctgggagccaccaccctggccaggcaacaggaagtgctttcaaagctgatactggagctaagtggggtggggtgtgggggaatattcaaagcgggagaagcacaggacaactgtggaagtgacggaggttcagtgccggagacctcggggtgacggctcacagcgcccagcccagtgtgtgyctggggctgggggtccatagggctaggcagctctggggggcacagaaccccagtggctgcactggagcccccatcctactgcggccacagtcctgtcctctcccagccctgccctgaaagtcacgccccatgcagagctgtttagggcccccctgctccttgcaccccagctaatg

SEQ ID NO: 760731 - DNA, 597 bp, Homo sapiens
aaaatggggacaaaacactaccttcctcttaggattgccgtgagagttaaatgtttcaagtgcttgggactgttcctggaccttaggaagtgtcatatcaatgtttgctattgtagatccaccatcccttatccatggttccaaaattccaaaactctcaaaatcaaaaggctttttgtaagttttgtattccaagtcatttcaggaaaacctgagcttgattgctctgaagctatttctatgctttaattatcctgctgagggtgaatatagctatagctgtatatctataagatatgagtgtcttatagatatatkcttgtatctgtaagattctgtatctttcaatctatcctgcttagggtgaatgtagtatgtgttataccacagacatgttaacgtgaccgatgaagggggaggctcccgtgggggctgaggaaggtatgtgatagatgagaaacgcatcatttctggaatccaaagcattctggattctgtaacaccctctggccccagggatttcagagaacaaactgtggacctattattgcttattattattttacttattattctcattattatgtgggtgatagg

SEQ ID NO: 760732 - DNA, 320 bp, Homo sapiens
tgatgttgacgctgctggttccatggaccacacattgtatagtaagcactgtattagtctatctttgtgtgtttctgaaaatttccataacaaaaagtttttaaaaattgactacccacaggccaggcgtggtggttcacacctataatcccagcactttgggaggctgaggcaggcaratcacttgagctcacgagttcgagaccaacctggcctggccaacatggtgaaactgtgtttctactaaaaatacaaaagttaggcaggcatggcacgggtgcctgtaatcccagctacttgggaggctgaggcaggaaaat

SEQ ID NO: 760733 - DNA, 606 bp, Homo sapiens
aagagtatgtatgtgatgatggaggctatgcataattccaatctttccatctctatctcaaccctttttttctcccatgtaagaatatgttaaaacggtgataatgactgtgtttaagggacaagtttcaagtagctctggcttatgttttaaaaagttaatgatgtggaaaattgagagtagtgttttgtgcacatttatgagagattctaaagcctgatacttaaatactgctttgaattgtagagacaattttcacatctttttccatgtgtgaacattggtcattattttcttcagttcatgttaatattaagttttaaaggtgatagagaaaaggaacaggagaatagtctggcttctggctaaatgatcacttctccacctaatgtgggtccagtggggatrgaggggagtagattgttgccatttttaaatgagataatttgtagaagtgcttgacatcatctttattttagaaagagtttaacagatgatattttgattccaattttggagtggctccttatttaaagagtagggttaatgctgtgctgagtgttcacatggatgtatgagaaaactgctgctaaacaatagattaaa

SEQ ID NO: 760734 - DNA, 490 bp, Homo sapiens
tttttccctattgttctttcaattattaatctaaaggagctctttctatatcaggatagtatccgtttgttacatatgtatagcatttattatttgtcttctgttgcttttgccacaggagattttagttctttattttattaactatgtattgtttacatctataacttttgggtttcctcctttgcttaagaaraccctttccatcccagtgttacacaaatacttcccccgtaattttgtctaatacttttataatttcccctttgagtttagagctttcattcatctacctttttttttttttttgagacagagtcttgctctgtttcctaggctggagtgcagtggcatgatcatggttcactgctgcctcaaactaacccaggctcaatccatcttcccacgtcagcctcccaagtagctggggctacaggcgtgcgccaccatgccccactcctgccacgtgttttcatacatacctgggtgg

SEQ ID NO: 760735 - DNA, 640 bp, Homo sapiens
tacttatcacctttcaggaatcctgggatacagatcatttctttcaggatccctttatcaaggaggacagggcagaaaattgaaaaatgtattttttggacaatcttgcaatttgggttccagacatgtagaagaattccagataattcatgtaaagactccaccttcaaggagggggagyacaactccccattctttaaagtgggctatgcctagtgacttccttccaaagaatgaagtacaaaaggggagaaaaagagtaactttatagtggagagacctgatagtcactatatcagccaggtggtcaagaaaatcagtcataaatcatgttgatagtatactcgatctgttgtgatgaactggtacattgtatctgtggacttccatcccaaaacctataaccctagtctagtcatgagaaaaatatcagacaattcccatagaaggacattccacaaaatacctgatcagtattcttcaaaactgtcaaggtaatctaaaacaagggaagtctgagaaactgtcatagccaagaggagcctaaggagatacaacaacaaaatgtaatatgctacatcctagagatgagatcctggaacacaaaaaggacattagttaaaaagtagggaaatctgaa

SEQ ID NO: 760736 - DNA, 646 bp, Homo sapiens
cattccattatgagctctttggttgacttccagtttaattgtgagctgaaaattttggcttcctgtgaactgagttgattgatgggccactgcaagaaaagaagtggaaatttaattccctataaagtacagctctcattttttatctccaggaataagatttcagctttcattacacctccaagtgggaattctcccattcgtgtatacttgtactaaatatacaawagcaggcattttttattaagaaaaaaattgcaaaaataaaaacaatttgaagaattgtaaaaaaggcaactttgtttctcagtggtcattctatctaataattattcatcaggaacccactatgtaggaggccctgtactagattggcatcaacacataaacatgcataaacaacaactggaaaggactctaatgcatccagtccaaattctcattttctaggcaattaaactttagccctaaaggagaaaaacaatttttacaaaataacacatgcagttactaatagcagatgctagaatatagtatcaagtcagatagattcccagttctcataagtataaagtgtgtgtgtgtgtgtgtatacatatatatatatatagagagagagagagagagagagaattcttattgtaaa

SEQ ID NO: 760737 - DNA, 562 bp, Homo sapiens
agcactttgggaggcctaaatgggcagatcatctgaggtcagaagtttgagactggcctggccaacgtggtgaaagccctcctctactaaaaaaatacaaaaaaattagccaggcatggtggcatgcacctgtagtcctagctacttgggaggctgaggtaggagaatcgcttgaactcaggaggtggagattgcagtgagccaagagtgtgccactgcactcccgcctggatgacagagagagactctgtcaaaaaaaaaaagaataataaatacaaaatcaaataggctcacacttattaggtgtgggacctagggtaaatcactcaatctctttaaggccttagtttccttttctacatactgaggataataatagcatctaccttataatgtcagataagataatctataccaatrtcaactaatcaggacaactatacaaactggacaaaatatatttcaaaatatcaaaaaataaaaagcaacaagttaccatacctgaaaaaaagacaggctccaagggggagagctctatattttagagtaacaattattttgg

SEQ ID NO: 760738 - DNA, 586 bp, Homo sapiens
acaatgaagtgcttgtgacttaaactcttcaacttatatactcttcaatttacacacaagatggtctccatcccaagagctgttaggatgccttgtttctactgagttctcaatggctcaaaaaggctaaaagcactcttcatatgtccatgattatctgattatcataattcatcaagaattagccaagtgtttaagtactgtcaatttcaagagtccagatcaaaagggagaacctacaggcctctgactctgaaaatctaggttttattaaataagaggaagccttcacattaattgttttactatactagacacatcttggtacatggtcaaagtaggataccatcatgtccartctgccaaagcaaaggctatcatatcaccatattcattttttaaacatctaacatttatttggtgtttaccatgtgcctgatacttttctaaatactttatatgtattaatctcatgtaatcctcataagaactacatgggagaagtattactattgtgtccaatttattgatctggaaatggagattcaaagaggttaaataactctcccagaaacattacatgaat

SEQ ID NO: 760739 - DNA, 522 bp, Homo sapiens
tatcagttcctggtgtataacttagagctaattagaaggtatcttgggtcctgggaagattctgtccattctattctgtcgttatagtgaaatgcacatttcccctaatcttaaaagattgaatagcatttcttttaaaaatgaaataaaatgccagctggttaagaggaaaaaacctagttagtataatattctctgtatcaacagcaccatccctgcagggtattgatttttccccatctcgctgggctctcagtcttgactaatgaaggcagcaggcagtgtggwtgatccccaggcaataaatgattcagaaatcacgccttttcattttgtagtgaaatacagcagcctcctttgaccctttctgagcctagtcctgctccatccacatgggctgcaaggccttggacaagtccctgagcctgaggaattcagtcacacctaacacacctaacagtcttttatgaccctcctgctcaatctgtattcaaccacttccctgttgtgacttcaggtctt

SEQ ID NO: 760740 - DNA, 584 bp, Homo sapiens
cgtgttatatcagttcctggtgtataacttagagctaattagaaggtatcttgggtcctgggaagattctgtccattctattctgtcgttatagtgaaatgcacatttcccctaatcttaaaagattgaatagcatttcttttaaaaatgaaataaaatgccagctggttaagaggaaaaaacctagttagtataatattctctgtatcaacagcaccatccctgcagggtattgatttttccccatctcgctgggctctcagtcttgactaatgaaggcagcaggcagtgtggatgatccccaggcaataaatgattcagaaatcacgccttttcattttgtagtgaaatamagcagcctcctttgaccctttctgagcctagtcctgctccatccacatgggctgcaaggccttggacaagtccctgagcctgaggaattcagtcacacctaacacacctaacagtcttttatgaccctcctgctcaatctgtattcaaccacttccctgttgtgacttcaggtcttggccattctagaccagcaagataccaaatatatatatatatatatatatatatat

SEQ ID NO: 760741 - DNA, 589 bp, Homo sapiens
gtaaaataatgccccttataagcatacatttagcggaaacttatgcatattcacctgagagttcttcctctaaaacttgttttagaaaagcaaatacccagcagtttccacaatttagagctgctggaaatgttccagtattaagtatctgagtagcattgacctcttccttagttagttctttgcagtttcaaattgtatgccagcctcatttattcggtgatatataaatcagacagctcaatggttcctccaggattttatccattcaaagaaatgtaaccaatgctctcatttttccacttttcatctactaaatttgtrcctcctaaaaataaatctagtgctggcaagcgtgtgatgaaactggtgctcttcttctgctggtgttggtgaaaattggttcagtccctgtagaaaatatctgatggcctatttcaagagccatattgctgttaataaccttgacttggtaattctgctcctaagaatctctcataaagaaatcatccaaaatatagaatatgttagatgtataagcttatttatacttctcagaaattggaagcaatctaaaagtctaccaaca

SEQ ID NO: 760742 - DNA, 499 bp, Homo sapiens
atcacaaactttcaatttggactgcggctatagcagtaagaaaaaaaaggaaatacaggcatatgaatatgtgtaacattaaggcattaaatgtggaaatatagagaagtagatgattttacagaaaagtataaattatcaaaattgacatcagaatagataaaaatatcaaacttaaacattcttaaaatgtgatcatctaatgatttaagcatctcaccytctatttaaataggaataggaatctgcaaggtgtaatttcaccacaagcaggtggaaaagaaaagatccaacaaagaaatcttacaagtatttatagcctgtagcaattcaaagatgtgaatataaatatcaccaaagcaaacactgttaagtaagacaaccaatcagaattttttgttttaaaagacaaatgttgatttcacaggacatgatcaccctttctgccttctaggtatcttacaagacttctttattagaaataacactttcaaggact

SEQ ID NO: 760743 - DNA, 612 bp, Homo sapiens
cagctcctacccctaggagctttgtgtcacccatgtcatcagccgaagtgctggcttaatagacggaacttgttctaaaggtatgagaagagtaaattggagatggtaattgcaggaagtgatggcagagggaagaaagaggtggtgttttaggagtagggtctggagctgttcccataaactagggccatggaggaagcggctgcccatgagggttgtgaaaccacagaggtgatgcygctacaggcagatatgccacccctccacaagcccagactctcaggggtactgcagacagttatctgggctcattccctaaggccccttttaacgagagagtctcaagacagcggagctgggagcctgtgaggcaggaagaaagttccagctaaaaagacaatccccattagttcagctgggactctcaagaagatgagcgctttcctaaatgcaatgaaggcaaggaataagaaggatgggctttcctcccaaggctgctgggagctcacttggtgaatataaattggtctccttgccaggcggggcctcagctccccgacctgtagcatgggatgactgggttggctcaaaggtgttacccatccatgttat

SEQ ID NO: 760744 - DNA, 612 bp, Homo sapiens
cagctcctacccctaggagctttgtgtcacccatgtcatcagccgaagtgctggcttaatagacggaacttgttctaaaggtatgagaagagtaaattggagatggtaattgcaggaagtgatggcagagggaagaaagaggtggtgttttaggagtagggtctggagctgttcccataaactagggccatggaggaagcggctgcccatgagggttgtgaaaccacagaggtgatgctgctacaggcagatatgccacccctccacaagcccagactctcaggggtactgcagacagttatctgggctcattccctaaggccccttttaacgagagagtctcaagacagcggrgctgggagcctgtgaggcaggaagaaagttccagctaaaaagacaatccccattagttcagctgggactctcaagaagatgagcgctttcctaaatgcaatgaaggcaaggaataagaaggatgggctttcctcccaaggctgctgggagctcacttggtgaatataaattggtctccttgccaggcggggcctcagctccccgacctgtagcatgggatgactgggttggctcaaaggtgttacccatccatgttat

SEQ ID NO: 760745 - DNA, 611 bp, Homo sapiens
ggctgagagcagcctgaaccctgtccctttaatgtggggtcctcctctgggctcttcctctctctgggaagtgactgtgcacagggaaagtgtaattggcaggctgtgacactgctgtctgcaagtgtctctctaagtggaacgcatttcagctttatctggtgatgtctgctacctgagaagggccctgggccatctcaaagggcttgtagcagctaattgtgcctgttaggaccagcaattagctggggatctctggacttcgaagctccaacacccaccagctttcccttcctttctctccctttcacttaactagcccagcctaatagaggcagtgaaggacaggcaggtgaggggcagacaggacaaggaaggtggaggctggcrgggcctcatcctatgcccctctgagtcctgcactccacccctgctcaagagaacctgcgaaaagaaacaggcaccagctctgctctcatgctgtaaatacatcctctttattgcaggaccagggctagaagcttattaatcggtatagggagtcatgctgcccgtttgtacagtttaagcgggagttggaagatgacaataaaaagctaattaggcgcagg

SEQ ID NO: 760746 - DNA, 578 bp, Homo sapiens
tccctacagtggttacctgcatttatatagtttttgatgtctataaattctgctgctcacataaccaattgccatggctgggtaccacaagacttggttttatccatgccgtgtgcaccatggatccatcacctccaatgtcctaccaactccaggcactgacaaggacctagggcagagtgctgaccacccccaggctctggcttcggtcctcttcctaggttaaaggacgatctttctctccyttgctgctttccacagatccatattccttcaggaaccctgtggacacaatcttcagtggcttcggcttttataaagtaaaggaaaagggtttcttcccattcccagcttctgctgtaagctctgcacctgtaccccacagaaagaaatacaaattgcctggttcacttcttgaagtgagatgcagtggggagagaatgcaaagatccaaattcagctcccaccctaatagaacacccaagaagcctgccttcctgctgcatgcttgggtgggattctgctcgttgcaatcagaaatgccaaatggaaacagttctacaatcaggggagtgtat

SEQ ID NO: 760747 - DNA, 645 bp, Homo sapiens
tccatacataaaaaattggaggctctttatgaggcaagagagagaagagtgggagagggagtagttagtaagctggagtgagagggttgggtgcattctccatgtatagctaaaattccaaggtgttggtagaaattctaaaytcaagcctgaccttccagttgttatgaagctttatttgtcaaggtgggagtatatcgcattttaaaaaatagtttgtaacatgatttgtaacatttagaaatgtttatactgtcatgctgggctctgtaagtgttcagatggggcctgtgacagtccccttggaggaatgtcccctccctgattatgtgcagtttggagagacagggacttcattgcactgccttccttctatggaagcagcagaagacccttgagcctgcttcttccagagtcttctttttttgtcattgatgattgacatttctaatgttggtagtcaggtatgtgacttcagctcagacaatcgtattctttcttactggacttgagacttgggtggaatgactttgaataaaataaatttcagatgatgttcattctagcagaagtggatgcctgggttggggcatacctgttctgactcaggtcttacagctgggccccacctccttctccagactc

SEQ ID NO: 760748 - DNA, 629 bp, Homo sapiens
tgcaaaatcttccttcaaaatcacttgcttaattacacaaatcaattcttcagactgaaaatttagttctaaaatagaaagtaggaatgtttcagaagcagtcacatgggtaaggtgaaaatcgcagggtggtcggctctggcctttgttttatagggatgaaacatgataaatatcacagaaatctagtgttttatgacccaaagttgctccataaataacttagaatagtgtagtacattagaggkctaaggaagtacttcagacctggttcattctcctctttgggcaaaagtaacaataaaccctttaactctgagacagccccagaatatgttagttctggagcaattacgagttgccaagcaactcaaacaggcatgtggatgctctgttatgatccaaagaaatctttgtcatcatcattatcttcatcatcattgccatcatcactgccattattatcattaccatcatcattatcatcatcattgccatcgtcatcatcatcaccacctaagaaccttgcaatcatttggatgaaccttgatgtgatagaaaaggtattggggttagaaggcccagatactaaactgactcagcctgtagctggtggtttaattttggca

SEQ ID NO: 760749 - DNA, 629 bp, Homo sapiens
tgcaaaatcttccttcaaaatcacttgcttaattacacaaatcaattcttcagactgaaaatttagttctaaaatagaaagtaggaatgtttcagaagcagtcacatgggtaaggtgaaaatcgcagggtggtcggctctggcctttgttttatagggatgaaacatgataaatatcacagaaatctagtgttttatgacccaaagttgctccataaataacttagaatagtgtagtacattagagggctaaggaagtacttcagacctggttcattctcctctttgggcraaagtaacaataaaccctttaactctgagacagccccagaatatgttagttctggagcaattacgagttgccaagcaactcaaacaggcatgtggatgctctgttatgatccaaagaaatctttgtcatcatcattatcttcatcatcattgccatcatcactgccattattatcattaccatcatcattatcatcatcattgccatcgtcatcatcatcaccacctaagaaccttgcaatcatttggatgaaccttgatgtgatagaaaaggtattggggttagaaggcccagatactaaactgactcagcctgtagctggtggtttaattttggca

SEQ ID NO: 760750 - DNA, 588 bp, Homo sapiens
atgttgctcagtgggtctgcactcatgggaagcatgtgatcatgggcaatgcaatgttttctggctgcagagagtctagaatcttaaaggtcctcttacccatcatgggaattcattccagaacattctggacccctctcaggggcaggtaagaaatgtctattcattgaaacygtctaatgcattttggggtggtttttagaacccacttatttagtctgctgtgacctctgatagctcactggggactatccagagacaccgtgaagctgcacctggcagcagatatgctcttgttctaatgagttcctcagtttctgctctagtggcttgagctatgcagcttaacgtaatggccccagacatggagggattgactgttccttctgtagagactccaagataataaaaacccatataaatggtcacagatccattcacagtggggttggatgtcagaaagcgctcagggccttggagcagggaagtcatccccaggcagtgggcttagtgaaccattgtcctagacgtggaacacattgtccttcttctttttactttagtttgccatttttataagaaaaaaaa

SEQ ID NO: 760751 - DNA, 588 bp, Homo sapiens
atgttgctcagtgggtctgcactcatgggaagcatgtgatcatgggcaatgcaatgttttctggctgcagagagtctagaatcttaaaggtcctcttacccatcatgggaattcattccagaacattctggacccctctcaggggcaggtaagaaatgtctattcattgaaactgtctaatgcattttggggtggtttttagaacccacttatttagtctgctgtgacctctgatagctcactggggactatccagagacaccrtgaagctgcacctggcagcagatatgctcttgttctaatgagttcctcagtttctgctctagtggcttgagctatgcagcttaacgtaatggccccagacatggagggattgactgttccttctgtagagactccaagataataaaaacccatataaatggtcacagatccattcacagtggggttggatgtcagaaagcgctcagggccttggagcagggaagtcatccccaggcagtgggcttagtgaaccattgtcctagacgtggaacacattgtccttcttctttttactttagtttgccatttttataagaaaaaaaa

SEQ ID NO: 760752 - DNA, 614 bp, Homo sapiens
gggaaagaggaaatgagaccaggaatgggaacaagccgatgtggagagttttgatgtacaagatatgatggggggtctaccggggacccctgggagactgtgtaaaacacacctcagtgttttcgtcccatctgaggggcaaggaagctggggtgtttgtcttcaatggccactggcttttcactgacacaggcagggcatgccttgcctggcacagtaggcctatctcatgtgggagctcgtcgtgctcttgcggccatggaaagcccacctgcagagtcacagagacctgcaatagaagctctactcatgttcgggaaccgtgagccctgaagggaaatgctctccactaaaggggtaatctatttttgtacaggagttctctttamccagataactttttagtgaacttaaaatataatatgattttaacatttcagattagcacactttgtgacaaattatggcactcccaaaagagaaacttctcatccagtgctaactcctttccccattcagtgtattttgcatggggccagaaataaaattccatggggctcttcacaattgtgtggaattgatcaaggaaatacatcgtggtgtccagatcacac

SEQ ID NO: 760753 - DNA, 620 bp, Homo sapiens
tccaaccctatgtcttcctcacaaggattctgtgagtatctgtggtcaatagacttatggtatcatacatgggaataaagccctagaaggtactacaatatcctttcgcagacagctcaatatctcatttgatcaccaccgccacccagtgagatatgttttagacaagacaaacaaaacaaaaataggataaacacagatatagataggacatggttgagaaaagaatcaaatgttaaatgccactcagctatcaattagcagagagggctccaccccacatgcagatttcagtgccccaggtgctgtggataacttgtgagagcrccccttctgtccctgcttcaaagggcagtgggtctgcataggctaactggtcctaggaatggcacagactcttgttcctggctttcctaccactggggctttgggaagcaactagcttgttttaggtcaagattttacggtttagcttaccagtagggaggataactcaaaaggcagtgatttccaattctaacatattttgtagtgccacaaaaatgccccctctagaccaacagagatagagagaagttgacttttggacctcagcctgcctagtaggtctttatcccgat

SEQ ID NO: 760754 - DNA, 564 bp, Homo sapiens
caaagacgccttgacctgataaatgacttcagtaaagtttcaggacacaaaatcaatgtacaaaaatagtagcatttctttttttatgtctttttttttgtcttcaacttttattttaagttccagggcacatatgcaggatgttcaggtttgttacatagctaaatgtgtgccacagtgttttgctagacagatcaatccatcatctaggtattaagccaagtatccattagctgttcttcctgatgctctcccttctcacatgcaccaacaggccccagaatgtggacacgtgttccccccatatgtccatgagttctcattgttcagctcccacttgtaagagagaacatgtggcatttgtttttctgttcccrcaatagtttactgaggataatggctcctatctccatccatgtctctgtaaaggacatgatctcattcctttttatgactgcatagtattccatggtgtatatgtaccacattttctttatgtagtatatcattgaagggcatctgggttgattccatgtctttgctgttgtgaatagtgctgcaatg

SEQ ID NO: 760755 - DNA, 624 bp, Homo sapiens
gtattgtgtggtgggtacacaattgctagaagcaagtccaaatctcacctctaggtctggctttctctaaagagctaagcaaagagagacactgccatgcccaagaaacagtgtccataagatagatgcaactgaactgttgaggagaatcagggcttttctccattttggagctggaagagatgtttcccattagttttcttaaagtgatcccaggtgatggattaggtgatgtctaacaccaccacaagaatgaataaatgcatatccagggctcactctcaatggataacatctctcagtattrgtcattgccagaataaagcttgagtgtttttacaataggctacaaaaactataaacacacatcattctaatggtcaagcttgactttaaggtaaaatttagaatatgcagagaggcatatggatgaatggatgaattctaaccctattcttaataagaattggtgagtataaacttcaaggctgtaaccaaaggcaaaactcagaagtaaagatattttgtgttgcaatttgaaaagagctccataaattttaaaatcaaaatcattttattaaattaggtacaatattagatgctcagctcgcacaccgatctaga

SEQ ID NO: 760756 - DNA, 624 bp, Homo sapiens
gtattgtgtggtgggtacacaattgctagaagcaagtccaaatctcacctctaggtctggctttctctaaagagctaagcaaagagagacactgccatgcccaagaaacagtgtccataagatagatgcaactgaactgttgaggagaatcagggcttttctccattttggagctggaagagatgtttcccattagttttcttaaagtgatcccaggtgatggattaggtgatgtctaacaccaccacaagaatgaataaatgcatatccagggctcactctcaatggataacatctctcagtattagtcattgccagaataaagcttgagtgtttttacaataggctacaaaaactwtaaacacacatcattctaatggtcaagcttgactttaaggtaaaatttagaatatgcagagaggcatatggatgaatggatgaattctaaccctattcttaataagaattggtgagtataaacttcaaggctgtaaccaaaggcaaaactcagaagtaaagatattttgtgttgcaatttgaaaagagctccataaattttaaaatcaaaatcattttattaaattaggtacaatattagatgctcagctcgcacaccgatctaga

SEQ ID NO: 760757 - DNA, 573 bp, Homo sapiens
tctaaatcttcaaataattctaaaccaaatggaatacagatgaacattttctagaaatcactgacattcactattttaatttcttagccattgataatgtttttgaagttaacatttactctggtcacagtggctcatgcctgtaatcccagggctttgggaggcttggtagcagaattgcttgaarctaggagtttgagagcagcctggacaacataggattaccctgtctctacaaaaaaatttaaaaagctgggcatggtgatgcatgcctgtagtctctgctactcaggagtctgaggcaggaaaatcacttgagcctaggagttaaagacttaaaggaaacagtgagctctgactgcactacagcactccagcctggacaacacagtgagaccccctctccccgctctctaagcatatatatatatatatatgtgtgtgtgtgtgtgtatatatatattattaaataagtttatggactttataaaatttatgttaaagtgacaagtatatagtgtgtgcagttacaggcatgaagaagcagttaataaattatcctggaattaaaac

SEQ ID NO: 760758 - DNA, 616 bp, Homo sapiens
tttatgaataataggaaaataggagcgatgaaaaagttttacttgatatcaaattgtaacatcattattgctctgcagcaaacacagaattacattccaggatttaagtattaaatgatatgtttttaaggtctaagaaaggacatttgcttcccgattgattgcattaatataaagcaatttaacacatgttaactacagagtcagccagacttgagtttaagtcctgactattactaactagatggtgttggagacttcgctcaaactgaacttaagttttttccaacagcaaaatgggggaatagaaatcaattattaataaaaggatgcctatgaggagcgccataaacagtaccccaaactccccctcccacatacgctccttttcatcacawaaatagtgtaaaatatattgacaaatggcatgatcatactttggcaaatagtttctcatgaaaacatttttggaaatgatttctaatagaacaaatgtaaaaacaaagatatttatatgaagggtctatttacataaaatagaaatttttctaagttaattgaaggaattaccatacttttttttttcgtaaaactcatcaacattaaaaacaaaagt

SEQ ID NO: 760759 - DNA, 567 bp, Homo sapiens
cactgagtccactgctttttgaatgatgcccagtcctcaacatgtcccctttttctccttccctattttagtttacatgaaccatacatacagttaattgttttcaaacacccaaacctcccttgccactttctcaatgtcattttcgccagcaaaatacgtaacttggtcaaacccaactgtctgtgtattaatcgtggctggagaacaacgcacgccctggctggctgcattctgtctaaaaccatccataagtctccagtggcagtttccatgaccctacaatccagrcatctttgcctgtacagtttaacttgctcactttttgatacaattttctgccctttttttttcagatatttccaatggtttaaaatttcagcgaattatcttgtcacatatgtaattgagagaatggaagttctcagaatgaaactttctctttgttcaccatcaaatctgtctaaatacttctacttctacccacacactttgtcttctcttctgtgatggtggatgaggatccccggctcccatcaaaggcagttcctggctggtgctccgtat

SEQ ID NO: 760760 - DNA, 564 bp, Homo sapiens
caaagacgccttgacctgataaatgacttcagtaaagtttcaggacacaaaatcaatgtacaaaaatagtagcatttctttttttatgtctttttttttgtcttcaacttttattttaagttccagggcacatatgcaggatgttcaggtttgttacatagctaaatgtgtgccacagtgttttgctagacagatcaatccatcatctaggtattaagccaagtatccattagctgttcttcctgatgctctcccttctcacatgcaccaacaggccccagaatgtggacacgtgttccccccatatgtccatgwgttctcattgttcagctcccacttgtaagagagaacatgtggcatttgtttttctgttcccgcaatagtttactgaggataatggctcctatctccatccatgtctctgtaaaggacatgatctcattcctttttatgactgcatagtattccatggtgtatatgtaccacattttctttatgtagtatatcattgaagggcatctgggttgattccatgtctttgctgttgtgaatagtgctgcaatg

SEQ ID NO: 760761 - DNA, 611 bp, Homo sapiens
ctcaggtcaaggcacaggcgacgggaatgtgggcggaggcaccacgcagcccatggcagaggagacaagagggaagatgctgggagagccaggagtgaaaggaggatgctggtgggagcgctgtcctggaatccagcccttctggggaatggaggaagctctctcatgtccatcttagagcatgggttccagcaaggcgcgcctgcaggcttggggctggggacacggtggagggtggggagaagggacatggccagctgctctgccagcagaataaagagaggtttctgtgtgggcccgggagggccaggagcgagagagcgagcctcggtttgtctaatgttctatggaagatggttcttaaaggggtkgggggacccggcaagaatcacaagggagccatctgagaggcaccttccctcccacagggaagggagggaagaggaggacgaagtaggatctccagggacccctggcaggcaggggctagaattctgcccgtcccagtggggctgggccagctcctgacagcgtcatacagagagaagctttccctttcatgtcccctctcctgggactaagccagtgcatttgtgtcctgaggcaaacaa

SEQ ID NO: 760762 - DNA, 638 bp, Homo sapiens
tcatgcctgtaatcccagcactttgggaggccgaggtgggtggatcacttgagctcaagagttcaagaccagcccgggcaacatggtgaaatcccatccctactaaaaatacaaaatttagccaggcacagtggagtgcacctgtagtcacagctacttgggaggctgaggcaggagaatcactcgaacccgggaggcagaggttgaattgagctgagatcgtaccacagcgagccgagatcacgccactgcactccagcctgggtgacagggcgagacctgcctcaaaacaaacaaaaacacccraatctaattgtgaggaaacatcagacaaaccctccgtgaggaaccttctgtaaaactactgtccttcactcttcaaaaatggtccaagggaagaaagacaaggaaacattacaggttaaaggggattaactggacgccaccagtaaaagtagtacctggtattggattggatcctggaccagaaacacacacacacacacacagctctaaaggaccttatggggcaactgagaccatctgactgcagacccatcacgatactgcagccatgttacacttccccctcttgattatttcctgtggttttgtaaggaatgttcctgctcttcgga

SEQ ID NO: 760763 - DNA, 650 bp, Homo sapiens
agacggttacattcttttcagtttctgataagcctctccaaaggaggtgatcggatatgcatttctctgtgggcagaggggggactttgaatagaatggggcaggtttaccctcagcagtgcccagcttgacttttacctttagcttagtgatttgggggccccaagaattattttcctttcacaataatttcacttgggtggaaaatgtagtgatgaaatggctggatatacgtaggtgtgcatttaacatttgcagaaactgtaaaactgtcaatatgtacaactataacacattgtagttaattgccaaattatttaaatggtagggccattatatactccgattagcagtatatgagagttccaatcatctgtatccttgctagcacttgcatgcccagtgtttttaattctggttagtttaatgggtaagtcatggtattatgatattttgagttttatttgcayttccccagtgactaatgctattgctcatcttttcatgtgcttatttgccatatgtcttcttgggtgaagtgtttttcaaatcattttgcccattagtttaattggatggcttgttttttattgaatattgaaaattctttgtataatctgcatacgctctcttgtcagatatattagttg

SEQ ID NO: 760764 - DNA, 561 bp, Homo sapiens
tttaacaccgtttaaaatgttttaaaaatgaagacacaaacgcacacattagcctgggcctacccggggtcaggatcatcacatcaccgtcttgcacctgcatgtcctgtcctgctggaaggtctccaggggcaaagcacgcgtggagcggccatctcctagggtgacaaggccttcttctggatamtttctggaaggcctgcctgagactgttctacagttattttataagtaggagtacactctaatgagaaaagtagagcatagtgagatatctaagcgagtgacatagttgcttattatcacgtatcaagcatgatgtactttgcaggatcatatgtgctaggcttttctaggactggcggtgcagtgggtttgtttacagcagtgtcaccacacacatgagtcatgcactgtgctgcgatgttaccttggctgtgaagtcaccgggctatagggctacagcgagctttcacctctctcagaatcttatggcaccaccatggcaagtatgtgtccctccttgacggaaacattgttcctcagctcgtgactgcaagt

SEQ ID NO: 760765 - DNA, 561 bp, Homo sapiens
tttaacaccgtttaaaatgttttaaaaatgaagacacaaacgcacacattagcctgggcctacccggggtcaggatcatcacatcaccgtcttgcacctgcatgtcctgtcctgctggaaggtctccaggggcaaagcacgcgtggagcggccatctcctagggtgacaaggccttcttctggataatttctggaaggcctgcctgagactgttctacagttattttataagtaggagtacactctaatgagaaaagtagagcatagtgagatatctaagcsagtgacatagttgcttattatcacgtatcaagcatgatgtactttgcaggatcatatgtgctaggcttttctaggactggcggtgcagtgggtttgtttacagcagtgtcaccacacacatgagtcatgcactgtgctgcgatgttaccttggctgtgaagtcaccgggctatagggctacagcgagctttcacctctctcagaatcttatggcaccaccatggcaagtatgtgtccctccttgacggaaacattgttcctcagctcgtgactgcaagt

SEQ ID NO: 760766 - DNA, 657 bp, Homo sapiens
ctttctttggtctaaaaactagtaaaaataggtgctaaaggaaatttcttagtaagaaggcaccaaggactataaagtccactgctgatgtccccacatttaaaacaaaagatcaatttcttagaaattatatagctggtttatcttccactttcctttcyctcaaaactaaaagtcttttagcacggataccacccctagaacttctggtaaaccagtgccagcctgaggatcacgttctcatcaaagggtggaaagaaggaaaacttgagccagcctgagaaggaccctaccttgtgctgctgaccaccgagactgctgttcgtacaccggaaaggggatggactcatcacacccgagtcaagaaagtgcagccccctccagagacgtgggccatagtcccagggaaaagcctaccaaactaaagctaagaaaaatttaactctcttctattctattaatccttcttctttcctcactctattgctgaccatctaactattaacataaccaagtcaatttcacctcaaactattgcatttgatgcttgccttgttataccctgtgggggcttgtcaagtcaaagacagctctctacttcagaaaagtacctctgtccctcctgactctcctcagactggacattagtgaattggg

SEQ ID NO: 760767 - DNA, 607 bp, Homo sapiens
ctcactatgctgcccaggctggtctcaaactgctgtgctcaagtgatcctcctgctttggctttccaaagtcctgggattaccggcgtgagccaccacctggcgagttagggaaactttaaagtttcggttttagcgtttgggaagtgaggagcgcctctgccccaccactgtgcaaccttggaagtgtgaagtgacagccttgtgtgtgatcttttctgttttccccaagtttgcattttcgacwttaaagtttactttttaataaaaaaaaagttttggttttaggtttgtggatggggatctgtaccctgaagcagcattgaccccaggtttttctgcctccccaaactgctcatttcactgcacccggaggaagcggcactgttaaatcaagaagtcaacataattttagcaactgttatctccgtattatctagatgcctaatatatattttttaaattgcactgttcaaacccatttaattcaaggttcattttccccactcatttccactcaatttaatgagattttactcagtattacattaaggcaaatcatcagggatccagggatctcttttcaaatattttcagtgtcttaaaca

SEQ ID NO: 760768 - DNA, 565 bp, Homo sapiens
cattgggagactgtgtatcaacaaagtgagttcttggtgttctcccagggttgtaatgaaccaggcagggagtgatctgggctcactcttcccatgggcagaacactccccgggttcccccagggggtctacggaggggagggttcttctgaaataaagccactcaattattcaagacaatacttcaactctcaaaacatcacaactagctagtctcatgcactattttaagagacaaaagttcaggttttggggtttttttttagacagtctygctctgttgcccaggctggagtgcagtggtgcgatctcagctcgctgcaatctctgcctcctgggttcaagcgatttctcatgcctcagactcccaagaggctggggttacaggcgtgcaccagcatgcctggctaatttttgtattttttagtagagatggggtcttgccatgttggccaggctagtcttgaactcctggcctcaagtgatccacccacctcagcctcccaaagtgttgggattacaggtgtgagccaccatgctgggtcaaaagttcaggtttctaaca

SEQ ID NO: 760769 - DNA, 562 bp, Homo sapiens
ttgggagactgtgtatcaacaaagtgagttcttggtgttctcccagggttgtaatgaaccaggcagggagtgatctgggctcactcttcccatgggcagaacactccccgggttcccccagggggtctacggaggggagggttcttctgaaataaagccactcaattattcaagacaatacttcaactctcaaaacatcacaactagctagtctcatgcactattttaagagacaaaagttcaggttttggggtttttttttagacagtctcgctctgttgcccaggctggagtgcagtggtgcgatctcagctcgctgcaatctctgcctcctgggttcaagcgatttctcatgcctcaractcccaagaggctggggttacaggcgtgcaccagcatgcctggctaatttttgtattttttagtagagatggggtcttgccatgttggccaggctagtcttgaactcctggcctcaagtgatccacccacctcagcctcccaaagtgttgggattacaggtgtgagccaccatgctgggtcaaaagttcaggtttctaac

SEQ ID NO: 760770 - DNA, 506 bp, Homo sapiens
ttgttttagcatctttttaaaaaatcaaatgaccacataagtgttggttcatttctgaggtctctattctttttcactaatttatttgtcccagtaccaccctgtcttgattaccacagttttaaaaaacatcttaacatcaggtaattaaagttctctaaatttgttctttttcaaaatttcttttaatattgtaggtctttggaatttctatgtaaattttagaaatagcttgccaatgtttgcaaaactccaagtgggattatgatttgaattgaattatatcactagagcaatttaggaaaagttggtatcttaacattattgaatcttctaatccatcgacgtgatacatcactccatttatttasatctttaattattctcagcagtgttttagtatttcagtgaagatcatgtgtatcttttgctaaatttattcttgagtgttcttgaactctttttttgaacatgtttttgaaactattgaaaacagaattttaaaa

SEQ ID NO: 760771 - DNA, 634 bp, Homo sapiens
cattctcaaacgctaagaaaacaagccagtaaaaactgaaaatgggcaaaagagcatacggacacttatccagagaggaaaaatggatgccaaaaatgtgagtatgcttatcatcattagtcattagggaaatgaaaaattaaaaccacaataagatacaaatacacatgtactagactatctaaaactaaaacatctgaccatactaaatgttggcaagtatatgaaacagggggaacttttagtcactgaagattggaatgtaaaatagwacagccgttttgaaaaaggtttggaagtttctttttaaaattgtttaagatgtacaatatgacattttgagatacacatacatattgaatttattactacagtcaaatttacatatctatctttcataggaatttttttgtggttaagagcacctaaaatttattctctcagcacattttcagtatataatgttattaataatagtcttcatgctgtacattagatctctggacttattcatcctacctaactgctaatttgtatccttgacctacatctctccgttttctcccccatccccaccccttgtaaccacagttctactctctatttctatttattctaccttttctctttttag

SEQ ID NO: 760772 - DNA, 634 bp, Homo sapiens
cattctcaaacgctaagaaaacaagccagtaaaaactgaaaatgggcaaaagagcatacggacacttatccagagaggaaaaatggatgccaaaaatgtgagtatgcttatcatcattagtcattagggaaatgaaaaattaaaaccacaataagatacaaatacacatgtactagactatctaaaactaaaacatctgaccatactaaatgttggcaagtatatgaaacagggggaacttttagtcactgaagattggaatgtaaaatagtacagccrttttgaaaaaggtttggaagtttctttttaaaattgtttaagatgtacaatatgacattttgagatacacatacatattgaatttattactacagtcaaatttacatatctatctttcataggaatttttttgtggttaagagcacctaaaatttattctctcagcacattttcagtatataatgttattaataatagtcttcatgctgtacattagatctctggacttattcatcctacctaactgctaatttgtatccttgacctacatctctccgttttctcccccatccccaccccttgtaaccacagttctactctctatttctatttattctaccttttctctttttag

SEQ ID NO: 760773 - DNA, 608 bp, Homo sapiens
cccagctagtttttgtatttttgtatttttgtatttatttatttatttttttggtagaggcgggattttgccatattgctcaggctggtctcaaactcccagactccagcaatcctcctgccttggtctcccaaaatgttgggattacaggtgtgagctaccatgccctgccaagatagctttctaaaccaaaatatatatacttaatatcttatttwaaaaaaaccctcatggcacatatttctttacccactctcagatttttggatagaaagaaactatgtgaaggaaggaccctggagcttaaacttcatgagctttattgggcaaaggaagtctttctaaccattatgatatttttttcttcatatgaaaagagaatgagtattcttcccttttggaccatatttaaggagcgtttttctcaaacttctttgtaataaaaccttgactgcttaagatgtatttgtacttggttcatcattagctgttgaggcattttttgcatacccatcttttttggacatagggtcatgagaattcaatttaaaaaatcacaagtccttgaatattctcaatttatctctgtgacactaggctttaaagaa

SEQ ID NO: 760774 - DNA, 608 bp, Homo sapiens
cccagctagtttttgtatttttgtatttttgtatttatttatttatttttttggtagaggcgggattttgccatattgctcaggctggtctcaaactcccagactccagcaatcctcctgccttggtctcccaaaatgttgggattacaggtgtgagctaccatgccctgccaagatagctttctaaaccaaaatatatatacttaatatcttatttawaaaaaaccctcatggcacatatttctttacccactctcagatttttggatagaaagaaactatgtgaaggaaggaccctggagcttaaacttcatgagctttattgggcaaaggaagtctttctaaccattatgatatttttttcttcatatgaaaagagaatgagtattcttcccttttggaccatatttaaggagcgtttttctcaaacttctttgtaataaaaccttgactgcttaagatgtatttgtacttggttcatcattagctgttgaggcattttttgcatacccatcttttttggacatagggtcatgagaattcaatttaaaaaatcacaagtccttgaatattctcaatttatctctgtgacactaggctttaaagaa

SEQ ID NO: 760775 - DNA, 570 bp, Homo sapiens
ccgcctcctagactccatcccctgtctgactgcacccgggctgctctttccccaggatggaaccacacctctggccatagccaagcgcttgggctacatttctgtcaccgacgtgctcaaggtcgtcacggatgaaaccagtttcgtggtatgtctgcctctcccccgcacccaccccagacacactcagcctggcgcacaggcgtgcctggggttactctggaagtggggtgcgttctggggctccsggacgcgggtcggaggcgccgcgcccgacgggtgggagcttgtcctccttccagcggggctgtgctgccacctagcggcccgaggactaggggcgggaccagctttccgggcagcagtggagtggatggggtttggggagatgggaagccagttttcccgggtcccgtccccgtggttcctgcccggcagcttccaggctgagcgcctcctccgtctgtttttcttcatttgtgggaaaccccacaggcatgaccagggaaccgctgggctggtaaaaaatgtgtgcggctctagtttgggttgaattatctgctttttctc

SEQ ID NO: 760776 - DNA, 636 bp, Homo sapiens
gaatatggaagttttttggggttttgacaggcttaaagagtgttccccctgccagtggtaaagtgaggtaagatctgattagagtgtgatattacactggctacagtgtggagaataaatggtggtggaaaagtgcaagtataagtgagactggttagaaatagtcgggggggctgggcgcagtggcttacgcttgtaatcacagcattttgggaagctgaggcgggcagatcacttgaggtcaggagttcgagaccagcctggccaacatggtgaaaccccatctctactaaaaatacaaaaattagctgggcgtgatggcacgcgcctataatcccagctactggggaggctgaggcaggagaattgcttgcactcgggaggcagagrttgcagtgagctgagatcgcaccaccacactccgacctgggcaagagtgagattccgtctcggggaaaaaaaaaagaaatagtggggagatgattgggctagacagggcagggtgagaagtaagtgattcaaaagatgcttaggtggcagaattaacaggccttggtgatgtggatcttggctgtgggtcatgggggataaaggagcaggggtgagagatacttgtgcttctggcaggagtaacta

SEQ ID NO: 760777 - DNA, 629 bp, Homo sapiens
aaatgaggccccagagagcaagctcttccaccaagtgaggacacagtgagaagacactgtctcagaaagagaataggctttcaccagacaccagattctgccagctccttgatcttggatttctcagtctcctagaactgtgaaaatacatttatattgctcataagctacccagctcaatatgctttgttataacagttgaaatggacaagacactggtttaaaatatatatatatttatatattttatatatgtaatttatatatttaattacatataattaaataatataaaataatcacataaaagaaaggagattaaaaggagacaaaatattctaagttttttgtattgtgatgagttccaatgtatcagagctctgataagtcaatggtayatactgaaacttacagagaaactattcaaaagcaacatataaagatatataattaaaaatttaatagtcaaatggaataataataatagtgatcttgataaaaataaatccagaaagaattaaaacagaattagagcagctaggaaaaatagaaaataaatagaaaaatggagatttgaatccaaattatacagtaattatattaaatataaataaagttcctataaaaac

SEQ ID NO: 760778 - DNA, 587 bp, Homo sapiens
accaaacccaaatttaatagaagaaaagaaataataaagaccagagcagaaataaatgaatttgaagttaagaaaacaatacaaaaatcaaggaaacaaaagttgggtttttgagaagataaacagaattgacagaacttctaccatactaatgaagaaaaaaatagaagaagtctaaaaatcagaaatgaaaaaggagacattacaactgatgccacagaaattcaaagggccatttgcrgctactgtgagcaactatatgacaataaataggaaaatctagaggaaattgatacatttctaggcacatgtaacctaccaagattgaaccatgaagaaacgcaaaatctgaacagaccattaacaagtaacgagatggaagctgtaataagtcttccagtaaagaaaagcctggggccctatgaattcactgctgacttccaccaaacatttaaaggggaaataataccaatcctgctagaactatttcagaaaatacaggaagagggaatacttccaaactcattctataaagccaatattaacctgataccataaccagacaaatactcattaaaaaaagaaaa

SEQ ID NO: 760779 - DNA, 587 bp, Homo sapiens
accaaacccaaatttaatagaagaaaagaaataataaagaccagagcagaaataaatgaatttgaagttaagaaaacaatacaaaaatcaaggaaacaaaagttgggtttttgagaagataaacagaattgacagaacttctaccatactaatgaagaaaaaaatagaagaagtctaaaaatcagaaatgaaaaaggagacattacaactgatgccacagaaattcaaagggccatttgcagctactgtgagcaactatatgacaataaataggaaaatctagaggaaattgrtacatttctaggcacatgtaacctaccaagattgaaccatgaagaaacgcaaaatctgaacagaccattaacaagtaacgagatggaagctgtaataagtcttccagtaaagaaaagcctggggccctatgaattcactgctgacttccaccaaacatttaaaggggaaataataccaatcctgctagaactatttcagaaaatacaggaagagggaatacttccaaactcattctataaagccaatattaacctgataccataaccagacaaatactcattaaaaaaagaaaa

SEQ ID NO: 760780 - DNA, 595 bp, Homo sapiens
cttcattaagggatttccggatggctgttaaaacattatttctgggtgtgtctgggaggatatttccagaagagattatcatgtgcatcagtagactgagtaaagaagattcccccttagcaatgtgggcaggcatcatccaatccctagagggcttcagtggaacaaaaaggtggaggaactgcaaacttgctctcttatctgaagctggggcatccatcctctcctgccactggacatcagagctccaggttcttgggcctttagactctgaggcttcttatatcagtgatactccacattcttattctcaggtctttcgccttgggtgctcargccttcagactcaagactgaattatgacaccactgatgttcctggctctccagcatgcagaaaccatgtagtgaaacttactggcctctataatcacatgagccagttcccaaaataaatttatctttaatacctgtgtatatcctattgattctgtttctctggagaatcctaacacagtcacaaagaattcatgcctcagcggagtataagtttgaataaagaatactgacaagctgagaagcttgttgaagcccta

SEQ ID NO: 760781 - DNA, 624 bp, Homo sapiens
gtaaatctgaccctagtgagcatagctactcgcctgcaagagcaattatgcgttaatggaagacagcggtgacgcacgtaggcagtctctaggcatttaaaggtcctcttgctgagctcgagatcccaaggggctgctgagccctgaacctctctggggaaactgcagcctggtggcctccaaatgtcaccaccttcatccgcgttgcatgtcagttcagcacctactgtatataagtctccaggctggttgctgaaggggtgacatcctggctgtccatgatctcccagctgtccagtgacctcccttaccaaatgcctactctgcacctccytgtgccagggcctgcctgtgcaatcatgttctgggtttgtcctctaattttccatccgaggtaggcactattatacccattcataggggagaaaagtgagcttcacgcagttcaataagcaaggcagctgagagggagagtatggtgcaggaactgagagcacagactctggaaccagcctgcgtgagttcagatcttagctctgcatgattagctgtgcagctttggggtgagttgcttaattctctgtgtgcctattacttgtcactaaaataaagaggaagagtata

SEQ ID NO: 760782 - DNA, 606 bp, Homo sapiens
cccttgttgtcagtgtggtgccgcatcctcccttgtgcctggagctttccaatgcagagattcccttctttatggtcgccagacaataaactcagagtcctctgttgggtgggatggcacagtcaccttgcagcgtggagctgggaaggggatcaggggatatctaactgcttcttcaacacctttttccgaytgccctttcctctcccaggacatccccctgccgcctgtccccaccacctaggagctctgggggatgtgcccatttcttcctttattatgttcctaggataggctgaggttgggtccccaaggacaagaagtggctcctcagagttaatcaagccagagaggaagcccccgaatagcaataggctccttaagtctcatccttccacgtgtccccaggcctcaggggcactgcaagatcatcaactgtgggattccactttgctgtcctgagtctctattcccctcatttggccaagaggagtgacaatgcctactctctccacttaatgggtgatatggcatcaatcctggtaacagaaagctgttgacctggaatgagcccatcagacaaatgagggtacaaaataatatttg

SEQ ID NO: 760783 - DNA, 582 bp, Homo sapiens
gatgggaaatgattcatgaaaaccaagaaggtaaaattagcccaaaggctgccgagtaatttatgcagccaacagccccaggagggaggggaggcccgcactgacagctcaggctggcctcccaggggctggcagagcgcagcctggccaactggagcctctgtctccggggtcttctatttctggactcagcttcccaggctgttggcaaggcttccagcrctttccctgaccttacgctgcccactcaccagacctaaaggatgctggatacactccaccggggacccgcggggtgctggggagtcacacatacccacctgttctatcctcacctcaatctcaggaggaaagtttcagatcccccatctttcaggtgcagaaactgagtgaggttcagaggggttaagtgggtagccaagggtaagtggcaaagccaggattcaaacctggatctcatgagctccgtgagctgcgccttccctgcatgctggctgctggctgccaaacctcaggttctccatggggtgaggggagtggatcctggcgagccccaccacaccgtcatgtgcttttcacagt

SEQ ID NO: 760784 - DNA, 572 bp, Homo sapiens
  misc_feature 1, 2, 3, 4, 5: n = A,T,C or G
nnnnnctcacacccactccagggttttttcctctctccctcctgcattgaattcttcctcctgcattgaattcttcctccatcctggatcaccctccacagcatacaaacctgttctaattgtgcccatcttaaaactggggaataaccagaaaaccttcctcaggtcagctcccctgacacaccgatctttccctgtgccctttataggaaaattccttgaagagttgccaggtggcatctgggaagcaggcggcctccatttcctcgcctcctgttccctctcgaacctacttcaggaggattttgtccccaygattccacaaaaacactctcgtcagggtcaccagtggtccatgttgctaaatccactgtcatttcgccggcttcatctccctggctctgatcaccagttggttgcccctgcagcccccgcctactcctgtcatggggactctacattcctggttttcctctggcctgctggctgacagatcaccccatcctctgttgattccacctcacctgctggcttctaacgccgaggtcccagggctccgtgggcttctctgc

SEQ ID NO: 760785 - DNA, 357 bp, Homo sapiens
ttttaaaggaaaaatgaggaagattacatcattgttttaaatcaattatgtttggctataaagatcagtgacaagagtgatgccagtctgaggttggacatgaagttactgggcagatgtccttgcagaagtatttttttgtgtaaggttgcagttgcctttgtgcagggttgtggcctttatgagtttttttgtgatagtttttttttttttttttttkaaatgtagtcccgctctgtagcccaggttggagtgcagtggtgcgatctcggcttgccgcaacctctgcctcccgggttcaagtgattctcctgcctcaactttccacgtacctgggactacaggcctgcgccacca

SEQ ID NO: 760786 - DNA, 357 bp, Homo sapiens
ttttaaaggaaaaatgaggaagattacatcattgttttaaatcaattatgtttggctataaagatcagtgacaagagtgatgccagtctgaggttggacatgaagttactgggcagatgtccttgcagaagtatttttttgtgtaaggttgcagttgcctttgtgcagggttgtggcctttatgagtttttttgtgatagttttttttttttttttttttaratgtagtcccgctctgtagcccaggttggagtgcagtggtgcgatctcggcttgccgcaacctctgcctcccgggttcaagtgattctcctgcctcaactttccacgtacctgggactacaggcctgcgccacca

SEQ ID NO: 760787 - DNA, 357 bp, Homo sapiens
ttttaaaggaaaaatgaggaagattacatcattgttttaaatcaattatgtttggctataaagatcagtgacaagagtgatgccagtctgaggttggacatgaagttactgggcagatgtccttgcagaagtatttttttgtgtaaggttgcagttgcctttgtgcagggttgtggcctttatgagtttttttgtgatagttttttttttttttttttttaaatgtagtcccgctctgtagcccaggttggagtgcagtggtgcgatctcggcttgcygcaacctctgcctcccgggttcaagtgattctcctgcctcaactttccacgtacctgggactacaggcctgcgccacca

SEQ ID NO: 760788 - DNA, 603 bp, Homo sapiens
catcaggggtggtgaggaaatggggagggagaggaatgtcaaaagatacaaagtggccgtcataaagaatgaacaagtctagaaatccaatataccacatgaagactataggtgacacgattttattttattagggaatttttttcttgttaaatatgtagattttagctattcttgtcatacacacaaaatagtagctatatgagatgataaattattttaatttrcttcactatagtaactattttactatccctatatattctataacattgtgttgtaaacttcaaatatacacaataaaatttattttttttaaaaagtgtatactagtagctgaagcttgtcttcaaattgatagatcaatctctaagaagagggcactttgtacaaatgcaaaaagagaagttttgtaattatataagctgtccagatagagataggctactgaacagaaacacatgttaaaatacagagagagagataattgctgaagctgaccttgaaactacatcctgaaattcattacttaataagataattccaactcttcttacttatctctaaactttattaaggctaagatggccagaaaacaatcac

SEQ ID NO: 760789 - DNA, 603 bp, Homo sapiens
catcaggggtggtgaggaaatggggagggagaggaatgtcaaaagatacaaagtggccgtcataaagaatgaacaagtctagaaatccaatataccacatgaagactataggtgacacgattttattttattagggaatttttttcttgttaaatatgtagattttagctattcttgtcatacacacaaaatagtagctatatgagatgataaattattttaatttgcttcactatagtaactattttactatccctatatattctataacattgtgttgtaaacttcaaatatacamaataaaatttattttttttaaaaagtgtatactagtagctgaagcttgtcttcaaattgatagatcaatctctaagaagagggcactttgtacaaatgcaaaaagagaagttttgtaattatataagctgtccagatagagataggctactgaacagaaacacatgttaaaatacagagagagagataattgctgaagctgaccttgaaactacatcctgaaattcattacttaataagataattccaactcttcttacttatctctaaactttattaaggctaagatggccagaaaacaatcac

SEQ ID NO: 760790 - DNA, 609 bp, Homo sapiens
tagctgagagtttaacagccaagaaagaaggaaaaagacaaaaggaagaagctcccggtacagacacagagagagggggctccaaagaggaaagaggagactctgcatttggaggataccagccagttttacgtgatggctggaagaggcggtgtctgatttcaagttccatggttcaggggattggtttgacctggcatgtcattcacgttggcygtgaaaaaactggccctcccacagtcctttaatatgcaaatgcagggcgccataatgttctacacacacttggggatatgtgggcgtggccatgttgtcaggcacatgctggggcaagggcaagaggacaagggtgggaatcgccatgttgggtggacccagtttctaatggtcagcttttgcgtatcacaggttgccagtctgggtctaagagccagggctttcatgctagacaagaaatatttttggagctgcaaaaaaaacctttcaaggacctcttttcctctctatctaaaataattttttttttcttttttttgagaaggggtctggctctgtcgcccaggctggagtgcagtggcgcaatcttagctcactgcaagctccgcctcc

SEQ ID NO: 760791 - DNA, 593 bp, Homo sapiens
accctaatcttttattatgcagatggcatctctatctggctggcgccatgttgcctgcttttttaatgcacacatagcaacaataaaaagagaagagggattccctccttgttgaacatacctggcccccagctagccttttcctagtggcacagctgccagcatttacctatgcaagcttccagcttgcttatttatgtctgtagctcgattttacaagctggtctttgttagaaaagaaataatttkgaggctgctttttgctaaaagggaagctttattgaggactctcttaccctcactaactgcctaaagaatttccttttaactcctgtatcatttagaataatctggcttcagtagtggagaataactagcactcacgtacatcctgtttgggtcctgattaacaaatcttaaaagcaagacccaaatagataaaaatgatttcaaagaacttatctacaatacagaaaaaatctcaaggatatttaaaggagtacaaaaatatgctatagacaacaaggtaagattctctctattgtatccaatgaaaattaccagaaatacaacgcagcagtaaaaaaccacac

SEQ ID NO: 760792 - DNA, 593 bp, Homo sapiens
accctaatcttttattatgcagatggcatctctatctggctggcgccatgttgcctgcttttttaatgcacacatagcaacaataaaaagagaagagggattccctccttgttgaacatacctggcccccagctagccttttcctagtggcacagctgccagcatttacctatgcaagcttccagcttgcttatttatgtctgtagctcgattttacaagctggtctttgttagaaaagaaataatttggaggctgctttttgctaaaagggaagctttattraggactctcttaccctcactaactgcctaaagaatttccttttaactcctgtatcatttagaataatctggcttcagtagtggagaataactagcactcacgtacatcctgtttgggtcctgattaacaaatcttaaaagcaagacccaaatagataaaaatgatttcaaagaacttatctacaatacagaaaaaatctcaaggatatttaaaggagtacaaaaatatgctatagacaacaaggtaagattctctctattgtatccaatgaaaattaccagaaatacaacgcagcagtaaaaaaccacac

SEQ ID NO: 760793 - DNA, 562 bp, Homo sapiens
tgatatcatgaaacaattttgcaatggatatttccaggttaaaaaaagtagctaagttatcaaggttttctttttaaaaaatacattcttgagtatatgattagtcttctgccaaatactatacacattatatcatcagaagaaaacagccatcaaaaatggcagattatatagtatagaatttatgtcaaatttatctcactgtattctaactctaaaaattcatgatgtaagtatgtattgtactgtctctctaagatgaccaaaataattccaattttctattctatgtaaacaagattttaactctgtattaaaatgcagaacgacgtgattcaatagcctmtgaaaatgacaattattttagaacaagcttgagaaacttagaattgcctcaaggactttaaaattgtagacatattctgggaaacccacttgaaaatccttcatttaaaattgttcatgtctttaagatcaagactaattcacctagacagtaaaattgaatggatagctttcaagaattagatcaaataccttaaagtttacaccataacttaag

SEQ ID NO: 760794 - DNA, 508 bp, Homo sapiens
atattcatatagtttatttttactagaatttttcactaacttcgtaaacctctcaaaataatctagaaactcagttacctcattagagtataaaatacatatatggaacaaaatatagaatttgtcatgcagattatgttttatcacacaagttcttttactaagaaagtgcaattcctttctagttatttttctcaaacttcagggaaatagmaaatttttcctcagctatctctgaggcatatagcctcttattcatctacataaaaatgacgttataaagatattaaataataatcccaatttcttagatatgaatatggtttttgagtgtctggatttttattcagttatagctgcatattggaaaatgttttaaaagggaacacattttgaatgcgtatatgaatctgagcagcagtatctcagaatggaatgtttttccctagagaaatatgttaggaatacgcttcttccaaatttttctctttgattatatagagttttt

SEQ ID NO: 760795 - DNA, 627 bp, Homo sapiens
gggtgttggcatgggctggtgcttgccccaggcaccctcagtcctgctgctggatcatctgattagtggcttctgactcaggggaccttcatcccctaggtaaatgggtcttccagtgattcccttgacataaggggcatggatgagggggcaacttatttccacttggacaatcttttttaaagtgtccttgtagaccacactggaagcaagccctattaggcattcaacttgcccagcttttcccttttccagagcctccaaagtccgcttccctgagggccatgattaaagcagtggcttttttttttatcctgtttgtctcattccacctgctcctcttgatctctattataaaaaaccaaggttgccaaattcaatagggtttctaagttttgctccaggactaaggwggacttttgaagtttttttctaatgtctgcagctgactgagtgataaacttatcctttaagattagttggccttcagtagagtcaggtgacagggaggtatgtttcctcaatgcctcccttagtctctccagaaaggcagtaagattttcttcctttccctgtgttatactggacatcactgaataattcataggcttcttcctagttttcctt

SEQ ID NO: 760796 - DNA, 550 bp, Homo sapiens
ctccttcataaggaatggctttagtcaagaggagttttcaaaatgtggcctttcagaagtgattcagtgggtgtcataggacattttgagcctcctcaatctgaaaacagccctctcttttccttttcaacccaaaccagtataattttacctgtttttaaatgtgatcttctccctagaaagagaaaaaaagtttgaaagcttctggtatagaagagtaggtcctggaaaaagccaggagtgctggcatttagtaacagttttgtcattacattcagaggaatttctcaacaagtcctactgggtgtttcagatcatgctrgataacatactctcaaaagtcactagcagacatcacttttagtattttcagtattctgctgaaatccatttcttattaacctcattagaataatgtagttatagcatctacttgtaactgaattaaaattctgctttgaataaatcagaagacactacaatggaaaggacaagacatatgcccaattgatatttgtgtattctcaagtgtctaatagtgtttttaatg

SEQ ID NO: 760797 - DNA, 679 bp, Homo sapiens
aatttatcatatagtgcatgataaaggtggcacttcaaattaccaaggcaacaaaggacattttaataaatggttcagggacaattggttaaccatttggaaaaagataaaattagatccatacttcactatcatactcaagaacttaactccaaatggattatagatctaaatgtagaaaaaattgtagccatacaagttgtggaagaaaacacctgtgaattcctttttaatctcwgtgtaaaaaaaaaaaagactttctagttaaatttcaaaaatcatataaataaaatatcagtaactttacctaaaaaatgacggcaaattttatggctaaaaaacaccatatactcaaaagaccactgcaacacttgagatgaatatttgcaatatatactacaaacgaagggctaatgctcctaataatataaagaacttttaaaaattagtgacactaagaaaaaattgaaaattaagcgaaagacatacacagaaaacaaattaaaggtatgtaactgggctcttaaacatgtgtaacaatatttatcctcatttataattagagaagtgcaaattaaaacatcattaagataatacttctcatctatcatgctggtgaaaatgaaaaagaatgacctcacattcttctggaaaggctatgaggaacctgacactagaa

SEQ ID NO: 760798 - DNA, 667 bp, Homo sapiens
tttataagaaccaccaaattatcttccaatgtggctatgccatttgcatttcaccagcaatgaggaacagttttgttgcttctaattctcaccagcaattggtatcatcacttttgaaattttagctattcaaataggtttgtagtggtatgctgttgttttaatttaaatttccctaatgacaaatgatattcagcacctttttatgttgcttatttggcacttgyatagcttcttaaattacatatttattctgatcttttgcccaatttttaattgggttgttttcttattgttgatttttaaaagttatttgtttattttgaatacagttttttattttcaggtatgcagtttgcaaatattttctagaagtctgtgtcttgttgttttattctcttaatgatgccttttccagagtaaatatttttaattttaataaagtctaatttaccaattttcaatttcatagattattgctttctgtgttgtgtctatatagtcatcactaaacacaaggccacacagattttctcctatatattctccttgatgttttgtagtttacatttaacatttaggtaaatgatacatattaatttaacttttgtgttagatatgaggttcatttttttccatatcgacttccattcttcccagcatcatt

SEQ ID NO: 760799 - DNA, 667 bp, Homo sapiens
tttataagaaccaccaaattatcttccaatgtggctatgccatttgcatttcaccagcaatgaggaacagttttgttgcttctaattctcaccagcaattggtatcatcacttttgaaattttagctattcaaataggtttgtagtggtatgctgttgttttaatttaaatttccctaatgacaaatgatattcagcacctttttatgttgcttatttggcacttgtatagcttcttaaattacatatttattctgatcttttgcccaatttttaattgggttgttttcttattgttgatttttaaaagttatttgtttattttgaatacagttttttattttcaggtatgcagtttgcaaatattttctagaagtctgtgtcttgttgttttattctcttaatgatgccttttccagagtaaatatttttaattttaataaagtctaatttaccaattttcaatttcatagattattgctttctgtgttgtgtctatayagtcatcactaaacacaaggccacacagattttctcctatatattctccttgatgttttgtagtttacatttaacatttaggtaaatgatacatattaatttaacttttgtgttagatatgaggttcatttttttccatatcgacttccattcttcccagcatcatt

SEQ ID NO: 760800 - DNA, 573 bp, Homo sapiens
gactcacttctgttcaagttccagatcctctctctctagctgtatgattttggacatgtttcttaatttctctgaacacattttctcatctgtaatataggtataatagcatccaccataaagttgatgtagattgaaatattcrtacaatgcgtaccagagtgcttataccttgcaaatgctcaccacatggctgccatcattattagtagcagcatccagctgtccaaattccacaaatctttaaagccctgcatggtttacccactttgtggaaaccgttgcttccctccccatgccacctaccaaccacagaaagctcagcctccttgctaaagtctcctgcctctcctctgacagttcagtgagttccaactgaggattgcccttgctctgttgttttgtcttgtcgtttcaccataaatgtctgtcatgtcttcctacctggagtattcccttctggagggcaggattctgtcttctacctctcagtatcaccatagcatgcagcataagacctagtacacaccgcaataaacactgacagggagattgcccagcccaagacaagcg

SEQ ID NO: 760801 - DNA, 588 bp, Homo sapiens
taaatttaaaagagaaaaaatgaggtaaaggtaaatgtacagaatttaattactttttcttctataaaacccaagagtcagtaccaagaagagtcaatttattagttttctaaaataaaaaaaatcaaagtcgccaaaaaagagcaatatccaagaaaacattgaaaatgaaacacaacatttagtaagaatagaaaacttgggcactgtatcaccctgttcctagataccgatttactgatagcaatttaaatagaattttattctatctaattcgtttatactcccagagttcgaaattacattttacctacaataaatgagataacacttgcaaattatatggtactctgcctaacacacgttaataactcaatacatgttagcaataaacttttagtatagtagtcaaagtattaatttctcacattgcaaagttscttcaaagacatgaatacaacctttctaatgactccttgttcatcaagatacctcttcaaattattctatttatttcattcagtatattatctgtgtataccgatatgatattacactcttttttttttttgagatggaatctcattc

SEQ ID NO: 760802 - DNA, 639 bp, Homo sapiens
cttgttctttagaaaaatcttccctgtgccttataaagaatatgattgttggcattcaaaagccagcgaagtatacattattagcctgttgcctaactcatttctttaagaaactacactaattacccacatacttatgtttttatttcctcattatttctggagaaaacaaatactgctaacatgatatttgtaagagagaaaaaagtcttttcttgaaaagtgctgtcattgtagtactaacttatagtatcaacttctttatcaactccttatacactttttattctgagagaaataaaaaagctaaaagtgaaatgactttttttactctccatattataagcacccatcttggtaatttagggtctttatagttagggtaggttgtgtcataycgaggttacaaaataataagtattttgtctctttgggcctttccttattcagtaatactgtcagtttggctttttttctaggtcaacttattgatctcagtattctgaaataatatgtttactatcttttgataagcatttaaaatattagatttattgttactcttctgccttcattgggctggaagaataattgtttctctcactccacaaaagccaagttgcagagaaaaacacatag

SEQ ID NO: 760803 - DNA, 542 bp, Homo sapiens
gcatacaggcccttcattttcatgacagcctgtgaggtagattctctccatatacccattttacagatgagaaaatcgaggcagaggacagctaagtaacttgcccaaggtaatacagctcattcatggcagagctgagatatgaacccaggaagtctggctccagaggctgtctttttaattcctcgggaggctgcctggattagtacttattagatcaaaaatccctggccaggcaccatggctcatgcctgtaatcccaacactttggggaggccaaggcaggacaattgcttgaggccaggaatttgaaaccaacctaggcaacatagtgagactccatctctacgaaaaaaatttttttcaattaactggtgtagctgcatgtgcctrtagtcccaggtattcaggaggctgaagtgggaggattgcttgagcccaggagttcaagaaggcagtgagccatgatcataccactgcactccagccccatctctaaaaataaataaaataaaataaaataaaattaaattaaattccga

SEQ ID NO: 760804 - DNA, 386 bp, Homo sapiens
acagataagcacagctaggattgtcatccaaaaggtcacctgcaaggcaatttcaaaagactctattagaggctcaaatataaatttgttggaaaattaaaatttgggtccgtagttgattccttgattacaattttattctttaaagttctttgtgagtataagttaattccagtcctgcttttttgttgttgttgttgttgaatggtagctgtcctttttcccactgttttctcccccccgrtttttattttcttgagacagactcttagtctgtcactcaggccagagtgcagtggtgcaatctcagctcactgcaacctctgccccctgagttcaggcagttctcctgcctcagtctcctgagtatctgggactacaggtgt

SEQ ID NO: 760805 - DNA, 617 bp, Homo sapiens
cataagtcaatagagtgctttgcctaagctctcacataaccactacatcaacagcagaataaatacatggtagcagaatacaactgaaagaactgtatgcctcagatcttgttaaataagtctctaagagaccacaaggaaattgaataatgttgataaagtygacacatgtatatgtagaaatacacaatgtactgacactgagtcatgaacaaatagaaaatctgaacagacctatagttgcagattgatgcaaaaatcacccctccagaaaaaaaagtacaaaactgttatgctgctgaatctatcaaacattttaagaattaattaccaattatcctcaaactcttgcaaaaacctgaagatgcagaaacacttccaaatttattctatgaggtaggccaaaattacagtgacataaaaaatgaacaaaagcactacaagaaaagaaagttgaagaaaaatgttctttataaataatataaaatctataaaataaatattagcaaaatatatttagcagaataataagagggttatctaccaagactaattgagagttattactgaagtgcaaagatgctttaacatataaatatcaataaatgtagccaggc

SEQ ID NO: 760806 - DNA, 457 bp, Homo sapiens
aaagtgagcttgtacatccaacagccatgagtaacatcaaaaaggttgtagcctggccaacayggcaaaaccccatctctacaaaaaatacaaaaagtagctgggcgtggtagcatgcacctttaatcccagctacttgggaggctgaggcaggaggatcacttgaacccggggggcagaggttgcagtgagctgagattgtgccactgcactccagccagggagacagaatgagaacctgtctcaaaaaaggaaaaaaaaaacaggttgtaacccatctgccaagatactcccccaatacattaaaacaattaaacagattcaacaaagtaaatatgtttctgtcctctgtctcatgtctctcatgcagcagggcttcccatgtattttatgctagcaggcactgtcccacacccacctgaaaccatggtgtcttaaggcttcttctgtcgtaaaa

SEQ ID NO: 760807 - DNA, 570 bp, Homo sapiens
atggagtcataaaaaagaatgaattcatgtcctttgcagggacatggatgaagctggaaaccatcattctcagcaaactaacacacgaatagaaaaccaaacaccacatgttctcactcataagtgaaagttgaacaatgagaacatttggacacarggaggggaacatcatacactggggcctgttgggggtggggtggagggcaaggggagggaggagagcattaggaaaaacacctaatgcacgtggggcttaaaacctagataatggtttgataggtgcagcaaaccactgtggcacatgtatacctatgtaacaaacctgcaggttctgcacatgtatcccagaacttaaagtaaaataaaataaaaaaggctttgttatcataggagatgacagcttcatgcacgcccctgaagaccttccagtgggacaatacatgaggcgaaagacagtgatattgatgatcctgacccttgtgtggccctaagccagcgtgtgtatttgtgttctaattatttttattatttaaactcttaggctataaagtcccatgtgttctaattttt

SEQ ID NO: 760808 - DNA, 427 bp, Homo sapiens
agcatttactcgaactcttcataatactctttaaaataaatgaacctgggactatgaagtaatttttgctctaagtaagtatagattagtccatatttaacgaattctgattgtattttgaagagaaaatcaggtgtctgtgtagagtatattatcccttsatttgccgtaatatatcttacaatttaaaaattacatataaaaaattgatatttagatattctgctagtcacataatttccttttttggaaaatatagtgttcccttttaagaaaggaaccatggagctctatgggaccattaagttggactagctgttataagaggaaggggttcagggagaaagggttccaccaccagaaagcaaacaggagatatagtgatagaatcctaattttaacatcattttaacatatctcaaaatac

SEQ ID NO: 760809 - DNA, 733 bp, Homo sapiens
aaaaaaatttctttataaatattaccatggatcctaatcctttattggtaatatgctacaagtatcttaatctgtgaattatctttcatttttaagtacaattttaatataaagtctttacttttagtgtaattatacatatcaatttttttttactgtttttgtaaatatgtatgtatatacgtatgcctgtttatatgtagagatgatgtcttgctatgttgcccaggctggtcttgaattcctgggctcaagtgatcctcctgtcttggattcccaaagtattgggattacaggtgtgagccactgtacccagctgcttttataaatcttaagaattcactttctacccaaaagtcatgaagttaytgtcccacatgttcttctaaaaatcttagaaccttgtttctcaaatttttatctttaatctacgtgaaactggtttttgtgttagaactgaggtggggaatacacacacacacacacacacacacacacacacttctcaacataaattacggaagaatttttgcttctaattatctgacttactttctatatcatccatcaaatttttataaacactggagactgctgcttctgggttctcttttccaacccatcatcctatctgtatgtcttattatcttggaaaatgtcaacatggccctactgtacttctcccccttaatgtatgaggaagtttggtataaggctacagggagctgtgaaa

SEQ ID NO: 760810 - DNA, 733 bp, Homo sapiens
aaaaaaatttctttataaatattaccatggatcctaatcctttattggtaatatgctacaagtatcttaatctgtgaattatctttcatttttaagtacaattttaatataaagtctttacttttagtgtaattatacatatcaatttttttttactgtttttgtaaatatgtatgtatatacgtatgcctgtttatatgtagagatgatgtcttgctatgttgcccaggctggtcttgaattcctgggctcaagtgatcctcctgtcttggattcccaaagtattgggattacaggtgtgagccactgtacccagctgcttttataaatcttaagaattcactttctacccaaaagtcatgaagttactgtcccacatgttcttctaaaaatcttagaaccttgtttctcaaatttttatctttaatctaygtgaaactggtttttgtgttagaactgaggtggggaatacacacacacacacacacacacacacacacacttctcaacataaattacggaagaatttttgcttctaattatctgacttactttctatatcatccatcaaatttttataaacactggagactgctgcttctgggttctcttttccaacccatcatcctatctgtatgtcttattatcttggaaaatgtcaacatggccctactgtacttctcccccttaatgtatgaggaagtttggtataaggctacagggagctgtgaaa

SEQ ID NO: 760811 - DNA, 523 bp, Homo sapiens
ccctgtgtaaacacaagacactattcctttaaaataacttttccctagtattggttagttgcctcacacatctgcactgatcactacttttatgaaatatttgaaatcaggccatctgaagaactatggaattatctcagtgtgcagctctcttctctctgctatgttgtcatgcaaattctagttctcttggtctrcccagtgtcttaactccctgtcttttactccctgaatccaccactattgttattagattgtcatacccgagccatggcctagaaaatttcttaaggcaagaaactggggtgatgtaggtcttaccttgtttatttcctggctgactctctgggatcactgtcctttgcttgaagttcagtgtcttgaaaatcatctttcatatattgtatctaaattttttgtttgtttgtttcagatggcaagttatatcctatgttactccatgttggtcagaagtggaaatatctgataaggctataattaggtaattttaacatataaggca

SEQ ID NO: 760812 - DNA, 553 bp, Homo sapiens
tttatcatgtttttaaaatttaaactttcaattttagaatagttttaaatacgtagaaaaatcgtgtttcctgtatcttatccattctcccatattgttaacattttatatgactttgatgcattaaggaaccaacatcagcaaaatactatatatatataaaatatatacatattatatataatatactatgtattatatacactatatattatataccatrtattttatacactattatatatagtatatacattatgtgtatactttacacattatttagactttaatagttatttcttaatgtcattttcaagaatttcaatcagaattgacattacatttagtcatttcttagtccgatatgatctgtgacagttctgagacattttccttttgataactttaagaattttacatactactggtcagacattttatagaatattgctcaatttttttttaagtttgctttgtttgtttggcactcggaggctatgagttttggagaagaccacagatacaaagtgccattcattacatcatatcaagg

SEQ ID NO: 760813 - DNA, 553 bp, Homo sapiens
tttatcatgtttttaaaatttaaactttcaattttagaatagttttaaatacgtagaaaaatcgtgtttcctgtatcttatccattctcccatattgttaacattttatatgactttgatgcattaaggaaccaacatcagcaaaatactatatatatataaaatatatacatattatatataatatactatgtattatatacactatatattatataccatatattttatacactattatatatagtatatacattatgtgtatactttacacattatttagaytttaatagttatttcttaatgtcattttcaagaatttcaatcagaattgacattacatttagtcatttcttagtccgatatgatctgtgacagttctgagacattttccttttgataactttaagaattttacatactactggtcagacattttatagaatattgctcaatttttttttaagtttgctttgtttgtttggcactcggaggctatgagttttggagaagaccacagatacaaagtgccattcattacatcatatcaagg

SEQ ID NO: 760814 - DNA, 553 bp, Homo sapiens
tttatcatgtttttaaaatttaaactttcaattttagaatagttttaaatacgtagaaaaatcgtgtttcctgtatcttatccattctcccatattgttaacattttatatgactttgatgcattaaggaaccaacatcagcaaaatactatatatatataaaatatatacatattatatataatatactatgtattatatacactatatattatataccatatattttatacactattatatatagtatatacattatgtgtatactttacacattatttagactttaatagttatttcttaatgtcattttcaagaatytcaatcagaattgacattacatttagtcatttcttagtccgatatgatctgtgacagttctgagacattttccttttgataactttaagaattttacatactactggtcagacattttatagaatattgctcaatttttttttaagtttgctttgtttgtttggcactcggaggctatgagttttggagaagaccacagatacaaagtgccattcattacatcatatcaagg

SEQ ID NO: 760815 - DNA, 609 bp, Homo sapiens
ttgcattcttgatttggttctcagcttgaatgttattgttgtatattgctattaatgtttgtattttgattttgtactctaaacctttactgaaggtaaagatagatatctgatgatcttagataatgtgacttcctcttttcctatatggatgtctttttttttttttcctctcacctgattgctctggctaggaattccagtactacattgaataggcctggtgaaaatagacaaacttgtcttttcctagtttttargggggatacctccaacttttgcccattcagtatgatgttggctgtgggtttgtcatacatgactcttattattttgagacatgttccctgtatgcctagtttgttgaaaggtttttttttattatgaagggatgttggatttaatcaaatgttctttcagcatctattgagataatatgtttttatttttaattctatttatgtggtgaatcacgtatattgagtcacatatgttaaagcatccttgcatttctggaataaagcccaatttatgctgctatattcagtttgctagtatttgtgtgaggacttttgtgactaggttaatcaggaatattgacctgtagtg

SEQ ID NO: 760816 - DNA, 566 bp, Homo sapiens
gcatataaacagttaagttattcctcatggttaacttagtagcctctggtaccagcaaggctgctgctgcaactgcccagaggcaggctggtcattctttagctaccaacacaagctccttgcttaggtagcctacaggatgctgggctggaccttgggcctgggttagaactcccagggccattcctttcctttctggtatgtaaagattgaccatctgtctaaggaaagactaagggtcagtgcctcaagcaaggcttgtttcaattagtcaaaggcccttttagcctctggttcctaaattagggagtgagtcttagctgcttgagtttcctttaataggtgayataagggataagctatctcactgtacccaggaatgcataatctgaagaatcctgtagtgcccaagaatcccctcagttgctcgatggttttgggaagggaaaaggaggagatgggcttaatcctttctttgcctagcacccttgtcccctctaacaagattagacctaggcactatactgaattctgacagagcagagccttagattttgagaccttat

SEQ ID NO: 760817 - DNA, 566 bp, Homo sapiens
gcatataaacagttaagttattcctcatggttaacttagtagcctctggtaccagcaaggctgctgctgcaactgcccagaggcaggctggtcattctttagctaccaacacaagctccttgcttaggtagcctacaggatgctgggctggaccttgggcctgggttagaactcccagggccattcctttcctttctggtatgtaaagattgaccatctgtctaaggaaagactaagggtcagtgcctcaagcaaggcttgtttcaattagtcaaaggcccttttagcctctggttcctaaattagggagtgagtcttagctgcttgagtttcctttaataggtgacataagggataagctatctcactgtaccmaggaatgcataatctgaagaatcctgtagtgcccaagaatcccctcagttgctcgatggttttgggaagggaaaaggaggagatgggcttaatcctttctttgcctagcacccttgtcccctctaacaagattagacctaggcactatactgaattctgacagagcagagccttagattttgagaccttat

SEQ ID NO: 760818 - DNA, 570 bp, Homo sapiens
ctcgaaatgcccacttgcagattctacaaaaacaatatttcaaaactggtccatcaaaagtaaggttctactctgtgagatgtacacacacatcacaaagaggtgtttctgaatttttctgtccagtttttatgtgaagatattaccttttctaccataggactcaaggtgctccacttgcagattctacagaaagagagtttcaaaacagctctatcaaaagaaaggtttaatactgtgagatgaaaacatacatcatggagaagtttatcagattatttctgtttagattttgtgtgaagatatttccttttttaccagagtcctcaaagtgctccaaatatayacttgcagattctacaaaaagagtgtttccaaatagctctatcaaaggaaagttcaactctctgagatgaatgcacacatcacaaagaattttctcagaattctctgtctagtttttacgttccttttccaccattggcctcaaagcgctacaaatgtccacttgaagattctgcaaaaacggagtttgaaaactgctcaatcaaaacaaagttttaaatctgt

SEQ ID NO: 760819 - DNA, 665 bp, Homo sapiens
tgcttttatctcacataattcaacatttcctttcattgagcagttttggaacactttttttgtggaatccgcaattggatatttggaaagctttgcctcctatagtgaaaaaggaaatatcttcacataaaaactagacagaagcattctgggaatcttctctgtgacgagtcctttcatctcactgggttgaacctttcttttgattaagtagttttgaaacactctttttctagaatctgcaggtagatatatggaacactttgaggcctatggtggaaaaggaaatatcttcacataaaaactacacagaagcattctgagaaacttctttatgatgtgtgcaatgatctcacagagttgaaactttgttttgattgagcagttttgaaacaccgcttttgtagaatctgtaagtggatatttggagtgctttgttccctattgtagaggaaatatytgcacataaaactagacagaagcattctgagaaacttctttgtgatgtgtgcattcatctcacacagttgaacttttcttttgattcatcacttttgaaacactctttttgaagaatatgcaagtggatatttgaagcgctttgtggcctatagtggaaaattttatatcttcacataaaaactagacagaagcattctgagaaa

SEQ ID NO: 760820 - DNA, 620 bp, Homo sapiens
tcacatggaaccaaaaaagagcctgcatcgccaagtcaatcctgagccaaaagaacaaagccggaggcatcacgctacctgacttcaaactatactacaaggctacagtaaccaaaacagcatggtactggtaccaaaacagagatatagatcaatggaacagaacagagccctcagaaataacgctgcatatctacaactctctgatctttgataatcctgaacaaaacaagcaatggggaaaggattccctatttaataaatggtgctgggaaaactggctagtcatatgtagaaagctgaaactwgatcccttcctttcaccttatacaaaaatcaattcaagatggattaaagacttaaacattagacctaaaaccataaaaaccctagaagaaaacctaggcattaccattcaggacataggcatgggcaaggacttcatgtctaaaacaccaaaagcaatggcaacaaaaaccacaattgacaaatgggatctaattaaactaaagagcttctgcacaggaaaagaaactaccatcagagtgaacaggcaacctacaaaatgggagaaaattttcgcaacctactcatctgacaaagggctaatatccagaatc

SEQ ID NO: 760821 - DNA, 542 bp, Homo sapiens
tggtctctaatggaatttattcgaatacagtgcaatcaaatggaacgcaatagtatggaatggaattaaatggaatggaccagaatggaatggactggaataaaatggtttcgattgtaattcattgcaatccaattgatttgagttgtatggaatcaaatggaatgaaatcatatggaatgcaatggtatgcaatggaatggaatggaatggaattcaatggaaaggaacggagtggaattgagtggaatggaatcgaaaggaagggaatcaaatggaatggaatcaaatcaaatggactsgaatggaatggactggaagaaaatggaatcgaatggattgaagtagaacagaatgcaatggaatgaaaaggaatgaaaaggaatggacacgaatggaatgcagtggaatgaaatgcaattaaaaagaatgcaatggaatggaacggagtgaaatggaaagatatcaaatggaattgaacggaatggaatggaatgaaatggactggagtggaatggacttgaatgaaatggactggagtg

SEQ ID NO: 760822 - DNA, 542 bp, Homo sapiens
tggtctctaatggaatttattcgaatacagtgcaatcaaatggaacgcaatagtatggaatggaattaaatggaatggaccagaatggaatggactggaataaaatggtttcgattgtaattcattgcaatccaattgatttgagttgtatggaatcaaatggaatgaaatcatatggaatgcaatggtatgcaatggaatggaatggaatggaattcaatggaaaggaacggagtggaattgagtggaatggaatcgaaaggaagggaatcaaatggaatggaatcaaatcaaatggactcgaatggaatggactggaagaaaatggaatcgaatggattgaagtagaacagaatgcaatggaatgraaaggaatgaaaaggaatggacacgaatggaatgcagtggaatgaaatgcaattaaaaagaatgcaatggaatggaacggagtgaaatggaaagatatcaaatggaattgaacggaatggaatggaatgaaatggactggagtggaatggacttgaatgaaatggactggagtg

SEQ ID NO: 760823 - DNA, 592 bp, Homo sapiens
ttgcatgccttctttatttttttgatttgtgaagcagttatttcttttggaatccactgtaaggcagatgtaatattagctgttggggaacaataattgaataccttcaaaggctcagtttggtggcaaaatatacagacaaagagaggatagcctcaaaaataaattcatttcaaggaaaacaaaagggaattcaaacaagaagaaaacagagtagggcttgtttcatatagaattggagaagacatcagccaagtaaaaattgagagcaactatgttcacttagaaagagcaggatctgtggtcatgtagctgaaaacaatagtaagtttaaatcatagtggtaggggagaagacyggctcttggtggagttacagggttgatcagggacaatggatgccaatgaagattcttatagggatttctgtctgataactctgttctgagccatctttattgacataacatatttaaactagactatccactatagtgtgaaattttgcaagttccattaattagggtgaactacagttctacaaaatttgtaggtataaatttaatccacataaaagttttgcagtaatcctc

SEQ ID NO: 760824 - DNA, 612 bp, Homo sapiens
atgtcttatatgctggtttagttacacatcactcatatgtagttaattcccttttttatttctcagcatttgccatacatgtgtagaagcagagcaaatacttttcagctaatgataattatgtcaattgttcagctactgatacttaaacagcagtacatcattatgcatattaagccacacatcattatatctgttaggactgtaaagctgaaaatttactaaaaaacaactaaaaagtagcttgccaataagatagtcatttattcaagtaacaagttttatggaaatagggtcagtccaagtttggataacttagaaaaacagcaacatttcaaccttctttctttatcactttgctgygcaatcctcagaatgcccttccagtctgtttttaatatggtagcatgcatattttgggcatagtgaaaatgtgaaaatatgaaaatatctaagaaagagaagaggatattcctggtgagttctacttttttatcagcaaagaaataagtaattttctaggactcttccattatactttcaggtttttagcaagaagggtcactgacgtggggagaaaaataaaataacaaaggaacagaaaaatcatca

SEQ ID NO: 760825 - DNA, 498 bp, Homo sapiens
tactgcctagcaattcatacttgaaaagattcaaaattgaagggtcttcctcaggaagaagagaggcttgttgaacttaccccactccatgatggcaaaaaaggaataggaaaatcacttcgttttcatcatcatcaagtaccgttcatgatccagcaggaaacagtggcctttggtgttgagaagagcaatttataaattgtagaccatctcaaaaaaatwctccttttagaaatgtgacaagttgatattgttttctcattagtttctccaactgtatttatcacttgtcttttgtgaagattttatggtgagcagattggtgagcggtaccgaaaaatgctaccagagcattgctccatcctaagtagtaaagagatagatctttatgtaaacatgagagcaaagcaaaatgattcatcatcataagtgatataatttttacttgatattttcaaccagctaattgaaattaattttatattgcttccaaaatgc

SEQ ID NO: 760826 - DNA, 650 bp, Homo sapiens
tgtaaacatgagagcaaagcaaaatgattcatcatcataagtgatataatttttacttgatattttcaaccagctaattgaaattaattttatattgcttccaaaatgcccccattcatgccatttgtccttttacatttattcctgatttatgaacacattgtaaaagcagatttcttaagctataatttaaagtgtacaattttgtgttttkggcatatgtataaaactataaaattatttccaccatcaaaatgaagcacatatccattattcccaaaagctacgactgtgtttgatttttttctaatttgattgtctccatagggccatttgttttctaccctataacaccttaattcattaatgttaaatatcttttcaaattttattgagtctcagaatccttctgcaaaatatgccacccctgtatataacagttactcatttgctaaagatgcatgaaactaaggtagttgattctcattattcacaatagtaatgttctataataatgttctatacagttaccacaaacacttaaataaaaaatactaaactcttgctcctagaggaaatatatacacacatatatacatacaaatatttaaataactcacatagattataaccttgtcctaaaaacaacc

SEQ ID NO: 760827 - DNA, 608 bp, Homo sapiens
ttctgatgcctgcttaagtttgagggcattgctcttttttaggatatcactacttaatattttgtatgccagtttatgaatctgtattattctattgactatgagctcattgtaactagggattacaggttattcatttttctacctcatataataccaaggaccaaactttgcacagaagaaaaaaatcaatgattccttgatgaattaaactatattgaaagtaaaacaatttgtatcttttctctgtatcgagtattgaataaatgatatttgtcttaaaatgtatatcatttgctgcagttttactcttagctatttcctcaaaataaacacaatcagaaatatcaaaagacatatgttgaattttagtgtttaatagaaacattttatgtgcagaratactagaacttttttctcatttctttcctttacatgttaagtctgtcttggaagcggagacttctatacacagggatagtagagataacaaaagaaaaacttactttctcaaaagcaattgaatatacttttcttttagaggtcattgctatctatctcttctcattggacataattcttatggtgaataattaacaaggttttgt

SEQ ID NO: 760828 - DNA, 526 bp, Homo sapiens
gaatgtacacaagaaccataaaaactgagtttcatgaggaaaagtaagccaagttttactttttgcagaaaatattgcttccttgtactgtccctacatcctctccatgcccccccccgccaaaaaataattccagtatgacatcatcacagaacctaattatagtattctcactgacataaaattttatttcatcagaaccaatatttcatgggtgatactctaatgaggatatagaaagtcactttgttttgaaagtaagtcacttagtatcaaccattgtattcattcattcatttatttaagaaataattttgttcttttgttttgttttgagacagagtctcgctcttgtcrcccaggctggagcacgacggcacgatcttggctcactgcaacctccaccttttgggttcaagtgattctcgtgcttcagcctccccagtagctgggattacaggtgcctgccaccatgcccagctaaattttgtagttttagtaaagacagggtttcaccatgttggcc

SEQ ID NO: 760829 - DNA, 627 bp, Homo sapiens
gccctactgaaaagtggccagacttacatgggtggctattcccatatctcctcactgggcaggtcctccaggcctgggcctccagccaccccctgccagagctatcaagccagtgctaactcagcaacaaccaggacagagcctccaggagcgactgaaagcctctctgccactgcatctgcagtagaactgcccttgccaccctgaaactaacgaagcagcaaagaccctaactgctttatccacagctccaacaggctacagttgacccaaggagaggaggcccttctgtctcccatgggtcctacacacccagcatggcacatcaccagacagggaacccctggcttgggcccacagcacaaaccctccatcttgggctgactgcactgagcgatcgctcacawaggtttgacatataccataacaatacataaagattgagaagaaagaaatggaagtatacttttgtaaggttcttgtactttatgtgaagtgatacagtatcactgagattaagttaaagatgtatactgtaaaccaaaatcaaccacaaaaatgtcaaaacaatctttaaactagtaagccaaaaaagaagataaaacggaagcataaagataattactt

SEQ ID NO: 760830 - DNA, 625 bp, Homo sapiens
ctctgtcgcccaggctggagtgcagtggcgtgttcccaactcactgcaacctccacctcccaggttcaaataattcccctgcctcagcctcccaagtagctgggattacaggcgcccgcctccacgcccagctaattttggtatttttagtggggatgggccactgtgatggccaagctggtctcaaactcccgacctcgtgatcctcccacctcggcctcccaaagtggtgggattacgagcgtgagccgccacacccagccccttttttaaattttttttgagacagggtctcactctgttgcacaggctggagtgcagtggtgcaaccacagttccctgcagcctcaaactcctgggctcaagtgatcctcctgcctcagcctcccaaagtgcggggattacaggcatactctgccrcgcccagcgtgctggaacttttctaaggaaggggtgctccttgctcactgtgagagtgagcaggctatgagctagagctactggtggctgccatgtggtgagagcccgcctgtgaggaaaaccagcagagaggagagcagagccaaagcacggagaataagagcagtcctaacaagcccctggatccagctgggcctgaagccag

SEQ ID NO: 760831 - DNA, 652 bp, Homo sapiens
ccgcccggatcccccagcctcaccccgctccctcccgcctggtctccaagcaatttcagactttttgtacatccagagcagagattgtgtacgatttctctcgccggcagaagcggctttcaggtaggggaagcaggtcgaggcatgtttatctttgaacaaaaaggcagctagagacaaaaagggagcatgccctgcccccagccgccygctcctgtgccctccccaaagcccaggtccttcctctggctgcagaggggagattttaattgtgtgtgctcagctcagcttcttcagggtgccaagatctggggacaatggtgtgggctgctctgctggtctctcgtgtgtgggtcaggtggtgtctgtgcaggtaggaagcagtcaccgcctgggccaggctgtgtctatatgagtacgggaagggagccaaatggctgtcactgggcagtttctcaacccgggcaggcccctctggagtcttcccttggtggcgggaagcaggatttaaggtgtccagtttgagggagaggcccttcatcaccactccagaacaccgcgggcttgacacaggatgccaggggtggctctggttgctgctggcagctgcgtgcatgtgcacacagctgggcgggggtctgcactcttgagt

SEQ ID NO: 760832 - DNA, 576 bp, Homo sapiens
tgctcatgtagaagctcacacatagtagctactcactgaatgctagtttctatttaaaaataaatgatcaagtaaacaaagaaaactaacaagacagctcagaaattagtcattgaaggtagtcttttaccattacaaaatccaactatgtcttttttggggggacaacttgaagtgcttgctgtgtccttcaatacatttttttccataaaatagttctctcagaattttcaaaagatgaggcaaaatgttctacattcattctcatgttgmaaacagtcattgtatattctttcctccgatttgatctttacattaatcctggttgctttctagtataccctattctgtaatagtcttgatctatgggatctcattttgacattggtaaaacacaatttttccatatccaaaaataaagtgtgccttaccatagcctcagaatacagtgcaaacaagaataccacttgttcatcattaatttccatatggagttctcacttcttccatttgcatatcaaaagagtatcatatttaacaaaatgcttagaaaatacatttcacacaaataatatg

SEQ ID NO: 760833 - DNA, 587 bp, Homo sapiens
ttttcttgcttgctaacacagcatccaatctgcagcccatgaattaagaagtcatttttacttccaagttttattatttaagaaatacattttgtaaggctaaggctgtcatagatactgattcctctgatggatctgggcaaagtcaactgaaaaccctctagaaaaaattcacttttctttttttttttcttttctttggggagcatggatggagtttccctctgtcacctgggctggagtgcagaggcgcgatctcggctccctgcaacttctgccttctgggttcaagcaattctcctgcctcagcctcctaagtagctgggactacacgtgtgcactgccatatctgcctaattytttgtatttttagtagagatgggatttcactatgttggccaggctggtcttgaactcctggcttcaagtgatccatccacctcagcctcccaaagtgctaggattatagatgtgagccaccatgcccggccacacttttctaaaagtcattaagaacatttatgattcatgaggggaggtcaaaatatcaacattaacaggagtttggaagaagttgactttaacct

SEQ ID NO: 760834 - DNA, 653 bp, Homo sapiens
agcattagtttctttgtcttctattgaccaactagcaataaaaccatattcttattttttatgtacttaagaagatgaatctcaaaaataatgtattatattatttgatatggctagggatctgaatgataaaaaaaaatttccaggagaaataagataagataaatgactactttcatgcaacattgtactacytcaaacgaagtacaattttacttttaaaaacttacttatttttaatctatatagcattgaatttataattatattgacatagtggctcttaggtgctctaaataaaaattcaaattaacacatatttattgagttatctaataaacaaaaagtactttatatgccatggtgggaaaaataaagaaaaacatttaaaatttaaaacagatttacaaatatgctctttgcatcatgtgttgtgttcttttcatagttataaaaatgcataataaatcattaaaatattcatttcttatcctgttattaataatccagaatattgtgatggaagttaacaaaaaatagtttaattatgaaactaagttttctcttctctgtatatgctggaccatagagtgattgaaacacagcattgtttttacataatgttcaaatattaataaaagctatattaatat

SEQ ID NO: 760835 - DNA, 600 bp, Homo sapiens
agaattaatacaaaatctagatttttggaaaaatagactttaattcatttttaattacccagtacatataaactatcgaagtactctattttacattcctaaggaggacgggtttaataagaagaaaacttataatttttatgttagktatttgttggtaaattgaaagtaatgaaaacagtgtttggaaattggttgctctctaaatgatccacatggatctttattgcacttttaatttgtttaagtttttttattcttttgtcatatttgctaaaagataatctgagtggctttaaatatgtttggcttcttgattatttgtaagaatgttagaaacagttattgcagttcttgttttttgtgtttttttggttttgttttgtttttcagtgatcatgaggttttaatgcctctcctaacccaggattaaaataaacatgcagctattcaggataatgttatagagaggagctatatatttagcattcattgaatgacctcttaagtaacctaacaattaatgaaaggcttcttggcaaatagtagaggactatcctccacactggacattcgaggttcttataacacaatttttga

SEQ ID NO: 760836 - DNA, 558 bp, Homo sapiens
cttgcataccatttgcaggaatgtaaattagtacagtcattatggaaaatcacatggaaattcctcaaaaaaagtaacaatataattaccatatgattcagcaatctcacctctgagtgtatctctgaaggtaatgaaatcagtatgtctgcgttctcacatttgttgcagcattatttacaatagctaagatatggaatcaatgtaagtgtccatcaatggaagagtgaataaagaaagtgygatgggaatactattccgccttaaaaaatgtaatactgtcatttgcaacaatgtggatggaactgaagacattatgttaaataaaataagcacagaaagacgaatattgcatgaccttatttatatgtggaatataaaaaaaactcagaagtaaagattaaaatttcagttaggaagaataagttcaagagttttattgtacaacgtggtgactatagataatgataatatattgtattcttgaaaattgcaaagagagatttttaagtattcttattgcagagaagtatgtgaagtaatgtatatgttcatcag

SEQ ID NO: 760837 - DNA, 595 bp, Homo sapiens
aaacaatttgagcctttcaggttttgcttttcagattattagacaggatcagagcagtgatcaaaccggggctaattgttttccactcttgaggcagaccttctgtattctttatatatacttggtatactccctaggaagcataaggttttccagtctggctgtggtaataagcactattcccagccctgtgtgcacattagatccggttatctttattcctttcgggtggttctttccccagtcacccgttcttcacatgcatgcacaaataagtgctctgctgaatactcaaaggggaccctctgcatattggtagggatctctttgtgtagctctctgatctcctctacattgctccatgaattttaaccagtttggtstacttggactctcagctttatcttctcaactcagggactcttccaggttcctcctcattccccattcctttattgtgccacctgaaaattatctcaaggcattaacataatgcaattgtagtctcatctcatttgtttcccatctctcaaggatactgttcattgtgtgatgtctggtatcttgaaactgttgtttcatttttattgtttat

SEQ ID NO: 760838 - DNA, 618 bp, Homo sapiens
taaccacaaaatacacattcttctaatttgcacacagaacatactctaagattttccacatacttaataaaccaagtctcaataaatttaaaaaaaatgaaatcatgccaatcatagtctcagaaaacagtacaataaaaataaaaataaatacccagcagatcccttaaaaaacacaatattccatggaaatttaaaaatgtgcccccaaatgattttgggataaaaatattaaagtagaaatttaaaaattatttgaaataaataaaaatggagatacaacatatcaaaatctctgggatgcagtaaaagtgttaaaaggaaagtttatagtgctaaatgcctatctcaaaaagttagaaagatttttaaaaacctaacatcatacctagagtaactagaaaaacaagaaaaaactaaccccatagctagcagaagaaaatagtcaaaatcagagyagaactgaaagaaactaagaccaaaaaaatctatacaaagaatcaatgaaacaaaaagtttattcttgtaaagaataaacaagattaatagactcttaactagactaataaaagagagagagagaaagatccaaagaaacacaaccagaaatacaaaaaa

SEQ ID NO: 760839 - DNA, 632 bp, Homo sapiens
agaattatatttctaaaatgatgttaatactctgcattaggtttaacattttttcattcacattataaacatttccccatgtcccatgtttatttatgtcaacaaatatttctcaaatacagaattttaagtggctgtgaaacactcagtctaaatgaatgcatcagagctacatttctaaaataaattcagaaatatttctaataaggcaatgtttatatgtttagaatatattaaaatgaagacaaatttctgaagcaaagatgtttatgaggagaataaggcatatcacaaaataccagcttcagattttagtcctataataacctttccatttgcaatactgaacaaaattaacagaaattaatggatagcatacacatttgaaaatagaaatttgagagctgactgccaactttgaaaagacattacttaataatgctgctacagcaagaagcctcytaaaatacaagtaattgccacttgtggtttaattattccattttatcaagaacatagtttggagctcaagtatgcatattgggtagcgattaaccttcagtagtaacatagaggacatcaaatagcttgtttaagcatctctcttcttgaaatgccactaaaatgaatta

SEQ ID NO: 760840 - DNA, 627 bp, Homo sapiens
ccacaggaaagggtcctaaggaactggacaccagaagtttaaaggaagaaaattttatagcatctattggtacgtatcagtgtgtttggtgtggtggaggggtcctggcttcttaaatatccctttctcctcaattcatccagaatcctgcctttctctgccccatgctttgcttcttagagagggaagggggcctgtgtccatttctggtggtgtttctttgtacttctctagtctttatgcttcatccacagccaccccccaccccgtatcttagatgaagaatggtaagttttgtttagagggcccaatgaggcttactgcagggggtgtgagctgtactcctggcccctccttttatttacgtctgcatttcttcacatagtggagagaattcctggaagtgctcaggargtttatagatgcatctttgggctataaaattatgacatttgtgtctctgaagccagtgtcctcccatccaaccattatactcctctggaatgtgctcctctggggcatgcctggcaaccccatttccctgggttctggatctttgaggtataggtttccaagtcagttctttaaatgcttcttcactggacttgattataatctcgtttacat

SEQ ID NO: 760841 - DNA, 612 bp, Homo sapiens
tgaggccagggctggctggggacaccagttggcaggaaggccacctctaggatctaaggacagccttctatttactggaagagcctgttttaagcaagtttgtttatgaacacagtcagcaatttgtaaacccggcactccatttgatgtctctgtgcgtgagctggtgtatatttatatttatttgtctatatttattccatctgattccagagagacttaagggtgcagctgkgtgaattggggagcagagtgggagtgtgacaaaggactggtgtatgcttttttaaagctgtggggtggaggagaatgtgcacccaaacgcacgatcagttgccaagggagagacccttgaaggcagtaaaatagcagcgaggttgggaacgctggctttggagtcagccttcaggtctggtctccaccacttatgagctgcatgactggctactacttctgtgagcttgtctctgaaaggactctctctcaaggctgttgtcaagattaaagtcagtgctgtgcctgggacatagtaagttttcagtaagcagtgaatgctgtggatgctatggatgttgttattgtcattatcacttaaactgatttgttgcgttg

SEQ ID NO: 760842 - DNA, 532 bp, Homo sapiens
gccatccttcccactcttccttcccctttccaaaggcagaggagcttcactccatggccaccacttccacaggccacaggaggtaatgtcagactactaccaatgttctcttaagtcccaagggctctccagtaagcttgtgaatgctgcctgacctagcactcacccttcagggcaatgagctcccctctggcctagggcaggtccagaaatgtccaaaagccaagtcctagaatcagrgaccctaagagcccacttggtgctcttatgcccctatagccaagctggtacctaaggtataagacaaagtctccttaaatttttcctacacctttctcaagtggaaagagtttcactccatagccactgtatctgggaatgtgctgagtctcatctgaagcaagcaagtttcagagtctcatccaatgcccttggcatagtgcctgggtatcactgctggttattcaaagcccaaggacttcccagttagcaggtgatgaattctaacagtactggatccttgccttccatg

SEQ ID NO: 760843 - DNA, 540 bp, Homo sapiens
tggtattgataggaacaaactactgatacatgaaaaacttggatgaatctccagagaattttgctaagtaaaaacatgaattcaaaaatgtcaaatactctatgattccatttgtaccacatttttgaaatgacaaaattatagaaattgaggacagattagtggtttccacagttaaccaggtgttgtggtgtgtgtctgtggtcacagctacttgggaggctgaggtgggaggattgcttgaacctgaaaggtggaggttgcagtgagctgagattgggccacagcactccatccaacctgggtaagaaagtgagaccttgtctcagtaaatatataaayataaaaaggcaacaaaagagttaattgtgttgatagaaaatatttgtgtcttaactatataaacctcaatattctaattctgttattatactaaagttttgcaaggtgttgccactgggggaaattagataaaagatatatggggtttctctgaattattttttacatctatgtgtgaatctataattgttcaatata

SEQ ID NO: 760844 - DNA, 585 bp, Homo sapiens
ctagggttattattgaatttttaagtatgttcaaattcactctgtaatgatctatataaagtgaaagcactgggagaatgaaaatacacatataaacaatacacaaatgtgaaagatggataacagtgcatggcatcaggcttgtgggttgatactggaatttatttaagttatggtcacaagtataatgatgagaaatcaagaggaagggactgacccaaaagrgaggctcttacctaagtttcaatacagggcataaatcgagcagcctagagcaaggacttatgtgaaggtgagtatgtgccagaaaagatacaactgtagaatgccggagctaattgggccctagagatcatcaagtctagcccctttcattaagacaacaaaaactaatttactttttactatcagttagatgctgagtatttaatggtaagctggaataacaaggaaggcccccctgccttcactcataatacataatcaaccacggggaaaacatgggctcagaaaggggaagagacttgctccaggtcatccatctcatttgtactgagtgaattctacaatctgggtctctggaat

SEQ ID NO: 760845 - DNA, 627 bp, Homo sapiens
atgctgctatgagcaattatagaccaaaaattggaaaacctagaggaaacggacacattcttagatacatacaacctaacaagattgaaccaagaaaaagtccaaaacctgtgtagattaataacaacaaatgagagcgaagctgtaataaaatgtctcctagcaaagaaaagcccaggacttaatgacgtcagtgctgaattttaccaaacatttaaagaataagtaatactaattctactcaaactactctaaaaaatagaagaagagggaatatttctatacttattctatgaggccactattaccctgataccagaatcacacatrgacacatcaaaaaaaaaaaaagaatattacaggccagtatctctgatgaatattaatgagaaaaccctcaacaatgagcagatacagtggcttatgcctgtaatcccagcactttgggagaccaaggtggaaagatggaaggatcacttgagcccaagtttgagaccagcctaggcaacattgtgagacccgtctcaaaaacaaaaacaaaacaaaacaaaacaaaaaacctcaacaaaaaaatactagcaaactgaattcaacaacaagcaacacattgaaaagatcatatatcat

SEQ ID NO: 760846 - DNA, 627 bp, Homo sapiens
atgctgctatgagcaattatagaccaaaaattggaaaacctagaggaaacggacacattcttagatacatacaacctaacaagattgaaccaagaaaaagtccaaaacctgtgtagattaataacaacaaatgagagcgaagctgtaataaaatgtctcctagcaaagaaaagcccaggacttaatgacgtcagtgctgaattttaccaaacatttaaagaataagtaatactaattctactcaaactactctaaaaaatagaagaagagggaatatttctatacttattctatgaggccactattaccctgataccagaatcacacatggacacatcaaaaaaaaaaaaagaatattacaggccagtatctctgrtgaatattaatgagaaaaccctcaacaatgagcagatacagtggcttatgcctgtaatcccagcactttgggagaccaaggtggaaagatggaaggatcacttgagcccaagtttgagaccagcctaggcaacattgtgagacccgtctcaaaaacaaaaacaaaacaaaacaaaacaaaaaacctcaacaaaaaaatactagcaaactgaattcaacaacaagcaacacattgaaaagatcatatatcat

SEQ ID NO: 760847 - DNA, 447 bp, Homo sapiens
tgtcaaataaagttttacttaacttcaaggttatgaagaaataagaggcaaataatatgaagaaaactgtaaacatgacactgaggagacaatgcttgtttccctctttgtttctgggattctaaggatttccctaaggaaatcaaattttcctttttaccattaagcctcatttcagaacttggggttttggcggaagtggttgtataattgyattatctaaaaaataatggtgctgactatataatcccttaaaagaatttcttttttaaagagttaatatgaggaattttccttagaggttaaaagaactgagaactacataatgaattgcagagaggagtgtggtggagaattatagtgtgccttgcttccagagactaaatcccagtgaaaacttctgaggagacatggcaaatagtagagggaggaagaagtcataaacag

SEQ ID NO: 760848 - DNA, 575 bp, Homo sapiens
taatagtatttactattatgggtaacatttcaggttataaaatattttcatttacattcacttgatcatagtattcacctcctaataatctatattacagcaacctaggtgtactgactccaaaacaagttcttgccaccacatggccttgcccgagcattataacttttaaaataacatttgatgtcccactttatacccttggataaggtagagctgaagtgatctggatatcaratgtcaagaaggaatgaaaacaggataaagcaaatgttattcgagttgggggccaaataaacactatgctattcaaataaaccctaaacacaatgggcgtctgagctatttttattgtatgtgttaagatgtaattaagagtttttttctcttcatatttttcctgtatatatttgaatctagagaatccaagtcattctaaaagatgtcactcctgtcagcttccagctattttgtatagtgtttaatcaactgatgaagttgggtgcatgtcttaagatatgaagtcattttgtctgatttgaagttcctttattatctatgtgatatatactgta

SEQ ID NO: 760849 - DNA, 612 bp, Homo sapiens
agtgggaagcagcttctgttcccagcaccctccctgttgatgggaaacgagggggtgcattaaggactctgaggagaataaaaataaaatgtcaagttgatgtggcccagaggcagtcagccacaagctgtgaaaagcctttgaaaagcttatttggctgagagagcggctcagccaggaaagcctgggtgagttccaggagctgaaccacaggtgctgagggagggagcccggggtcagcaggagcggcccaggcaagtgctggggaygagggcgctgggtccagtccccaccttcccactcaggcttgtctcccctgcttacctgtactgtttggacccagcgatgaaaatgcgttctgaaaaggtggggctgaactcttggctattctcacctaaagcaaaaggagttggattagcagagaggagaaaaaataggaatttagcacttaggggagagacattttacagagatcccctctggcgcctctccttcccctcctttccagacaacccctgtctggcagtcacctccccaccaatgcctccttcccgcactgtctctccccagcttctcagcttactggtcaagagcagaccacggcctcagcca

SEQ ID NO: 760850 - DNA, 581 bp, Homo sapiens
cacccacacctggatccactcctatctgcaccgggctgactccaaccaggacagcaagatgagcttcaaggagatcaagagcctgctgagaatggtcaacgtggacatgaacgacatgtacgcctacctcctcttcaaggtgggcttccgccctgaaccccagcccctggctctgccatcactctgacctctgcctgcccccagccatctgaatcatcagytcccctgccctctccatctgcagcttttttggagcgagcagcctttccctgcacaaaggcaacatctggggttagttagccttttgcctcccctgaggccactgggccaggaagggagtggggagccggggcccagaactttcctcatcctcagttcctacccctccaaagtgagcagcaaagctgttttcatttccctgagtctgcaaggcaccttttgcacgtgggggcacaggcaggagccagcctacaggtgtgcatgtgcacggatacacgtgtgcacccttctccacgcagaccctccactgtggcacgtgttggcacctcatgcatgggagcacaggggcacacaggagtggg

SEQ ID NO: 760851 - DNA, 581 bp, Homo sapiens
cacccacacctggatccactcctatctgcaccgggctgactccaaccaggacagcaagatgagcttcaaggagatcaagagcctgctgagaatggtcaacgtggacatgaacgacatgtacgcctacctcctcttcaaggtgggcttccgccctgaaccccagcccctggctctgccatcactctgacctctgcctgcccccagccatctgaatcatcagttcccctgccctctccayctgcagcttttttggagcgagcagcctttccctgcacaaaggcaacatctggggttagttagccttttgcctcccctgaggccactgggccaggaagggagtggggagccggggcccagaactttcctcatcctcagttcctacccctccaaagtgagcagcaaagctgttttcatttccctgagtctgcaaggcaccttttgcacgtgggggcacaggcaggagccagcctacaggtgtgcatgtgcacggatacacgtgtgcacccttctccacgcagaccctccactgtggcacgtgttggcacctcatgcatgggagcacaggggcacacaggagtggg

SEQ ID NO: 760852 - DNA, 647 bp, Homo sapiens
ttttagactgtgatagagaagaatattctaaatcttcttgtgtcttctccttgttggtcttcgttctaatcattggaatcatgaagaagtttagtttctcttctgtgtgactgacacccctccaaatttgtgctgacaggaatcttgtgtttctttaatgtttaatttaaatcttaatagttcctcattactccttatgtaatcctgaccctctctcatggtggttactcaactgtctttcatctgcttacatatctctaaaattgagattaccatccaaaaggcaggcaataacaaatgctggcaaggatgtggagaaaagggaatgcttgtgcactgttgatgggaatgtaagttagtataaccactatggagagcagtttggaggttcttcaaaaagctaaaaattgagctaccatatgatcagcagtcccactgctgggtatatacccaaaagaaagtractcaaaatattaaagagatatctgcactcttatgtttgttgcagcactgtttataatagctaagatttggaaacaacctaagtgtctatcgagagatgaatggataaagaaaatgtggtacatatacacaatggagtactactcagccataaaaaggaatgagatcctgtcatttgcaacaac

SEQ ID NO: 760853 - DNA, 577 bp, Homo sapiens
cacttggcatgtagtaggcattcagaaaactttggttgaagcaatgcaaatattaatgatgggcagtagaggcaaaccctggggagaatccttggggctccagagtgtaatgaagcactgtaatgacaggcagggttgtcctttaaaataaggattttacagccaccataatgccagaaatgcattcagattgatgctcagcctccttggttctactgtagcctggggcagaagcctggagggggtgaaatgttttgaaccttaggggcatagtcactggatactgaactgccaagacttgctgatgccatggggctgtggtccatgatccatgtagcagatgctgtcattacctgccatgtccccttaccacttcattgtgtgcctgttgacctccagtgcagcctctgcattgatttcagtgtgggattttcctggccmctgaagcttactttgttcatctgggctgcaggtttcaaatgatgggaatttaatgccctttgagaaatgccctctaattaataactaaagagagctaatgtgtaataccttggatcccttgccacttaggtggggt

SEQ ID NO: 760854 - DNA, 688 bp, Homo sapiens
ctaaggggatactagtagaatacaggagatatttgtttatgtagtcatccaacaaatataacaagcatctaccagtaccaggcgttgtgttaggtccccagtatataaagggtcagcaaaacaatcaggtgcctttcccttgtgactttacagtccttgtacctctcaagatttgtatttctggttttcaacctcttcttttctaatattatctcaatcagaataaatascttgcatttttgtcatactcagcaaaaaaatttagcttgcttccccacaaagaaaacctagcaaccaattctcttaacttcccatctttttgctataataggcagccctcccctggagctaacttttttcatgaaagatgattgtgtcatcagtagcagccacattactaaatgacaccttcctttctctctgatgtgttagcagcccaggagctcaagttagcagaaatctgtgctgaggcctggaaaagaatgaattgtttctttttttctttttcttttttttttttttagacggagtctcgctgtcgcccaggctggagtgcagtggcgcgatctcggcttactgcaggctccggaattgtttcttttaaataagctctaagatggattctaggaagagctatagtaagctacttccccccactccaagattttgttgttatttctacaatata

SEQ ID NO: 760855 - DNA, 547 bp, Homo sapiens
aaaaaaatactgtcttttgagacaccatgtttgaacatgaagaacattatgtaaagtgaaataagtacagaaagacaagtacccaaatactgcatggcctcacctatatttgaagtataaaattcaaactcatagacatagagattaaaatggtggttaccagaggctgggatatggaaggattgaggagatgttgatcaaagaacacaaactttcagttaaaacataaataaataaaaataatgtagaagaagtttgttttccttgcttatttgttttccttgcttatttgtttaatcattcgatgtgtatgtktgttttgattcttaacacacaattattccaaaaaaataaggtgctttgaaataaaaccaactttcccccatagggctatttattttttaaaaaaatatcatcctaatgtctgcatttataataaccatttatttgttttaaaaatatttacttaatatctaaaacctaccaatactatggtcttccttaagaaattgtcacagccatgcaaccttcagcacacgctaccttg

SEQ ID NO: 760856 - DNA, 620 bp, Homo sapiens
gatcagtagtgatatctcttttatcattttttattgtgtccgattcttctctcttttcttctttattagtctgactagcagtctgttaatcttttcaaaaaaccagatcctggattcattgattttttgaagggttttttgtgtctctatctccttcagttctgctctgatcttagttattttttgtcttctgctagcttttgaaatgtggcacatatacaccatggaatactatgctgccataaaaaaggatgagttcatgtcctttgcagggacatggatgaagctggaaaccatcgctctcaggaaactaacacaggaacagaaaaccaaacaccgcatgttctcactcataagtgggagttgaacaataagaacacatggacacagggaggggagcatcacacaccytgcctgtcagcgggtgagggtgataggggagggataccattaggagaaacacctaatgtagatgacaggttgttgggtacagcaaaacaccatggcacctgtatacctatgtaataaacctgcatattgtgcatatgcatcccagaacttaaagtataataataataataataaaaagaaacataatcccagacttgaattctttctac

SEQ ID NO: 760857 - DNA, 486 bp, Homo sapiens
tggactactgagtctttcggtgcccccttgctgttttagttttgtcctgcggccgagtgtttccctcgcttcacgccaacacaatctccgccgccctgtcttgtcatccccattctacagcccagcacggtgtagtatggcagccgctagccacaggtatctagggagccctggaaatgtggtcagttctaatggagctgcgctgttaagtrtgaaatacacatgggattttgacggcagtgggagcaaaattctcccaattttttttttttttttttttttttttcagacggaggttccgctcttgttacccagcctggagtccaatggcgcgatctaggctctctgcaacctccgcctcccgggttcaagcgattcccctgcctcagcctcccgagcagctgggactacaggcatgtgccaccacgcccggctaactttgtatttttagtacagatggggtttctccacgttgctcaggctggt

SEQ ID NO: 760858 - DNA, 625 bp, Homo sapiens
cccccttgctgttttagttttgtcctgcggccgagtgtttccctcgcttcacgccaacacaatctccgccgccctgtcttgtcatccccattctacagcccagcacggtgtagtatggcagccgctagccacaggtatctagggagccctggaaatgtggtcagttctaatggagctgcgctgttaagtgtgaaatacacatgggattttgacggcagtgggagcaaaattctcccaattttttttttttttttttttttttttcagacggaggttccgctcttgttacccagcctggagtccaatggcgcgatctaggctctctgcaacctccgcctcccgggttcaagcgattcccctgcctcagcctcccgagcagctgggactacaggcatgtgccaccacgcccggctaactttgtatttttagtacagatggggtttctccacgttgstcaggctggtctccaactcccgacctccggtgatctgcccagctgccgcctcccaaagtgttgcttgcgattacaggcttgagccaccgctcaccctggcttttttttttttttttccagacaaactctcgctctgtcgcccaggctggagtgcagtggcgcgatctcggc

SEQ ID NO: 760859 - DNA, 490 bp, Homo sapiens
cacgtggactactgagtctttcggtgcccccttgctgttttagttttgtcctgcggccgagtgtttccctcgcttcacgccaacacaatctccgccgccctgtcttgtcatccccattctacagcccagcacggtgtagtatggcagccgctagccacaggtatctagggagccctggaaatgtggtcagttctaatggagctgtgctgtaagtrtgaaatacacgtgggattttgacggcagtgggagcaaaattctcccaattttttttttttttttttttttttcagacggaggttccgctcttgttacccagcctggagtccaatggcgcgatctaggctctctgcaacctccgcctcccgggttcaagcgattcccctgcctcagcctcccgagcagctgggactacaggcatgtgccaccacgcccggctaactttgtatttttagtacagatggggtttctccacgttgctcaggctggtctc

SEQ ID NO: 760860 - DNA, 616 bp, Homo sapiens
gaaacgatcttttggaatgatcacgtcataaaatatgaaacttatcatgaaggaaagcatgtaactttaaggagagatgtgtgctaaccaatattggaaaaatctgagctggttaaaccagggtgtgaatgagcttaagaccataagttcacctctggcattggtcggagaaactagaatcctgggattcaagaagacagcaaaagctgctttagttatccttgtgggcatttggtcttcaaagcacctccagagtgttccatcattctatcacatagtaggagatcctcagtaacatagtttacatcttctagggagcacttattctattttcagctccctaagatgttggaaccttctacttgataagctgaactatttctttcagttttggtcatcagtatctcgctcctacaatctacttttccacagtgacttcagatgctgaggtcacaggcaaatgatgggcattcagsgtgaacagtggcagaaatctcacatccatattacagttttctgttacaatcatcagaaggaatcatcataagaaacattatttctgaatacatagagaaaccaatatggccttcctggtcttactcatgcacctcagagc

SEQ ID NO: 760861 - DNA, 601 bp, Homo sapiens
actgtatttaggttttaggaatacaatttgattaacataaccttcccaaagagaacactagttcatcaaaatgatctctgtaattggtgaaattttagaatatttgtgaaatagtgaataagaacacctatataaccctgcctataatatcctgcaacagcaagaatctgttcttaaagaatgtgtgcttcaaccagtatccatggaagtgccttcattttctctgcggcctaggctttccagcccaggacagcagcattcacccaggggttctggtacatacatttgtccctcttgctctgctatcctcctgaccacatccctggcttgctttgtgtccagacagacagatcctaattgcagtacataatgaaaactttaatagagttcatgggacagtgaagaatgaaatttaatataatcctgaagcaaaggaaaatttgacaaaggatatggctgggtcyataagcaaatggtaatgggtgaggggaataaagggaaaattgggctcttcagggttgggaagcagaagaggaacaggtaggcaagaaggaatgggaggacacagaaagtgaggtgaaatgaagtcccattataatat

SEQ ID NO: 760862 - DNA, 646 bp, Homo sapiens
aaacatctcaatgccttaaagagcagtattgctgcccgcctgtcccacctccagccctaaggcggtttttcccctatctcagtagacgggacatacaatcgggttttataccaaggcattccattgcccagggacgggcaggagatagatgccttcctcttgtctcaactgcaaagaggcgttccttcctcttwtactaatcctcctcagcacagaccctttacgggtgtcaggctgggggatggtcaggtctttcccttcccacgaggccatatttcagactatcacatggggagaaaccttggacaatacctggctttcctacgcagaggtccctgaggccttccgcagtgtttgtgtccctgggtacttgagattagggagtggtgatgacccttaacgagcatgctgccttcaagcatttgtttaacaaagcacatcctgcacagcccttaatccatttaaccctgagttgacacagcacatgtttcagggagcacagggttgggggtaaggttacagattaacagcatctcaaggcagaagaatttctcttagtacacaacaaaatggagtctcctatgtctacttctttctacacagacacagcaacaatctgatctctctttcttttccctacactcaa

SEQ ID NO: 760863 - DNA, 646 bp, Homo sapiens
aaacatctcaatgccttaaagagcagtattgctgcccgcctgtcccacctccagccctaaggcggtttttcccctatctcagtagacgggacatacaatcgggttttataccaaggcattccattgcccagggacgggcaggagatagatgccttcctcttgtctcaactgcaaagaggcgttccttcctcttttactaatcctcctcagcacagaccctttacgggtgtcaggctgggggatggtcaggtctttcccttcccacgaggccatatttcagactatcacatggggagaaaccttggacaatacctggctttcctacgcagaggtccctgmggccttccgcagtgtttgtgtccctgggtacttgagattagggagtggtgatgacccttaacgagcatgctgccttcaagcatttgtttaacaaagcacatcctgcacagcccttaatccatttaaccctgagttgacacagcacatgtttcagggagcacagggttgggggtaaggttacagattaacagcatctcaaggcagaagaatttctcttagtacacaacaaaatggagtctcctatgtctacttctttctacacagacacagcaacaatctgatctctctttcttttccctacactcaa

SEQ ID NO: 760864 - DNA, 559 bp, Homo sapiens
aactaaccttatgccaggaaataaaagctggactattgacttaattaggaaatttcacctttacaagggtgaaaaatggacatggaagagaatatgcaccttcctttttggaaatataaaattatgttctttttaatgattttttctaagagaggttcaaggagtcacatcattaaaggagtcagtgaatttaatattacttatgacatattgtaactataataaaatacatacttgttctgtgtcwggtcctaattccaaaaactggatgccaataagtgtttatattactgagattatttagactgcattacaggtatactctctcatctcctcatgaccagtcttctcaaatcatatgccccaaattgactcagtttttatgtcttaaaccaacatcagaatgtctgttcaaaactctacagatgtaaattctgaagaaatcctaagactatatttatatatataagcaatatgtgttttaaatccacatattcaatactttaagctgtaacaagccttgaaatcctgcgtgtgtatgtgcgtgtgcatacatgaa

SEQ ID NO: 760865 - DNA, 640 bp, Homo sapiens
tgagatgtgatttgacaaacgagtagaaagatggagggaagagcattacaatcttacagaacagaatgtacaaagaactggccacagtggcacacattatctgtaaaatagttaaaggatgccgggtgtggtggctcactcctgcaatccccgcactttgggaggctgaggagggcggattgcctgaggtcaggagtttgagaccagtctggccaacatggtgaaaccccgtctctactaaaaacacaaaaaaattagccagacgtggtgtcatgtgcctataatcccagctactcgggaggctgaggcagggaggtggaggttgcagtgagtcgagattgcaccactgcactccagcgtgggagacagagtgagactccatcttaaaaraaaataataaaataaatgaaaaataaaggaaatcagaatggctgagatacatggtgaaaagcagggagtgtcaacatataatggttgaaagattagtgagtaatacttgaaaatcatctgaaattccaaagagttcagactttggtccaaatatcttgggcaaagttaaaagattttagcagaaagtcaatattcattttagaaagaagtactacctaacctattgtttcttcttgtaatttttgtgtac

SEQ ID NO: 760866 - DNA, 588 bp, Homo sapiens
atctcattacctgacttcaaactatactacaaggctacaataaccaaaacaacatggtactggcacaaaaacagacacgtagaacaaaggaacggaatagacatctcagaaataagactgcacatctacaaacatctggtatttggtaaaactgacaaaaagaagtaatgggaaaggattccctatttactaagtggtgctgagaaaactcactagtcatatrcagaaaattgtaactggacccctttccaacaccttatacaaaagttaactcaagatgaattaaagacttaaatgtaaaaatcctaaaatataaaaaccctagaagaaaatctaggcaacacccataggcatgggcaaacatttcatgacaaaaatgtcaaaagcaattgcaaccaaagccaaaattgacaaatggaatctaattaaattaaaaaactgctgaacagaaacacacacacacacacacacacacacacaaacctaccaccaaaatgaacagacaacctacagaatgggagaatatttttgcaatctatccatgtggcaaaggtctaatatccataatctacaaggaacttaaacaaa

SEQ ID NO: 760867 - DNA, 568 bp, Homo sapiens
gcattccacgctctttctgggtgcacacttccattatttccatatattcaccaacccagaaactctaaaccctgtcatttaggttttcttcagccattggtgaatagcccaatctacagatcctttcccattcctggaggttggggaaagtagggcttatagttaaccaattcttggtctttttggtaatcagcttccgccctgaaggtatgtgcccactaagagtttcctcatcagggcataaaagactccatcatccttttcactgagaaaattccaagggttttacaaattctgtgccaggtagcagggacaaagactacrtgttttttttctttcttttttttgagatggagtcttgccctgtcacccaggctggagtgcagtggcatgatattggctcactgcaacctccgcctcctgggttcaagtgattctcctgctccaggccccccgagtagctgggattacaggcgcgtgcaccaccccagctaattttttgtatcttgtggtagagacgtgggtttgctccatgttggccaggctggtctcaaactcctgaacttgt

SEQ ID NO: 760868 - DNA, 664 bp, Homo sapiens
tgagtttttctccatgaagaatattcagaaatctctttccattttaatactatggtatcggaggaaacttaggagtaaatgatatagtaaactatttccccatttgtagagtctccacctctgtctttttacagatactattccctcacttctgaaacaggaaggaaaacaaatataaaagttatggtgaaacatggctgttgtagactgaatgttttagacatctcaaaattcatacattgaaacctaattcccaatgtgacagtatcaggagatgtggcccttgggagatgattaggtcatgaatgggattggtacccttataaaaggggacccaccctaytataagcttcctcacccagtctgccatgtaaggacgcagcaaaatctggccatctacgaaccaagaagtaggccctccgcagacacaaaatttgccaggatcttgagcttcccaggctccagaatcgaaagaaataggtttatgttgtttataaaccactcagtgcatggcaattcgctatagaagcccattggactaggacaactgaccaacatttctggagcaaatgaagatggtttcatttagtttacttatacattacagcataaatttctcgtattttagaaaaccttaacctttaaaaagatttttgcacagtat

SEQ ID NO: 760869 - DNA, 619 bp, Homo sapiens
tatcctgacacttgtgtccccatgggatcctgcagaattcaggaccctgttcacacaggggaaaactctctgttggggtcctgatgactgaggagggagcttacccatggctctcctggtcatttttatttaatagtgagcacagaacctcacattttctggaatgttcccatatgattttgtgagagaaaagagaatagagaccccaaccccaagctcactgtgtcaaagggaaaattaagcttgggaactgagttatgcaatactgccttccttgttctcaaacacatagctataacttcacaaccctgtgtcatagcctcatccataagccaggttcccacagtgacagaaggccrcatgtctcctcagatgtcctccctcacaatttgctgtgaacccctaaatctttcagaatgcacatcccacctgtaaactatccctaaaagtgagtcggctcaatttcaccctgacaatctcaattaccagcttattttcatagttctgggacaaggtcaggaccagaaatcatccctctgcctatcctgagatgaatgaatcattgagttttcctctactccactccctctattcacatgcttactttatcttatgtaaa

SEQ ID NO: 760870 - DNA, 572 bp, Homo sapiens
ttattcagcatactgggtcttactcggttcccttccattttaagtgagctattttcattccaattttgcaagttggatttcactaaaatcaaaacatttagaaaatatactaaccatgattgttctaaaaagtaatggttttttatgtctaggaaataaatcgaagctctgttttggtaaagtgcagaaaacaaatcagcatctttataaatagattttactgctggtttagaaattaccttatgtgctttrtagatgatggaaaatgaaatcagctgcagttagcagtgtgcatgcatcgtacttgctgtgtcactttcagaaagattatggaatattggcaggtcaggattctcaaaatgataagttccaagaagaggctaaatgaaaaagaattttaaaagcaaggctaattgtttaatatatacatggacgagttatggggaaatcctggactgggagctagcagatctatgttctgacttttactaagtcattggctgctacagcaggccaagcaaacataactgtcaaggctgcctgggagttgggttgattggcaattggcacag

SEQ ID NO: 760871 - DNA, 621 bp, Homo sapiens
ttccttgacagattgtcagcacctctaagacaacatgtagatattgctcattattaactcatttcatcttttcatgataaattacaaaaatttaattttcatttttaaaatgcaaaccattatgccttgtattatggcattcttgcattactataaaggaatacctaagcactacataatttatactgaaaaaaaagattgacttggctcacagttctgcaggctgtacaggaagctttgcattggcagttgcttggcttcaagaagggtcctcagggagcttttacacatggcagaagatgaagcaaaagaaggtatgtcacatggccagagcaggagcaagcagggagaggtgccacacacttttaaacagccagatgtaatgagaactcactcactcttgcaaggacagtgccaagaggatgktgctaaacatgagaaatcagccctcatgaccccatcacctcccaccagaccccgactccaacactgggaattacaattcgacatgagacttaaaggggacaacatccaaactatttcattccatccctgacccttcaaatctcatgttcttctcacattgcaaaatacaatcatcccttctcaatagtcccccaa

SEQ ID NO: 760872 - DNA, 621 bp, Homo sapiens
ttccttgacagattgtcagcacctctaagacaacatgtagatattgctcattattaactcatttcatcttttcatgataaattacaaaaatttaattttcatttttaaaatgcaaaccattatgccttgtattatggcattcttgcattactataaaggaatacctaagcactacataatttatactgaaaaaaaagattgacttggctcacagttctgcaggctgtacaggaagctttgcattggcagttgcttggcttcaagaagggtcctcagggagcttttacacatggcagaagatgaagcaaaagaaggtatgtcacatggccagagcaggagcaagcagggagaggtgccacacacttttaaacagccagatgtaatgagaactcactcactcttgcaaggacagtgccaagaggatgttgytaaacatgagaaatcagccctcatgaccccatcacctcccaccagaccccgactccaacactgggaattacaattcgacatgagacttaaaggggacaacatccaaactatttcattccatccctgacccttcaaatctcatgttcttctcacattgcaaaatacaatcatcccttctcaatagtcccccaa

SEQ ID NO: 760873 - DNA, 563 bp, Homo sapiens
agaggctgaagtgagaggatttttttaagcctgggagagcaaggctgcagtgagccatggtcgcaccagtgcaccccagcctagatgacagagaacctgtctcaaaaagtaaaaaggagaaaatctaaaaagaaatgtattaaatcaagacgtgtagacatagaaaataatagagacccctctctccacaaaaccttgtatatatggtcaaaatgatcttcaacaagggtgcaaaggccaaactatggagagggaataatagccccctttaacacaaaaacggtatgaagatttgctatcaacatgtaaaatatagaagtcagaattgtagwttatactatatttttttaaaaactcaaaatgtttaagtctgaaagtcttacacaaaaatataagggaaaaatatccaaaattatgccatggaatttggcaatgggttcttgactgccagcagccccacatccctggagcatccatccgctcaccgctgcctggtgctgggtccttccacacctgtcacactgctttgtgcggggccctgaggggcacgagccaggacacca

SEQ ID NO: 760874 - DNA, 563 bp, Homo sapiens
agaggctgaagtgagaggatttttttaagcctgggagagcaaggctgcagtgagccatggtcgcaccagtgcaccccagcctagatgacagagaacctgtctcaaaaagtaaaaaggagaaaatctaaaaagaaatgtattaaatcaagacgtgtagacatagaaaataatagagacccctctctccacaaaaccttgtatatatggtcaaaatgatcttcaacaagggtgcaaaggccaaactatggagagggaataatagccccctttaacacaaaaacggtatgaagatttgctatcaacatgtaaaatatagaagtcagaattgtagattatactatatttttttaaaaactcaaaatgtktaagtctgaaagtcttacacaaaaatataagggaaaaatatccaaaattatgccatggaatttggcaatgggttcttgactgccagcagccccacatccctggagcatccatccgctcaccgctgcctggtgctgggtccttccacacctgtcacactgctttgtgcggggccctgaggggcacgagccaggacacca

SEQ ID NO: 760875 - DNA, 545 bp, Homo sapiens
tgctaactttgggtttagttagtttctctttttctaattgtttatttgtaaagttaggttgttcgagttagatctttcttattttttaatgtaggtatttaacactgtaacatttccctcttagcacttcttttaytgaatcctgtaagttttgttgagttgtatgttcatttttgtttgtcccaagatatttttaaaattcccttttgatttcttcttttacccaatggttgtttaagcatgtgttgtttagtttctgcatttttgtaaatgtttctgttttctttgttattgacttctaattttattccattgtggaatgagaagatacttggacattatatcaaacttcttaaatttgtagtatgccttgtgacctaagatttgatctatctcagagaagattctgtgtgcccttgagaagaatgtatattctgctgctattggatggaaagttgtgtatcctgtcgtgtttaatctactgtgttgttcaagtcagctgtttcctctttttttattccctcctagatgttctatccattatt

SEQ ID NO: 760876 - DNA, 545 bp, Homo sapiens
tgctaactttgggtttagttagtttctctttttctaattgtttatttgtaaagttaggttgttcgagttagatctttcttattttttaatgtaggtatttaacactgtaacatttccctcttagcacttcttttactgaatcctgtaagttttgttgagttgtatgttcatttttgtttgtcccaagatatttttaaaattcccttttgatttcttcttttacccaatggttgtttaagcatgtgttrtttagtttctgcatttttgtaaatgtttctgttttctttgttattgacttctaattttattccattgtggaatgagaagatacttggacattatatcaaacttcttaaatttgtagtatgccttgtgacctaagatttgatctatctcagagaagattctgtgtgcccttgagaagaatgtatattctgctgctattggatggaaagttgtgtatcctgtcgtgtttaatctactgtgttgttcaagtcagctgtttcctctttttttattccctcctagatgttctatccattatt

SEQ ID NO: 760877 - DNA, 610 bp, Homo sapiens
gcgcccggcccataattggaaatgtttgtactgttagatctaagagtattttatgtggtataataaaagattaatttagtgaacctcattagataattagcatggaatatattatgcactgccatgcaggggcctaagagaatggtccacacgtcttgcgaagttgatatgaagacaggcaacaagacagtctagctgagtaaaagtctgtagacatctctaaggaggagtggttagagaatgccctgackgtggatagctggcatattttaccccagaaagaagagcacagagtggcagagagtacttgagatttaaataagaaaagaggatgaaaaaattactttcactaattataaattttctcaagaatggacttattctctattttctattgcctcttgagaaatcattattttgcattcagtcaacatgattattaagactaattgtggagggtgttcaaaatggaaaaacagcggtccctaggattatattgtatttatgaatgatcactcatttgtaacttttccttcagttagatgttttttaatgcaaaaataccttttaagcaccagtacaatttgtgaaacgaaatgtgaaattcagg

SEQ ID NO: 760878 - DNA, 599 bp, Homo sapiens
agggttttctctagaggcaggttataggatttttttgtctgactggaataaaacaaaattaatcaatattttctgcaaccaatggcttttgacttagtcatctattaatatctatcaatcactataacctcagtcctatttcctccattcttctttttgctatcataaaaactggtccatttttttcctgttagatctatatgtttcacctcttttcttttcatccaaacaactggtcatcaacttagtacagataatgcaattgatccaaaccctayagaactcactgtttcaatttacataacttacataactgtcaagctgaaatcactctcaaattttttaattcaaaattttaatttcatttaatcatatttatttattcattaattaatttattttgaaaataattttaacttgtattttacattcaggggtacatgtgccagtttgttacatgggtatatcccatattgctgaattttggggtatgaatgatcccatcatccagatgctgatttggtatggtttgactctgtgtcaccataaaaatctcatgttgaattgtaattcccaaagtagggggaatgacttggtgg

SEQ ID NO: 760879 - DNA, 634 bp, Homo sapiens
gtttgtttctattttaaacagctctagtcaggaagtgttagagagttctaaacaggaaatgttccaacacaccatctaagcatgaagcaggagacacccataattgagtttgctgccaccaaccccaacagcaagaattccagtcctgctgctgcaaagtaagtgtcactctgattttattgctgctgtgtaacccagttttagactctctggttstcacttaatgttctaaaaaagtattaaagagaaaattttattctggtgatgagcccatccactgcagccatctcaacatcataccaattataagcctatcatttaaaaagaaagctgttagtttaacttatttatccaaatatcagtattacataaacatatttgtcatcagactttggacttatgggttaaatagcatataaatatgattagagccttaaagtttacacttctctggttcgctcaaatttttttcaaaatagcatatgcctttctaaacaatggttagtatatttttcaaaatgaacattaaaatgtatattttccaaaaacaaaatacagctcccattggtaaatgatgctattgagacacaacagacaacttctcttgggaaccatttaatcagtgctcactttt

SEQ ID NO: 760880 - DNA, 634 bp, Homo sapiens
gtttgtttctattttaaacagctctagtcaggaagtgttagagagttctaaacaggaaatgttccaacacaccatctaagcatgaagcaggagacacccataattgagtttgctgccaccaaccccaacagcaagaattccagtcctgctgctgcaaagtaagtgtcactctgattttattgctgctgtgtaacccagttttagactctctggttctcacttaatgttctaaaaaagtattaaagagaaaattttattctggtgatgagcccatccactgcagccatctcaacatcataccaattataagcctatcatttaaaaagaaagctgttagtttaacttatttatccaaatatcagtattacataaacatrtttgtcatcagactttggacttatgggttaaatagcatataaatatgattagagccttaaagtttacacttctctggttcgctcaaatttttttcaaaatagcatatgcctttctaaacaatggttagtatatttttcaaaatgaacattaaaatgtatattttccaaaaacaaaatacagctcccattggtaaatgatgctattgagacacaacagacaacttctcttgggaaccatttaatcagtgctcactttt

SEQ ID NO: 760881 - DNA, 634 bp, Homo sapiens
gtttgtttctattttaaacagctctagtcaggaagtgttagagagttctaaacaggaaatgttccaacacaccatctaagcatgaagcaggagacacccataattgagtttgctgccaccaaccccaacagcaagaattccagtcctgctgctgcaaagtaagtgtcactctgattttattgctgctgtgtaacccagttttagactctctggttctcacttaatgttctaaaaaagtattaaagagaaaattttattctggtgatgagcccatccactgcagccatctcaacatcataccaattataagcctatcatttaaaaagaaagctgttagtttaacttatttatccaaatatcagtattacataaacatatttgtcatcagactttggacttatgggttaaatagcatawaaatatgattagagccttaaagtttacacttctctggttcgctcaaatttttttcaaaatagcatatgcctttctaaacaatggttagtatatttttcaaaatgaacattaaaatgtatattttccaaaaacaaaatacagctcccattggtaaatgatgctattgagacacaacagacaacttctcttgggaaccatttaatcagtgctcactttt

SEQ ID NO: 760882 - DNA, 587 bp, Homo sapiens
  misc_feature 560: n = A,T,C or G
ccattggtaaatgatgctattgagacacaacagacaacttctcttgggaaccatttaatcagtgctcacttttgcactctttccagaaatgtcaatggctttgaaatatagaagtatattatacaaataaacttatacttattcagtattgtgcaatatttagtatttcttctagccatctcttgctgaatagtaagccattccaaaacttacggaattatttattgtttaatattgtttattgttattatttgtttagtaattttaataacgttatttctcatggttttgtgggttgatgggcactacaaaagttctcttttggagtctttcttgcagttgcggttgsttggctgctgctgaagtcacctgaaagctcaattaggctaaagagtctagacgggtcacttacatggttggcagtgcatattggctgctgagtgtgatgcctatctgacctctccatgttacctggagtgctcataacgtggtagttgtcccaagacacacaggcaaatactataaagcttcttaggacctagcctggaggtcctagaacnagacttctgctccatcccttttggaaa

SEQ ID NO: 760883 - DNA, 509 bp, Homo sapiens
  misc_feature 20: n = A,T,C or G
agcctggaggtcctagaacnagacttctgctccatcccttttggaaaagcaagtcattgtgaccagcacagattcaagaaatgggagattcgactctgcctgtcaatgtaaacagcagcatgtgcatgcagggaggaaagaaatcgagggcatcatctagaagactatcatatcacaccattattccaactaatgaacattatgttttagatgggtagyactagctactcatctctcccccagaaacccaagctaagcatggacatattgaagagaatgtcagcaccattaaaaaaaaactctagaaaaatcacatgtgatgactgaggttaattcagtctgtcaattacatcaatataattgccttcttgtagccctaagtatggtgaagcagaattgaattctacaaaagtctttcatctgttttcctatggaataattaacaaacccaataaatgtataaatagcatgaagtccgacttattttagatttttacctcataatttca

SEQ ID NO: 760884 - DNA, 434 bp, Homo sapiens
agattcgactctgcctgtcaatgtaaacagcagcatgtgcatgcagggaggaaagaaatcgagggcatcatctagaagactatcatatcacaccattattccaactaatgaacattatgttttagatgggtagtactagctactcatctstcccccagaaacccaagctaagcatggacatattgaagagaatgtcagcaccattaaaaaaaaactctagaaaaatcacatgtgatgactgaggttaattcagtctgtcaattacatcaatataattgccttcttgtagccctaagtatggtgaagcagaattgaattctacaaaagtctttcatctgttttcctatggaataattaacaaacccaataaatgtataaatagcatgaagtccgacttattttagatttttacctcataatttcaaagcttatag

SEQ ID NO: 760885 - DNA, 551 bp, Homo sapiens
cacacattttcaccaggtgaattttaaaggctataagagttcataaaatcttagcatcctgagtcatttgagagtctgataaacatcatttaaatacgtaatttaattgtttctcttttcttgttagagaaaggtggtgcaaacttattcctggaagacggtcagccatattaataatgascaaaatgcctattgagttggttttttaaatactaagaaaatgacttttgaagttaaaacacatgctaactgttgcttagttttaaatatatatatatggagtggaacaaaagttcccactcaacagcttactgaaaaatacaaaaaggaatgcagttttcagcaggttctatttgccataaaacattttcttttcttaccattgttttatttttttctttctggtctccccctcttgccaacgttcacagctggacatctttgtccatctttcaggtactttgtgttgcatatccgtacgtgaaacacatatatgcataactattcaggtttccctcctgtctccattgttggcagaattctcattcaag

SEQ ID NO: 760886 - DNA, 551 bp, Homo sapiens
cacacattttcaccaggtgaattttaaaggctataagagttcataaaatcttagcatcctgagtcatttgagagtctgataaacatcatttaaatacgtaatttaattgtttctcttttcttgttagagaaaggtggtgcaaacttattcctggaagacggtcagccatattaataatgagcaaaatgcctattgagttggttttttaaatactaaraaaatgacttttgaagttaaaacacatgctaactgttgcttagttttaaatatatatatatggagtggaacaaaagttcccactcaacagcttactgaaaaatacaaaaaggaatgcagttttcagcaggttctatttgccataaaacattttcttttcttaccattgttttatttttttctttctggtctccccctcttgccaacgttcacagctggacatctttgtccatctttcaggtactttgtgttgcatatccgtacgtgaaacacatatatgcataactattcaggtttccctcctgtctccattgttggcagaattctcattcaag

SEQ ID NO: 760887 - DNA, 615 bp, Homo sapiens
tatgaatttatcttattttattacatcaaattgtttgtcagggtcatattttatttagcgttccactaatgactacttgaaataaatcagagaaggtaagtcccataacagcttatgatctaggtcagtctcttcagatgaagataatgaagtgatttgaaaaactgactctattactgaatagtggtatgcttacttgagatagattatttatagcccctgcaaacaagagcagagttattttatattactgagacattttgaacaagaatgttagacagagtgaattgaataacttttcttaggatttagctcattttctatcatttcacatgtgttgacttttaaaaatctatttttaattatttcaactggcaatttaataaatacatttgcataatgtcctgaaagttcagggtagatttgtatgtgtaacgttctcaaaatagaggggagaaytgttgggaaagctttgcatgttttatcttaagcaatactttttccttaaaaccaaagacattgaaaattacagccacaggtggatgtttgttttgagctaaaatagttaacagtctcatttatgagtccttgctctttccatttagccccatcaaa

SEQ ID NO: 760888 - DNA, 538 bp, Homo sapiens
attggtgccctgaaatggaagagaaacaacagtcaactttatatgaacaggatgaaatagcatacaacaggatgatattaacatatctctgagcctgtgagggacagggaacagacttagagcaatccacccttgccgttaagatctattttgaagtgagacaggcgcttgtctcaaaggtcagggactaaatgtgtcttagagaagtcatcgtggttgttttaccttttcatccacctttgaaataaaagattagagataagatgaaatctaactagatccttgctaggagaatgaagttttaaaaggagagccatagtcacagctgtcttcagagtaggtagatgccaagtcttagggaagtacaggattaaccatgttgrtaatgacagaacctaaggtatccccagcagtgttctttaagagtgtaaaaaacaaggattaggagagcaggtgattggacgcagctgctgaataatcttcttaacctcatctttactccacagggagaaaaataacaggaaaataaaagcttcca

SEQ ID NO: 760889 - DNA, 613 bp, Homo sapiens
tccatgcctgagtaccttcaaacagaagaggctaaccagctgaagaactcagcagatctctctgggatggtactcagtgcaataacaggcacaacagattgagttaacgtggtatatggtagtgctggaatagagagggtcagtgttgtaggatgtcagataaatgaatcagtttgatccatggaatgggctgaaggttgagagagattgataccctgagagaggagtcagccaaggccatattcttctcgcctccatgttgtccctgaaaamcaaaaaaagaatgaggggctggagccccattctgactttcctctctctaagcaagatggcgctcttcattattcatgaaaaatacgatttccatagaactctgtgtccattcctatgttattcattttttttaaagtgactaaaatattttctaatgctctttgtgaaactctaataacgaactttcagtgagtgattctcaggttactctctcgtcagtagccttcagccaaggacggatgccaaattttagacctgtgattaccggaggttatcatctgatctgatgactttagagactcatcattgctcctcaaatcagttgtgacacaaaggcttg

SEQ ID NO: 760890 - DNA, 629 bp, Homo sapiens
cttcttgtgagagcagttggagttatacagagcaatattttgatttgttttgagctacactcatgtttacttgctctgtgaatggcttactgatttttctcttctactttctaactttacaccaaaaccactattagctccccactatttaaaaaaaataaataatgaggtcaaacatttgttgttgtcatgggcgacatggtgtgtactggtgtgggtgtgagagtgtgtatgtgtgttttgstgtgtgatccaggcatataatagacttctaatacagcttcactattaagatgacaactgctgaaattcagtactgccttttgccctctctctgatttccttatttctctcttagtgtatcagccatgggaagacccaatctttcccttacttatgatgcatctttactggagttgacagctcctttctttgcccatattctcctgcaacacaagtttgtccatagttccatcccctgagaaaacttagacttcaagctgtacccccttatctattatctcttcagtacagaatttcattctttttggaaaattccctccacatatcctagcatctatggcattgtcatttgtggactgatctggccctgacttgtcctaaagcct

SEQ ID NO: 760891 - DNA, 679 bp, Homo sapiens
aatcatagatgaccttagaacaactattaactttttgcaccagttgagatataaacatacccacgagtatattagtttaataaatgtctgagtgcctacctagatgctaggagtaaaaagagagtgataaataaatcaaacgtagatctaccacttagggagtttaaagtctatcagagggagtcaagtaacagataaataacgaaatttgtgaaaaattggaaggctggtatttctgacaaaaaatcatttcctctgagtttcacaggatgagaaaaacaggcacgtgaagatcaagggggagagtgcttcagggaaagggaaatgcatgtgaagaatgtatacaggcatgagagaggttttattgcctaaatttaggaagagacaataacggctttttatggtggagtcaaagggagctaagaatgtatacactgttaaaatgtgcaatstaattttaatgtacaagtagtaacagatgaattaaaaattaaaaagatgtactttagaataaaataataggatatatttttattttttatgaaattgcaaacatgtatatactattttaccactttcttttaaagcataagtctagctaggcatggtggcatgtacctgtagtcccagctactcgggaggctgaaggaagaggatccctcgagcctgggagttcaag

SEQ ID NO: 760892 - DNA, 532 bp, Homo sapiens
acacctctttagaagtacttaggtgttttggattggtttctttcttctttcttttctttctttctttttctttctctctctctctccctctctctttacttccttccttcgttccttccttccttctttttttcagagtctcactttgttacccaggctggagtgcagtggtgcgatctcattgcaatctccgcctcyggggttcaagtgattcttgtgcctcagcctctggagtagctgagattacaggtgtgcaccactgcacccagctaatttttgtatttttagtagagatagggtttcaccattttggccagtctggtcccgaactcctggcctcaagtgatccaccctcctcggcctgccagagtgctgggattacacgtgtgagccactgcgcccggccctggtttggtttctttcatcacactcacctaaggctacagaaatatcctttgtagtgtcatttgattgtatacatactggcagaagtcaagagggaagctacttgtttttttgtacaaccctgatg

SEQ ID NO: 760893 - DNA, 532 bp, Homo sapiens
acacctctttagaagtacttaggtgttttggattggtttctttcttctttcttttctttctttctttttctttctctctctctctccctctctctttacttccttccttcgttccttccttccttctttttttcagagtctcactttgttacccaggctggagtgcagtggtgcgatctcattgcaatctccgcctccggggttcaagtgattcttgtgcctcagcctctggagtagctgagattacaggtgtgcaccactgcacccagctaatttttgtatttttagtagagatagggtttcaccattttggccagtctggtcccgaactcctggcctcaagtgatccacyctcctcggcctgccagagtgctgggattacacgtgtgagccactgcgcccggccctggtttggtttctttcatcacactcacctaaggctacagaaatatcctttgtagtgtcatttgattgtatacatactggcagaagtcaagagggaagctacttgtttttttgtacaaccctgatg

SEQ ID NO: 760894 - DNA, 636 bp, Homo sapiens
accttgaagtctggacttcctgtagagtgggtaaattctctggtagtctttgtccacagccagcatttcacataccgtcacagaatcatagaaccttaaaggtctgttagtccaaacatgcccaaatgacattaaagtttatttgaaggtcaaatgaacaactatcaaagatcttcaagtgagagcaatttaagagaaatgttctgctgaatccttctttttaataattttttccccatttaggaattttttggccactggggaaaaaatctcacttttaatagataaacctttttagggtgactgctaatgtgctgataaagttgcctgtacttgtgtttattccaattattacagaggttgcctgcatagctactcattcactcattaaatatgtattgactgcctactgtcacttctgcttttctgggcrgtggtaagagaggggcaaatgagacaaacaaggtcactgctctcagcaagcttatataacagcgagaagacaaaataagcaagcaaaacagcaaataatataattttcattaaaagtaatcacagcaaaaaaactaggtaatgtgatgatgactagatgactggggttgggtagaatgtggcagcaatattagttggagttat

SEQ ID NO: 760895 - DNA, 634 bp, Homo sapiens
aaactctcaacatatactcaatcctctggattcttagatgtttacaaagaaaaaggggacagccttgtattattttcctaaaaaacataggcgataggagactaaagcagatttcttcctttttcttaagagaacggctttagtctgagaaagggtaaagaagtaacatcccagtaaataaaaaaaaacagcaacctactactaccaacatgtatgagggcagactacgacttctgtattaaggggaatgatgaatgttttcacattatgggaaccattttaagcacaaccttaaaatagtgctttagagataggtgaagacatcgagaaatttgtctctacaytttaaaccttttctctcccacaaggattttttagtaagaatatgtttgtactagagctaagagaatgtgaaagaaaatttctagccttgagtgttgctgccacctacatggtgggaagactacaaacaaaatctaacacctttcagacaggcatcagctgcagtatgttttctatgaaaatgtactttagaaatccccaaatttgtttatttacttcactatcctgaaggcatgttagtatttgttagtttcgcctcattttctatctcaaatacttgcagacattggag

SEQ ID NO: 760896 - DNA, 606 bp, Homo sapiens
tattagttcttggtcagatgcatggtttgtgaagatttttcacctgttttgtgggttatctgtttattctgctgattatttattttgctgtgcagaagcttcttagtttcattaagtctcatctattttcttcgtttttgttgcatttgcttttggattcttggtcatgaaggctttgcctaagccaatgtctagaagggttttttcaatgttatcttctaggmtctttatgatttcaggtcttagatttaagtctttgatccatcttgagttgatttttgcataaggtgagagatgaggatccagtttcattcttttacatgtagcttgccaattatcccagtaccatttgttaaataaggtgtcattttccactttatgtttttgtttgctttgtcaaagatcagttggctgtaagtatttggctttatttccgggttctctattctgttccattggtatacgtgcctgtttttataccagtaccatgctgtttttcagtgactatagccttgttagcacagtttgaagttggataaggtgatgcctccagatttgttccttttgtttagtcttgctttggctatgtgggctcttttttagctc

SEQ ID NO: 760897 - DNA, 592 bp, Homo sapiens
caaattatttcattattgctaatagttgagggctaactggcaatgagaagaaaggtaatacgtaaaggttttagcataaaggtaaacattaggaaaaaaaaaaactaccaaatactccctcaatacctacatacagaaagtgagagagaaagagagattttgaggaaaataaaatgaaatagatgacatagtaaaagaacatatatagtttcatatatttgtgtctatgtacaaacttaccawctttatcaataaatgttaatggacttaattcacctattagaataaaagagattaagattgactaacaaagtaaaatctaacactatgttgtttttaaaaagatacatcaaaaacaaagagttaagcaagattaaagataaaaggatagacaggatataaataaatttttaaaaagcagtggtcacaatattattgagcatggtggaatgcaaaccaaagagcaataaataaagacacagagaagagtatttcgtaatactaaagactgcaattcacaatggaggtatttcaatgactaatatatgtgtaagtaataacacagctactttaataaagcagaggctaaaga

SEQ ID NO: 760898 - DNA, 602 bp, Homo sapiens
atgttactggactaacatatatcactgtgttcctaggaaagccctgatttatgccagttgcctcaagcctaattgctaaacagcagtacttctcactctagaaagtgtcatggtttgcactaaaaactctatcgtgacttcactaaggtctcagaactgagatgcaacacaggaggaaagcgctgaatcagttgaggttaagagttttctacctggaaaaataagaagttaaatctaaaatggaaattaaattcattaatagagaaaataattatgtttttggcactcctgatagtgtgtgctgacatttcaaatctttcctaatttaaaaagcactcaaacctsagaagtttacacactcaagtccatctcactaagattacttcaatataataggatatataaagttttaatattttatgtacttaatttgtccctcaactttttagagtgcctttattctattagcaaatatagaattcactaatttattgttataatatggtggagagcaagggatgctttacaaaaggcttcacaagccctgctaagggaatttggatggtgttcaaggaagtcaaataataggtttgtgttgtaga

SEQ ID NO: 760899 - DNA, 616 bp, Homo sapiens
aatcattttaaaaacattatattcttccacactctctcttcttatctaattcccagacttcactctccctaaagatattattaccacagtcctttgtttgagattagaacttcataaatcttcagttctactcttttattggcattttagagttgtattatttgattttgagtatcataaactgcaytgttcagaacacctggaatttttaccttcaataaatgagacaactggtgtagcacattcaaccaaaaggacttcatttgaaattaattctggtaaggatatagctatttctaaaacttaaatgcactactaagacctagtattagttctcctctctctccaaaaatattagaaattttactctatttttaaacttcctgaggaaaaaagcaaacatattgaaagcttttattctgtccagaacccaaattcatatcccaaatataaatatataaatcaaagtaattaaaaaaatcaaaatttaacatagttttactttgcttaaagccgtcagcaaagagggtattcctctacataaaataagtgcatactttgctgcattctggttctatttcctcatacaaataaaggaggaaaatgattaatttct

SEQ ID NO: 760900 - DNA, 632 bp, Homo sapiens
cattttaaaaacattatattcttccacactctctcttcttatctaattcccagacttcactctccctaaagatattattaccacagtcctttgtttgagattagaacttcataaatcttcagttctactcttttattggcattttagagttgtattatttgattttgagtatcataaactgcattgttcagaacacctggaatttttaccttyaataaatgagacaactggtgtagcacattcaaccaaaaggacttcatttgaaattaattctggtaaggatatagctatttctaaaacttaaatgcactactaagacctagtattagttctcctctctctccaaaaatattagaaattttactctatttttaaacttcctgaggaaaaaagcaaacatattgaaagcttttattctgtccagaacccaaattcatatcccaaatataaatatataaatcaaagtaattaaaaaaatcaaaatttaacatagttttactttgcttaaagccgtcagcaaagagggtattcctctacataaaataagtgcatactttgctgcattctggttctatttcctcatacaaataaaggaggaaaatgattaatttctccctagaaactcatatatt

SEQ ID NO: 760901 - DNA, 608 bp, Homo sapiens
aataacatatgtattacctcatataccatttttttttttttgtggtgagaacacttagaatctaacctcttcacaattttcaagaatacaatacattgttcttagctatagtcaccatgctgtacaataggtacctggagaactaaacagatcaaggaaaaaaatgaaaaacgccattcaaaagtgggcaaaggacatgaacagacacttctcaaaagaagacatacaggtggccaataaacatgaaaaaatgctcaacattactaaycatcagagatgcaaatcaaagccacagtgagatactgtctcataccagtcagaatgggtattattaaaatgtcaaaaaataacagatgttgccaggttgtggagaaaaaggaatgcttatacactgttggtgggaatgcaaattagttcactcctgtggaaagcagtttggaggtctctcaaagaactaaaaatagaattatcattcgatccatcaaaccattactggatatttacccaaaggaaaataaactgttgtaccaaaaagacacctgcactcatgtttatcacagcactattcacaatggcaaagacatgggatgatcccaggtgcccatcaa

SEQ ID NO: 760902 - DNA, 611 bp, Homo sapiens
tttcactttactttgcctataaaggtcttctgaaaagctggatgagctgtgtttccgccctccagattctctgctttctcacttggcacaatcatttctcccagcttcatcacacaggggaaggggggctggggttccagttcatttcccatctatagggaatgtggcactgatttcattcagatctgtaagtgactgatgccagaactgcaatcttagctccttatctaaactctaattgggggattaacccatggagtaggacagtatacagtgtaacaggtcttgggtccaawtaccacctcactgactttaaatgaaattctttttgttgagattttgctcacagtaataagtatttggttattcttgttaacaatagggtataatcaggtggaaatataaatttaggtagtgtccatttaaatatcaggaaaaaactttttgacaaaagatgattccgttagataggggacacctgcccacctgaattttggtctgtctttctcagaaggacacaacatttgctcagttaatgcctctcaactgtcttctctgggagataaatataatgtaattgcaaagtttaaagtaattttagaaaataagca

SEQ ID NO: 760903 - DNA, 637 bp, Homo sapiens
gtccttttcctgctgctctgccaaactgctcctcaggaatgcaagaaaaactaagtggatggaaggtatctgatcacctggtgcagtaggctactgagcggcctgtgatttctggcacctcataatatttttgtattacaaaattttttcattatacaactattattgccacattataaaaatttgggaactagagaaaggaaaaaaaatcacttatgatcccatcattcgaatgaaatcactgcattttggtgcattgcttcctctcctcccgggctctttgtatatagttccacggactgcatctatttagcttgtttatacacacctcagctcccctacaaagaatttgcagcaactaacataaataacatcagacagacaactccatgccaacatactctctcccaaaccagcttgtactcctgattcccatttctaacttaygggttccatctcccagtcatccaggttgaaaccttggcaccatcttggactcctctccctcaaccccaacattcatttccatagattcttctgtcattatccctttctcacatctgtccttcccactccaaccccccctattgattttgctaccatctagtccaggtccacaactattgcaatatttctc

SEQ ID NO: 760904 - DNA, 608 bp, Homo sapiens
taaagagtaactggagattataaatctatttttttaatctaaaaacgcagcacctttcaatgaatccacaagaactgacatcagaaaagatggaaatttactagctgaatttcaaaatgaattggaatataattggcgaataggactgagaaatgagtattaggattttgtaagcacagctcacatcttctaaacatatatccttttcaattatgataatcatcaaaaccaagtaccaaaacatacagaacttagaatcagatctctgaatttccatattattagttgttaaagtaaaattttaataaataaagaatattattcaaccatactgctttcaccaaaagtaaaattactatataaacagttttctatacttttcgtaagtaaaatgaaaatatttaaaaatttatttctcattacatttttatttttctattttcacttacatttataatgtacrtaatagactatcaatgtagtaaattcatgtatagttttaaaataaagacaagcattagtggtaatttactatattacttcttgatgcctaaagtagtaatttctaaacttcagacattactactttaggcattaagaaacattag

SEQ ID NO: 760905 - DNA, 588 bp, Homo sapiens
cctgtggagttagaatgtgctaccctttcagcgcatgtttgtgttcaccaactgagaagctccccaaaccctgtagtttagggagttttatgaaagcattatcatgtatgaatggtggattattcatttacttcccgcccactcttccctccccagaggatgagggtatggggctgaaaattctacccgtctaatcatggcttcatatctctggtgaccagtgcttctcaagaagctatccaggagcccaccaagagccttattaaactaaaagaccctcccatcacccagaaaatttcaagagatttaggaactctatgtaggatgctgctatcagccccattactcaggaaataagaatttttaaatctctgggtcagaaaccagaggcagagaccaaayacatatttatttttatatcatagttactatataaaacaatgtagcaatatctttcttttaagaattgttagctaaatacaagctgcatgagggcaagaaatttgtctggtttgtttatcgttgtatctcagtgattagcactgtgcttagcacaaggtagatactccatgttttaattaaatactt

SEQ ID NO: 760906 - DNA, 577 bp, Homo sapiens
  misc_feature 543, 544, 545, 546, 547, 548, 549, 550, 551, 552, 553, 554,555, 556, 557, 558, 559, 560, 561, 562, 563, 564, 565, 566,567, 568, 569, 570, 571, 572, 573, 574, 575, 576, 577: n = A,T,C or G
aagtgagttttacataatttatcttcaatggcctgagggtttttagatattaactatgagttaatagtaaaatacttcagtagtacacaagttaccaatactgataggtgaggcaaaaccaaagggcaacaaaatcaatgacaatcattctattttagaaaacaaaacaatgttttaatacttcccacgtgtaaaaactggaatttccaaggattaaaatataagtgttattgaaaagtgatatagaaagggtggcatattttctaagagaagttatgatayagccaaaattgtttcttttaatgaatataatttttgctcattctataatagaaatattgctgaaaaagcaatctgatgaaatagtaagtacagtataagtttctcactaaactatataagaaatacccaagtcaatcttattaaattagcagctaattaagagtataaattgacttcattgaaatgaattttaaaaacctttgttctttagaaacaccatgaaaagagaaggtaaattacagattgggagataataaatannnnnnnnnnnnnnnnnnnnnnnnnnnnnnnnnnn

SEQ ID NO: 760907 - DNA, 532 bp, Homo sapiens
aggtatttttgatgttgaagctttgaggtgttatccagcaggtgacacttaggcttataggtcagctggtagactcttgtttggttgtgtggctcccctttgtttcctctcagttgcagccttgttccctcttggtgctctgaaagtgtgggtttctctcccccttgattgctggctatagttcgcaacttggcactcctgggctgcccattgcagcgctggrgtgattacagtatttatgttccctttccagcttagaggtagcagaggaagaaattttagcagtagttgtggccaaaggtagtttgcttgactccgggggttccacctcagagatatgcagtcagcagtcactcagtgcagtcagcccaagatggagggtttgtgctgtgggcccaagcaaggagaaacctgtctggtggtgagccatggggtgtgtgtgggacccatgggaaataactggccttctctccttgggtcaactgcagcttgttggaggtgtggagaagggcctttgctccttcattagtct

SEQ ID NO: 760908 - DNA, 605 bp, Homo sapiens
acaccagtcagaatggctattattaaaaagtcaaaaaataacagatactggcaaggctgtgaaaaaaagacaatgcttatacacggttggtaagaatgtaaactagttcggccattgtggaaagtagtttggagacttctcaaagaacttaaaagcagaaccaccactcaacccagcaatcccattactgaattaatatccaaaagaaaacaccccattctaccagaaagacacatgcacttacatgtttacatggagacaacctaggtgcccattaatggtgaattagataaataaaatgtggtatatatacagaatggaatactatgcagtcataaaaaagaataaaattatgtcccttcaagcaacgtggattcagctggaggccattatctcaagagaattaatgcagtaacagaaaaccaaataccatatattctcacttataagtgagaactaaacartgggatctcagggacataaaggaactaaacaagaggtactcagggacataaagatggcaacagtcaaaactggggacttctagaggagagagtgagagggggcaagggttggaaaactaactattgggtactatgctcaat

SEQ ID NO: 760909 - DNA, 557 bp, Homo sapiens
tcaattaacataacataaccaatcatttttgtcttttctacagtctacattgttttaaaatgctgaaatacatagtttaaggccttattatatctcagtaaaagatcatatggcttcggtgtatttaaaataatataccttttaaccactttctgatttcttctgtggttcttattcaagtttttattcatttgtgggatcaatttaattgtttatattttgctggggaaaatctgtattctcatacttattggcacattatgttacaaaacagttttattytaaaacatcattttgacagctataattatttatatctcttttaatatttaaaaagtggtgatcttcaggtttttagtatatttatctctttgcctttatatgtatttcatactttattccttccagttgccttttcttatttactattcattttctagcttcataatttgaatacttaatttaggattttttttttaacttttattttaagttcaggagtacgtgcgcaggtttgttacataggtaaatttgtggcacagggtttttttgtacag

SEQ ID NO: 760910 - DNA, 526 bp, Homo sapiens
ttagtaatatctttgcacaaagtgtttttaaggatcaaatgagacaatgtgtaccaattgttgtgcgtgtgctagagaacatgttattgctactatcgttgttactatgattattattttattagtactatgattatttctctttctgaactaattgagatattcagaggattcagagaagcagagttcaaatttatccctggtacaagcttgatggaagatgtggcttatctgtacttcctgataggtgattcgtgaattagacatgtattcattcacccaggtgccagcacagctggaaatggggcatcccttgcaggccaggagaagtgagggtcctaagggaaggactctgtgaaaaragaaaattccttctcccaccctcaccctcaaagagggactgtgggcaagggggtggagatttcacttcctcggggttggagaagtgggggtgtgagacatcagaagacgcccctcataccatgccatcaacaccagcaccagttcccgtcatttcagggcttag

SEQ ID NO: 760911 - DNA, 523 bp, Homo sapiens
attatctctaactgcttaatccccccacccatcagttacaaaaacaaaaacaatctctgtttatctttcctctttgggcttcacctctcatttcttagcctgaactccatggcatgcgaaatcagcaacttcccttaggagaaactagattgtttagcttttctgtccttccaccatacctgtccagccaatctcctaccctgcagaaagcaacttccatttattttcttccatccttctctcaggggaccaagtgttcctggacaaagtcataaaatagggccaattggtttttttaataaatccacatttttcaaccttaactgggaccctcatttctgttgggaattctattggtcttttctaaccaattgcctttcatatcccatctcctgccccacttacctgaaaactttayactctcttaccccaagccctcaaactgaccactgtcactttttgcagatgaccttgctttctctcttatgaagatggagattatttaatatgagttaattgcttg

SEQ ID NO: 760912 - DNA, 657 bp, Homo sapiens
tgttaagattgatgtttctgaaaaagcagtgttgataatacatgctggagataaacagagcaaagatacctgggcaagctgcctttcccctttgcccagccctggctttggttctccccattggtcatgttcatggctctcctgcccagaaactcttttgtaacacataacctgactattccaaaaatggacagaaggtttcttctgagcaggaggacataaaaggagaaatcagtttttgctttactgtaccagttggattacttcaagttgatgaattctagtattcatagtcagttgtactgaaaattggatgcatatctaacatgtaataccarcctgggtttcttttctcccctgcttcttaaaatacttgactatccattttgtaccttgttaatggatcatatcagaaatgaatttcacaattaggtgagggaacagacttcgggatttgatatattatctttcattttgaaaagttgataaaaatattttataaaatatttaagaatttaaaatcaaggaagtcacctttgattcctctcgttattagtcagaaattcatctgagaagagcctaatctctaagccaaagtgacctgcagatcccctagctagtaaatgatagagccagaattataacccagatggcctg

SEQ ID NO: 760913 - DNA, 605 bp, Homo sapiens
ccactcaccaaggctgacttggctacagtcactgataggtgcccaaaatgccagcagcagagatgaacattaggttcctgatatggtactattccctggggtgattagcctggtggcagaatggctacattggaccatttctgtcatggagagggcagtgttttcttcttactggaatagatacttattctagatatggttttaccttccctgcattcartgcctctgcaaaaactaccatccatggacttacagaatgccatatctattgccatggtaatgccacacagcattgtttttgatcagcgaactcacttcagagcaaatgaagtgcaacaataagctcaagctcatgtaatttgctggtcttactatgttccccaccattatgaagcagctggtttgacaggatgatggaatgaacttttgaagacaattacagcaccagctagctggcaatatcctgcataactgggggaaggttcactagcagagtgtttctcccacagctaggattcacaggtccagaaatcagggagtgaaaatgggagtgacaccactcactattacccatagttacctactagcaaaaatttgcttcctgt

SEQ ID NO: 760914 - DNA, 575 bp, Homo sapiens
agttattgtgctggaaggggttatcgatactgactaccataaggaaatttggcctattacttcacagttaaggaagtgtatattagtaatacaggaagccccctagggtatcctcagtattaccatgtcctgtgattaaggtcaatggaaaactacaacaacccaattagaacaggactactgwtggcccagactcttcaggagtgatggtttgggtcaacccaccaagtcaataatcacagcctgctgaggtgcttgctgaaagcaaaggaaatatggaatgggtagtgggagaaaataatcataaataccagctataaccatgtggccagttacagaaataaggactgtaattgtcatgagtatttttccttattttgttatgaacatgtttgtgtgtttgtgtgtattacatacctttgttttcttccctctcttatccccttattatgtaacataagatgtgttgactttatgttatggcttttaagttgtggtatttcaacagaagagtaaacgtcactcaagaattttgcatcctcttctggaaaagtgttagtgcattttttgttgta

SEQ ID NO: 760915 - DNA, 575 bp, Homo sapiens
agttattgtgctggaaggggttatcgatactgactaccataaggaaatttggcctattacttcacagttaaggaagtgtatattagtaatacaggaagccccctagggtatcctcagtattaccatgtcctgtgattaaggtcaatggaaaactacaacaacccaattagaacaggactactgatggcccagactcttcaggagtgatggtttgggtcaacccaccaagtcaataatcacagcctgctgaggtgcttgctgaaagcaaaggaaatatggaatgggtagtgggagaaaataatyataaataccagctataaccatgtggccagttacagaaataaggactgtaattgtcatgagtatttttccttattttgttatgaacatgtttgtgtgtttgtgtgtattacatacctttgttttcttccctctcttatccccttattatgtaacataagatgtgttgactttatgttatggcttttaagttgtggtatttcaacagaagagtaaacgtcactcaagaattttgcatcctcttctggaaaagtgttagtgcattttttgttgta

SEQ ID NO: 760916 - DNA, 594 bp, Homo sapiens
aatttaaataccttaattctttatagtctattcagattttctatttcttccttagttttagtagtttgcatgtttctaggaacttgtccatttcagcaggttatctaatttgttggcatataattgttcatagtattctttcataatcacatttatttctataaggtttgtagtaatgtttccacattcatttctgattgtactaatttgagacttctctatttttctttagtctcattaaaggcttttccattttgttcatctttcaaagaatcaacttttgtgttcattgattttatctactgtttttctattttgcttctaaataattttcactttaatctttactactttatttccttctgctttcttcaggtttgatatgggttttttttattttcattatcttaagatggaaagttaggttattgatttggggtctttcttctttkttagtataggcatttacagctataaatttctatctaagcactaatttagctgcatcctataagcattgatatgctgtatcttcattttcattcatcgcaaagtattttctaattttctttttatttcttctttaatcccttg

SEQ ID NO: 760917 - DNA, 584 bp, Homo sapiens
ggctcactgcagctgtttatagcatggccaccagagggatcctttggaaacacaagatcccatcacttctctgctggcatcttactcagaaaaaaagccaatgtccttccagcagcctgaagatgctggccctctgrtgccccccgcccctggctctgctgccatcctctggttctgctgctgaaccacgggaacctccatgatgttttctccaacactccaggcatctttccacctttgggcctggaatgttccctccgactggggaactcttccctcagatgttcccacagcttcctctgtcccttcctcacctccttcagatcactaatctgcaaccaccttcccaatgaggcctacctgaacaacccaacacccacactctcccagtaacccgcttcccttccccttatctatctttcctgtagtctatgcatctaacaccctctgcaactgacttatttgttacatttcatgcttactgcctgtccctagaatgagattcttaaggacagggatgtttttggtttcactcactgtcatacctcaaatacctagaactgtgtctggcacacggttgacac

SEQ ID NO: 760918 - DNA, 584 bp, Homo sapiens
ggctcactgcagctgtttatagcatggccaccagagggatcctttggaaacacaagatcccatcacttctctgctggcatcttactcagaaaaaaagccaatgtccttccagcagcctgaagatgctggccctctggtgccccccgcccctggctctgctgccatcctctggttctgctgctgaaccacgggaacctccatgatgttttctccaacactccaggcatctttccacctttgggcctggaatgttccctccgactggggaactcttccctcagatgttcccacagcttcctctgtcccttcctcacctccttcagatcactaatctgcaaccaccttcccaatgaggccyacctgaacaacccaacacccacactctcccagtaacccgcttcccttccccttatctatctttcctgtagtctatgcatctaacaccctctgcaactgacttatttgttacatttcatgcttactgcctgtccctagaatgagattcttaaggacagggatgtttttggtttcactcactgtcatacctcaaatacctagaactgtgtctggcacacggttgacac

SEQ ID NO: 760919 - DNA, 573 bp, Homo sapiens
actgttgtttgtatttgaccagatccttttatcttcaagagacttaaagacttatctttccaagattcttaggcaaagcctctccctagagatcctatggaccaagtccatgtcatttatcaaaagtaccttgagtttctcccctcccagaaacattttatggctcccagatactttaggattaaagtccaaattcctcagccaggtatttgccctccctgggggatctggctctatctcactgtgccctacagttcacctcccttcgaatctctcactcaccctgaaccccagctactcccgtccactgcgagagacaggcacaagcgagtacttgggaattttcctgctgggaaagaaccaatcagggmggcatggactgcccaatagaagaaattaagaagcaaatgctggtggaggaactaagggaaaggaagatgggagaagagtttaggaaagactaaaccccaagcagcacagccaggtgccctggagtagagggagcagcaatttttgattcagaaaacttggcttttaatcttagttctgccaatgattgatcttggaatgaga

SEQ ID NO: 760920 - DNA, 568 bp, Homo sapiens
cgtgtacttcttacagagtgcctggactgcaactgctcaaggtcattttctttcccatccacgtgcactcgtccactaaacgattcacctcacctcactcttggctgttggcagtagttgctgcctgctcacagatctcgtcatggctgatgatcagagctagcctctccttgtctagtgttttcccagacagggcctggtgtttggctgaggtgcactaggacccctggccgtkgtgtactggatggcatcagttctgatgggtcagatgtccattctaacaggttggtgctggagagggagcagttgttaaatatctttactatctcccctgctccggacacctagatgcccaaatatacagcacgtagtatcgaggcaggcccttttgattgacatcagaatcaggtttgcaatggaataggagctttccttcctcctgtcactttagccccaggctccacctcagagtctggaatgctcatacctatggcaggtgaccttgtgtaacaggttggggttaatgccattctgtcctccagcatggcactgaacttagctggactag

SEQ ID NO: 760921 - DNA, 650 bp, Homo sapiens
atctcgtcatggctgatgatcagagctagcctctccttgtctagtgttttcccagacagggcctggtgtttggctgaggtgcactaggacccctggccgtggtgtactggatggcatcagttctgatgggtcagatgtccattctaacaggttggtgctggagagggagcagttgttaaatatctttactatctcccctgctccggacacctagatgcccaaatatacagcacgtagtatcgaggcaggcccttttgattgacatcagaatcaggtttgcaatggaataggagctttccttcctcctgtcactttagccccaggctccacctcagagtctggaatgctcatacctatggcaggtgacctygtgtaacaggttggggttaatgccattctgtcctccagcatggcactgaacttagctggactagagggacattttggggagatgtgctcagagtcctcctctggtcctcctcattcaccttctgtctttctaaatgactgatggagaaactactaaggccagaccaggctctcaggaaaactctgggcctttagagaaccactggggatgagttggtcttcagatatattcgttaacattattagctcaggggtaaaaaaaataactcagaggacagggc

SEQ ID NO: 760922 - DNA, 551 bp, Homo sapiens
tcctcctgtcactttagccccaggctccacctcagagtctggaatgctcatacctatggcaggtgaccttgtgtaacaggttggggttaatgccattctgtcctccagcatggcactgaacttagctggactagagggacattttggggagatgtgctcagagtcctcctctggtcctcctcattcaccttctgtcttyctaaatgactgatggagaaactactaaggccagaccaggctctcaggaaaactctgggcctttagagaaccactggggatgagttggtcttcagatatattcgttaacattattagctcaggggtaaaaaaaataactcagaggacagggcagtctagcacaatggtcaagagcatgcatgggtttcggccttccacagagctgctttatcacaagtttatcagcagggtatacaacctctccaggcctcggtttcttcatcaataaatggggatagaaatggtacctaccttagagggttctggtgaggatccagcaaatgtgtttcaaagcagttagcctagcatctggc

SEQ ID NO: 760923 - DNA, 650 bp, Homo sapiens
atctcgtcatggctgatgatcagagctagcctctccttgtctagtgttttcccagacagggcctggtgtttggctgaggtgcactaggacccctggccgtggtgtactggatggcatcagttctgatgggtcagatgtccattctaacaggttggtgctggagagggagcagttgttaaatatctttactatctcccctgctccggacacctagatgcccaaatatacagcacgtagtatcgaggcaggcccttttgattgacatcagaatcaggtttgcaatggaataggagctttccttcctcctgtcactttagccccaggctccacctcagagtctggaatgctcatacctatggcaggtgaccttgtgtaacaggttggggttaatgccattctgtcctccagcatggcactgaacttagctggactagagggacattttggggagatgtgctcagagtcctcctctggtcctcctcattcaccttctgtctttctaaatgactgatggagaaactactaaggccagaccaggctctcaggaaaactctgggcctttagagaaccactggggatgagttgstcttcagatatattcgttaacattattagctcaggggtaaaaaaaataactcagaggacagggc

SEQ ID NO: 760924 - DNA, 607 bp, Homo sapiens
agcacgtagtatcgaggcaggcccttttgattgacatcagaatcaggtttgcaatggaataggagctttccttcctcctgtcactttagccccaggctccacctcagagtctggaatgctcatacctatggcaggtgaccttgtgtaacaggttggggttaatgccattctgtcctccagcatggcactgaacttagctggactagagggacattttggggagatgtgctcagagtcctcctctggtcctcctcattcaccttctgtctttctaaatgactgatggagaaactactaaggccagaccaggctctcaggaaaactctgggcctttagagaaccactggggatgagttggtcttcagatatattcgttaacattattagctcaggggtaaaaaaaataactcagaggacagggcagtctagcacaatggtcaagagcatgcatgggtttcggccttccayagagctgctttatcacaagtttatcagcagggtatacaacctctccaggcctcggtttcttcatcaataaatggggatagaaatggtacctaccttagagggttctggtgaggatccagcaaatgtgtttcaaagcagt

SEQ ID NO: 760925 - DNA, 582 bp, Homo sapiens
tcagtattcaaggcaaacaaatcgaggggagatgcacctgtatcatcaaaacttggttggaaagtccaggtaatctctgcagatgggtcttttcattaatgctgctagccttggtgaagaaattaaatttgagcagttcttccaataatcaataatgaaaatcagtaacagattgacaccttgcatgatcaatgaaaattaataatactttgacactttgcactatccctgatttgggcacaaccagagtaggtgtgcatttctagctgtttacatttaaaagttaaaaaatataaattgtctccactttgcccagttatccttatagtataaaattagacygagagtctttctcttaatgcccccaccccctactctccaaaggaaggtatataaaacagtaaatccactttcttgggggaggaggaggggggttacattaacacagcatttgtattcatgaagtctgcaccaaacatcaggtagttactaaatatcttccccttatgtaccctgcactgtgcccagcactctggtagttaagaaatagaagccataactttccctcagagtttttgcaaa

SEQ ID NO: 760926 - DNA, 582 bp, Homo sapiens
tcagtattcaaggcaaacaaatcgaggggagatgcacctgtatcatcaaaacttggttggaaagtccaggtaatctctgcagatgggtcttttcattaatgctgctagccttggtgaagaaattaaatttgagcagttcttccaataatcaataatgaaaatcagtaacagattgacaccttgcatgatcaatgaaaattaataatactttgacactttgcactatccctgatttgggcacaaccagagtaggtgtgcatttctagctgtttacatttaaaagttaaaaaatataaattgtctccactttgcccagttatccttatagtataaaattagaccgagagtctttctcytaatgcccccaccccctactctccaaaggaaggtatataaaacagtaaatccactttcttgggggaggaggaggggggttacattaacacagcatttgtattcatgaagtctgcaccaaacatcaggtagttactaaatatcttccccttatgtaccctgcactgtgcccagcactctggtagttaagaaatagaagccataactttccctcagagtttttgcaaa

SEQ ID NO: 760927 - DNA, 607 bp, Homo sapiens
ctcccagtggaagcatcagttattaatatttacttaccaagtgatttacatctagtagaggatttatttattgatttattttatttcattttattttatttatttttcaagacagagtcttgctctgttgcccaggctggagtgcaatggcatgatccagtctcactgaaacctccgcctcccggttcaagcgattctcctgcctcagcctcctgagtagctgggatgacaggtgcacacaaccatcgatcagctaatttttgtatttttagtagaggcaggttttcaccatgttggccaggctggtctcaaactcctgaccttaagcgatccacccgccttagcctcccaaastgctgggattacaggcgtgagccgccgagccccgatggggatttcttgacaatgtcccagggtctcatgggcaacaccctgcagaccctcttttcctgcctgcagcctgcactgcctaactgaggctcagctctctgcagaagaagaagcaggttttgcctactgattctttgctggtttgggacgctgaagtgacttgtcatcagcagagacgcttcccttttctcccttcagaaccaaaaaagaagctgag

SEQ ID NO: 760928 - DNA, 607 bp, Homo sapiens
ctcccagtggaagcatcagttattaatatttacttaccaagtgatttacatctagtagaggatttatttattgatttattttatttcattttattttatttatttttcaagacagagtcttgctctgttgcccaggctggagtgcaatggcatgatccagtctcactgaaacctccgcctcccggttcaagcgattctcctgcctcagcctcctgagtagctgggatgacaggtgcacacaaccatcgatcagctaatttttgtatttttagtagaggcaggttttcaccatgttggccaggctggtctcaaactcctgaccttaagcgatccacccgccttagcctcccaaactgctgggattacaggcgtgagccgccgagccccgatggggatttcttgacaatgtcccagggtctcatgggcaacaccctgcagaccckcttttcctgcctgcagcctgcactgcctaactgaggctcagctctctgcagaagaagaagcaggttttgcctactgattctttgctggtttgggacgctgaagtgacttgtcatcagcagagacgcttcccttttctcccttcagaaccaaaaaagaagctgag

SEQ ID NO: 760929 - DNA, 607 bp, Homo sapiens
ctcccagtggaagcatcagttattaatatttacttaccaagtgatttacatctagtagaggatttatttattgatttattttatttcattttattttatttatttttcaagacagagtcttgctctgttgcccaggctggagtgcaatggcatgatccagtctcactgaaacctccgcctcccggttcaagcgattctcctgcctcagcctcctgagtagctgggatgacaggtgcacacaaccatcgatcagctaatttttgtatttttagtagaggcaggttttcaccatgttggccaggctggtctcaaactcctgaccttaagcgatccacccgccttagcctcccaaactgctgggattacaggcgtgagccgccgagccccgatggggatttcttgacaatgtcccagggtctcatgggcaacaccctgcagaccctcttttcctgcctgcagcctgcactgcytaactgaggctcagctctctgcagaagaagaagcaggttttgcctactgattctttgctggtttgggacgctgaagtgacttgtcatcagcagagacgcttcccttttctcccttcagaaccaaaaaagaagctgag

SEQ ID NO: 760930 - DNA, 601 bp, Homo sapiens
ctcatgtgttccagaaaactgttgttataggcataaatttgcagcatgactcttatggattaagaatgctgcatttctttatttctcttaatcaaatcaaatttggctccaatccagagagatctaaagtcattatggggaaaaaatgtaaattaaagtcagycatgttttctggtcccctacccctgcattgagggggtctcaggggcccagcactaagggaggccctagacttagaagggaagggggcgtcggtcttcagtccttggggtcgccctggtttcccactgattgccaggcctgatgccttcacagcctaggagctcccagtgctcctcatccctccctttaaataggcactggaatcttccaccctgtaggaccctagagaaaaagtaacctttttcccaggcagtttctgggaagctgtttcccgagatggagccgccccctcctatactgaaagcacctgtttcccctcttggacaacacaccctaattgatttcatagatttagcctcttgaaatcaaagccttctgaaatgtcccagaaatcccactttcatgtcaaccactgcggtcctgaatggaaataatttga

SEQ ID NO: 760931 - DNA, 601 bp, Homo sapiens
ctcatgtgttccagaaaactgttgttataggcataaatttgcagcatgactcttatggattaagaatgctgcatttctttatttctcttaatcaaatcaaatttggctccaatccagagagatctaaagtcattatggggaaaaaatgtaaattaaagtcagtcatgttttctggtcccctacccctgcattgagggggtctcaggggcccagcactaagggaggccctagacttagaagggaagggggcgtcggtcttcagtccttggggtcgccctggtttcccactgattgccaggcctgatgccttcacagcctaggagctcccagtgctcctcatmcctccctttaaataggcactggaatcttccaccctgtaggaccctagagaaaaagtaacctttttcccaggcagtttctgggaagctgtttcccgagatggagccgccccctcctatactgaaagcacctgtttcccctcttggacaacacaccctaattgatttcatagatttagcctcttgaaatcaaagccttctgaaatgtcccagaaatcccactttcatgtcaaccactgcggtcctgaatggaaataatttga

SEQ ID NO: 760932 - DNA, 616 bp, Homo sapiens
ctccatctcaaaaaaaaaagaaaaaaaatatatatatacacacatacttgtgtgtgtgtgtatatatatatatatgtatcatatatatgtgtgtgtgtgggtgcatgtgtgtgtgaaattagcatggcatggtggcacatgcctgtagtcccagctactcgggaagctgaggtggaaggatcgctcgagcccaggaggtcgaggctgcagtgagctgagatagcgccactgcactccarcctgggcaacagagcaagaccctgtctcaaaaaacaaaaaagatactttttttgctttgaaaaaccaatctaaaaaactaacctatttagataccaaattgcatatgaaataaaatctcaattctctttttagaataaatagatccacaaaaatgctaaggaaatatactacaacattaacgagggttacttctggtgggaagatgatgggtgatacccatctttttcacttcacttagttactaaaagaataagcatcgtcacctttaaaatcagaaaacaaacacaactaccttccaaagtttaatcaatcaactccttagaagtgaaatctaacaatcacttcaaatactctaaaattcgacagagtaaaatct

SEQ ID NO: 760933 - DNA, 636 bp, Homo sapiens
acaaaatgttaactttaaccttcgtaagagctcaatagggtaaaaatatttgcaaatttcatcaacgccgttaattgagtgcttgctatgagtcagatgctcacacttgaattcctttgtcagcttcacttctaactagctacatttacttgacaaactacacagctactcaaaacctcagttgcagtatctgtaacatgacagtattagctcatgttgatatgttgatatgaggtttacttaaggcatagtgatttgcctattgtaccaggaacccagaaacttttcatacatattattcattattacctaatttaactttcrttagaaatttctaaatttcatttaattctgcagcatttccatttccatcatcattctgtacccactaatagcactgttacatgacaaacagttattaatttgcttgtttctggtctttcctcattaaaatgcaaactccactgagggtagacattttagtctctttataggaagcattgcattcttatccctagaagagtgcctggcattcagtagattttcaattaacatttattaaataaatgaattaattaatatttttagtatctgctttgttatgggtgagactgaggcttaatgttgcaagttcta

SEQ ID NO: 760934 - DNA, 608 bp, Homo sapiens
atagcaccaagggaatgatgttaaaccattcatgaaggatccacccccatgccccaatcacctcccaccacgccccacctccaacactggggattacaatttgacatgagatttgggtggaacacagatccaaaccgtatcattctgcccctggcccctcccaaatctcatgtccttctcacatttcaaaatacaatcatgccctcccaacagtccttcaaagtcttaactcattccagcattaactcaaaagtccacagtctcatccgagacaaagcaagtcccttccacctacragcctgtaaaataaaaaacaagttagtcactcctaatataggcattgggtaaatactcctgttccataagggagaaattggccaaaataaagggaccacaggccccatgtaagtccaaaacccagcagggcagtcattaaatcttaaagccccaaaataatctcctttgactccatgtgtcacatccaagacacactggtggaagggttcccccaaagccttgtgcagctccacccctgtggctttgcagagttcatccctttcagctgctctcaagggctggcattgagtgcctgaagcttttccaggctc

SEQ ID NO: 760935 - DNA, 495 bp, Homo sapiens
aagtggcatagtattaacagtggacttagattagttgtaaatgtacagtgtaaattctagggcaaccagtggaaaaaatgtaaaagtgtaatattatgctaagagaggacagaaaatggaatcatataaaatattccattaaaaccaagcaggtagtaaaagagggaagacaaagaaaaagacaaagtgcaacaagtataaarcagttataaatatggtagatattaatccaactatttcaataatcactttaaatgtgaatggtctaaatataccaatgaaaagacagacagagtggatcaaaaaacaagatccaattttatgttgtgtgcaacaaactcactttaaaaataaagacatagattaagagtaaaaagagaaagatataccatgctaacactatccaaaagaaaagtagagtaactatattaatttcagataaaagacttcagaataagaaaatttctcaagaataaagaggagtattacctaaca

SEQ ID NO: 760936 - DNA, 625 bp, Homo sapiens
taccagattttacccaggacaacagccgatatttttggcttttgagtttctttaccaaaggtatctttctaagggtctcaatcaaaattatgacttaatcatgggtgcacgagttatctccaaagaggtggcaaacaatttttacacgatccagaatcaccctagagatagctcagagaaaggaaaacacaggacgagaaatcggaaactgtccatggaaggaaaaaggaycaataaatggcaattccctggctgggtattgaacccacgcagcattagtcaaatgggagagacttagctactgtactacggcatggggtggtgcattagcctgtatttgcattgctataaagaaatacctgaggctgggtaatttataaagaaaagaggtttgattggctcatggctctgcgggctttaaaggaagcatggtgctggcatctacttccggtgaggcctcaggacacttacaatgatgatagaaggtgatagggagccagcatgtcacatgccaagagtgagtgagagagagagagagaaagaagagagatcctagactcttttaaacaaccagaacttgcatgaactaagaactcacttatcaccaagggaatggtgttcaact

SEQ ID NO: 760937 - DNA, 614 bp, Homo sapiens
ttcttcaatcagcttgtgccctcctgtaaaaaggcttccatgaattctcttgtcacaggaaatattgatcaaatcacatttttgatgccacgaagctgagggcagacctgggacagatggtgtctcccactgagggagcggaggcccctgggaggtcagtttctcctgctgctgaacaccatcttccaatcacaacagcaaggaattgggaatgtgtcattttagctgtaaaggaatgtacatgcaaaatgtcctgattaatgatkattaaaggaaagaccatttctcttttccccaaacccaacctctttgtcacttcagacccctaagggagcctgtgcaacatcggtgaaggttgctattgacacagggtaccgacatattgatggggcctacatctaccaaaatgaacacgaagttggggaggccatcagggagaagatagcagaaggaaaggtgcggagggaagatatcttctactgtggaaaggtgagatcttgccttcagcctccactggggacagtgagaaggtttcagttgttcattttattattcatcttccgtgtgtgtgtgtgtgtaattgcactcatgagtaggcagtacttaataacagt

SEQ ID NO: 760938 - DNA, 609 bp, Homo sapiens
gggtgaaagtctaaatgtgaagcaatatgtagagggaacattccattttctcaagactggtatcctctgccttatttggggaggctttttagcaaaggaaagagtcaaacatgtgcccagaggaaccccactctcataccctgcttctcttcttcccatggcctacaaacggttaaaaaagatttcctcagcatgtgcaagcaygcaagggagaaactgtgtgtgagttcccagaagccacccaattgaccatcctctgggttgtggagacagggtacagcctgttctttttgtactttacaagttcagtgaaaaaagcaacaagctgtttctttcccttaggcaggccagccaagagatagcaatgctgtttcttcctctctcttgttttccccatgattatcttgtaagcctttccttttacacatttgagatgggtttgaaatggttccttgcagagggtttgcatcagagagtcttgagtttcccttgggtcactttcctgaggctcaattttgtcaccagtaaaattggggttatagtagtaactatcttagagagttgcagggtagactgagtgagctgataaatgataagctctagcttagt

SEQ ID NO: 760939 - DNA, 609 bp, Homo sapiens
gggtgaaagtctaaatgtgaagcaatatgtagagggaacattccattttctcaagactggtatcctctgccttatttggggaggctttttagcaaaggaaagagtcaaacatgtgcccagaggaaccccactctcataccctgcttctcttcttcccatggcctacaaacggttaaaaaagatttcctcagcatgtgcaagcacgcaagggagaaactgtgtgtgagttcccagaagccacccaattgaccatcctctgggttgtggagacagggtacagcctgttctttttgtactttacaagttcagtgaaaaaagcaacaagctgtttctttcycttaggcaggccagccaagagatagcaatgctgtttcttcctctctcttgttttccccatgattatcttgtaagcctttccttttacacatttgagatgggtttgaaatggttccttgcagagggtttgcatcagagagtcttgagtttcccttgggtcactttcctgaggctcaattttgtcaccagtaaaattggggttatagtagtaactatcttagagagttgcagggtagactgagtgagctgataaatgataagctctagcttagt

SEQ ID NO: 760940 - DNA, 631 bp, Homo sapiens
ctgtaatatgttagagttgacttctgctctattgtagcttggttggatcagtgtgtttcacaaggccagaaaaagtttctcttaagtcttcagacaaattattagctctcccatataaaggtcgcccaaactgggggcagccttcacttacccctactgtcctggtatacttaggagtatcctggtttggatgtgttcattctatatggtcagcattcattttatatgatcactctccctttggggctgttttatctcattgtgcagtctgtctctggatatggtttagctgaacccagagtttccttatatttggatctttccctttgttccaccttcagagaagtcccactctrgattccatattcagagaggatgactaagtctttagccctgccttagagaagtgtccctccaaaggggcccagagcgggttctgggtggaaggcagggagctgaatttttctctcgtctatgcacacaggagagttatacttaggcaaattattccattaggttggtgcaaaagtaattgccatttttaccattaaaagtaatggaaaaaaactgcaatttcttttgcactaatgtaatggaataatgtgccttagccattgctctgcgccctgac

SEQ ID NO: 760941 - DNA, 610 bp, Homo sapiens
ctggttgtgatcaattcattgtaaatactatagcactcaggctaaccctgtgtatttttcttaatttatttcttgggaggttttaaaatgtatttttttcctttggacttaatgttttcatttttgttttctaagtagtccaaaagaagtttaaaaaatttcattaagagaagaagaaagctaaagcacatgggtacgtgtcatatatttttgcaactgttcatctacgtataaatattatatacactctttattcatgacatatttcacaataaaaaacgtcataataagggaggaagaaatgtttaatttaagaaaagagaggaaaacaaaatccatatcttacaataactcatcctcatttgtatcagttatatgtttttatgcaatgtgccagataggggaagaaaatayaggaggcaataaagaatttcaagaacttctaagccctggaaatcatgccatagaagcatgctctaagattttgtttatataaagatagttttagcagtctatagagctaataaacttccatcaaacactggcgaggagcaatttggagtacatcaaagagctacgtagttccagcactaagatgaatgtaacattt

SEQ ID NO: 760942 - DNA, 609 bp, Homo sapiens
gggtgaaagtctaaatgtgaagcaatatgtagagggaacattccattttctcaagactggtatcctctgccttatttggggaggctttttagcaaaggaaagagtcaaacatgtgcccagaggaaccccactctcataccctgcttctcttcttcccatggcctacaaacggttaaaaaagatttcctcagcatgtgcaagcatgcaagggagaaactgtgtgtgagttcccagaagccacccaattgaccatcctctgggttgtggagacagggtacagcctgttctttttgtactttacaagttcagtgaaaaaagcaacaagctgtttctttcycttaggcaggccagccaagagatagcaatgctgtttcttcctctctcttgttttccccatgattatcttgtaagcctttccttttacacatttgagatgggtttgaaatggttccttgcagagggtttgcatcagagagtcttgagtttcccttgggtcactttcctgaggctcaattttgtcaccagtaaaattggggttatagtagtaactatcttagagagttgcagggtagactgagtgagctgataaatgataagctctagcttagt

SEQ ID NO: 760943 - DNA, 623 bp, Homo sapiens
aactcagcactttttgcttcctgccccaggtcagtatgcagctctgggcagaacacctgcctcactccacccaagagatggctgtatggttgtagtgggtgagatatttcctgggcagcttcccatctggaaagggctttgaggagctgtgctacagtaggtgtttggttcagaagttgttctttttttaaaaaaaaatttttttttttttgaaacagagtcttgctctgtcactaggctggagtgcaatggggcgatcttggctcactgcaacctccacctcccgggttcaagcagttctcctgcctcagccccctgagtagccgggattacaggtgcatgccatcatgcctggctaatttttgtatttttagtagagatggggtttcaccatgttggccgggctggtcttgaactcctaacctcaggtgattcaccyaccttggcctccctaagtgctgagattataggaatgagccaccacacctggcccagaagttagttattctttgaattctttctcagagaggcataggggggcaaaacaaaaaccaaaaaacaaaacaaaacaaaaaaacccacatagcttgggtacagagccctgggtttgagttatagcactg

SEQ ID NO: 760944 - DNA, 580 bp, Homo sapiens
agcatttttttttttttttttggttaatataatgttttcaaggttcatccatggtgtagcatgtgtcactgcttcatcgtaagagtgtagcattttagggctagcaatggactttcaagttcatgtattcaataaatactcatgaagcaactgcactgtgccaggcctcgtgccaggtgctatacctggttccattgttgcctttggtttttcctttcctggtgtgctgctttatgaagacttgtggggcagggcatggtgactcaggcccrtgatctcagcactttggaaggctgaggtgggaggatcaggagtttgagatcagcctgagcaacacagtgagaccccgtctgtacaaaaacaaaacaaagcacccgtcatggtggcaaacatctttagtctcagctgcttgggaggctaagttgggaggatcactcgagcccaagagtttgagacttcagtgagctatggtcgcaccactgtactccagcctggtcgacagagtgaaactctgtctcaaaaaaaacaaacacacaaatggtggggacccaagccaatgacattcctttttcctggttgc

SEQ ID NO: 760945 - DNA, 615 bp, Homo sapiens
aatttttttttttttttttttttgagatggagtctctctctttcgccaggctagagtataatggtgcaatctcggctcactgcaacctctgactccctggttcaagcgattctcctgcctcagcctcccaagtagctgggactacaggcacgcaccaccacgcccagcaaatttttgtatttttagtagagacagggtctcaccatgttggccaggatggtctcgatctcctgacctcgtgatccgcccgcctcagcctcccaaagtgctgggattacagacatgagccaccctgcccagccaagaaataaaattttataaagatatgaaagaaatctaaccsccttttaaaccttgacatttgtgctgcttgatatgctgaaagggccgccatcttggctgacccatatgcaaagatatggcagaaaaaacataaacctgcgtctgcaatggatcacttcacaacattgctgtgtgttttcaggcccttttagacaatgaagatgatgaaatgcaacacaatgaagggcaagaacggagcagtaataacttcaactacggggcttaccattccctggaagctgtaagtgtttcagagtgggttaagatcaaggt

SEQ ID NO: 760946 - DNA, 615 bp, Homo sapiens
aatttttttttttttttttttttgagatggagtctctctctttcgccaggctagagtataatggtgcaatctcggctcactgcaacctctgactccctggttcaagcgattctcctgcctcagcctcccaagtagctgggactacaggcacgcaccaccacgcccagcaaatttttgtatttttagtagagacagggtctcaccatgttggccaggatggtctcgatctcctgacctcgtgatccgcccgcctcagcctcccaaagtgctgggattacagacatgagccaccctgcccagccaagaaataaaattttataaagatatgaaagaaatctaacccccttttaaaccttgacatttgtgctgcttgatatgctgaaagggcygccatcttggctgacccatatgcaaagatatggcagaaaaaacataaacctgcgtctgcaatggatcacttcacaacattgctgtgtgttttcaggcccttttagacaatgaagatgatgaaatgcaacacaatgaagggcaagaacggagcagtaataacttcaactacggggcttaccattccctggaagctgtaagtgtttcagagtgggttaagatcaaggt

SEQ ID NO: 760947 - DNA, 635 bp, Homo sapiens
gggatccaatttcttcctggttcggtcttgggagggtgtatgtgtccaggaatttatctatttcttctagattttctagtttgtgtacacagaggtgttcataatattctctgattgttgtttgtatttctgtggcgtcggtggtaatatcccctttgccttttctaatttcttttatttggatcttttttgrtttttcaagtctcaatatccttcagcttagctttgattttggttatttgttgtcttctgctagctttggggttgatttactcttggttctctagttcttttagttgtgatgttaggttgttaaactgagatctttctaactttttgatgtgggcatttagtgctatacattttcctcttaacattgccttagctgtgtcccagagattctggtgtgttgtatctttggtctcattagtttcaaagaacttctagatttctgcttaatttcattatttacccaaaaatcattcaggagcagattattcaatttccatgcaattgtgtaattttaagctattttcttagtcttgaattctattttaattgcactgtggtctgagagagtggttgttatgatttcagttcctttgtatttgctgaggagtcttttacatctgatt

SEQ ID NO: 760948 - DNA, 570 bp, Homo sapiens
tggatcacctgaggtcaggagttcaagaccaacctggccaacatggtgaaaccctgtctctactaaaaatacaaaaaaactagccgggtgtggtggtgggtgcctgtaatcccagctacttgggaggctgaggcaggagaatcgcttgaacccaggaggcggagcttgcagtgagctgacattgcaccattgcactccagtctgggcaacaagagtgaaactcctcaaaaaaaaaaaaaaaaaaaaaaawagagagtcttaagtcaggttgaagttgtgaacctgagtgattgggagttggggtcaggaagatggtgctttgtgcatgttgaattgaaggtctgtgtattggtagactatccttgcagaattgtgttataggaagtgtattagtctgttttcacactgctgataaagacatactccaaactgggcaatttacaaagaaagaggtttaattggaatcacagttccatgtggctgggcagcctcacaatcatggcggaacgcaaggaggagtaagtcacatcttacatggatggcagcaggccaaaaaaaaaaaaaaaatgc

SEQ ID NO: 760949 - DNA, 594 bp, Homo sapiens
agtgtctcagtactaaatcatttattattaattattatcaagtattgtatggcatgatagtggcaatactaataaatgttcacatttttaaattcatgtgctagtcaaggcacattaaatgtttatttcataatttattcctcataaactttatgaggtaggtatcatcatttattccaagattatagattaagatctgtgataaaatacagattaaaattacagaggcacagagaagtaaagaaaatttgttgtacctgttttatttacacagaggaaacagaacaaagaagtgactaagagcaaggcttcraagatacatgtagctgagtataagaactggcttctgccacttataatccatttactattggtaagccatgtgaccactctgagtctcaatttccacatcagcaaaaaaggagataataagagtttgcatcctataaagttatcgtattaaatgagacaattaagttcttgctgtggtgtctcacacagagaaagcatacaataaatagtttatgatttttgtcatcattcacatttggagctttgtgttcagttatggatattacattttaatatggacaa

SEQ ID NO: 760950 - DNA, 594 bp, Homo sapiens
agtgtctcagtactaaatcatttattattaattattatcaagtattgtatggcatgatagtggcaatactaataaatgttcacatttttaaattcatgtgctagtcaaggcacattaaatgtttatttcataatttattcctcataaactttatgaggtaggtatcatcatttattccaagattatagattaagatctgtgataaaatacagattaaaattacagaggcacagagaagtaaagaaaatttgttgtacctgttttatttacacagaggaaacagaacaaagaagtgactaagagcaaggcttcgaasatacatgtagctgagtataagaactggcttctgccacttataatccatttactattggtaagccatgtgaccactctgagtctcaatttccacatcagcaaaaaaggagataataagagtttgcatcctataaagttatcgtattaaatgagacaattaagttcttgctgtggtgtctcacacagagaaagcatacaataaatagtttatgatttttgtcatcattcacatttggagctttgtgttcagttatggatattacattttaatatggacaa

SEQ ID NO: 760951 - DNA, 562 bp, Homo sapiens
cttactcaacatgataaagaacatttatgaaaatcccacaaataacactctaatcaatggtggaagacagaaagcattcccccacaaatcagaaacaggataagaatgtctgcatttgtgatttctagtaaatgttgtatggaggttctagccctcaaaattaggcaacccccttccaccctcacacaaaagcatccaaactggaaagaaatttgaaatagttttatatatagaaatagttttatatatagaaaatgctaaagaatccacaaaaaataacctagtaaagctgataattaaattcagcaaagttgcaggatataagatgaacacacaaaaatcaattggatttctatacactagcagtgaacaatccaaaagaaaataaagtccacttacatcaaaaagaagatacttaggaatacaygtaaccaagggagtgaaagacttatacactaaaaactacaatactacaatacattgctgaaagaaattaaagaagaactaaataaacataaatacatcttttgtgcatgtttggaaggcttaatattgttaagat

SEQ ID NO: 760952 - DNA, 516 bp, Homo sapiens
actacattaggtacgacaactgctcgtccagcgtgctggccgccgtggtcttcgagcaccccttcaaccacagcaaggagcccctgccgctggcggtgagacgtgcggccgggccgagcagtcacagcccatcagcaaggcctccgcttcctcccgcgtcactagttcaacctgtaaaaggcactgctttcccttaaacctctgcctgcctgcragtcaatagcagtcactcctttgggtctgataatatcatcacagtccccgccaaggggatcttggtgacatttaaacccacgggtcagaacaggttagaaaatgcacctgcctgtggcgccccaagctcctttctgttccctcattttatgaaagatattactggtctccagaacagagtctaataagatagttaaggaaagtagtaggtatttaggacttaaatatgatctggcggaaagaaagaaagtgaggtttttgcttgcctgatggcattaaaattaggaagccatcaagtccatc

SEQ ID NO: 760953 - DNA, 587 bp, Homo sapiens
tgcgtacgtagagtttgagaatccagatgaagccgagaaggcgctgaagcacatggatggaggtgggtgaccctgccacataaccctgacctctcagagacccgccgccgcgaggggctttcaaactgatttccaactgggctgcacttctttttgtttgtttgagacagagtttcacacttgttgcccaggctggggtgcagttcctggaccaaactgaggtttgggctgctmtttctcatggcccaataacaagatgcacattaactgagtaggtggagtttttatttctgcaaccagttgcagggaaaaggcctggaaattattgtcagaccaacttaaaattacaaagtttttcagagcttatatattttttaagctatatgtctatacatatgtgtacatttatgtaaagacataagttactgacttttaatctattaactaaggattgagtcttgaagaccttcctctggagcctcagtaaattgacttaatttaaatggctgtgagtgctggggtaattacccttgctttgccttctgctaaatcacagcagtttggggagttttcttcccaataaaact

SEQ ID NO: 760954 - DNA, 587 bp, Homo sapiens
tgcgtacgtagagtttgagaatccagatgaagccgagaaggcgctgaagcacatggatggaggtgggtgaccctgccacataaccctgacctctcagagacccgccgccgcgaggggctttcaaactgatttccaactgggctgcacttctttttgtttgtttgagacagagtttcacacttgttgcccaggctggggtgcagttcctggaccaaactgaggtttgggctgctatttctcatggcccaataacaagatgcacattmactgagtaggtggagtttttatttctgcaaccagttgcagggaaaaggcctggaaattattgtcagaccaacttaaaattacaaagtttttcagagcttatatattttttaagctatatgtctatacatatgtgtacatttatgtaaagacataagttactgacttttaatctattaactaaggattgagtcttgaagaccttcctctggagcctcagtaaattgacttaatttaaatggctgtgagtgctggggtaattacccttgctttgccttctgctaaatcacagcagtttggggagttttcttcccaataaaact

SEQ ID NO: 760955 - DNA, 731 bp, Homo sapiens
cacataaccctgacctctcagagacccgccgccgcgaggggctttcaaactgatttccaactgggctgcacttctttttgtttgtttgagacagagtttcacacttgttgcccaggctggggtgcagttcctggaccaaactgaggtttgggctgctatttctcatggcccaataacaagatgcacattaactgagtaggtggagtttttatttctgcaaccagttgcagggaaaaggcctggaaattattgycagaccaacttaaaattacaaagtttttcagagcttatatattttttaagctatatgtctatacatatgtgtacatttatgtaaagacataagttactgacttttaatctattaactaaggattgagtcttgaagaccttcctctggagcctcagtaaattgacttaatttaaatggctgtgagtgctggggtaattacccttgctttgccttctgctaaatcacagcagtttggggagttttcttcccaataaaactggcttaatcctaaatgggtcctgacgtattcttcgttattttatgttttaaggcccaggaaaggcctaagctaaacttttggtgggcttttcttatatcccagcctttgtataagggccttggcttttaatatttaactactcagacagtactaaaacacttgttacagaggcctgcgttagtgagacctggcctgccacaatccccactgtcaatttgc

SEQ ID NO: 760956 - DNA, 621 bp, Homo sapiens
taactatacatgagtgtggacaggcgaagactccaccagcacccttaataatagggagcaacatctccccgcaaattaccacaggaggttcctagaggatagtgcagtggtttaagcctggccacagctggtacccacaggaaatattcagagcctcaatttagctattaaagacattaaatctctttyagcctgggggaaaacaactctcacccttaaagctggatttgggcttctaactcctggattcatctgggtgaaggtaggagtgggggctgaatataaagagaatattttttcactgagtcattggatagggtaaagagagcttggttttgtttttgcctttttacttcccctccttcaccttacttttccaattctcattttaatcatctttcatttgttaaaccctgagcccccaatatctctatactcctctaacccccttcttcatgatccttttcagcctagtgaggatgagacagaggtttttcctttaatgatggagttaactaggatgaaccagggagcgttatggtcctaaagtcaaggaatgggtaagtttggtacttcaatgcacggtgtgagtgggggacaatacaatatacatacgagctg

SEQ ID NO: 760957 - DNA, 657 bp, Homo sapiens
cgaaaggaacatgggattgttattacgggaagataaacaaccaatttctgtccttaaagattttggaaatatagccttagacggaagcccaggtaggttggaactttagagagaactagaagaaagtcaatacgtatgagttttcctataatatggcacagagatccagccttcttctggtaagagagaaaagccattttctcactcacagtctactttacagattattgacagagttccaagcactgattcagacatgaaaaagtataaagcaatatctgaagaaaatttcttagggactttgattgtatgggtgtaatttgaatcctttttctttctgcycgtgtgctcaaaggaaagtttctcattgtaactctccatttgtttgagtgcaatttcctttttctttctgcctgtgtgctcaaaggaaagtttctcattgcaactcttccatttcctcatctttaaaatgtttacttcatagaatgactgtgatatttaaattataatacatatgtaaattttatgacacagttcctggcatatgttccgattgaataaatgttgtaatcaatactatgtgaaagttaaaggtcaagaaaaagtgaacccagatagggaggaatgtacatctgatcctcagtgaatgtccaaaac

SEQ ID NO: 760958 - DNA, 570 bp, Homo sapiens
tctagaaaactatgtccctgattttgctgagcaaatagaaagcaacattacttatgctgcagtgccttgagggagtggaaagagctcatggcagcccctagctcaggctactccaggctcccacctcacactacagcacagctagaggttcaaagaagggccatgccatagccccgggtccacaaatgattctcttggtgcagtgtggtgacctgtccctggtgaggmtcattaccctgatttcacatttccttctgctgcagggaagcctgcttttggctacaaagagtctgtctaccttgctagattttgctccttgaagaaggggctatgttttcttcatctccatatcgccagtagctagccaatgcccagtatacactagaggatcagtaattttttgtcttgttttctttttgactctgctctcacttgggacatgtcacttcccctcttgacctccatatgcagatctgtgaatatgagtaaatgggtaaaggcccctctagctttaaaacccttctgacatagagagaactctgaacagaaccagaagctaaggaatgatga

SEQ ID NO: 760959 - DNA, 570 bp, Homo sapiens
tctagaaaactatgtccctgattttgctgagcaaatagaaagcaacattacttatgctgcagtgccttgagggagtggaaagagctcatggcagcccctagctcaggctactccaggctcccacctcacactacagcacagctagaggttcaaagaagggccatgccatagccccgggtccacaaatgattctcttggtgcagtgtggtgacctgtccctggtgaggatcattacyctgatttcacatttccttctgctgcagggaagcctgcttttggctacaaagagtctgtctaccttgctagattttgctccttgaagaaggggctatgttttcttcatctccatatcgccagtagctagccaatgcccagtatacactagaggatcagtaattttttgtcttgttttctttttgactctgctctcacttgggacatgtcacttcccctcttgacctccatatgcagatctgtgaatatgagtaaatgggtaaaggcccctctagctttaaaacccttctgacatagagagaactctgaacagaaccagaagctaaggaatgatga

SEQ ID NO: 760960 - DNA, 511 bp, Homo sapiens
atgaagtcttttgatccataaatgcaggatgttcttccaattatttgggtcttttaaaatttcttttaattatgttgtttagtttttaatgtacaagttttggacattctattagagttctccagagagaatgaaccaatagaagatacaaatagacataactatagttatagatatagatatgtgagggaatttattaggagaattttctcgtgcaattatggaggctgagaagacccatgataggctgtctgcaagctggacatcctaggatgctggtmgcatggctcagtccaagtccaaaagcctagaaccagggaagccaatggtgtaattttcagttcatggccaaaggcctgagaaactggagggctgctagtctaagttatggagtccaaggctggagaggatgaagttgtaatgtccaagggcaggagaagaaagatgtctcaggtccagcagagataaagagagacagagagagagacagagagagagaatgagagagaaa

SEQ ID NO: 760961 - DNA, 546 bp, Homo sapiens
agataaagaattcaaaatgttgattatgaagccactcaaggagttacaagagaaaggtgaaacccaacataaagaaatttaaaaaacaattcaggataataatgaaaaattttctaaagagatagatatcttaaagaaaaacgaatcagaacttctggaaatgaaagacacatttagggaattacaaagtgcaatggaaagttttaacaatagactagaccaagaagaattttggaactcaaagacaagccttttgaattaactcaatcagaaaaaataaagaaaaaaaataaaagaaatgaacaagagctccaagaaatatgggattatgtaaaacagccaaacctaagaatcatytgtgctcctgagggagaagaaaaagcaaaaagtttcaaaaacttatttgagagaataattgaggaaagcttccctggccttgctaaagatttagacacacaaatataagaagctcaaagaacacctgtgggattcatgacaaaaagacattaccaagacatatagtcatcaggccatctaaagtcaatg

SEQ ID NO: 760962 - DNA, 541 bp, Homo sapiens
ttcctaccaacctcagtacccaaagttgtttaaaaaatgcatgatatgtatcttttttattcccattgcaggctttctccaccaccacaacagcatgtggtctgacagaattggcttcaaagaagaaactaaaagccacctcttgcaggaaactgcactgccctcaacatccagcccctactccttggtcctccaaacccccaaactctgcaggagaaaggyagcatggtacatggggaggaagaccagactgagcgatttggaatccacatcctaatgctgccacaagctgcatgcacaaagaccttaggcacatctcttcatttctctgtacactggtttctctactatgtgtgtattaaaatatataatgtggatgatagtaaactgaacaaagccttaattttctcccaagctttgacattgccaagggcagttaggagacttcaggatcaagtttaggggacaagtttttttctaatactttcaaaaggcccaagtgaagagaggaaggacacctcactttctggctctaaaagca

SEQ ID NO: 760963 - DNA, 541 bp, Homo sapiens
ttcctaccaacctcagtacccaaagttgtttaaaaaatgcatgatatgtatcttttttattcccattgcaggctttctccaccaccacaacagcatgtggtctgacagaattggcttcaaagaagaaactaaaagccacctcttgcaggaaactgcactgccctcaacatccagcccctactccttggtcctccaaacccccaaactctgcaggagaaaggcagcatggtacatggggaggaagaccagactgagcgatttggaatccacatcctaatgctgccacaagctgcatgcacaaagaccttaggcacatcwcttcatttctctgtacactggtttctctactatgtgtgtattaaaatatataatgtggatgatagtaaactgaacaaagccttaattttctcccaagctttgacattgccaagggcagttaggagacttcaggatcaagtttaggggacaagtttttttctaatactttcaaaaggcccaagtgaagagaggaaggacacctcactttctggctctaaaagca

SEQ ID NO: 760964 - DNA, 656 bp, Homo sapiens
cataagaactcacttattatcatgagaacagcacccagggggaaatccaccccatgatcacctcccaccaggtcccatctccaatattggggattacaatttgacatgagatttgagtggggacgcagatccaaaccatatcaggatggataccctaagtaccttgacttgattattacatattctatacatgtaacaaaatatcacatgtatcctacaaatatgtgaaatattatgtatcaatgatctaaagaagaattagtattaaatgaacacattttgctgaacatagagtaggggtcatggaagacaaagttgaaaaaagcaaacatgggaaccaagatggccaaataggaacagttcyggtctacagctcccagcgtgagtgacgcagaggacagatgatttctgcatttccaactgaggtaccaggttcatctcactggggagtgccggacagtgggggaaggacagtgggtgcagcacaccatgcatgagccaaagcagggcgaggcatcgcctcacctgggaagtgcaagggatcagggaattccctttcctagtcaaagaaaggggtgacagatggcacctggaaaattgggtcactcccaccctaacactgtgcatttccaatgggcttaacaaatggcacacca

SEQ ID NO: 760965 - DNA, 726 bp, Homo sapiens
gcactttgggaggctgaggtgggtggatcccttgaggtcaagagttctaggccagcctgggctacatggtgaaacctgtctctactaaaaatacaaaaattagctgggcatgatggcgggcacctgtggtcccagctactcgggaggctgaggcaagagaattgcttaaacctgggaggtggaggttgcagtgagccaagattgtgtcaytgcactccagcctgagcaacagagcaaggctctgtcaaaaaaaaaaaaaaaaaaaaaaaaaaaaaaaaaagaaaagaaaaacaaacaaacaaaaaactctcaataaagcaataatagtgagatcaaagccataacaaaaagtctcctctcaaagaaaagcccaggacctgatgaattcactgctcaattctatcaaatatttaaagaactaacactaatcttaaactcatcaaaaaaactgaaggagaaagactacttccaaagtcattctacaaggccagcaataacttgataccaaatccagaaaagaacacaatgaaaaagcaaactataagccaatatcactgataagcataaatgcaaaaatcttcaacaaaatactagcaaaccaaaacaacacattaaaaagatcaagtgatcaccgtgatcaagtgaaatgcattccagggatggaaggatgattcaacatttgcaaatcagtgaatgtgatatatcacaacagaatcaagaacaaaa

SEQ ID NO: 760966 - DNA, 726 bp, Homo sapiens
gcactttgggaggctgaggtgggtggatcccttgaggtcaagagttctaggccagcctgggctacatggtgaaacctgtctctactaaaaatacaaaaattagctgggcatgatggcgggcacctgtggtcccagctactcgggaggctgaggcaagagaattgcttaaacctgggaggtggaggttgcagtgagccaagattgtgtcactgcactccagcctgagcaacagagcaaggctctgtcaaaaaaaaaaaaaaaaaaaaaaaaaaaaaraaaagaaaagaaaaacaaacaaacaaaaaactctcaataaagcaataatagtgagatcaaagccataacaaaaagtctcctctcaaagaaaagcccaggacctgatgaattcactgctcaattctatcaaatatttaaagaactaacactaatcttaaactcatcaaaaaaactgaaggagaaagactacttccaaagtcattctacaaggccagcaataacttgataccaaatccagaaaagaacacaatgaaaaagcaaactataagccaatatcactgataagcataaatgcaaaaatcttcaacaaaatactagcaaaccaaaacaacacattaaaaagatcaagtgatcaccgtgatcaagtgaaatgcattccagggatggaaggatgattcaacatttgcaaatcagtgaatgtgatatatcacaacagaatcaagaacaaaa

SEQ ID NO: 760967 - DNA, 643 bp, Homo sapiens
gtttccactctccatttctggtgacaagaatatttattctctcctggcacagggaggtcagagtgtcccttttgtatctgttgttttccaagtgcctttagctagaaaaaaatccttctgccactcttcagcaggcattgttctagtgtttgggacttatttgtatatcaaagacacaaaaatccctgcttgtgtgtcttacattctaggaagagaagaaataaacataataagttaattctataatactttagaaagtaataagtgctgtaaaaatcaagaagaagacacctgtgtgcatgtgtgtgtatgttgggcgtgaggggtgggctaagagggtagcattttgtcgtacagatcgccttctgaggagaggatatttgagcaaagacttgaaggaggggaaagaccgtttcaggcagtgagaatagccagtgcaaagccctcrggtgggagcatgcctggtgtatgtaaggaagcttggagaccaacataagagtatagtgagcaagattgagagtgtacgagatgaaatcagggaggtcacaggggcaagagcacacaaaacctacagggtattgtcagggtttgccttcaggagccatgggggcattttgagcaaagtgaagtgatctgacttaga

SEQ ID NO: 760968 - DNA, 582 bp, Homo sapiens
ttttaaaatcccacttaaaacagcatcaaaaataaaatacttagaaataaatttaacaagaactataaaacttatactctgaaaacaacaaaacattgttgaagaaattaaagatctaaaaaatgaaaaaacataccatgctcatggattggaagagttaatattgttaagatggccatattatccaaactgacctacagtgtcaacataatccccaacttctttgtagtaattgataacgtgattctaaaattcatatggaattgcaagggacccagactggccaaaacaatcttcaaaaagaacaaggtaagaagagtcacacttcctatttttaaaacttactacaaaacaatggtaaccaagatagtacggtaytggcacaagatagacatagagacacagaaaggtttaacatagggaaaaggtgtgacatggataaccaaagctaaacattaaatatagacaagattatacacaatttatacaaaatgtacattcttttatacattcttgaacaccagtgatttgctatatagttgctttcacaactggagattccccctccattcaaaatttaaa

SEQ ID NO: 760969 - DNA, 606 bp, Homo sapiens
gagccaacacttgctaagaagagatttcatgcatcatcgcacttaatattcataactatcctgtgaggtaggaactattatttcttcattttacagataaggaaactgaagcttaatgagataaagttgctcacgggtcaatgagctcttcagtagcagagctgggatttgaactcagattggtctgattccagaccttgactttgtaaccaatatgctactgtgctaaggagcagaggtgcctcayggtttagataatgagtgcgatttttcccaggtctggattttgtaagaaaggaaaaaaagtataagttgtttatatatatatgtgtatatatatacacatatatatatacatattcacagtataatcccatttcatttaatatacttatgagacttgttcccctttcattaaattgtgccagcaagatttttactagttgactgttaagaactggtaatagtaataatgatcatcataatgatgacttttatgagagcaaccattttttaatacttaactatgtgtcaggtgctgtgtgaaacactgcacctaaatttccttatttagttctcgtaatcactataatggtagtgtctgtt

SEQ ID NO: 760970 - DNA, 632 bp, Homo sapiens
taattgccatagacatacttagcagctggcagaacccccacattggctccctgactggtagagtgaggactactgtggtgggaaaggccaaatggaagccactgaagctacttctacctagaaaaatagtaaatcaaaaacaatattgcaaccctggagggattgcggagattagtgccaccatcgaggacttgaaagacacaggggtgatgattcacatcacatccccgttcaactcccctatctggcctgtgcagaagacagatggatcttagagaatgacagtggattaycataagcttaacgaagttgtgactccaattgcagctgctgtaccagatgtggtttcacttcttcagcaaattaacacatctcctggtacctagcatgcagccattgacttggcaaatgcctttttctccattcctgtccataaggcccaccagaagcaatttgccttcggctggcaaggccagcaatataccttcactgtcctactacaggggtatatcaactctccactttgttccataatcttattcagagagaccttgattgctttttgcttccacaagatatcacactggtccattacattgatgacactatgttgactggatccagtgagcaag

SEQ ID NO: 760971 - DNA, 541 bp, Homo sapiens
tctacctcagtaaaatttctagaggtccagtggtgtggggcctgtcaagatactccttctaatgtgaagggtaaattgctgcatttggcccctcctacaacccagaaagaggcacaacatctagtgggcctatttggattttggaggcaacacattcgtcatttgggtgtgttactccaactcatttattgagtgacccgaaaagctgccagttttgagggggtccagaacagcagaaagctctgcaacaggtccagcctgctgtgcaagctgctctgccacttgggccatgtgacccaacagatccaatgatgcctggggtgtcagkgacagatagggatgctgtttggagcctttggcaggcctccataggtgaatcacagtggaggcctctaggattttggagcaaggccctgccatcttctgcagataactactctcctttggagagacagctcttggtctggtactgggctttggtggaaactgaacatttaactatgggtcatcaagtcaccatgtgacctgaactccctatcat

SEQ ID NO: 760972 - DNA, 624 bp, Homo sapiens
atgcagtgggttgtatgactataaaaggtaaagcaaaattaaatttcctttgagtatcttgggtgtaaatggaagaagcaagttagggcagcatttgggagaatgaatgaatcttagaggagaaaaaggaaatggagcacaatgacctgagaaaatttaaagagctagatgagaagggaaaaaggaaaaaagtaacacactatgaagcaaagtccatgggttcctggaggtcttggaggaggtggtaaaagttgacctctgaagctcaggtgacagtattgcttttgatggggaggtattctctttctgggacagcaggagggagagggagataagtgcagacacagttaattggctctttgtttgtaaaggatgggcagagtttctattttatcttcttcattatcttttttccatgaaacaggcaagaacacttgstgagggtgagagtagcaggagtgtggtaaataccttgagttgagtaggaaatctttgaaataaatgctgatagcttataggtagctggaaaccataattatgtattacttgtctacgcaagggcttaaagtggatggtaaaacttattcacaactgactttgcagagacagaataatagaagaaca

SEQ ID NO: 760973 - DNA, 444 bp, Homo sapiens
tcatcattgagtatagaattgtgctaacctgtccacatttagtttgttatcagcttttacaaccaattaatgaatttaaaaaaaattaaaaaaggaaaaaatcaaagtgaaggcagaagaaccagatgtgagaagacctactcaatcatgcttcacttttmcaaaccaaacttccatagaaaaaattttgatattaggtgcaatgccatcacagggcacaaaacaggaagatttatttgtaggattgtaaaatatgagccatatatataagaatgaaagcttcagaaaagtcattgaacaataaactgttcatattctcatctcttcttcttgttcaaagctaaaagatagatactatgttttgaaatatttgccatatatggccagtagctgatattatgtcttctgaagccatcagaaagcagggcaggtttttatacaatt

SEQ ID NO: 760974 - DNA, 530 bp, Homo sapiens
acatttatgtttttcatgttatatatctctatctagatagaaagcagccattttaagccagagatcatacttgtaatttatgtttattcttacagtgcctgatacttcattgagaaaacaatgattttaatttctattgataaactacttttggagagtccttcttgtctgaagtcattatktgtgttctgagcagattcgaatggggaatagaatttgttaaactttgaggaaagatagtggactagcgatatcctgaagcctatctgagaccatgtccccaatatgaagctgaaaaggaacaatgagatgtctggcaaagccctggaccctagagaaggtttttgtgatgcctcttatggtatcagtcacagttgctgaaacagaggttaattgcagtgttctgggcaaacccaggcattgatatagttacgtgggcttcacacactctttcagcgttaggaggggtcattttagatggtttccctttggaaaccaacacaggaaatccattctaggggaagttactc

SEQ ID NO: 760975 - DNA, 564 bp, Homo sapiens
aaaacttaaatgaattaagatacctgaaagcaaatataagaataaaggcatagcatttccggaatagatagcgcaataggaagacgaaatagaaaaaaagcacaagttacatgaaaactccgctctctaaaagatytctggcacagaaaactttttggaaggaaatggattaaaagcctattaagatttgagagaattagtcaaagaaatcatgaagctgtatgtgaaagttttctgactggatcttagacacgtacctatcatgagcagaatgcaggctgagaaagctgtgcaccctgtaagaaggttgtgtttccctaatacctgtattagagaaagccacggaggaaaacagtaaaggaagaacccctcccagagtggagtcagggaccacatagaacaatggacaaggaagctattcccaagagaaaaattagggcctaaacaaggaacattccccacccagggttgggctttcacaatgttatccaagctagctacttacaggttatctttcatgttttaaataagctcctataaaaataaatcagaaaactgatagca

SEQ ID NO: 760976 - DNA, 577 bp, Homo sapiens
ctgctttgttccaggaattgaataaggtttccaaatgttatcacattgactttatcacatatgatagcctctatttcacatacgaaacaactgtggctcatttaaatgacttgtctaattcttaaaacttacttaaatttatagctattaggctccagagktcttgttctatcagtttgagtacatttcacagtccagatattccttgtgcttctacctcggttctcaccaaattcatgaaatcttttccaatttaagtttaggcctaccaaatgacaaggactttgctgaacacctggtatataaaaaaaataaacatgatctttgctctcaaaaaacatacaatttagttatgaaaactcaaaataaatatgtaaacattttaactagcgctatgaagacaagcacataatacgatgagacaataaagaaaggtcataatgagtgaggggattggttctgatgtggctttgccaaagaaggcaaatgtcagctaagacatcaggatgaacagaaattagccaagtaaagaatgggagtgtggaagaacaatgtcctaagcataaggaaaagcgta

SEQ ID NO: 760977 - DNA, 607 bp, Homo sapiens
cataataatagctatcatatattgtgtattgactacctgctttgttccaggaattgaataaggtttccaaatgttatcacattgactttatcacatatgatagcctctatttcacatacgaaacaactgtggctcatttaaatgacttgtctaattcttaaaacttacttaaatttatagctattaggctccagagttcttgttctatcagtttgagtacatttcacrgtccagatattccttgtgcttctacctcggttctcaccaaattcatgaaatcttttccaatttaagtttaggcctaccaaatgacaaggactttgctgaacacctggtatataaaaaaaataaacatgatctttgctctcaaaaaacatacaatttagttatgaaaactcaaaataaatatgtaaacattttaactagcgctatgaagacaagcacataatacgatgagacaataaagaaaggtcataatgagtgaggggattggttctgatgtggctttgccaaagaaggcaaatgtcagctaagacatcaggatgaacagaaattagccaagtaaagaatgggagtgtggaagaacaatgtcctaagcataaggaaa

SEQ ID NO: 760978 - DNA, 571 bp, Homo sapiens
gatttttcagatttttagatcaaccattaactgaaatgcaacaatgtaactagttacctacccccctccccacccagcaaataatggttaatattaactgaaaatgaaagaagatagatttgacaaatattttattattatatttttgaatgggctatcagagttacagaagtattgggattaaaatgcttgtaaaacaagtcctcatttaacgttatcagtgggttcttggaaaccagctttaggtgaaaccacatataacaaaaccagttttaccctaggctaatcaagagttaagttcctatggcatatttctggtcaaaaaataaaaaatcaaatttctaaataaagatacagaacacctctaatattaaatattgaaataaatktgagctatacatacttttaagattaaagactaatataaacaaaattatttacccaatatttggtgaatcagtgagtgatggcagtcatggtggtgaattatattaaggaataattgcaaagcaaaaattgtcaggagtacctcctaccactatgcagtcaatcacaagtatgacaggcccac

SEQ ID NO: 760979 - DNA, 642 bp, Homo sapiens
ggtacttgtccaacatgacagtgcacctggggttgcccgggctgggccctgagcatgacgctctgcagccttcccagcggtgggtgagtggccaagaatgatggagctggcagccaggcaccttccacagcacctaccatcacagaaaggtatgccctgaggctagagaacggcagtaggtggacayggtccctctgttcatctgctgccaggagaagccggtctacacttgcccctccctgccccaccctgaaggaggctgctgttggttttccaggtcagccgccctgtgatggagaaagtgccctacgctctaaagattgagacttccgagtcctgcctgatgctgtctgcgaggtacgggcaggtggagggaggatggcgcacaaggcagaggtgtgagcatgggaaggttcagaacaacagataaggatgtgctgtttttattttggtatccttctgggtcaaagtatccttctgggtcaaaggactttttttcttttcagtgtttcttaaccttttggggaatttgataaaaacttttctccccccaaaaaatgtacacactcataaaattttatatataacttcaggggtttctagagcccatggcttaaatatggcaatagcaatgtctcatgt

SEQ ID NO: 760980 - DNA, 642 bp, Homo sapiens
ggtacttgtccaacatgacagtgcacctggggttgcccgggctgggccctgagcatgacgctctgcagccttcccagcggtgggtgagtggccaagaatgatggagctggcagccaggcaccttccacagcacctaccatcacagaaaggtatgccctgaggctagagaacggcagtaggtggacatggtccctctgttcatctgctgccaggagaagcckgtctacacttgcccctccctgccccaccctgaaggaggctgctgttggttttccaggtcagccgccctgtgatggagaaagtgccctacgctctaaagattgagacttccgagtcctgcctgatgctgtctgcgaggtacgggcaggtggagggaggatggcgcacaaggcagaggtgtgagcatgggaaggttcagaacaacagataaggatgtgctgtttttattttggtatccttctgggtcaaagtatccttctgggtcaaaggactttttttcttttcagtgtttcttaaccttttggggaatttgataaaaacttttctccccccaaaaaatgtacacactcataaaattttatatataacttcaggggtttctagagcccatggcttaaatatggcaatagcaatgtctcatgt

SEQ ID NO: 760981 - DNA, 618 bp, Homo sapiens
cacttctgctgcttccattcgagccatctgtgtctctctgctgggccatcacaacagccccagattgttggcatctcttatttgccatcagcctctcccactggcatcagttctttctgtctaaaatacaatgtcattatgctgttcccacctttaaaggcccacaatggtgttcaatttccaatatgatcaaatgcagtttttgagcacagcatattagggacttcacagtttgacctgtccccttcatccatacctccagctacagcytacactgtggccacaacccctccctatttagctttagacactgtatttcatctaccccaaacatctcacattttccaatatagtgtgcttgctcttttgcttccatggaatttcatttctaaatctgttctatttctttactagatctagtgacaaaagtttttacaatctagtgagatagcaggaaatgttccttacataaatatttgttgaatgaatacactagatgcctgatataactacaatcattgttggattagtatgtgaggttggtaaatagttacaaaactggaaaataaaataagtaggcttggatatttgcctggatttcacaaaaagattgttaaa

SEQ ID NO: 760982 - DNA, 648 bp, Homo sapiens
  misc_feature 1, 2: n = A,T,C or G
nncctatcacgtgttcttaagctggatccagtagatacactcagtcatcagtagaaaaaggttcagtgaagagagtccctgagccataggacaggaaagatgcctgggcacatctagctccctgctcctaccttctcatatgcccatttcccatgatttttcagatgtggaaactgagsccaacagctgtaatttcccaggtcccagtcattgtagagtaggcatagagccatctcctaacttccgagagggcaagatgctgattcttctgaaataagttttagaataggaaagctagagctgagcaaacagaaacagcttcatggcaggctgccaggaagacagacagcacaaagatgatggatgtaagaaaaacaacttgtaagtggtccaaaaatgagaatcctgttggtttttcgaaaatactgtagttttttaaaaattcaattaaaataatatccatgtttaaaagaaaaaagaatgagcaaaacaaggtaaatataaatagattggtgtacatgtacctaagctttcagcggaggctacaaatatacattataagcaccaaagagtgtcaagagcattttaagaaattggtcatccctttccactttgtgagtaatacttgggaatgggataaaaaataat

SEQ ID NO: 760983 - DNA, 599 bp, Homo sapiens
cagcgagactcggtctcagaaaaaaaaaaaaaaaaatcagatcttttgccttagcagattcccttatttaagttgttggaaccggcagttcatagggattttgtttccatcctttagtgaggggggtgtgtgcgtgygtgtgcacatggaaagttaggggaaaaacacaatgatataacctaaccccaaaacaaggaagcacgttacacagttgaggtttggcgcttcagttcctgcccagtctcagaaggtacagcttggctgaccttgtgtgacctatctctatgacacatctcccaagggggtggggaggactgtttctctccagcatggctttagttttataaaagccctgtgcagtcttgcaaactcaaatggttttcttaacaaatcactcacatttcatgtgttctgggctgggcagggcctcgctaatccttggccagctttgtgagtcagaaattatttaaatgattgcctgagtccttttgaggcgagagaattggcaagttaatttagggaggtgcaatgactcttaaacagcactgcagtgagtggcagcattgataaatgtgttagaagctctattttattgtgat

SEQ ID NO: 760984 - DNA, 633 bp, Homo sapiens
caagagaaagagagactgggagtacctgggtcctccaggatggcgcctgggaagcctcatagctcctactattcagttcccagaattaaaatatttggcttttaacctcaggagccactaaaaaaaacaggtatcattatatatctgtttcttgggacagggtctcgctctgttgcccaggctagagtgcagtggcacagtcatagctcactgcaggctcgacttcccaggcttaggccatcctcccacttcagccccctgaggtagctggggactacaggcatgcaccaccatgcctggctaattttaaaaaaaaattttttttgtagtcatggggtctcactatgttgcctaggctggtcttgaactcctaagctcaagcattcctcctgcctcagcctccctctcatgctgggattacaggcatgagacactgcatctggcccataattctattttcaatgataggakagtaaattcagggtcataaaggaagcctgaagtataagtaaggatataggtagggcttggtcatttacaaaagtcaccatgagacagccttctgaggagttggaaatgatccatagcttggtctgggtgaggattacacagttatatacttccataaaaatt

SEQ ID NO: 760985 - DNA, 617 bp, Homo sapiens
tgtctagggaggcaggtgggcccagtgaagcccagaacatccccacctctctgcactgagctcacctggcccctctgatggcttcctgtatatcctatcagtgcagaagaatgggagcataattcaagagcatcccaactaacctctgcaccttttaaaatgaacaaggttggaaggttggggaaggaagtgggccaaagatggtgctatctttggagaagaaaaagcagattcctggccaggcgtggtggctcacgcctgtagtcctagcactttgggaggccaaggcgggccgatcatctgaggtcaggagttcaagaccagcctggccaacatggtgaaaaatacaaaaattagctgggtgtggtggcacttgtctgtcatcccagctacatgggaggctgaggcaggagaatcgcttgaacccaggaggyggaagttgaagtgagctgaaatcacgccattacattccagcctgggtgacaagagcgaaactccatctcaaaaaaaaaaaaaaaagccgattccttcactcggcagaattgtcctctgcctgggcagatctcaggtgagtcttcatcccaaggttccttcttctctgtactcacccatattgg

SEQ ID NO: 760986 - DNA, 619 bp, Homo sapiens
aagttgtctctggttgcatggaagggtctcagcaaactgagaatattttggcaattcagtagatagagccagattcattattgcacataagcactcttcagtggaatattcatacatattacaaattaagtttgagctgatagggagggtttctttttctcttataacttagtcaacacagcagaagagaggcaaatattttctcctctagcctaaatttcaccaagttgagcaataatttgcaattaaaatacagaattttgacaaagtttaggacaaacataaagttagtttttgtgctttaattctgtatgtgaactagataagcaatgaaatggtatttccccgcacgtgcacacacagcatagttctccagaatagttcaattgtcataactcagtagaataaaatayggaccactgctcctcactctaagaaagcctgagcagcaagggctgccctgctaactgcaggcttctattcagttttccttatggggagaagcaagagggagaaaattatcaaaatttgcataatgaaaatgaagaaaatcacccatgataatgccactttgaactgttgatgttccttaacttacgatggagttacatcttaaaag

SEQ ID NO: 760987 - DNA, 608 bp, Homo sapiens
catagctattaatattacctctcagggagtaatagtgtgttggaattaaaaagtagcatggcaaggacaacctagggctcaattcctttttttttaatagatgagaaaactgaggctcagggaagtggagagatttgcctgaggtcacacaggaagttaaaagagtcaatgggctcgaacccarttttcctgactccaggccagagggtattttttcatttctcctgtgacagtgacatttccttgagaggcgattttcctcttactcttttttagagtgtctccatgggtggaagcttatacaagtggtttttacatttcactaccctgagtccttctacttattttctccatttaaaaacccaaaaaaaaaaaaaaaaaaaaaaaaaaaaaaaaggtgaatgaacaagttttattatgggtaattcactcttccatgttctatatacattaaaaatgcatcaaacaagtgaacaccctttagaattcctgacactcaatttttttgaatgcttgtagaatgacttacattctattctctgaaaaagtataggatgagttttcaaatcattagttgtaaggatcctcaaggaatgcaaaactctaaa

SEQ ID NO: 760988 - DNA, 608 bp, Homo sapiens
catagctattaatattacctctcagggagtaatagtgtgttggaattaaaaagtagcatggcaaggacaacctagggctcaattcctttttttttaatagatgagaaaactgaggctcagggaagtggagagatttgcctgaggtcacacaggaagttaaaagagtcaatgggctcgaacccagttttcctgactccaggccagagggtattttttcatttctcctgtgacagtgacatttccttgagaggcgattttcctcttactcttttttagagtgtctccatgggtggaagcttatacaagtggtttttacatttcactaccctgagtccttctacttattttctccatttaaaaacccaaaaaaaaaaaaaaaaaaaaaaaaaaaaaaaaggtgaatgaacargttttattatgggtaattcactcttccatgttctatatacattaaaaatgcatcaaacaagtgaacaccctttagaattcctgacactcaatttttttgaatgcttgtagaatgacttacattctattctctgaaaaagtataggatgagttttcaaatcattagttgtaaggatcctcaaggaatgcaaaactctaaa

SEQ ID NO: 760989 - DNA, 654 bp, Homo sapiens
tgtagagtcacctttgatgtgccaggcacttgctcaagccaaggggtgtggagataaatcagtccctgcccttatagattccagactaataagggagataaacacggacttaaatgattatgatacaatcagataagttatcacagagttatctgtaaagatcatgatgacctggaaktccgtacatgcaggaattgctattaagtgcttttgaatgaagagagtagccatctgcccggccaacctacatgtgcattattctgtcattctcctcctctcttggttggactcaacttatagcctatttgacctgtggcactggccagaccattggccaatttcctagatttaattcatgctagccattaatatcctgttgcatcaaaatacagtatcgggcaggggaaaagcacagtaccagaattatttctcccgagaagaggcaaaccaaagtttccctaatagcaattaaatgtttcagaaagcacaataactcttttccatatgttgggatatagggcaatcttattagacaattagaagagacctggacttagataaggaaactaattcattgtgagtctataggcaagacattttatgaaaatctgcccaagatttagatcactcctgtacttaactgggtttacaagg

SEQ ID NO: 760990 - DNA, 634 bp, Homo sapiens
gtgtggcaattcctcaaaaacctaaaaacagaactaccattctacccagcagtcccattcctgagtatatacccaaaggaatataagttattctaatcttaaagacacacaacatgctaatgttcgttgcagcactactcacaatagcaaagacatggaatcaaccgagatgcccatcggtggtagactagataragaaatgtacatatataccatgcagtaccatgcagccgtaaaaaagaacaggatcatgtcctttgcaggaacatggatggagctgcaggccattatccttagcaaactaacacagaaacagaaaaccaaatacagtatgttctcacttataaatgggagctaaataatgagaacccatggacacatagagggaaaaaacagccacagggtcctaccagagggtgcagggtggaaggagggagaggaccaagaagaataactaatgggtgctaggcttaatacctgggtgaaacaggcatacctagatgaaataatctgtacaaccaactcctgtgacacaggtttacctatataataaacttgcacatgtaccactgaacttaaaaaaaagtcagaatgaaaaaaaaattaaaaatactttatttttagggccatttta

SEQ ID NO: 760991 - DNA, 634 bp, Homo sapiens
gtgtggcaattcctcaaaaacctaaaaacagaactaccattctacccagcagtcccattcctgagtatatacccaaaggaatataagttattctaatcttaaagacacacaacatgctaatgttcgttgcagcactactcacaatagcaaagacatggaatcaaccgagatgcccatcggtggtagactagataaagaaatgtacatatataccatgcagtaccatgcagccgtaaaaaagaacaggatcatgtcctttgcaggaacatggatggagctgcaggccattatccttagcaaactaacacagaaacagaaaaccaaatacagtatgttctcacttataaatgggagctaaataatgagaacmcatggacacatagagggaaaaaacagccacagggtcctaccagagggtgcagggtggaaggagggagaggaccaagaagaataactaatgggtgctaggcttaatacctgggtgaaacaggcatacctagatgaaataatctgtacaaccaactcctgtgacacaggtttacctatataataaacttgcacatgtaccactgaacttaaaaaaaagtcagaatgaaaaaaaaattaaaaatactttatttttagggccatttta

SEQ ID NO: 760992 - DNA, 474 bp, Homo sapiens
ttctgtgcactcacaggctcaactccatgtggaagctgccaatgcttggggcttgcaccctctgaagccacagctcaagctctacattagcccctgtcagccacagctggagcggctggaatgcaggacaccaagtccctatgcttcacactgcatgaggacctgggcccacaaaaccattttctcctaggcctctgggcctgtgatgggaggggctgctgtgaagacctctgacatgccctggagacattttcrccattgtcttggggattattatttggctcctcgttattaatgcaaatttctgcagccgcctttaatttctcctccgaaaatgggggggttttcttttctatcacattgtcagtctgcaaatattccaaattttatgctctgcttcccttataaaactgaatgcctttaacagcacccaattcacctcttgaatgctttgttgcttagatatttcttccg

SEQ ID NO: 760993 - DNA, 504 bp, Homo sapiens
cacaagtaacttaaaatccgtttaagaggggccactccaatgcctgatgaagtgagcaaggtgaatgatatggttaggctttgtgtccccacccaaatctcagcttgaattgtagatcccataatccccacgtgtcatgggagggacccagtggraggtaactgaatcatgggagtgggttttcccatgccattctcctgataatgactaagtctcttgagatctgatggttttataaatgggagttcccctgtacaagctctctcttgcccgcaaccatgtaagatgtgactgctcctccttggccttctgccatgattgtgaggcctccccagctatgtgggactgtgagtccattaaacctctttcctttataattacccagtcttgggcaggtctttactagcaacatgagaacagactaatacagtgaagaatcaggaaaactatttaggcctgtggagaactgggagcccctgcaggggaggaaggttgagactctgc

SEQ ID NO: 760994 - DNA, 582 bp, Homo sapiens
ctcccactgatcttgccccataagaacgtgggccaaggggcaggggtgaggactgaaatagagatgttcatgtggaagtcgtaagagtttgcacaaatatatactgacacgtatccaccattagagcaccacacagtatttctttggggtaaccaattaaatgtaagtttaaacactgagcaccataagaaaaaactcactgtagaaaaaattcaatctgaaaactatccattagctgactctggaatacacagtaatattttatcagagaatcctaattccttttcttttctcttttttctttcttttcttttcttttcccttctctcttcatctttcatttgctattcttttttagtagattttgtgttatgtttagagtagttttaagtttactgcaaaattgagagkaaggtactgagatttcccatatacgctccaccctgacacatacatcagcctcccccatatcaacatcagccaccagagtggtccatgtgttacaatggatgatcgcacattaacacatcattatcacccaaagttgcagtacatgttagagttcactcttggtgtaagttc

SEQ ID NO: 760995 - DNA, 420 bp, Homo sapiens
aagttctaatgtttcttagcagagtaggttgactacagtaaacaatatattggatctttgaaaatagctagaaaagataactttttggggaaggttatatatacaaatttactttttaagtgttattataatttactggattaatttggatttttttattttagattcaggaagtgcatgtgcaggtttgtttcctggttacattttctgatgctgaggtttgggtcatgaatgatcccaycacccaggtagtgaatgtggtaactaagaggtttttaaccctttcttcccttcctccctcccacctccagcagtccccagtgtctgttgttctcatttttatgtccctgagtacccaatgtttagctcgtacttataagtgagaacatgggatatttggttttctgtttctgcattagt

SEQ ID NO: 760996 - DNA, 597 bp, Homo sapiens
aggctggagtgcagtgctgtggtcagggctcactgcagcctccacctcccaggctcaagtgatcctcccacctcagcctcccaagtatctgggactataggtgaacaccaccacactgggctaatttttgtattttttattgatacggggttttgttatgttgcccaggcaagtctcaaacttytaggctcaagtgatcctccctcctgcctcagcctcccaaaatgctaggattacaggcgtgagtcactgagccgggccataggttttttgttttttttttttttttcatgtccaaatgcagtgatactagatattctaatcttccaagaggcaccaaaattctgtaacttcatgtgagaaaaaaagctgaattaatttaggctatctgttcgtgttaaatcactgatttggccatagaaaacaagtctgcgtgctagatatccttcgaggactaccaatttgaaaattctgattaatttattttgcatagattgttagatggtaagcaagttttcattgttataaacagtgcagaagtgaaaaaaatacacatcaacaatttaaaaatttattaactttgatcttcattaccac

SEQ ID NO: 760997 - DNA, 597 bp, Homo sapiens
aggctggagtgcagtgctgtggtcagggctcactgcagcctccacctcccaggctcaagtgatcctcccacctcagcctcccaagtatctgggactataggtgaacaccaccacactgggctaatttttgtattttttattgatacggggttttgttatgttgcccaggcaagtctcaaacttctaggctcaagtgatcctccctcctgcctcagcctcccaaaatgctaggattacaggcgtgagtcactgagccgggccataggttttttgttttttttttttttttcatgtccaaatgcagtgatactagatattctaatcttccaagaggcaccaaaattctgtaacttcatgtgagaaaaaaagctgaattaatttaggctatctgttcgtgttaaatcactgatttggccatagaaaacaagtctgcgtgctagatatccttcgaggactaccawtttgaaaattctgattaatttattttgcatagattgttagatggtaagcaagttttcattgttataaacagtgcagaagtgaaaaaaatacacatcaacaatttaaaaatttattaactttgatcttcattaccac

SEQ ID NO: 760998 - DNA, 466 bp, Homo sapiens
aagtggcatcattcatttggggtgatacctgaggttcattgtcccatgccaaggcaatcaaggatgcaaacacacaatgagtgaggttcacagcagaagttaaacagacaaaagaaagacaaaagctctctcctgcagagagaggggtcctgaacaggtcttccagtccatggtgaagtgcagatggttctgcagatgagcttgcggagttagtgtcttgtttacacagggcaggaaagattggttggaccaggtgtgccatttgcatagcatgcaaagaactggttagcagtaggtgtactgtttgcrtaggtgagaagaagctgccaccccaccccaattttttattatgcggatggggtctctacctggctggcgccatgttgcctgtttctttactgtacacgtggtgacaaaagagaagatggagcctctatatcgaacatacttggcccccaagtagccc

SEQ ID NO: 760999 - DNA, 633 bp, Homo sapiens
cctttgtggtgatttaattccttcttggttttttgttattgttattgttttggggttcagggtgtgtgcgtgtgcgtgtgcgtgtgtgtgtgtgtgtgtgtgtgtgttttggccaagatttgggattatttcattcttcctgaataacaacccttgatattttctttaatctgggtcttctggtaacaaagacagtttctctttgtctgaaatgtctttatttcactatcattcttaaagaatatttttgctgagatactttcaattattttggttgagaagtcacctgtcagtctacacattttttccctctaattggaaagataacaatgaattttaaagaactagactttagttctggagggacatggctgagaatcctggctctgctataactagtgagtgcctcaagctttcacacctgtgaaatggggataacaatatctcccttgctgtgattttgtaaagattggagataaattattattattttttagwcatgtggcctaatgggcacttaaaataataacaatattattataaatgttaataagttaataactttcttataaatccttcttgttcagaaaaacaaacatctgtatagcccctgcacataagagcaaatggacc

SEQ ID NO: 761000 - DNA, 586 bp, Homo sapiens
cggactattgaatacattctgacctaagtcttattgatagatttgtttctgcagcacctagaatagtactttatttatagatgattttcagcatatattttttagttgaatgtaatccaggcaaaagacaacatgcagtaayaaaaaaatacaagaaaaattgtttttcaggaaatgaaaattaagatatgtgtatttttgctttttaagtttaaatatttgatacaatttatgacacattggatttaaaatgctagtagtgatggcatcggccactccagatggcctgccgctgccatcatactggctgtatcagggacatgtgggcagggctgcaaactccatggagccgatggggacaggggagaagtgggaaccctgccccttctgagttggagaggaagctccctgggtgccgctgctgatgcctaaactatgtctgcagactcaggcagccctgcactcttgggggcccaggaaggaccccccttccctggcaggctcagaagtgcctgatcctgctgcctggcttctccctgctgtcggtgcccactttgatcttggatcaaagccgaggctgatccct

SEQ ID NO: 761001 - DNA, 586 bp, Homo sapiens
cggactattgaatacattctgacctaagtcttattgatagatttgtttctgcagcacctagaatagtactttatttatagatgattttcagcatatattttttagttgaatgtaatccaggcaaaagacaacatgcagtaataaaaaaatacaagaaaaattgtttttcaggaaatgaaaattaagatatgtgtatttttgctytttaagtttaaatatttgatacaatttatgacacattggatttaaaatgctagtagtgatggcatcggccactccagatggcctgccgctgccatcatactggctgtatcagggacatgtgggcagggctgcaaactccatggagccgatggggacaggggagaagtgggaaccctgccccttctgagttggagaggaagctccctgggtgccgctgctgatgcctaaactatgtctgcagactcaggcagccctgcactcttgggggcccaggaaggaccccccttccctggcaggctcagaagtgcctgatcctgctgcctggcttctccctgctgtcggtgcccactttgatcttggatcaaagccgaggctgatccct

SEQ ID NO: 761002 - DNA, 586 bp, Homo sapiens
cggactattgaatacattctgacctaagtcttattgatagatttgtttctgcagcacctagaatagtactttatttatagatgattttcagcatatattttttagttgaatgtaatccaggcaaaagacaacatgcagtaataaaaaaatacaagaaaaattgtttttcaggaaatgaaaattaagatatgtgtatttttgctttttaagtttaaatatttgatacaatttatgacacattggatttaaaatgctagtagtgatggcatcggycactccagatggcctgccgctgccatcatactggctgtatcagggacatgtgggcagggctgcaaactccatggagccgatggggacaggggagaagtgggaaccctgccccttctgagttggagaggaagctccctgggtgccgctgctgatgcctaaactatgtctgcagactcaggcagccctgcactcttgggggcccaggaaggaccccccttccctggcaggctcagaagtgcctgatcctgctgcctggcttctccctgctgtcggtgcccactttgatcttggatcaaagccgaggctgatccct

SEQ ID NO: 761003 - DNA, 659 bp, Homo sapiens
tggcctcctatgcatccatctctttgccatttttgtcaattcttttctgattgattactctagatttggtacataattctaatgtgaaactgttgcttcctccccactgtatttttttttttttttttttttgagacggagtcttgccctgtctcccaggctggagtgcagtggcacaatcttggctcactgcaagctctgcctcctggattcactccattctcctgcctcagcctcccaagtagctgggactacaggccccaacaccaagcctaagtttttttttgtatttttagtagagacggggtttcaccgtgttagctaggwtggtctcgatctcctgacttcgtgatccacccgcctccacctttcaaagtgctgggattacaggcgtgagccaccgtgcctggctgcttcctccccattgtttaataatggacacaatttttttttgttcttatgttatttttcaaagttcatcttccattagcttaaaaaaaaaaagatccatggttcctcctttgcagcttggcaatcaaactaaaaaaattgaagcaatatagtctcagaaaagtgaagacattatttcactgttttcttatgatcaattgctactaaaaatgggaagataagtatattcagtattataaatgtaatta

SEQ ID NO: 761004 - DNA, 659 bp, Homo sapiens
tggcctcctatgcatccatctctttgccatttttgtcaattcttttctgattgattactctagatttggtacataattctaatgtgaaactgttgcttcctccccactgtatttttttttttttttttttttgagacggagtcttgccctgtctcccaggctggagtgcagtggcacaatcttggctcactgcaagctctgcctcctggattcactccattctcctgcctcagcctcccaagtagctgggactacaggccccaacaccaagcctaagtttttttttgtatttttagtagagacggggtttcaccgtgttagctaggatggtctcgatctcctgacytcgtgatccacccgcctccacctttcaaagtgctgggattacaggcgtgagccaccgtgcctggctgcttcctccccattgtttaataatggacacaatttttttttgttcttatgttatttttcaaagttcatcttccattagcttaaaaaaaaaaagatccatggttcctcctttgcagcttggcaatcaaactaaaaaaattgaagcaatatagtctcagaaaagtgaagacattatttcactgttttcttatgatcaattgctactaaaaatgggaagataagtatattcagtattataaatgtaatta

SEQ ID NO: 761005 - DNA, 659 bp, Homo sapiens
tggcctcctatgcatccatctctttgccatttttgtcaattcttttctgattgattactctagatttggtacataattctaatgtgaaactgttgcttcctccccactgtatttttttttttttttttttttgagacggagtcttgccctgtctcccaggctggagtgcagtggcacaatcttggctcactgcaagctctgcctcctggattcactccattctcctgcctcagcctcccaagtagctgggactacaggccccaacaccaagcctaagtttttttttgtatttttagtagagacggggtttcaccgtgttagctaggatggtctcgatctcctgacttcgtgatccacccgcctccaccttycaaagtgctgggattacaggcgtgagccaccgtgcctggctgcttcctccccattgtttaataatggacacaatttttttttgttcttatgttatttttcaaagttcatcttccattagcttaaaaaaaaaaagatccatggttcctcctttgcagcttggcaatcaaactaaaaaaattgaagcaatatagtctcagaaaagtgaagacattatttcactgttttcttatgatcaattgctactaaaaatgggaagataagtatattcagtattataaatgtaatta

SEQ ID NO: 761006 - DNA, 638 bp, Homo sapiens
agggctatatgatttaagtttacacaatgaataagagtgtcatgatttcagagtcccaaccttagacgtaatgaaacattggtcttgtttctttttaatatgacagatttgtatttatactcaattcatgatttgactgacacttagaaaaaaattaattatacatagacaaaattttcttttttttaagttaatattcacatttgaccactttctaaaattcttaaatggtttataccaagcaatgtaatattagatatataatttttaatgcttcaaggatataactaaaaaggaacgtatataataaatgctattattattgctagataatacagactgaagtctatatttacattatttgcagyatgatattttatctaaaatagattttaatttaaaaagtaattaagattgtatcagtaaggactctttatatgcatgttatagaaagccctattcagattgattaatataaggaaatgtattgactcatgaagctgaaaattcagaattagggcaggttttaagtttgatccaaaggtccacaaagtcatcgggtctcattttcctgcaattcgcttagctttacttcctctgtgtgttttctgcatacttaagctggcttccctcatgta

SEQ ID NO: 761007 - DNA, 617 bp, Homo sapiens; identical to SEQ ID NO: 755863

SEQ ID NO: 761008 - DNA, 546 bp, Homo sapiens
cgtatttgtacttccaagtccccagtaatgttcttttctgaaacaggatccagtctaggatcccgcattgatctaatgtgcatgcctccttagtctccttgaccttgtgagagttcctcagtcgatttttgtcttttatgaccttgacacttgtaaaaagtttaagacagttatttagacggtctctcactttgggtttcactaatgttttctcatgattagattgagattacatattttgggcaaaattaccacagaaatgatagtgtgcctatcttcagtgcgtcatatcagggggartaagatgtccatgtgtctggttattaatgttaaatttggtcctttggttaaagtgggacctgctgctatttgtccatttgtaagtaatacatgcctttgacctgtttctaaagatactaaatacctgtttagcaaaggtactagaactttcttattcatcatttacccactaatttgatgatctatgactaattcctgcctataacaattattactataatgtttacttaaggaagattttctgtt

SEQ ID NO: 761009 - DNA, 554 bp, Homo sapiens
ttaatcctcaaaacaattctgtgagataggtagtattactattcttactttatagaaagagactgaggcacagaaagactaagtcaaatatcccagtactgaccacttaataaacattagggctagagtttaacccctaacaatctaatgccagagcctgcttaactaatgtgctatgtgttaccagctgtctctatagaaagctaattctaactggtatgagatggtatctcattgtggttttgatttgcatttctctgatggccagtgatgatgagcattttttcatgtgtctattggctgcataaatgtcttcttttgagaagtgttttttcatatccttcacccacttyttggtggggttgattttttcttgtaaatttgtttaaggtctttgtagattctggatattagccctttgtcagatgggtagaatgcaaaaattttctcccattctgtaggttgcctgttcactctgatggtagtttcttttgctgtgcagaagctctttagtttaattagatcccatttgtcaatgatggcttttgttgcca

SEQ ID NO: 761010 - DNA, 554 bp, Homo sapiens
ttaatcctcaaaacaattctgtgagataggtagtattactattcttactttatagaaagagactgaggcacagaaagactaagtcaaatatcccagtactgaccacttaataaacattagggctagagtttaacccctaacaatctaatgccagagcctgcttaactaatgtgctatgtgttaccagctgtctctatagaaagctaattctaactggtatgagatggtatctcattgtggttttgatttgcatttctctgatggccagtgatgatgagcattttttcatgtgtctattggctgcataaatgtcttcttttgagaagtgttttttcatatccttcacccacttcttggtggggttgattttttcttgtaaatttgtttaagktctttgtagattctggatattagccctttgtcagatgggtagaatgcaaaaattttctcccattctgtaggttgcctgttcactctgatggtagtttcttttgctgtgcagaagctctttagtttaattagatcccatttgtcaatgatggcttttgttgcca

SEQ ID NO: 761011 - DNA, 604 bp, Homo sapiens
gtatgttatcttaattagagcaaaaaattgatgactaagaaattaaagttcaagccctaatactaccatgaaccagtggtgttccgggagttagccatgttttctgtataagttgcattttcctgtctataaatgtggatgtaatggtttcctctaatattcyatggttgcagcatttttctgcctcttgataattatttgttcaatatctggcctccctgtaggtagcatgaggacaagattctgcttgtcttttcacccacatgtctttgtatctatcacagtgtttggcatctagtggtcactcaagtgccctttattgagtgagaagacacagggattcattcacctgagagactcaggtaatgccaatacagaatacagtatctgtctaatcagaatattctggagaaagttgttccactcttgtcttgctaatattgacagcagtagtgtgtttgatatttatgccacccagccaatgtttggaagagttattttctctagatgtatgatgttacttctcaggttgctgcaaatgttgagatcattaatttatgtattttagcttcagggaatacacatgcacacatacacattgttt

SEQ ID NO: 761012 - DNA, 664 bp, Homo sapiens
atgagttgatgtgtggagcaagtgcttaagaagtggtaattattcctttatggctttctttatctggaccaaatgtactttcaataagaagcctttctctctgaccactctcttcacctaactgcaacacatctcccgaggcccctggtggaattttgtgcgaaatgaagctgtaccacctggcttttgaagagctctattatcatctgtttatgttttctcacctgataaaagtgaggcttctccagtgtagtgctgttctttctctgttttcccygtgctcccctgcattcaggggagactggctagtaaagaagtaactcagaaggatgccccagagtcttcctcttcctttaagagctgacctaagtctcattccctgaccataacactgcactccctgtagccaacctgggcattcagtcctttgagctcactgccttcccttcctaagcatttatcacaactgaaccacacttgcctgttaaaaacagactagttaagtgttccagtgccagtaaatagcatgagacaaagcctggaggtaagacctaaaagacatccatcatgatgaagtgatgaacacagaatgagaatgtggcgtggaggtgagcttggagccttaatatccatgtttatgagtcacttaaaggcaggctaggtg

SEQ ID NO: 761013 - DNA, 638 bp, Homo sapiens
agaccaagtagtcatattattgcctgatggttaagttttgattgtaaaaggttgtaaaactctcttaagaatcaaggcaagtttttataaagacaaatagaagagtccatttgtttcaaagcattgtgatgctcacttcagtagcagtctcatggctattgaactcactttcaacaccatagtcaaagaatgagtttttgcacttttctctctattctttgcctgttaacttgatacatggcatgtggatttcaatttttgaaccagaatatttaagttgcatctccactttttcatctccaataaataaatttttccaaaagcagattctccatataacaggttgactttgagtcctttttgaactctttattaaatcttaccaaaaatctttgccgtatttattcattcgacaaatgtaatgtcaagatcatraaagctcagacttgtgtcttcataaagaaaacgtaaatctcataatcataaatatacatatacgcatatatataatacacacacatagatcatttcacaaaatacttcattaaaagaaactgtgctccaagggctatatgatttaagtttacacaatgaataagagtgtcatgatttcagagtcccaaccttagacgtaatga

SEQ ID NO: 761014 - DNA, 638 bp, Homo sapiens
agaccaagtagtcatattattgcctgatggttaagttttgattgtaaaaggttgtaaaactctcttaagaatcaaggcaagtttttataaagacaaatagaagagtccatttgtttcaaagcattgtgatgctcacttcagtagcagtctcatggctattgaactcactttcaacaccatagtcaaagaatgagtttttgcacttttctctctattctttgcctgttaacttgatacatggcatgtggatttcaatttttgaaccagaatatttaagttgcatctccactttttcatctccaataaataaatttttccaaaagcagattctccatataacaggttgactttgagtcctttttgaactctttattaaatcttaccaaaaatctttgccgtatttattcattcgacaaatgtaatgtcaagatcatgaaagctcagacttgtgtcttcataaagaaaacgtaaatctcataatcataaatatacatatacrcatatatataatacacacacatagatcatttcacaaaatacttcattaaaagaaactgtgctccaagggctatatgatttaagtttacacaatgaataagagtgtcatgatttcagagtcccaaccttagacgtaatga

SEQ ID NO: 761015 - DNA, 638 bp, Homo sapiens
gaaaaaaataaaatgctcaattttatccttctctttcttgttttcgtggctaagaagtttagaatagtcattgggtgggggcctagtgttctgcatttctaacaagcttccacgtgatgctgttgctgctactgatgatctgccaagcacacttgaaatagcaagactttaaggaagtcttgttatttgaaaagagagtcttgtgactttgtgataattcttagagcraattaagaattcgctccactgaattcgctccactgcaccactgaaaaaaggacgttggcttcattcccaggatgcgaggctggttcaacatatgcaaatcaataaatgtaattcatcacctaaacagaactaaagacaaaaaccacatgattatctcaaaagatgcagaaaagaccttcaataaaattcaacatctctttatgtcaaaaactctcaataaactaggtattgaaggaacatacctcaaaataataagagccatttacgacaaacccatagccaataacatactgaatgggcaaaaggtggaagcgttccccttaactggcacaagacaagggtgccctctctcaccactcttattcaacataatattggaagttctggccagagcaatcaggcaagagaga

SEQ ID NO: 761016 - DNA, 619 bp, Homo sapiens
tattttcttccattctgtagattgtttgtttattctgttgattatttctgttgctatgcagaagctttttagtttaattaggcccaatttatttattttgcttttgttgcatttgcttttggggccttagaaataatttttttgcctaggcyaatgtccagaagagtttttcttagattttcttctaaaatttttatggttttagctcttggattcaaggtatcttagttttagttttagacactagggatttgatagtagataagatgcctcttaagaaacctattatgcaaacttgactatggaacagtgtggaagatacaagggaagtacgtttgagaggtcacttaactccttcataaggcattacaggagattttctctagaaaatgatttcaaagcagacacttgaaagtattagccagaaaagattttgaggtgtgagacaaagaagaatatctcaggaagaagaaatagtgggcatgatgtctcaaacatcaaaacagggcaagtttatagaagaacagtgcttctcaaatgttaatgtccacattaatcacctggggatcttgttaatcttttttatccttaggatcctaatatgtacatttgcacagag

SEQ ID NO: 761017 - DNA, 578 bp, Homo sapiens
ctccttcaggctcaagccatttcccaacctcagcctcccaagtagctgggaccacaggtgagttccaccatggccggttaatttttttttttttttttttttgagatggagtctcacccggtagccaggctggagtgctgtggcgtgatctcggctcactgcaaactctgcctcctgggttcaagtgattctcctacctcaggctcccaagtatgtgggactacaygtgagtgccaccacgcccggataattttttggtattttcagtagagatggtatttcaccttgttagtcatgacagtctggatttcataacctcgtgatccgtccgcctcagcgttttaaagtgctgggattacaggcgtgagccacctcttctggccttttttttttttttttgagacaaagtctctgttatccaggctggagttcagtggcatgatctcagatcactgcaaactctgcctcccaggcaattctcctgttttagcctcccaaaaagttggggattatagtccagtgccaccacccccaactaattttttttgtatttttagtagagatggggtttcaccatt

SEQ ID NO: 761018 - DNA, 516 bp, Homo sapiens
acagagcaagattctgtctcaaaaaacaaaaacaaaacaaaacctcatggcagactttaaagatatccagttccctatttgctactcctgtgcttttgattcagtagttctgggaagagagctcagtgtccacatattacagtgctctttaaagattcagaaggaggcagtcagtggaggaatttgtgaratattttcctaagtccatctgtaatgtcttctttcctacagaaacatagggctggggatctagaaaacttccaacatgtcatgtttcctactttttataagcaggagtctctttctaacctgttggagcaaggcaaagagccctggactgtgtagcatgaagtgaaaataagatgggtgggaattttttttttttttttttttttttttttgagacaatctcactcttttgcccaggctggagtgcagtgacacgatctcggttcactgtaacctccacctctggggttcaagcaattctcctgcctcaggctcccaagtagctgg

SEQ ID NO: 761019 - DNA, 631 bp, Homo sapiens
agttttttttaatttagtagattcaaggtttcattatgtttgcccgactggtctcaaactcctgacctcaagccatctacccacctcagcctttcaaagtgctggaaatagaggcataagccactgcggctggccagtctaagctatttctaacagaacgatgaaatgagtgagayaggaaaaggggcatctcatcatcacatcaccaaaggccgacaaatcttattaaacaaaggaagtttagagtctgtcctgtaaaacttataatatatgaagccatctaataatattcacttgttttaaaaagcaggtggatgaatcacaagtagaaactccacctctactaaaaatacaaaaattagccaggcttgcgccaggcataatgggcaggtggatcaagagatcagcagttcaagaccagccaggacagtatggtgaaacactgtctccactaaaaaaatacaaacaagtattagccgggcatggtggtgaacatctgtaatttcagctactcagaaggctgaggtaggagattgcctgacctgggaggtggaggttgcactaagctgaaattgcaccactgcactccagcctgggtgacagagcaatactccatcttaaaaaaaaaaaa

SEQ ID NO: 761020 - DNA, 631 bp, Homo sapiens
agttttttttaatttagtagattcaaggtttcattatgtttgcccgactggtctcaaactcctgacctcaagccatctacccacctcagcctttcaaagtgctggaaatagaggcataagccactgcggctggccagtctaagctatttctaacagaacgatgaaatgagtgagataggaaaaggggcatctcatcatcacatcaccaaaggccgacaaatcttattaaacaaaggaagtttaragtctgtcctgtaaaacttataatatatgaagccatctaataatattcacttgttttaaaaagcaggtggatgaatcacaagtagaaactccacctctactaaaaatacaaaaattagccaggcttgcgccaggcataatgggcaggtggatcaagagatcagcagttcaagaccagccaggacagtatggtgaaacactgtctccactaaaaaaatacaaacaagtattagccgggcatggtggtgaacatctgtaatttcagctactcagaaggctgaggtaggagattgcctgacctgggaggtggaggttgcactaagctgaaattgcaccactgcactccagcctgggtgacagagcaatactccatcttaaaaaaaaaaaa

SEQ ID NO: 761021 - DNA, 554 bp, Homo sapiens
ctgtagtatttatcctaagctgtggttcagctgacccataattctttctcctttcttttattttgccctgttgaacattcactgagggatcacttcttctgagacctcagttttttcatctgtatattcaacgagttggaatagatgctctttgagatactctcaagttcrgtgtttctaaaatttactaaaaagacaaccccatacaagcaagggcacagagcaagggctttggtccacagagtaggggagggtagaggtgaaatgaaaaggagaaaaagcttcagagacaaaggtgcagagcaaaaacgaagggggtgcctatgctgagatggacacttgctctattcctctagtgacttaaaatgttgaaaattggtatacataaaaatgtgttaatatggtattttctgacgacggaagagagatgagatggtgagagccaggtgtggaaagtggagatgtgcccatagtggatatcttgcacatcacaattttgctcccaattagcagtacaatcctctgtgttagtctgttttcacactgctataaag

SEQ ID NO: 761022 - DNA, 518 bp, Homo sapiens
tacagtcacagctcactgcagcctcgacctcccagggctgaagggatcctcccacgtcagcctcccaagtagctgggactacaagagtgtgccaccatgcccagctaacttttttttaatttttattttttgtagaggtgggattttgccatgttgcccagggtggctcaagtgacccacccacctcagcctcccgaagtactggaattacaggtgcgagccatcgtgcctggccatgttttgttgtttttaaatagacttaattttttcaaacagttgtaggttcacagcawaattgatgagcagcaggtactgagttcctatacatccctgtcctcacacccacacagccttcccaactgtcagcatcctgtgcagggtggtacatttgttacaactgatgaaagctggctgacgcaccatcacccaaaatccacgtttacacgagggttcgcccttgatttgtacattcttggtttagacagatgagtaaggacatgcacccaccattccatgtc

SEQ ID NO: 761023 - DNA, 615 bp, Homo sapiens
ctatactcctaaaataattacaaatgtccatgatattatcattcctactttccttctctagctttcatagggtcaagcttggatgcattttgcttcacccaattcaacagctttcccaagtaccctcaggtggtaatgccctcactcaggccaccaagrgaatagcgtctgaagctgagcagtttacctaccaccaaggtagaatgcttcacccactgccctttcagaataaaacgatggccacagacaccatcactaagttttgaaaaagactaaacttgttgagctaacagctctaaagcagactgtagtatggtggaaaacggcccccaaagacatcggctcctaatctctggagcctgtgaatgctaccttataaggaaaatggtctttgaagatgttataaaaaattttgagataaaagagattatcctagattatctgggtaagccttaaatgccactcaaatgactttataagaggcagagggagatttgacacctcacaaagtacagaaggtgaagcagactggagtgatgtggccacaggtgagggaatgctgcagcccaccagaggctggaagaagcaaagagcagcttccctccacagccctgc

SEQ ID NO: 761024 - DNA, 521 bp, Homo sapiens
gaacatttacgttttattctcttagcaattttgaaatataaaatattctattattaaatatattcaccatgctgtgtaatagaactaagaaaaccccatatttttcctctaactgagattttgtacacttcatctccccattctccacagtcccagtctctgtaaccagcctctccgcttctatgagttcaattgttttagattccatacataagtgagaacatgtggcatttgtctttcyatgtctggcttatttcacttagcataatgttgtccagttccattcatattgttacaaataacagaatttccttcttttgaatgactgaatagtattccacagtatatatacaccacattttctttgttcatttgttgatggacagttagggtaatttctttctttctttctttcttttttttttttggagacagagttttgctctgtcacccaggctggagtgcagtggtgcagtctcggctcactgcaacctttgcctcctgggttcaagcaattctca

SEQ ID NO: 761025 - DNA, 644 bp, Homo sapiens
ttgtctgctaaatgaaaagtccctggccccagaataattagcagtgatacccaggtactgcattgagggccttgggtgagcctgtgagaccttgctggcttcaagtgagactcagtacatcattatcagctgaggtggctgtggggcaaaactccttctgtttgagaaaagaatagggaaaagtaaaggggactttgtcttaaaccttaggtatccccacaaccacaggagggcagagcaccaagggggctgttggggtccctgattccaagcactgactcttggacagcattcctggatctgtcctgggctagaggaaagcccactgccctgaaggatgaatcctaggccaggyagcattaactgcaagctgacttaagagcccttgggccttaagggaacattgactggcagtctggcagtactctttgcagcctggatggcaatggctatgggataaggctcctctgcctttccaaagagtaggtaagagggggaaggactatgtcttatggtttgaatgcccgctcagctgcaatacaatagaacagcaggtagacatctaaggtttctgactccaagacagcacctctggatccacctggggcctgggggacctcaccatcctgaagggaaggaaacag

SEQ ID NO: 761026 - DNA, 642 bp, Homo sapiens
attgccttgaaggaaaaaacccagttctgccagcgttcattgtctgctaaatgaaaagtccctggccccagaataattagcagtgatacccaggtactgcattgagggccttgggtgagcctgtgagaccttgctggcttcaagtgagactcagtacatcattatcagctgaggtggctgtggggcaaaactccttctgtttgagaaaagaatagggaaaagtaaaggggactttgtcttaaaccttaggtatccccacaaccacaggagggcagagcaccaagggggctgttggggtccctgattccaagcactgactcttggacagcattcctggatctgtcctgggctagaggaaagcccactgccctgaaggatgaatcctaggccaggtagcattaactgyaagctgacttaagagcccttgggccttaagggaacattgactggcagtctggcagtactctttgcagcctggatggcaatggctatgggataaggctcctctgcctttccaaagagtaggtaagagggggaaggactatgtcttatggtttgaatgcccgctcagctgcaatacaatagaacagcaggtagacatctaaggtttctgactccaagacagcacctctggatccacct

SEQ ID NO: 761027 - DNA, 586 bp, Homo sapiens
gtttcctgaatacagcacaccaatgggtcttgactctttatccaatttgccagtctgtgtcttttaattggggcatttagtccatttacatttaaagttaatattgttatgtgtgaatttgatcctgtcattatgatgttagctggtgattttgctcgttagttgatgccgtttcttmctagtgtcgatggtctttacaagttgacatgattttgcagtggctggtaccggttgttcctttccatgtttagtgcttcctttaggagctcttttagggcaggcctggtggtgacaaaatctctcagcatttgtttgtctgtaaagtattttatttctccttcacttatgaagcttagtttggctggatatgaaattctgggttgaaaattcttttctttgagaatgttgaatattggcccccactctcttctggcttgtagggtttctgctgagagatccgctgttagtctgatgggctttcctttgagggtaacccgacctttctctctggctgcccttaacattttttccttcatttcaactttggtaaatctgacaattatgtgtcttggagttgctcttctcg

SEQ ID NO: 761028 - DNA, 586 bp, Homo sapiens
gtttcctgaatacagcacaccaatgggtcttgactctttatccaatttgccagtctgtgtcttttaattggggcatttagtccatttacatttaaagttaatattgttatgtgtgaatttgatcctgtcattatgatgttagctggtgattttgctcgttagttgatgccgtttcttactagtgtcgatggtctttacaagttgacatgattttgcagtggctggtaccggttgttcctttccatgtttagtgcttcctytaggagctcttttagggcaggcctggtggtgacaaaatctctcagcatttgtttgtctgtaaagtattttatttctccttcacttatgaagcttagtttggctggatatgaaattctgggttgaaaattcttttctttgagaatgttgaatattggcccccactctcttctggcttgtagggtttctgctgagagatccgctgttagtctgatgggctttcctttgagggtaacccgacctttctctctggctgcccttaacattttttccttcatttcaactttggtaaatctgacaattatgtgtcttggagttgctcttctcg

SEQ ID NO: 761029 - DNA, 586 bp, Homo sapiens
gtttcctgaatacagcacaccaatgggtcttgactctttatccaatttgccagtctgtgtcttttaattggggcatttagtccatttacatttaaagttaatattgttatgtgtgaatttgatcctgtcattatgatgttagctggtgattttgctcgttagttgatgccgtttcttactagtgtcgatggtctttacaagttgacatgattttgcagtggctggtaccggttgttcctttccatgtttagtgcttccttyaggagctcttttagggcaggcctggtggtgacaaaatctctcagcatttgtttgtctgtaaagtattttatttctccttcacttatgaagcttagtttggctggatatgaaattctgggttgaaaattcttttctttgagaatgttgaatattggcccccactctcttctggcttgtagggtttctgctgagagatccgctgttagtctgatgggctttcctttgagggtaacccgacctttctctctggctgcccttaacattttttccttcatttcaactttggtaaatctgacaattatgtgtcttggagttgctcttctcg

SEQ ID NO: 761030 - DNA, 560 bp, Homo sapiens
gagactgatcatatttctaaggcttaattttgcctcttgtatctgatttttcaggtctcattttttatttcaactttaaaaaatgaaatcttaccctgttgcccaggctggagtgcagtgacacaattctggctcactgtatcctctgcctccctggttcaagcaattttcatgcctcagcctcctgagtagctgggattacaggtgcccgccaccatgcctggctaatttttgtatttttagtagagacggggtttcactgtgttggctaggctgttctcgaattcctgacctcaagtgatcctcccacctggtcctcccaaagtgctgggattacagacatgagccaccgtgcacagcctcccatcgctttctgacataaaaatggaccagtgtcatggttcacaatcttcttgcacrttgaagtcacttgaggaacctaaattaacttgagtcccacccttcaaaatgctgagttaattggtccaaggtgtggcatgggcactgggacttttaaagttccccaaggtgattctaatgcgtggtcaagattgagaccc

SEQ ID NO: 761031 - DNA, 614 bp, Homo sapiens
aggaaaaaaaaaaaaaaaaaaagccccaaaactataaagtcacagtgacagtcacaaacataattttcccacggtgctctgcatcccactttataatgaccactgcgcactctaatgttagtcttgcatcacctgaaacttctttaccctaggtgctatgggtttatgagaacataaatgatacatagttatagaatcacaagctgaatagactccaacattgtctaccatgaaagaaacatttattctccaccttatgccatgccactacttttgtttggacctattgaggtacatttattttattggattttaatgagcttgggacactgagaatgcatgtcaagaagtagaagggaggaaagaaaagaaaagtaatgttatggtctgctgtgctttcttacttaatacygaaaaaaatgcaaagaataattcacagatgaggacattgggatatgaaaagtgatagctctgtgatcacatagttagtacattgcagatcttggattttaactgatgttttacatgacttagaaacccttcatattatttacactacttatttctatcctgccaaatgtctctgttaatatccagactcttttttggattaa

SEQ ID NO: 761032 - DNA, 496 bp, Homo sapiens
tcataagtgcttgttacttagttctcacctcaactttaagaggtgttggtgggtaggaaagtagtgagagtgtagtttctagggtcggtgtatctaggtttggaaattacagttaatttacttatgagctacatggttggacaaatttatacatacatcggggatagaagtagcacttgcttgatatgattgttgagaagatggagagttaataacacataaagtaaaagtacctgctacagagtaagacactatgcttattagcatgttgacaacttgttgagaagaytgggttctcagagatcaggtttccgttcatctctctggaagtgacggtggggggggcggttgcctctgcagaccatgcctcggtttcccataaatgatcccggaattgcctcttgctggtgtttgccttcctatcagactggcctccagtctttcctgttgccacctgctctgcattcactgggcctccctgctggtgagtggcctt

SEQ ID NO: 761033 - DNA, 560 bp, Homo sapiens
agctagagaggaatctcacctatccggtctgttaaaactcaagtttctcagcaaggctcaccatcatgggccaaagtgctctgggtctctaggtaaacttgaaaggcaatgtaggacacaaagactgtaattcctaggcaactcctagtgctaggctaggctcagaaacagaggagtagagtggcatgtgacctacagagatatcagccagggcagctaaaggattgcttaccccaccccaccccaacctcaggcaatgggtctgccagcaacagaagtgtcttcttccttaygcttaaaaggaggggaaaaaaagaagaaagactttatcttagatacaagctcacccatagtaggataggacactgagcagagtccttaggtctgcaaacagaaaaacctaaagactccaccaaaaaactaccagaagtgatcaaccaattcagtgaagtggcaggcttcaagaccaacatacaaaaatcagtagcatttctatatgccaacaatgaacaatctgaaaaataaattaaaaaactaatcccatttaaaatagccacaaa

SEQ ID NO: 761034 - DNA, 618 bp, Homo sapiens
ttcattcactcaacatttctgtaagtctcctttttcaaaccctgactaccaaaaacacacttcatatatatattttttaaatctacttttccccacaagtaatctctcttggtacctctgatctacttattgagattttttttttttactttaaaccttgaaaattaatttttctttaaaacatttttctcactgtttctattagtagcatctcattctcattccctcaatttaacccccaatgtggccgggcgcggtggctcacgcctgtaatcccagsgctttgggaggccgaggcgggcggatcacgaggtcaggagatcgagaccatccttgctaacatggtgaaaccccatctctactaaaaatacaaaaaaaaattagccgggcgtgatggcaggctcctgtagtcccagctactcgggaggctgaggcaggagaatggcgtgaacccgggaggcggagcttgcagtgagccgagatcgcgccactgcactccagcctgggcgacagagcgagactccgtctcaaaaacaaaaaacaaaaaacaaaacaaaaaacaaaaaaaacccaatatgcccttgcttttttaatgctattgattacacacatcttaca

SEQ ID NO: 761035 - DNA, 656 bp, Homo sapiens
gataaattagtacaactatggagaagagtctggaggttcctcaacaaattaaaaatagagctgccatacaacccagcacttccactgctggatatgtaggcaaaacaaagaaaatcagtatatcgaagagatatctgcactcccctgtttgtttaagcccttttcatagtagccaagatttggaagcaacctaagtgtccatcaacagataaataaataaggaaaatttggtacatatacacaaaggagtactattcagccctgagaaaatgtgatcctattattgacaacaacatggatggaacttgaggacattatgtaaagtaaaataaatcagaatcagaaagacaaacttcacaatttctcacttgtatgtgggagctaaacatgaaaacaattgcactcatggagatagagagcagaaggatggttactagaggctgggaaggagagtggggatcamgagggaagtagggatcagtaatgggtaccagaaactatttatgaagaacgaataaaaggtagtgtttcataatacaacagggtgactatagtcaataacaatttaattgtatgtttaaaaacaaccaaaagtgtataattgaattgcttataacacaaataacaaatacttgaggagaataataccctatttt

SEQ ID NO: 761036 - DNA, 614 bp, Homo sapiens
tacatttgtgattataattctcttgaaatcaatatttgagaaatgttttcacaccagttactaaatggattattgattatgaaacgccttaaatcgttttcagggttgatcaattggtaatatatccacataatattcagacaaagaccactgtttccaggcttatgcttttctaatttagagagaaatcagaatcaaaatttttgctcaatatttatttataaatatagaatgtatcagcttctatcctattgacaacatagcccatcatttattaaacaaattagagcacctaytgggcaccaggaagtgagttagaccctgagcgtacaatggtgaggaacagaggcagatgctctgcctttatggaatttgtactctagaggaaaatgtacagagagaacaaaccttgaggggaaagctggagacacagagagacacaggtgaaaagtccatgtgactttggaggcaaatgttagctagatttacctacaagccaaggaacacgaagagttgccggaacccaaaagcatggaacagattctcactcagaacattgagacaaagcataatcctattgacagcttgattttagactttcagcctcctgaact

SEQ ID NO: 761037 - DNA, 593 bp, Homo sapiens
tgtagagggcaatgaactataaaggtagaaggataaagatgacaatggtaaagtatcagacagaaaaaaatacatgtagtgataagtgatagaaaaatcaaacagctattcagaaaaatagtcaaggcgcagtatgattctaaaaaatactgtcgagggtatttgatgtcccatgtttttatatatccactatctccttctttagtgaacatttaacaattatgctgaaaattattccagcatgaaaaatataaactcacatgtgcataaataaatggacaataaatggtcttctacacataaatacccttaggtggttttattctctggggaccttttttcctccctgaamattactaccgtaaaagctcattaatttgaaaaatggaatattctgaagaaatcatttgattaatttatcgtaatctaaagtccacattttgtgtcaactaagaaggcaggtttttcataaatgaaaatcatactgtgagttgcagtttacagtttgaatagatccaagtgtaaatggagtactgtcatttttaatgttatttaactataattgttgctaatatcttcaatttcagatattt

SEQ ID NO: 761038 - DNA, 580 bp, Homo sapiens
tcttcctagcaccattattaaaaggagtatcttttcttcattgacttcccttcattgtcaaagatcaagtaactgtaggtgtgtgcgttgatttctaggctctctatgctattccactgatcaagttgtttattattttgccaataacacactgtcttgattwttgtcttaacttatggtaagtcttgaaattagataagtttagtcttccaactttgcttctctttaatagtgtcatctattctaggaattttgcctttccatataaactttagagtcaatttgctaatatttacaaaatagttttctggaattttgaatgtgaattcattgaacctataaatcaagttagggataattggcattttagtaattactgaaatagagatgttgaagtctccaacaatattgagaatttgtgtatttctgcttttaatactgtcattttttgtctcacttactttgtgtctttcaattctttataatttattattcttatatttaagcccttttggtgtggtggtaagttgtgaggggagggaagtcttctgtaatctgattaaatctgtctcttatgggc

SEQ ID NO: 761039 - DNA, 697 bp, Homo sapiens
aaccttaaactggttggcttaggattgggctcaggggaagggaatccagaagcctgacatgctggcaaaagggtaaaaggttttttaccagttgggcctgtggcccccctctccctgtacaaactggtaaaaggcctcacaatttttgagctgttctctctcctgcctttttttcattttgatgtatgttttctaataatctgagttgtctcttctcaccttcaggccatcaaactccaaatggtcatgcaactggggtctcagacaatggccccttttgctgggaacccttagtttggcctctgagggagattggactgccattttcccaaaacagcaccccttgtcaacaggaagcagttaaaatcagtgttcatccttatccttatccttattctaatggcagttagatgtacttctttagaggggaaaatgatagasacaggaggcagccaagggacccaggtgaaaccctgccttcaagcctaaaacagcatgaaggctgaaaaattggactgcaggttccggattaagcctgccctttgccaactgatttttttctcaataatgcccacctacacactgggaggacggggtggagccttgggaagttcgcatcatttgcagcgagaaggagcctggcctctcctgttactgtatggtaacttgagattcagtcagtgagatgggggcctgt

SEQ ID NO: 761040 - DNA, 586 bp, Homo sapiens
ttgcagattggctttgtttgggaaagccctttaccagtcagccaacccagagatctgggaagcctgtctgggcatggttcacaggtgggcttgctacttgggattttgggcaggctggcatggtgccttggttagcaggtaggcaggcctaatgcctgagtctatgggattcagcctggagcctggattcactwgggtagacttttttatttggtccatgggagtgggctttgcacttcagtctgcagtggctggccagttgctggggtagatctggagcctgtgttcatgagaactagcatagcactgagggttggcatagagactgtttatgagagtgggcctgggtcctggttccaaaggggtggcctgaagcctgagtctacaggggtggtcctagagactcagtttatgagagccagcctgggactggggtctactggagtaggcttgaaccctgggtctgccagaacttgtctggacctgtgtccattggtgtctggatctcttggaacttaactggagcctgacgctactctggcactggggtaggtgttggacctgtgtctgtaagagccagtctgaa

SEQ ID NO: 761041 - DNA, 627 bp, Homo sapiens
gacaaaataggggtatattttcttaggtactgaaatcattgtattttatttataatatcaaaaattatgtgtacctttagaatagcatataagtaaaatgagggggatttaaaaaaaccatcatagcaaagagacagttgttttaagaacagtcttatagtttttggtttaatatgtccttgctgttaaacttatctacatatatttaactcattaagtggctctttcaaatttttttctaaaggttactttttaaaaaaattctgatttaccttcctatatatgtactggtttatagccataaaccaggagaggagtcaatataaatatgtgataatgttttgaarcttaaaaagcactaccaggttaccatcatgatgccataggaacaatttatttatctttccagttcatagttggcatgcagtggagagcattgtccaataagatgatccctgaaaacaagttaaacatctaaaaacattttgttgaggaatttgcctgagtcatgagggacaaatccagcacctcctgcctccctattatctagcacaccgatttgagaagactgaaatgaggccaattttccatataccctcaaacatttgaaagagccacagtgaagag

SEQ ID NO: 761042 - DNA, 583 bp, Homo sapiens
tgttaacttggcctgtctgttgcatatggggccaaactacacgcctacctgtggagcaaatgaatacagtgactcatctgtgagctgaggcttgagcaattccagcccaggaggctctccggcctgggaacagagtgggattttttgtctgaggaggctgagtctggaagaaggatgactctgtgggtggtttcctagatcctcaatgcacgtggcttccggccttgactcytcccttaaattctgggttgctggccaaggctgaagaacaaatttgcctcagcagccaactcctctatgtaagcctgacatttactctgtatctacataatatctattaagcaacacctgatcctgttcaccaggatgtatgttcccagggaaaccttcctttcaaagttaagcaggcattcttggtaagtagccctaacacctgggaatcatgcagttaactttccaggcctcaatcctacatgagtgtcctgggttataatagcatggctggatgggtggtgatctcaccattttagccagtggctcatcctgcatgggaagaaaagttttaaaatggcacagcttcctt

SEQ ID NO: 761043 - DNA, 583 bp, Homo sapiens
tgttaacttggcctgtctgttgcatatggggccaaactacacgcctacctgtggagcaaatgaatacagtgactcatctgtgagctgaggcttgagcaattccagcccaggaggctctccggcctgggaacagagtgggattttttgtctgaggaggctgagtctggaagaaggatgactctgtgggtggtttcctagatcctcaatgcacgtggcttccggccttgactcctcccttaaattctgggttgctggccaaggctgaagaacaaatttgcctcagcagccaactcctctatgtaagccygacatttactctgtatctacataatatctattaagcaacacctgatcctgttcaccaggatgtatgttcccagggaaaccttcctttcaaagttaagcaggcattcttggtaagtagccctaacacctgggaatcatgcagttaactttccaggcctcaatcctacatgagtgtcctgggttataatagcatggctggatgggtggtgatctcaccattttagccagtggctcatcctgcatgggaagaaaagttttaaaatggcacagcttcctt

SEQ ID NO: 761044 - DNA, 577 bp, Homo sapiens
caaattcagactctcattatcattaatattgattgttggttagttttctggaacacgtttgtatagtgacatcagctgatttcaagtcctgttgggagcatctttgtcaatagtaaagttggatatcgtaagacggctgtccttgaatatcttcattagcagtttttcagtttttaattagtatctaaattagatttcttattgttacaactcaccacagatgtgccatacttgtgcagaaacttaccaggtatttttacctttggkttccaaagcacataatactaaatggtgtgattgctgctttggatgctggggttttttttttttaaaaaaaagtcatgtaaaagggtacatggcatataaaactgtggagtagataaatgtggctagagtccatcactaagacaatcgaatatctttggttggcagtgcattcattctatagaatattttaaatcagattgcatttataggggactaaaccctttaaaaactattaagtatatgttaattggtctctaagacattgtattgtgcttttagtaaactgttaatttggaccaggaaagcactg

SEQ ID NO: 761045 - DNA, 538 bp, Homo sapiens
tacaaatgttctagatcattccactctcacctagtcaagatgttgctctagtgaatagtccctttcaaaaccaaacaaacactatgttctattttccgtatttaaaaaatccacctttatccctgcccttttgtctagctgccatctatttcttgggtctcccttacacctgcagtcctcaagagctgcctctactcacactccttgtttatacttcctcrcctcccattcttttttaaactcactacaattaagctttggtatccaccacttcctaaaacggctgctgtgaagctttttggtaatttctgatttgttaaaccagatgacatttctctgtcctcatttgattggacttacctgctacatttgatgcagataatcaatccctccttcttgaaattatttcttcacttggctgcaagacacctggctgcgtggggttttgttcctacctttcttaaccaactttctcagtctaatttgctgatgtcttttctcttcctaacctatattggagttccatggagctcttttc

SEQ ID NO: 761046 - DNA, 659 bp, Homo sapiens
cacatggatatatcgtgccatcttctgctttagaaaatgattactttgcacctgtgacccatttactaaacctcaaaactcttggtttaagatatgttgttttgtaattaagcttttgaaatgcacatttgttggcttttgtcctgtgcttgttattatctgaactatgaccaattataaatwctaagctatttagagtcttaaaaacaaatggatatctatacttcgtgatttacacaaatattaactttattagctacaaaaaattataaattggactttatataaaattaaaacctgttcttcaaaaaagaaaataaaacacaagccacaaacaggagaaaatattttcaatgcacatatctggaaaagaacttgtaaccagagtatagtaaaagctcttacaactcagcagtaagaagataaaacaaaaataggcaaaatgtgaataaagagttcatgaaagaagagctaaatggcaaataatcacatgaaaagatcttcaacatcattaatcatcagagaaatgaaaataaataccatgaaatattgtatacccattataattgctaaaagtaaaaggactgaaaattccaactgttggagaatttggaacaactggcactcttgcaaaatagtacagcaactttggaaaacag

SEQ ID NO: 761047 - DNA, 604 bp, Homo sapiens
aatggtggctggcacatataagagctatatatatatatatatatatatatagctcttatatatagcacatataagagctaacatatatatatatacgtatatatacgtgtgtgtatatagatgtatacatgcacatgtgtgtgtgtgtgtatgtgtgtgtgtgtgtgtgtgtatatatatatatatatatgtatgttatctattattacccaggggaaaaaaggaactagaacattgattttgagagcttgaaaataggattggtcattaatcaaccaataattgtatacttttggcagtttaacaatctattattattattgtttaatcccatgtaatcatcactaccctgtgaagaagatattattaacatcmtttcttttcaactttttgttatgaaataattataggctcacataaatttgcaaaaatagtacagagaggccccatatacccttccttcagctaaagatgacatcttacatcactgtagtacattatcaaaactaggaaactgactttggtacaatacgattagctagactacagaccttactcaccttactcaagtctcactggtaattacttcattttgcagatgaga

SEQ ID NO: 761048 - DNA, 604 bp, Homo sapiens
aatggtggctggcacatataagagctatatatatatatatatatatatatagctcttatatatagcacatataagagctaacatatatatatatacgtatatatacgtgtgtgtatatagatgtatacatgcacatgtgtgtgtgtgtgtatgtgtgtgtgtgtgtgtgtgtatatatatatatatatatgtatgttatctattattacccaggggaaaaaaggaactagaacattgattttgagagcttgaaaataggattggtcattaatcaaccaataattgtatacttttggcagtttaacaatctattattattattgtttaatcccatgtaatcatcactaccctgtgaagaagatattattaacatcctttcttttcaactttttgttwtgaaataattataggctcacataaatttgcaaaaatagtacagagaggccccatatacccttccttcagctaaagatgacatcttacatcactgtagtacattatcaaaactaggaaactgactttggtacaatacgattagctagactacagaccttactcaccttactcaagtctcactggtaattacttcattttgcagatgaga

SEQ ID NO: 761049 - DNA, 604 bp, Homo sapiens
aatggtggctggcacatataagagctatatatatatatatatatatatatagctcttatatatagcacatataagagctaacatatatatatatacgtatatatacgtgtgtgtatatagatgtatacatgcacatgtgtgtgtgtgtgtatgtgtgtgtgtgtgtgtgtgtatatatatatatatatatgtatgttatctattattacccaggggaaaaaaggaactagaacattgattttgagagcttgaaaataggattggtcattaatcaaccaataattgtatacttttggcagtttaacaatctattattattattgtttaatcccatgtaatcatcactaccctgtgaagaagatattattaacatcctttcttttcaactttttgttatgaaataattataggctcacataaatttgcaaaaatagtacagagaggccccatatacccttccytcagctaaagatgacatcttacatcactgtagtacattatcaaaactaggaaactgactttggtacaatacgattagctagactacagaccttactcaccttactcaagtctcactggtaattacttcattttgcagatgaga

SEQ ID NO: 761050 - DNA, 572 bp, Homo sapiens
acagtattttctttcatacaacctataatctcaaattaacttatttttcttgtttattgtctcaggctttcagtagaatgtcatttcattgatatcattgttcttgtctttctgttttccattttatcctatacatgtctggcaaacagaacatacttaataaatgtattgacygaatgaatcaatgaaagagctatttttttctctggcatccctcacaaatactcatctacttcatattaacatatctcacttgtgagtcctcttagtgtcctcaaattctgcttatcaaagacctaaacacaaaactattttagaggcctcaccctgcttgagtttcacttctttcatatcaatatctattgatatagataaataatagagatctaaaaattgacagttcaatatataccagtatctatcttctgacagaaaaagtggaagcaaaacagaaatcgagtgatgctccttttttctattacccatcaattttcagtcatcttctttatcgtctgtaagaagatttaaaagggcattgaaattcaacagggatgccaggtctaggggggatc

SEQ ID NO: 761051 - DNA, 623 bp, Homo sapiens
ttttttccactgcaacttttgctttcactttaatataattaagctggataacttttacaccttgtctttcctgctgtatctagagactgatcttaaaattgtatatcaagaaagttgataagatggttaattttacgtgtttacttgaytgggccacggggagccagatatttggttaaacattattctggccctttggaaggctgaggcgggtgaatcacctgaggtcaggagtttgagaccagcctggccaacatggcaaaaccccatctctactaaaaatgcagaaattagctgagcatggtggcaggcacctgtaatcccggcactttgggaggccaaggtgggcagattacttgaggtcaggagttcaagaccatcctggccaacatggtgaaaccccatctctactaaaaatacaaaaattagctaggcatggtggcaggcacctgtaatcccagctacttgggagcctgaggcaggagaatcacttgaacctgggagacggaggttgcagtgagccaagatcgcaccactacactccagcttgggtgacagagtgagatgccatctcaaaaaaaaaaaaaaagaaaagaaaaaaaaagaaaaagacaattattttg

SEQ ID NO: 761052 - DNA, 624 bp, Homo sapiens
ctgaggacatgcggaactgagtctccttgggaactctgggaggctgggtaggaaatgcctccaggaaaggaggatgcttagtggtctcagtagtagaggcgcatgcagtgggctatatagcctggaggagggagaaaccatttctgtagagagagcttctggagacatccaaaggaggtgattctcaagagatatgccagagatgacggagcagggcagtcaggccctggaggaagcacaaacrgccattagagatgtcaactcacatacctggctattctagacatgggactatttctccaatagttgaatttaatttttccttgaacttgtattcactatcatttcttggccttttggctaagatcaagtgaacctgcacccactggaaggcagacaatcagtttattttattgctcccctctgtctcactccagggatttgcagaagccccaaagagaataagggaagtggaaaaatctgattctctgttttggggttctagtggtttaattttataggtcaacttggctgggccactgcatacagatatttggtcaaacattagtttggatgccactgagaaggcatttttaaaatgagattaacatttaaattagtagc

SEQ ID NO: 761053 - DNA, 658 bp, Homo sapiens
aagggatccttaagcaaaagcctttctagtgtgagagatcctgtgtatagaaacaatggagatgcaaatcaactcttaaatagtttttgaccccaatgtcaaaaatcctatctgtaggaatgatgcgtatgcacatgttcagaatctagtgctaagtgacctttagcaacaaggaagggatgaggccaaagtgcagccttattaatgcttaattataacgatatttctgttcaaaacccagtatgcaattcttgtcaaccctttggaggtggtttcatgataatcctataaaatatgtattatccttgttttacacattcagaaactcgggcacaatgaggtagaaagacttgcccaagagaagatcatggggatgtctggggaggacagtctgtcaggaagccccatgwtacctacctcctggtattcacaccccatgtaatctcctctccagaagtgtgtacagacctgtgacttgcttctaagcaacagaatgctgagaaggtgatgaaatgtaaattccatgatgattttatgtaagattataatgcttatgatctgagagaccaaaatacacacccctttatcaactaggatagaccctaaggttacagaatcaaaaattacctacagatagagggtttagggcttggttggc

SEQ ID NO: 761054 - DNA, 542 bp, Homo sapiens
tttctttgccagaaataggaaaatgtacacccaggccagcatctggaagttattcttaaagaaatgtgacattagataaaatgagagtggtgggtcaatttctatttacccatttcactgttccatgctgactaaagtttaatgcaactttaaactaaaatcttcaccctgtttttcattctctttcttcttgttgcatcatgtttatttccaaatccatttgaaaaatagatactggtggcattctattaagacttaggtgaactatggaccttaattattctttttataaaatttgcttaagtaaaarggatcctagagtggaatatatataatatttgaattcagagccacctggctgtaaatacagtgactatgaaaccttaagcaagtgtttcaacttttctaaagttctttatgtgtacatgggtagatcacctgaccactttgaaaaattataattggagtaatacatgatgtatacgaaatactcaactctagtaggcactcaataaactgaactattattactactaatcact

SEQ ID NO: 761055 - DNA, 629 bp, Homo sapiens
taaaatgctatcaaaacaaagtaatgtatctttgatctaacaaacttcataattcaaattcacttaaatagatgtagatttgatacatgtcttaagtaaagaaaaggaaaatatgtccaggcttatgaaacaggtggccagggggaataaaagttaatataatggagtaaaatgtatttggtgaatttttcctcagcaaattcaattgatagcaccaagcttagataatcatagttcagcaaataaaaccattttacttaatggtaatagatttagtagagttactctgaggaccaaacaaaactaggttgcttaagtatttatttaaaaacaaagaaaaacagagtcccaactgtgttgtcctgctctrcagaatacctttaggatactaagaaagcatatacataatgtgttcctgttacaggactttcccttaattcagctaaaggtggggttctttgttccatcacgaaaattcaggctcgcagacaatttgggtggtgagtgagacagagttttattgggtggaaaggaagaaaggggaaaaacagggactctcgctaggccagtgttcctgctagagtgcttcccgcccaaagcttggatcccgggttccacccaggaagagg

SEQ ID NO: 761056 - DNA, 578 bp, Homo sapiens
cctgcaatcccactgctagatatatacgtaaaataaaaaaaaaatcagtatattgaagaaatagcggcactcctatgtgtactgcagcattattcacaatagccaagatttggaatcaacctaagtgttcatcaacagaggaaagggtaaaamcaatgtggtacctatacacaatggagtactattcagccataaaaaagagtaagatcctgtcatttgagacatggatggaactggaggacattatgtttgatgaaataagccagccacagaaacacaaactttgcatgttctcacttatttgtgggaactaaaaattaaaacaactgaactcatggagataaagagtagaatgatggttaccagaggctggaaagggtaatggggatggggggcggtaggaatggttaatgggtacaaaattacagtcagatagaatgaataagatctagtacttgatagcacaacacagttactacagtcaccaataatttattgtatattttaaaatgaaaatagtgtaattggatagtttgtaacacagagaaaggataaatgctcgaggtgatggatacctt

SEQ ID NO: 761057 - DNA, 523 bp, Homo sapiens
atagcaatatgtttttcaaatctttttaaaacccagattactgcaaaaagtaggaataagataaaagatgttgtgagtcatgtgtgacagaggtctcatcaacattttctgaaacatggataaagaaaaattatcttgaggcctggacagcacacacacacatagctcagaagtgtttkcacactgtagttccaaatacattttcacattgaagattaattcaccagagcctttctaaattgctatgtatgcatttctgtgtgacagaggagagagaagaacagaggtaaatcttttaaagcaggcaatgggggtcagagatagggatgccttactaggcgctgactcaatgtaccatagcatggggcaaattgatctttgcagcatgtggttagctgacaacatcatctcacgttactggcttgatgccttaaaaaaacaaacaggggaagcagagggacatagtaaaatacgccaccctgctgtgcttgtaacatgcacaggaacatgtatctgaatattt

SEQ ID NO: 761058 - DNA, 571 bp, Homo sapiens
aaactaactcactggaaaaagacatgtgcagggcagaaagattatttgcagaagcaccatgctaactaaaagttgaaaggtccatataaagagccctaaggcccttaaaacctggtattacgaatggctattgtacaccaaccactgtaagttctatttcagctttaaaatataaataccatggaaactgtcatggtttcagaatttcttcacagaagaggcttaagagctgcaaattgcctggaaaggggaattgcatacggcgatgaaagatttggaagcccactgacttctcttgttttgtatgatataaatatacaaatatagttttagtatagtgttagtaggaagtctaaaacatattttgaaatactayaaaaatatttcatacttaatttattaaatgtgaaataaaacaaggatacaattataagcatattatatttacttcagtgtgataatcaagatttctagaatcagaatatatttctttctttccaatagctaattattttagtgacaaatagtttcctctctgtccatattaggttataaaatcaattaatttaag

SEQ ID NO: 761059 - DNA, 578 bp, Homo sapiens
aagaatggctagcatttacagagtttctactctgccaagttctgtgcttagggcttcacctgcccctgcctatgatgtaggtgctaccaccatcctcattttatagatgaggaaattgaggctcagggagtgcagtgactcacccaaggtcacacaagttagtggtgtggccaggacccaagcccatgctctgacccttgggccccatgccatgtcccccaggcttcctgacaaagtgcatccagctctacgagaccacggtggtacgacacggcctcatgctcgtcgggcccacaggctccggcaagagtactgtaagcagagccaagcttggcagccagtgtccggatagtgggcctgtaggggggtgcagcttcaacaggggttggcctccatttgtrccccttggcatagaatacccctccccctccccttggcccccagcccactctagccctgctctctgggagcctcactctcaggcggtccgtctcccagtgttacagagtcctggcagctgccatgacgtcactgaaagggcagccatccatcagtggtggcatgtacgaggctgtcaa

SEQ ID NO: 761060 - DNA, 587 bp, Homo sapiens
atcctaggttgacatttttccccagtactttaaagatgtctctctattgtcttctggcttgcatagttgttgacaaatagtctgagattttcttttctctgttttaaggttttctccttatctttggtttttaacaatttgattacaattatgatgtgcttgatgtggcttttttcatgtttatyttgctcaggctttgctgagcttcttgtgagtgtcatttttcatcacatttggaaaatctggagctgtttcttcaaaattttttttctgtctcctctttctctcctctccttctgaggctccaaatatatatatatgttagaccacttgttattcccccacaggccacagaggcagtattcattttctcctcaatcattattcttcatgttattgccatatgttcaaattccctgatattttttccttctatagtgtttaagctgaggttaagccaaaccagagaatttttcattttggatatatttttcatctcttaaagttccatttgtttttttttatattgtcccatctttccttactataatcaggtatccctttaagtccataaatttataacagca

SEQ ID NO: 761061 - DNA, 618 bp, Homo sapiens
tttcagaagtttgctcttttgaaaataatgactaatgttcctacatgatcaatattagaactatgagatagcaaactgttaaagatggaaatgaccctcaagattgtggagttcacaccaccattttagagacaggaaagtgaagsctggagagaggtgatccattgcccaggagactcagaaaacaggaccaggcctgtgggttccccacatcatactgccctcaactcctggtcccctcagtcactgcagtaaccaccacggaaaatgccgcacagagttaactcatgatcagatgtgaaaagggtctcccactgtgattttctttgttggatttaacaacctcctcacctttctgctgaatcagagtgaggaacagtcgaggagaattgcatgagtagcttcttgtgtgtctgtgtgtgttaatggagtttttttttttaaggtttttccatgattagagtcgtattttttgtttgtttttgtccagttttttttgtttgtttgtttctgcatgaaataatgaaaaagtaaatcaaggtttgtaattggtttcttctcacttaggaaagaagaaaattattctatgagagtaccagcaatgtaacatgagtctat

SEQ ID NO: 761062 - DNA, 541 bp, Homo sapiens
cccaatctatttcttccttagtgtactggaaagggggcagttcactggtgggagaggggagcgaggcctccatgaaggtattttttgagacggctgcctctttagctttttggtcagctaaccgttttcctcatgcagtttcatcagaacccttctggtgtcctctacagtgcactactgccacttcccagggcaaatgaacagcctctaggagctctaagatttgaggcccatacttartaggagtatcccaagctgttaggtacccccctttcctttcagatagccacatggacatgagacaccagaaaggcgtatttaaaatctgtatacatggttattctttttctttccctagttttagggctctggttagtgcaatgagtttggctacttgcactgaggtccccggggacagagctttagcctccagaactagatgaagggacactatagtgtaccctgcatatcaagttccattccagacaaaactactttaatctgaaaaccatatttcgtccggattatctaggggctgatt

SEQ ID NO: 761063 - DNA, 619 bp, Homo sapiens
tgcaaaaatcacaaacattcctatacaccacaaatagacagacagccaaatcatgaatgaattcccattcgcaattgctacaaagaaaataaaatacctaggaatacagaaaacaagggaagtgaaggaccttttcaaggagagctacaaaccactgctcaaggaaatcagagaggacacaaacaaatgaaaaaatattccatgcttatggataggaagaatcaatactstgaaaatggccatactgtccaaagtaatttatagattcaatgctattcccattaaactacaattgacatgcttcacagaattagaaaaaaaattttttaattcatatagaaccaaaaaagagcccatatagccaagacaatcctaggcaaaaagaacaaagctggaggctttcaaactatactacaaggctacagtaaccaaaacagcatggtactggtacaaaaccagacacatcaaccaatggaacagaacagagatctcagaaataagactgcacatatacaaccatctgatctttaacaaacctgataaaaacaagcaatggagaaaggattccctatttaataaatgtgctgagaaaactggctagccatatgcagaaaattga

SEQ ID NO: 761064 - DNA, 564 bp, Homo sapiens
gtggggccatgctgcagatgggaggggcaagcaggacccaggatggctctgaagctggagttggagcaatgagcaagatattttcttctctcttaccagtggtagccaagttttgtcaaatgggaccctatttagattttggaatcagactagttacgtgaactttccattatgtattatgcaacaaagatcatgccatggttgggtgagacccaaggtatatttagcttactcaactatttttaggcactctatctgtcctggrgaagtcatttgacctcttcctacctttcttttttcagatgcaatgttgagaggtaaacttccttcatgtgaattaattaagaattgcaacccttgaaggaggtgggaaagggggggtaacagacattctcagtggctgaggcttctaagtgtcccctccctgctcctgaccaagtctacagataccctggaaaaagcatctggggctgcagagtcaacttcaggaaattccttccagctccattttaaaccactgtttctgattcagctatccagccctatcctggacttcacataggg

SEQ ID NO: 761065 - DNA, 640 bp, Homo sapiens
ccgtgcccacggccctgaggagggatgaggctcttggaatgattgttaagggctttttatgtgccaggtgccatgttatgtgtattccacacctggtttagttttatccttatatcagtctcatgatacataattatccacattaagcagataagcaaacagccttagagaagttagctaatttgcctaaagcccaaaccttatagtggcagagacaaattttgagctcaggtctgtccaattagagtttaagcctttaaccactgtgatggcagctccttccatggggcagccatgtgctctgccaaggaccctaccattgtggcccctgctggtcaggccagaagtggatgccagccatgccaatggcatggggtggcagctcaaaagagtcagcctcctcttgatagtcactggtcarttaatctctctgctggaaaattcgagtgtaagacccacggaaggaatcagaagttgactgcagaatcaacagctctaagctggttgagctatcttcccctacagaacacagcttttcagtaatgattcatagacaatgcagaaggatgtggacctcagggctccggaatttggtttgaattctgacatgtatattttccagaattttttctccataact

SEQ ID NO: 761066 - DNA, 597 bp, Homo sapiens
ttcgagtgaggcctaggaaaatgaggctgagacttgctggactgcgttcccaaaaggttagacattcctagcctccagatgtttacagctaagggaacaaattaataacgtttactaaacagaccagacttgggagtgtccagatattctgmtatctggagaacaaaggcattcctaattttgctttaaaaataatattaattcttgcaaaatatactagttaagagaattaatcctttatcacaaacccttgtagcagagcacatctcccgagaatctttttaatcatatatataggataaaatatttttgtatgtatatatattttatatgtatatataaaatatatacaatgcttgtgtatacacacacacacacacacacacacacacacaagcattgtacctacggtggacgcattcctccgctttcaggaatgccctactctttctatggagtagctgtgctttcactactttagtttcttaataaagttgcttttacttggcactgtagagactcaccgtaaattctttcttgcttaagatccaagaaccgtctcttggggtctggattggaacccctttcctgtaacag

SEQ ID NO: 761067 - DNA, 616 bp, Homo sapiens
gagaggcagacccaccctcaatctgggtgagcaccattaatcagctgccagtgcggctaggataaaagcaggcagaggaacatggagggactaaactggttaagtcttctggccttcatctttctcctgtgctggatgctttctgccctcaaacatcagactccaaattcttcagcttttggactcttggacttacaccagtggtttgccacaggctctcgggycttcagccacagaccgaaggctgcattatcggcttccctacttttgaggttttgggacttggactaacttcctggctcctcagcttgcagatagcctattgtgggacttcatcttgtgatcatgtcagtcattctaataaactccccttcatatattcacctatcctattagttctgtccttttagagaactctgactaatacacatattcaccataatgtagaatcattgggaaccctgagcttgttttcctgcaatggtcccatctaggggtgatgggagacaatgacagattatcaggcattagattctcataaggagcacacagcctacattcctttcctgtgtagttcacaatagggttcgcgttcctctgagaatctaatgccacc

SEQ ID NO: 761068 - DNA, 675 bp, Homo sapiens
tggctcctcaagcatggctagagtggacgccgaggccgaggaggtgctgagagtgagtgagggctgctagcacgttgtcacctctcaagcctatgtgtgtccttgaatctagtatttactattgccgttttgttaactattttttgtttgtcttgtagttcctttgactctctgtttctctcttgctgtcttccccagtgttttggtctttttatatttgatgcagaaaattaaagaaaggaaaataaaattaaaagagaaaagcaagttttcctgtwttaggctgtctcatcccaaaaagcagtaacagacacagcccaggcccaggcaaggtcctgataacacaatctaagaagtcaagacccaaaaggaatgtgctctggagactctcccagcactccccaacataaggataagaaaaacaaattcctcttttagccctttaccccttctccataaatattttgcaagttttctaagttcctgtttctcctttgatgcagctgcaaagtcacaagctatgctagagattatgagacctgtcactgtttaattaactgtctttgttctgcttctgtaagcttgcttataaaaatcaagccctgtctttgttccaggctcagttttttggatgtgaaaaaacctggatccactgagctggtgtacaccttaata

SEQ ID NO: 761069 - DNA, 368 bp, Homo sapiens
cctggatccactgagctggtgtacaccttaataaaagtcctcctgtaacacctatttagtctctcaggtcctctaattcctgcaacatattgataagtttttattccttctcttttcttcctgtgtaacttttataagtattttcttcatggttaccaaaggtaacagtaaatcattcttcaccagtwattacattaaatgttaatggactaagctccctaataaaaagatacagaatggcttaatggattttttaaaaagcatgatccaactatacatttgtctacaagagactctatttatttatttatttatttatttatttatttagagacggtctcactttgttgcccaggcgaaagtgcagt

SEQ ID NO: 761070 - DNA, 662 bp, Homo sapiens
cataattttgcaacagtagttctgagaggtgacagcgtgctggcagtcctcacagccctcgctcgctctcggcgcctcctctgcctaggctcccactttggtggcacttgagcccttcagcccacagctgcactgtgggagcccctttctgggctggccaaggccggagcctgctccctcagcttgcagggaggtgtggagggagaggtgtgagygggaaccagggctgcgtgtggcgcttgcaggccagctggagttctgggtaggcatgggcttggcggctcctgcacttggagcagctggccggccctgacagccctgggcaatgaggggcttagcacccgggccagcggctgtggagggtgtactgggtcccccagcagtgccagcccaccggcgctgcactcgatttcttgctgggccttagctgccttcccgtggggcagggctcaggacctgcagcccgccatgcctgagtctcccacccctccgtgggctcctgtgcggcccgagcctccttgacaagcgccattgcctgctccacggtgcccagtccccatcaaccacccaaaggctgagaagtgcaggcgcatggtgcgggactggcaggcagctccacctgcagccccggtgcaggatccactaggtgaagccagctgggc

SEQ ID NO: 761071 - DNA, 624 bp, Homo sapiens
agaggtgacagcgtgctggcagtcctcacagccctcgctcgctctcggcgcctcctctgcctaggctcccactttggtggcacttgagcccttcagcccacagctgcactgtgggagcccctttctgggctggccaaggccggagcctgctccctcagcttgcagggaggtgtggagggagaggtgtgagtgggaaccagggctgcgtgtggcgcttgcaggccagctggagttctgggtaggcatgggcttggcggctcctgcacttggagcagctggccggccctgacagccctgggcaatgaggggcttagcacccgggccagyggctgtggagggtgtactgggtcccccagcagtgccagcccaccggcgctgcactcgatttcttgctgggccttagctgccttcccgtggggcagggctcaggacctgcagcccgccatgcctgagtctcccacccctccgtgggctcctgtgcggcccgagcctccttgacaagcgccattgcctgctccacggtgcccagtccccatcaaccacccaaaggctgagaagtgcaggcgcatggtgcgggactggcaggcagctccacctgcagccccggtgcaggatccactaggt

SEQ ID NO: 761072 - DNA, 658 bp, Homo sapiens
agccctagcaagcccccagagaaggataggtaagccatctgtaatacgagagattgagcctaaccaggacccaatatgggaaacaccccaagtaagataagggrtataaaggataaagttaacaacaataatactccgcctaatagtcctctaggcctaatgttaaaatattagaagaaaaaaaaaccttagagaaatgataattgaaagaatttgagagtctgcgccccgcatccaaagcattataaaacctttcaatatacaacaaggaaaagatgaaagacctacaaaattcctagaaagactcaaagagcaaatgaggaaatatgtaggtctagaattagaagacccccctcaaatgagggatgttaaagcttcattttgtaactaatagttggccagatattaacaagaaattacaagagaactggaaagatagacctatggaagagcttctaagagaagcccaaaaagtatatgtaaaaagagatgaaggaaacacaaaagcagaaagcaaaaattctgctctccaccatataacaaagtacccagggggccagaacctataaagaacctaaacccccactctccaggtaatataatgggtatgaaagagtaaagccaggagactcaaaggtagaaaaaaaaaaaagggaca

SEQ ID NO: 761073 - DNA, 658 bp, Homo sapiens
agccctagcaagcccccagagaaggataggtaagccatctgtaatacgagagattgagcctaaccaggacccaatatgggaaacaccccaagtaagataaggggtawaaaggataaagttaacaacaataatactccgcctaatagtcctctaggcctaatgttaaaatattagaagaaaaaaaaaccttagagaaatgataattgaaagaatttgagagtctgcgccccgcatccaaagcattataaaacctttcaatatacaacaaggaaaagatgaaagacctacaaaattcctagaaagactcaaagagcaaatgaggaaatatgtaggtctagaattagaagacccccctcaaatgagggatgttaaagcttcattttgtaactaatagttggccagatattaacaagaaattacaagagaactggaaagatagacctatggaagagcttctaagagaagcccaaaaagtatatgtaaaaagagatgaaggaaacacaaaagcagaaagcaaaaattctgctctccaccatataacaaagtacccagggggccagaacctataaagaacctaaacccccactctccaggtaatataatgggtatgaaagagtaaagccaggagactcaaaggtagaaaaaaaaaaaagggaca

SEQ ID NO: 761074 - DNA, 601 bp, Homo sapiens
gcctttcaggaagaatcaaggaacatcaccattttctggggttttttttttttttttttttttttgagacaaagtctcactctgtcacccaggctggagtgcagtggtgtgacctcagctcactgcaacctccatctcctgggtccaagctattctcctgcttcagcctccccgagtagctaggattacaggcgcacaccaccacacccagctaatttttgtatttttagtggagacaaggtttcatgatgtttgtcaggctggtctcaaactcctgacctcaagtgatctgcccaccttggcctcccaaaatgctgggattataggtgtgagccaccatgcctagccgcaattgagcagaaatctgaaaaataaaaaaaactcggtaaagggaagtggaaatggggacaagaactayaagcagagaggacaatctggcaggatagaaggacagaaggaaggccagcatggcaagaacagagagaaccctctcctaacctactcctaactggctccccgatccctgtggtctgtctccattgactccattgcctacacctgaccactagcaatttgcaggccgcatttcaaggtcatgaca

SEQ ID NO: 761075 - DNA, 601 bp, Homo sapiens
gcctttcaggaagaatcaaggaacatcaccattttctggggttttttttttttttttttttttttgagacaaagtctcactctgtcacccaggctggagtgcagtggtgtgacctcagctcactgcaacctccatctcctgggtccaagctattctcctgcttcagcctccccgagtagctaggattacaggcgcacaccaccacacccagctaatttttgtatttttagtggagacaaggtttcatgatgtttgtcaggctggtctcaaactcctgacctcaagtgatctgcccaccttggcctcccaaaatgctgggattataggtgtgagccaccatgcctagccgcaattgagcagaaatctgaaaaataaaaaaaactcggtaaagggaagtggaaatggggacaagaactataarcagagaggacaatctggcaggatagaaggacagaaggaaggccagcatggcaagaacagagagaaccctctcctaacctactcctaactggctccccgatccctgtggtctgtctccattgactccattgcctacacctgaccactagcaatttgcaggccgcatttcaaggtcatgaca

SEQ ID NO: 761076 - DNA, 594 bp, Homo sapiens
tctacattttttgactcacgacatagaactgaggttgactatgactaacatttgacttgcatattacagctggcatagtgagggctttgttcagcatgtattagcttgcttaatttttgcctttggcgctgcggggcctgcaggcttctcagagcagagggtgcatctgctgcagcttcccatgtctcctgctgaaaggtagccaatcatttcttcctaattagcgatcaaacatgatttcagatagtccttctcctaagatgccatgggagatgttccttgtatctgtcagtggcactgatcacgttgtcatttttggcaactaattcccggaatgaataataaaattataataatcttgtaccagagggagggtgacmattttgtaaactccattaagaatcgagcaaaggattgtcctctaatgagatagatagcatcagggagaccattcatcaagcctctctgtcacagatgcacaaagggaccctggagggaggggctcctggaattcgggcagacgagggcgggttgtcttggatgtgcatttccatattgtcattgatcagctgccggagaaggaatgacaagcag

SEQ ID NO: 761077 - DNA, 594 bp, Homo sapiens
tctacattttttgactcacgacatagaactgaggttgactatgactaacatttgacttgcatattacagctggcatagtgagggctttgttcagcatgtattagcttgcttaatttttgcctttggcgctgcggggcctgcaggcttctcagagcagagggtgcatctgctgcagcttcccatgtctcctgctgaaaggtagccaatcatttcttcctaattagcgatcaaacatgatttcagatagtccttctcctaagatgccatgggagatgttccttgtatctgtcagtggcactgatcacgttgtcatttttggcaactaattcccggaatgaataataaaattataataatcttgtaccagagggagggtgacaawtttgtaaactccattaagaatcgagcaaaggattgtcctctaatgagatagatagcatcagggagaccattcatcaagcctctctgtcacagatgcacaaagggaccctggagggaggggctcctggaattcgggcagacgagggcgggttgtcttggatgtgcatttccatattgtcattgatcagctgccggagaaggaatgacaagcag

SEQ ID NO: 761078 - DNA, 599 bp, Homo sapiens
tcagagtctccaaggtcaaaatgaaggaaaaactgttaagggcagccagagggaaaggtcaggtcaccaaagagaagccaatcagacaaccagcagacctctcagctgaaattctacaagccagaagagattgggggccaatgttcaacattcttaaagaaaagagtttccaacccagaattttatatctagccaaactaagcttcatargtgaaggagaaataaaatcctttccaacaagcaaacgctgagggattttgttaccgccaggcctgctctgcaagagctcctgaaagaaatgctaaatatggaaaggaaaaaccagtaccagccactgcaaaaacacagcaaaatataaaaccaatgacactacaaagaaaccgcatcaattagtgtgcaaaataaccaaacagcagcatagtgacgggatcaaatttacacataataatgctaaccttaaatgtaaatgggctaaatgtcccaattgaaagacacatactgggaaattggataaggagtcaagacccatgtgtgtgttatattcaggagacctatcttatgtgcaaagacacacatgggctcaaaataaagggatggag

SEQ ID NO: 761079 - DNA, 599 bp, Homo sapiens
tcagagtctccaaggtcaaaatgaaggaaaaactgttaagggcagccagagggaaaggtcaggtcaccaaagagaagccaatcagacaaccagcagacctctcagctgaaattctacaagccagaagagattgggggccaatgttcaacattcttaaagaaaagagtttccaacccagaattttatatctagccaaactaagcttcataggtgaaggagaaataaaatcctttccaacaagcaaacgctgagggattttgttaccgccaggcctgctctgcaagagctcctgaaagaaatgctaaatatggaaaggaaaaaccagtaccagccactgcaaaaacacagcaaaatataaaaccaatgacactacaaagaaaccgcatcaattagtgtgcaaaataaccaaacagcagcatagtgacgggatcaaatttacacataataatgytaaccttaaatgtaaatgggctaaatgtcccaattgaaagacacatactgggaaattggataaggagtcaagacccatgtgtgtgttatattcaggagacctatcttatgtgcaaagacacacatgggctcaaaataaagggatggag

SEQ ID NO: 761080 - DNA, 602 bp, Homo sapiens
acaaatagggtaataaaagctggccaccccagccagcagtggcaacctgctcacttccacactgtggaagctttgttcttttgctcttcacaataaatctcgctgctgctcacattttgggtccattccatctttaagagctgtaacactcaccacgaaggtccgtggctccattcttgaagtcaacgagaccataaacccaccagaaggaaccaactctggacacactactagacatctraagaactctctaccccaaatcaacagaatatacattcttctcattgccacatggcacttattctaaaattgaccatgtaattgaaagtaaaacactcctcagcaaatgcaaaagaactgaaatcataacaaacagtcttgcagaccacactgcagtcaaattagaactcaggattaggaaactcactcaaaaccacaaaatttcatggaaactgaacaatctgctcctgaatgactcctgagtaaataatgaaattaaggcaaaaatcaagaagttctttgaaaccaatgagaacaaagagaccacatatcagaatctctgggacacagctaaagcagtgttaagcagctatagcactaaa

SEQ ID NO: 761081 - DNA, 627 bp, Homo sapiens
actgaacaaatcagagggtaaacaaatcaccctaggaccacttccttctaaatgtctgcctttggaaatttatttcctaagtctatcggttagaaattccaggttgattttaccacaatgaacaaatatatccccagtttcctctgctgttctttttttcttgtttttctttttttgataacatttattataattacaccttayttttcaatatagtcttttttttaaataaaaactcctcaagtatcaagttcttattataatcttccagtatacttagtacctgatacagtccctgagaacatagtagacactcaagataattctgtgaaatgaataaatgagaaaatgaatgggttattttaaaaagataacatcaattttctcctaatagtgattactgttctctttgcattcaccctttatataataaccgtggccccttcagttcagagagaatccatttaataattccacaaatatacagcaagtgtctttatgaggctctgtagggactcggctagtaataaattctatattcctcaagaatcttttatcgtagctcagctttttctcagccttgacccctggaaggtccatggaggggcactaggaattcacacatct

SEQ ID NO: 761082 - DNA, 627 bp, Homo sapiens
actgaacaaatcagagggtaaacaaatcaccctaggaccacttccttctaaatgtctgcctttggaaatttatttcctaagtctatcggttagaaattccaggttgattttaccacaatgaacaaatatatccccagtttcctctgctgttctttttttcttgtttttctttttttgataacatttattataattacaccttactttkcaatatagtcttttttttaaataaaaactcctcaagtatcaagttcttattataatcttccagtatacttagtacctgatacagtccctgagaacatagtagacactcaagataattctgtgaaatgaataaatgagaaaatgaatgggttattttaaaaagataacatcaattttctcctaatagtgattactgttctctttgcattcaccctttatataataaccgtggccccttcagttcagagagaatccatttaataattccacaaatatacagcaagtgtctttatgaggctctgtagggactcggctagtaataaattctatattcctcaagaatcttttatcgtagctcagctttttctcagccttgacccctggaaggtccatggaggggcactaggaattcacacatct

SEQ ID NO: 761083 - DNA, 618 bp, Homo sapiens
agaggtccctctctggcctcctcctgagccaagtttttctgtcaacatattgctagagatggacttccaggcattggggtttctatcaaaggtgagactatattgcacagtagttcagttaggactccttcagttgcagatgtcagaaaacctaatccatgctagcctcagcaaaggagaatatgtattggttcattttgaccaagaaaccaacagcctcgcttcaggcacagctgatacaggggctcacacagtgtcctcagggcccagttcctccttgccatcttttggctctgtgtccccagtgctggtggtgccttcagtgttggtaatgtggcagctccagagttcacagctgctcaggttcaaggtcrgtgggaaagaacaaaattatctttggctgcaatcccaagaaagagctcagtggacatcattggctccatttggtcctgtgtctatctctaaaccagtcattgtacccaggggaatacaatattgtgatggccaggttggagccccacccagacctcaaagactgctactcagagaggaatggtccccaaaggaaaattagaagttattcccagaagagagggcaggggaatagaactcatcctg

SEQ ID NO: 761084 - DNA, 545 bp, Homo sapiens
attctaggtgatccggaggggctaagcaaggcttcaaggctcagggcatagagttcagtgcagagggagatccgaagggaaaggcaggcagccctgatctcacagggtcctatcaaccatccttatgagaagtctgggctgcatccccagagcaatggggaaccactggagagttttccccaagagggcattacaatcagatctgtgttttttgtttttttttttttttwaaaaaaggtgtcatgtggctgggcacagtggctcatgcctgtaatcccaacactttgggaggccgaggcaggtagatcacttgaggtcaggagttcaagaccagcctggccaacatggtgaaaccccttctccactaaaaatacaaaaaaaaaaaaaaaaaaaaattagccaggcgtggtggcacacgcctgtaattccagctacttgggaggctgaggcacaagaatggcttgagcctaggaggcggggattgcagtgggccaagatcgcaccactgcacttcagccagggcgacagagcaagctgtctcaaaa

SEQ ID NO: 761085 - DNA, 672 bp, Homo sapiens
cataatgtgaaaggggagactccacctaatctagggaatgctcaaattacagaagcaggtgctgggcagccataagttaaaaagaagacaagctgaagccacacatgttggtgttatattgaaaatgtgacttaaattctttcaataaagctttacaatcttctctgggggaaagaaacaaacaaaaaaacaaagcctctgcaaagtcattggtgtatctccattttgcaaatggggagctgtgaaataaggctcagagagactgtgtcacttttccagccaccagtggcagagctggaattttcatcctgatctgtctggtccctgagcctgtgggtccgtttgtacctgcactgtctttcagaatccaagagaacacagacttctctctacaggctttgagcagtaaggaatgatgtgttttgctaatgaggaaatgcacaagttcaatatcagtgttgaaacaaagattttaaagaatggacagactcctttgggcaatatgaaatgttcatgatggagacttttcaagaatrtgttctgacctgatgtctcaggtctctgggctatcctaataaaacacatcatttcactgattagccaaccatgccagtgtatgtgagcaaatatctgatttatcattaatgcctaggagcttgactgaagggccag

SEQ ID NO: 761086 - DNA, 633 bp, Homo sapiens
caggaaaatgaatcatttcatattaggggatggggcgataatgatgataaatgcctttttgaaagctttgtgttccaaccataagcccttctctaatagttcttcggagctgattagaagcttaaaaagccccattttggtcaagagctggtaattcctagtttccctttggtggaaataattggtctgataatatccaaataatatttattaattaaataatattcattttatgtgattgtactatgtacatgttaattggatgctgaataatcagttttactatcttcattatgtaagtaatgcataaatccaattttgtttaagagtttcagataatatgtactatgcaggagaaaaatagaaagtctttcttcaacatccttctcccacctgcctcagccatcctgttccaggtgtagccacagccrgtagatgagtatggatccttaattctccttgctgtacacacacaagtacgtatatgaatgtacataaacaaataactttttccataaatgagaacacactgtaagttttttcctgtgaccttttttccacttgacatgttgaggaagtcttttcattttaatttgatacaatgcctctatttcattctttgtaaggtttatt

SEQ ID NO: 761087 - DNA, 533 bp, Homo sapiens
attacacagttaatgttattgtagagtccaatgtgaaatctgtgcatttaatatggatatggaaagtatagaattccagtggctgattttatccagctgggaatatgttcccttcaagcttgggaggggtcacccatcaaacagaattgaacagaaaaactaagcatccatcttaaaaagaagacaaggactcactagcactgcaactcagcttctgtgagacttcagctttggccttatcatccctcatttcccattaaataatttcctgtatttcatagcaatcccaggctgtctgccttttgaccttggcttcctgakgctgctgaagttgtgtgaagattctgttcattttgggtctctagtgaattaggacgtgattctattcagttcatgcaacaaatgcccattgagtgtttctgactttttgggcactgttgcaggcacagcaggacttatattcataacatttaataagtggtaaggtctgggtaccaaccaccctggtactagaaggttgtcacagagggttt

SEQ ID NO: 761088 - DNA, 592 bp, Homo sapiens
tagtaattgatagccattatttaaagtcacagtgctttaggggagtttgttaggtagttatagctaactgatagatttcttgcctctgtaatatctcctatagggttgataatcaacaagtatatactaattctgatgtaccagtgactgtaaaattgaatcaattagtaaatagtctctttcctaaacaccctgagtgacccagaaccctggccccactcccagccccattgaatctccctatgatccaacaactgaaagagtaatgcctggaatgccaggggtcctccaacaccctaatgcagttctatagagaaatccattctgattggtcagtgcccatgccttacatttgttaaaaattytgaatataatttctggtcattcatggacctgactcgtcactccattaggttcttagcttcctgaggttagtctcaacatctggatcatcctgaacacttttgggccatgcaccatgaatatttgttgaatgaatcctggatagaaatatgtactgaaggaaataatatggtctagtgcggtcatcaaaaaagttgaagtcatttgcggcatgagtttaagtgtccag

SEQ ID NO: 761089 - DNA, 592 bp, Homo sapiens
tagtaattgatagccattatttaaagtcacagtgctttaggggagtttgttaggtagttatagctaactgatagatttcttgcctctgtaatatctcctatagggttgataatcaacaagtatatactaattctgatgtaccagtgactgtaaaattgaatcaattagtaaatagtctctttcctaaacaccctgagtgacccagaaccctggccccactcccagccccattgaatctccctatgatccaacaactgaaagagtaatgcctggaatgccaggggtcctccaacaccctaatgcagttctatagagaaatccattctgattggtcagtgcccatgccttacatttgttaaaaattctgaatataatttctggtcattcatggacctgactcgtcactccattaggttyttagcttcctgaggttagtctcaacatctggatcatcctgaacacttttgggccatgcaccatgaatatttgttgaatgaatcctggatagaaatatgtactgaaggaaataatatggtctagtgcggtcatcaaaaaagttgaagtcatttgcggcatgagtttaagtgtccag

SEQ ID NO: 761090 - DNA, 643 bp, Homo sapiens
caatacaatgttgaatagaagtggtgaaagaggggatccttgtcttacaccggtttcaagtggaatgcttccatcaatgataattttgaattaatattctgcattcactcattaagagcatttccttgactaagatttacgttactcaggcttccgatcattcaagaagtgtattccaaattaataaggattagccagtcttaaaagattactgctgagtttatccaacatttgcatcttctacaaattctctgtgcaatggaatcaggattaacatgcagtagagatccttgggttggcycttgagcttgtcaaagtcccttgatggctaaaccatctctttttggagtggtcatttgtctctttgtcatgaaaccttgtgttaaatttgttttgtataggactgggcaaaatgctaaaatgtacattctagatgctggtctaatacaatttagaaagattttcacaattgaaacagatcatgaaaccatcgaaattttgtatttctgtcaaattggagcttcaccaccatcttctttgagtaaaagctggaacatttacaactttgaagtgtttggaaaatatacttatgatgttccacttgtaaaaacctttataggcctagttgacatacattctcagc

SEQ ID NO: 761091 - DNA, 643 bp, Homo sapiens
caatacaatgttgaatagaagtggtgaaagaggggatccttgtcttacaccggtttcaagtggaatgcttccatcaatgataattttgaattaatattctgcattcactcattaagagcatttccttgactaagatttacgttactcaggcttccgatcattcaagaagtgtattccaaattaataaggattagccagtcttaaaagattactgctgagtttatccaacatttgcatcttctacaaattctctgtgcaatggaatcaggattaacatgcagtagagatccttgggttggcccttgagcttgtcaaagtcccttgatggctaaaccatctctttttggagtggtcatttgtctctttgtcatgaaaccttgtgttaaatttgttttgtataggactgggcaaaatgctaaaatgtacattctagatgctggtctaatacaatttagaaagattttcacaattgaaacaratcatgaaaccatcgaaattttgtatttctgtcaaattggagcttcaccaccatcttctttgagtaaaagctggaacatttacaactttgaagtgtttggaaaatatacttatgatgttccacttgtaaaaacctttataggcctagttgacatacattctcagc

SEQ ID NO: 761092 - DNA, 601 bp, Homo sapiens
gcagtgaaatgacaatatgaggatatagagtataagtttgatttttctctttcttatcttttctaaggaagtttaagaatttttcctgggccaattaaaaaaaaaaccaacaggatgcatcatattttatctaaaactactttatccttttctgacatgcgtagaaatttcagccaacactgaagtagaaagrgaggaacagaaaggaccatgtgcattaaaatgccagctcttccatatgtaaaatcccagctcttcttataaatggaatgcaccgtactgcacattctcttagttgtttaaatgagtacgaagaaaaatcctagcatagtccctgtcacagaattaaatactcagtaaatattattccagaggaatttatttttctatgtggtatgaagtattaatcaaatctgcttttctaaatgcaagccaatttattccaacatccattaataagcatccacttcccccactaaatttttgattcaaagttttaagttacaaaagtaaagtacatttgttgcaaaaacttcaaataattcaacaaaagagaaaaaaagttttggtcactctctcaaaggaattctgaacacatctc

SEQ ID NO: 761093 - DNA, 568 bp, Homo sapiens
aggagctatctccttcaggaagccttccatgagagggccctgtgccatgtcttactcttgaggtctggtactctcagatcagacagtatctgatgctgactaggcattcaggaaatgtttgttgaatgaatacaatggcrttggtttctattctttttctctaatcttctcaccagagtttagatgtttcaactttgtaacaggatgggacatctatttcagacttggagagactctgaagagtttgtcagaggacagacagttcattagttggttctcattttgaaatgcttgaactcagggaacacatctcagcttcatacacagagcctttgtggttggatccatgctggtctttcaggatgggttctctggaagcagatgccagatggagtttgggactgaagatatttatcagagagcagtgttagtagaaaggaaggggagtagtattggacaaaagaagtcaaattgggatgcaggcctgacacagccttgtcaacctatctgtgagggagctctggaaaagtacctccagggtgtcatccatcaggccaaagtcgtcggt

SEQ ID NO: 761094 - DNA, 568 bp, Homo sapiens
aggagctatctccttcaggaagccttccatgagagggccctgtgccatgtcttactcttgaggtctggtactctcagatcagacagtatctgatgctgactaggcattcaggaaatgtttgttgaatgaatacaatggcgttggtttctattctttttctctaatcttctcaccagagtttagatgtttcaactttgtaacaggatgggacatctatttcagacttggagagactctgaagagttygtcagaggacagacagttcattagttggttctcattttgaaatgcttgaactcagggaacacatctcagcttcatacacagagcctttgtggttggatccatgctggtctttcaggatgggttctctggaagcagatgccagatggagtttgggactgaagatatttatcagagagcagtgttagtagaaaggaaggggagtagtattggacaaaagaagtcaaattgggatgcaggcctgacacagccttgtcaacctatctgtgagggagctctggaaaagtacctccagggtgtcatccatcaggccaaagtcgtcggt

SEQ ID NO: 761095 - DNA, 476 bp, Homo sapiens
tccagagttctcactctctctcctctctagtattctatcttgcaagttctagacactgtggcccctgaagattcccatctcggtgtcttcacctcatggagactgctagacactgcctggattcccgtttcccatactgcatcctgtaaactgtagccaggcagtaagttagggcartcgtggagctcagctctttcattttccatcactttggggtcactgaccttcattgcatgatatctaaagtatcaaaacttgtttactatatcttgttgatttttcagtggttttaggcaggatatatctttttgctattattctatcttggtcagaaaaagatccatctttctttatttctcctggaggatattttatattctatctaaaatattatcaattttatctaacttttcatttttacacccatcaagttgtagttaatatttagtaaaaatttttgttaaacttactccgta

SEQ ID NO: 761096 - DNA, 634 bp, Homo sapiens
tattctgtagatgtgtattagatacaatgggtcaagtgtcaaatttacatccagaatatttttgttagtattctgcctcaatgatctgtctaatgttgtcagtggggtgttgaagttcctcactattattgtgtggctacctatgtctttttgcaggttgagaattacttgttttatgaatctggatgctccattgttaggtgtgtatacatttagcatagttaagtcttctttttgaattgaaccttttatcattatataatgcccttctttgttcttttctactgttgttgatttaaagtctattttatctgctacaagaataacaactcctacttttttttgttttccatttgtgtggcagayctttctccaatcctttactttgatcctgtgggtgttgttatgtgtgagttgagtctctggaatatagcagatggatttgtcttaaattttcataccatttgctactctatgccttttaagtggagtgtttagaccattgacattcaaggttaatattgatatgttaggttttgatcctattatgaaattcttagctgattacttcattgtttctattgtgtgggtgttttatagggtctgtgggctatgtactcaaatgtgtttttgt

SEQ ID NO: 761097 - DNA, 634 bp, Homo sapiens
tattctgtagatgtgtattagatacaatgggtcaagtgtcaaatttacatccagaatatttttgttagtattctgcctcaatgatctgtctaatgttgtcagtggggtgttgaagttcctcactattattgtgtggctacctatgtctttttgcaggttgagaattacttgttttatgaatctggatgctccattgttaggtgtgtatacatttagcatagttaagtcttctttttgaattgaaccttttatcattatataatgcccttctttgttcttttctactgttgttgatttaaagtctattttatctgctacaagaataacaactcctacttttttttgttttccatttgtgtggcagacctttctccaatcctttactttgakcctgtgggtgttgttatgtgtgagttgagtctctggaatatagcagatggatttgtcttaaattttcataccatttgctactctatgccttttaagtggagtgtttagaccattgacattcaaggttaatattgatatgttaggttttgatcctattatgaaattcttagctgattacttcattgtttctattgtgtgggtgttttatagggtctgtgggctatgtactcaaatgtgtttttgt

SEQ ID NO: 761098 - DNA, 606 bp, Homo sapiens
tgatcctattatgaaattcttagctgattacttcattgtttctattgtgtgggtgttttatagggtctgtgggctatgtactcaaatgtgtttttgtgattctagatattgtcctttcatttccacattcagagcacccttagagatctcttgtaagggaggtctagtggtaacaaattcccttagtgcttgcttgtctggaaaaatgttatttctccttcacttatgagccttagtttggggaatataaaattcttggtttgaatttctcttctttaaaatgctgaaaatagccctctaatgtctcctgtcttgtaacatctctgttgagaaatctgctgttaggttgatggagttccttttgtacatgatctgaccttatctccagcttccttttcattttttaatttttttwaattttattctccagcttcctttaagatttttttctgtagcattgatcttggagaatctgaagactatatgccttggtgatgttcattttctattgtatctggcaggtgttctctggatttcttctatctagatttgtacctctctggcaggattaggagaattttcttgaattattcccatatatatttt

SEQ ID NO: 761099 - DNA, 646 bp, Homo sapiens
catgcaaatgtgtgctttgaattatttttatacaggtaaatacacctgaacttggggcagggaaggcggcactttaccacagtatgcaaaggaaggatgggccagctcaggctgctgattcaagcaagtggtcacactaaatgcctagagatctgcctggacatggagcagagaggatgctgcttcattataatgtctgtgcgggaaggatgggttagcttcagctgccaatccagggaggaccctagagtctgggctcttagattcccgttttgagagggtctagtagatctaggtttgaaccttttgtccaccattaccrtcctatgaacttggccaacaaactaactactctaagccttggtatctacctcctttataaaatggggacatcaacaatagctaggcatagagggtgatgatatacagcttaatgaggaaatgtaaataaagaacttagcaaggtaccatagtacatgaaaacaacttaaaaagttattagctaaaattattaatataaactttgtattttaggtcttccagaggggctgatattttagctgagtctaaaggattgcaaggtattcaactaatgaataaagggaaaggaatgggcattctgagaagaggaaataccaagtttaaa

SEQ ID NO: 761100 - DNA, 621 bp, Homo sapiens
tctgtctgctgaataaatgaatcataggatgaatgaatggagaaatgaatgaaaagtaagaggatatagaacaccaattatgcccataattaagtcctagattctctattccatttaggactcaagatacctagtcttatagttctttttcctgtagatggggataaggagaatggcaagatctctaatgattttcaagtcatctcattaacattttccttatattctccttagaagcctccactgcatgagatttaggtacagtctacaaatagaacatctccttatacaataaaacttggcccctgttaaagacttgattctttagagctattgaagatttttaagaaagatctagaatgtactactatcttacaaacatctgcttatggtccttaatgaaaacctctaaactaattccatttaaactgtacaaattctatgttgycatactcccataacgtgttctaaaacacagcattgttaatgagcataaagtatttatcagtccacataattgtttcacacatctattatattcctcagaaaattcatatgtagaaaaccaaatgaactgaaacttcattgtcctcacacctgacatcaaagtaataaaattcc

SEQ ID NO: 761101 - DNA, 584 bp, Homo sapiens
gttataatcctaggtacatatccaaggtaattaaaacatgtctatacaaaagcttatatacaaatgtttacagcagcatttaaaaacaactcaaatgtccatcaataggcaaatggataaacaaaaggtggcatatccatacagtggaatattatttagccataaaatgactggagtgctgacacatgcttcaggatgaataaaccttgaaaacataatgcttaagtgaaagaagccagtcaccaaaagacacatattatacaattcccatcatgtgaaaaccyggaatagggaaatctacagaggcataaattagattagtggttgattagggctgggagtgaggcgatggtggtggtagtgataaagggatacaggggtcatagctaaaggatatggggtttctttttgagacaatacaaatgttctagaactaactaggctgttggttttccatgtttgtgagaaaaaaattgaattttacatcttacattggtgtattgtttggtatgtgaattatatgtcaatgaagctgccaaaattgcctaatgcagtaaatacttacagacattatctttataagc

SEQ ID NO: 761102 - DNA, 584 bp, Homo sapiens
gttataatcctaggtacatatccaaggtaattaaaacatgtctatacaaaagcttatatacaaatgtttacagcagcatttaaaaacaactcaaatgtccatcaataggcaaatggataaacaaaaggtggcatatccatacagtggaatattatttagccataaaatgactggagtgctgacacatgcttcaggatgaataaaccttgaaaacataatgcttaagtgaaagaagccagtcaccaaaagacacatattatacaattcccatcatgtgaaaacctggaatagggaaatctayagaggcataaattagattagtggttgattagggctgggagtgaggcgatggtggtggtagtgataaagggatacaggggtcatagctaaaggatatggggtttctttttgagacaatacaaatgttctagaactaactaggctgttggttttccatgtttgtgagaaaaaaattgaattttacatcttacattggtgtattgtttggtatgtgaattatatgtcaatgaagctgccaaaattgcctaatgcagtaaatacttacagacattatctttataagc

SEQ ID NO: 761103 - DNA, 488 bp, Homo sapiens
acgcaggggctgaaaagtggtgttaagttcccataaccagcctttaaacatctattgaaggataataccccaacctgtctagggctgtatggtttaatatggtggccaatggtcacatatgtgttttaaatttaaattaatgaaagtgaaatgaagtttaaagttgagttcctcagtcacactggtgacatttcaaatgctcagtttcacacgtggtgggtggctaccatattggacgtgcagatacgtaacatttccaacagctcaaaaagttctgctctrgggccttgaaccctttttgattaggtcattttggtgttatatgacattttatccttcaatgatattaaagctagaataagctgaatatttattatgtgtcaggcaggattctaagcatattatacatattaactcctttaattgtggtaagacatgttataaatgggggtcatggaagccatttatcccatttatcccacatgtta

SEQ ID NO: 761104 - DNA, 655 bp, Homo sapiens
agttactaaaagagattttcacactttctcccttttttgttgtcctttgtaggaaggcaaatagaaagaagatgagatagagaaaaagggggtagggaatgagaaggaagatggaagacagagggaagcagtgaagatacttaagagtagacagagcctccctaagccccygtcttctaaactttccatccagcctaaaaccccttagtcacctggcagttatgtaacccccaatcccaaaatcccgggaaccttcaaattacccttgggggaggcttgggattagatgctgaggacagaggattagtgtcacactcaggggtaggtttgtataccaacttgtccccagcgggaacccagattcataggacctatgcctccttgcagggagtaaagaaaccttacctgactttcaaaatcaaccagtcgcagggcttactggattcctaacataaagaaacaaaatttgtttcatattcaatggtgctgggccactctattactatgtagatgtgttagtttcaaacacagaagccaatatataaaagcctatattttatatgattacaacccaggtgtatgtgttttatcttatacttatgatgcttttaaaatatagagtaatttctcttgcaaggaatataataattaacaa

SEQ ID NO: 761105 - DNA, 647 bp, Homo sapiens
caggtcactgctactttaagtacagatccatcaatcacttgttactggtctttgtcaggaagaagaaccaacgagaagataaactagctatattactaaggatgttacttagttcaattgacatttttttctaatgtaggaaggaatgcactgatttgtattttgtcctgatttgttatttgttagtggagcagtaatggttaggggaaccacactttgagtcgcaatgcactagattgttttggcagaagtcaaagaagaaagtaatgtrgattttgagtaaatgttccagaaagtaacggagatttcaggaatggtacaaaccagacagtaaggaatagaacaagtttaacttttagcctctttttaccctcaaaaatgcaattcaaaaagaatctgccactaagagcacaaacacagaaattgtatactgattatttaccacatgccaggtactatggtaggcaatatacatgcagaatttgtttgggaaacacatccatttgtccccaaataaattagagatccagggaatgtgctttggaaaatgctgactaacatcttatgttttggataatcttgatttctttaaataaaatgaatcacatcatcttccaccctcttcattgttccatgtcttccctatt

SEQ ID NO: 761106 - DNA, 572 bp, Homo sapiens
gaccaatgcatgatgttaaaacgtcaattcaaactgcaaaatagaccaattaattttaaagtaacagagtaggaaaaggccaatgatacgatttcaaattctacatcacaaccaacatttaagaaactaccaagctttgccaagytttgatatagtatcaaaaaagaatacccacaattaattgaaaaggccactaaaataaccctcattttttcacctccatatttcttttctgttttcgagactaagtctcgctctgttgcccaggctagagtgcagtggtgtgatcttagcttgctgcagcctccacctcccgggttctcctccctcccgggttctcctccctcccgggattgtcctgcctcagcctcctccacctccatatttctgttaggttgcattttcttcatatatttgaaccaaaacaacacatcacaataaactgaattcagaagaggtgagaatctgttttctaatacctcatgatttgtaaaaatgtataacagtaactcccttgttggtaaatttatttttatttgggaaaatcattatttttaatgaaaaactattat

SEQ ID NO: 761107 - DNA, 572 bp, Homo sapiens
gaccaatgcatgatgttaaaacgtcaattcaaactgcaaaatagaccaattaattttaaagtaacagagtaggaaaaggccaatgatacgatttcaaattctacatcacaaccaacatttaagaaactaccaagctttgccaagctttgatatagtatcaaaaaagaatacccacaattaattgaaaaggccactaaaataaccctcattttttcacctccatatttcttttctgttttcgagactaagtctcgctctgtygcccaggctagagtgcagtggtgtgatcttagcttgctgcagcctccacctcccgggttctcctccctcccgggttctcctccctcccgggattgtcctgcctcagcctcctccacctccatatttctgttaggttgcattttcttcatatatttgaaccaaaacaacacatcacaataaactgaattcagaagaggtgagaatctgttttctaatacctcatgatttgtaaaaatgtataacagtaactcccttgttggtaaatttatttttatttgggaaaatcattatttttaatgaaaaactattat

SEQ ID NO: 761108 - DNA, 612 bp, Homo sapiens
aggagaatgagagtgtttcccaagggaaaaatgactactctgtttcctaataactgaatatgttaccatagaagttataaacatcaagagggcataaacgccctctcaaataaaatggggtactttacacacaatttccagtgaagaatttmatcttattcctcttaagaataacctaataaatatcaaaagagctctttttgacaaaatggtttcaaagtttcataaagtaaaagctgctccgtatgatttttataatgcctataatcaaggcctcagaacttggaattatctttttacacaaattatttttcaaataaaagactgccacgagcatctcaatctactactgaatataacaatctttcccaaatattcctacaaagggtcatctagcttctatgaaacacctgaagggcagtattcaaatggcagtaatcataattagtgagattcctacttcagaatacgtactagtagctgcttaatttgcctttagttaatgtttatctagggaatcgatacactgcccctacaatacaggtttaaagaatgctgatcctgagacaagctaatgtgattcaatgacaatacctggaccataatattatc

SEQ ID NO: 761109 - DNA, 580 bp, Homo sapiens
ccttttacaatagctgcaaaaaaaataaaatacttaggaatatatctaaccaaggaggtgaaaggcctctacaaggaaaactacaaaacactgctgaaagaaatcatacatgacacaaacaaatggaaacacatcccatgctcatggatgggtagaatcaatactgtgaaaatgaccatactgccaaaagcaatctacaaattcaatgcaatccccatcaaaaccatcaaaataccaccatcattcttcacagaattagaaaaaaaaattctaaaattcatatggaaccaaaaaagagcccatagccaaarcaagactaagctaaaagaacaaatctggaggcatcacattacctgatttcaaattatactataaggccagagtcaccaaaacagcaaggtactggtataaaaacaggcacataggccaatgtaacagaatagagaacccagaaatatacccaaatacttacagccaactgatctttgacaaagcaagcaaaactataaagttgagaaaggacacccttttcaactaatgttgctgggataactggctagccacatgtagcagaatgaaa

SEQ ID NO: 761110 - DNA, 571 bp, Homo sapiens
aaggtgagttttatggtttatgagttacatctcaaaagttataagctgggaaattatcaaggaaatataaaatagaatttaagtgaacaaaagctataagcaaaaacaagggtgaaatcttagaagaaaatactaaatgaacaaaacaagatgcaactcttttgagtacccccacactccggtgagtgtgcatctttttgatatgaaataaaatctctgtactttcactattttctgactcatccttgaattccttctcatgatggtgtcaagagtctggacaccggctggcgctgaggtcccatcggcatttggggaccccccccctccagcctaccagtatcatctttatggccatccagcccagagcatcatcagccacatyagaaccaccagcagttggtaagtcccattggggccttaattggagtcttctcgttctctggagttactgctactttcttccttgttcctacagcctgactcccctcagccgtagtgcctctgcttcctccagctggaaaacgcagttcgccctgacagtgacaaatggaggtgggaaggctttgac

SEQ ID NO: 761111 - DNA, 607 bp, Homo sapiens
cttagggggctttgaaaatttctaaaatatttctggggatacagaaggtcatgtgcatgtgcagggctaagcaaacagccactaaagacctgacagagctccgctctctaacctttgcttgactctgaggctctgcacaaagcaggaagtgaaggctaaggcagagctgtgaactcccggggcatggaaagcacgccccaacatacacagcacccgttggaaaatgatgggagacatactggtttaaagcatttaagaaaatctgtcaaattattatttgtgactcagctaatcaaacaaagacttcagtgtctatacaagatacagaataaagactacagaaatagtccaggaaggtcacaaacaacaacaaaaacaacaaaccccagggatagggaaagggaaggtctgattaccagtgttgtcacattataatatttaaaawataatgtttctgacaaaataattatgagacacacaaagaaatacttaactatgacccatctatgggggaaaaaaagtagtcaatagaatttattcctgaggaagcccagatgttgaacttactggcaaaaactttaagtcagctaatataaatatgttcaaa

SEQ ID NO: 761112 - DNA, 579 bp, Homo sapiens
aaggatctagggagtaggactttgatgtctttgggggctgttgtttagcttaccacaggcttctgtctggtccctaaagatttacatccatcctacatgcaaaacacattcaccatattgtaaaaatcttccaaaatctaaacccattgcattaactcaggtctaaaatctcgttaaatattataactcaaaagtcccaaatctcataatctaatcatctaactccagtataggtgagtttctgggtatgattcatcccaagacagaattcctctttatctatggacctgtgaaactagcaaacaagttatgtgctgctaaaatactgyggtgggacaggcatagaataacaattatatacattcccattcagaaagggagacaatgagaggaaagaaaagagtcactagcaccagacaatttttaaatttaatcaggtaaacttttaggtttcaagggttgggaatagtccctgtggcacccagctccactctatgggccagagggttgtgtatgtattgtgtatggctgtttttatgttacagcaaccaaatcaagtggttatggggtagtcatata

SEQ ID NO: 761113 - DNA, 602 bp, Homo sapiens
ctataaattttatttatcgacatagctccatcaagttcaagacacattttaaagtgatgataccagtcatttagtccatccctaaacaattgaagttgctgggaatgtaagcatgtcaatgcagtcatttttacattattattatttttttaaggagccaggagtagataactttgtttatatggggattaagatagttgctctgatgttggtttgagaacttcaacttcaacgttcggggttctcttttaactcaaggccaagcttgtaaattaagctgccttaaagaaaaaagaaggactgcagataaaagaagggaatgggaaaaataaacacagacttttaagaatgagtaacaagctacrcatcgtggtttacgcctgtgatcccagcactttgggaggccaaggcatgtcagaggatcctctgaggccaggagttcaagaccagataggcaacataacaagaccccatctctatttaaaaaaaacacacacacaaattaactggaggcggtgatacacacctgtagtcctggctactcaggaggctgaggtgggaggataacttgagcccagaagttggaggttgcagtgatctgt

SEQ ID NO: 761114 - DNA, 521 bp, Homo sapiens
aaaacagttaatttttctgaagttcctctagacgattaactcttcgttaatctacacattaaaatctatcagatagaataatttactagctgttttaattttattatttagaaaaaatgtgaagatatttaaaatgcagagagaacattacaagcacccatatacctgtctcatataatgaatatgttaacattttgttatatctccctcagatctattaagtattcaacatttctgataaaattgaaggtccccttgtactgcccccaataccattctccacccttttccccaaaggcaaacactaacatgaatttggtatgtaactttccartctgggttttacaatttaactggatgtgaacctataaaatgcagaatattggtttatatgatttttttaaatgtacaaacatggtattaggctgtgcatattattcttggacttatttttttcattcatggtatgtttttattttttctcttcgtgttgataaatatagatccaattcattcatttt

SEQ ID NO: 761115 - DNA, 605 bp, Homo sapiens
cccactctgcctgacatcatcaccaccaaagctgagactgacttggagcttaggtcttcatctgagacattcggattcttttattgacatctatcttcatgcttatctccccatcagtagttcaaactatacccccatgctctatataatagaaaggaagggaataatatttttctctcttgagatttaaggatattagaattcacaggattttgcaactcatcaaaacagatgcagaatataatgtcatgactaaatatarcacattgttgccctgaaattatctttatttccttagttaacttttttgaaatgtctgacataaggtaatatcttacttccagctttgttgcttctctttcttgtgtttgtttattggttgtgtgtaggtttgtttgtaatggtaggcgtgaggttatctcactcctctcatctcattacacatttttgaagaaagaagagtagaggccctaattttgtacactatttgttcttagaaattacgactcccttttgaatgcaataaactcaggcaaaattctgaaatgacctcaaacaaaacaggttgccgcttgtaacaaaaaaaattttttttcatatagaca

SEQ ID NO: 761116 - DNA, 625 bp, Homo sapiens
tttgtctgtctgctgaataaatgaatcataggatgaatgaatggagaaatgaatgaaaagtaagaggatatagaacaccaattatgcccataattaagtcctagattctctattccatttaggactcaagatacctagtcttatagttctttttcctgtagatggggataaggagaatggcaagatctctaatgattttcaagtcatctcattaacattttccttatattctccttagaagcctccactgcatgagatttaggtacagtctacaaatagaacatctccttatacaataaaacttggcccctgttaaagacttgattctttagagctattgaagatttttaagaaagatctagaatgtactactatcttacaaacatctgcttatggtccttaatgaaaacctctaaactaattccatttaaactgtacaaattctatgttgycatactcccataacgtgttctaaaacacagcattgttaatgagcataaagtatttatcagtccacataattgtttcacacaactattatattcctcagaaaattcatatgtagaaaaccaaatgaactgaaacttcattgtcctcacacctgacatcaaagtaataaaattcc

SEQ ID NO: 761117 - DNA, 567 bp, Homo sapiens
tggaaattttaagccagattttgaaaatgtaattatataaatacatccaaaatgtgtgtgtgtgtgcgtgctgtgtgtatgtgtgtgtgtgatggttcatttttaaagaattttatattttgttattcttgaactttttcacatacagattgatttcccataagctcttgttaaaatggcctcagtttaattttttgtgctctgctcaaaasagtattaatgaaatgaatcaatgtccaaagtatgctacctggtaagttggtgaggatcccagaaatgaaattaggagacctacatttcagtcttagtcaatattttgtgttgtttctcattaaaaggaatgtatttcaaagaaggaaattctagaccagttgttcttaaagggtagtccagctccctgtgagagtccccaagacacttgcagaagggccaggagctcaagattatttttatgattgtactaagttgttctttgccttgttcactctcactgtctcatgagtgtatagtggaaggtgcatgtacagaaagagaacatatagaggctgcataacttgtgatgacatc

SEQ ID NO: 761118 - DNA, 479 bp, Homo sapiens
acgcaggggctgaaaagtggtgttaagttcccataaccagcctttaaacatctattgaaggataataccccaacctgtctagggctgtatggtttaatatggtggccaatggtcacatatgtgttttaaatttaaattaatgaaagtgaaatgaagtttaaagttgagttcctcagtcacactggtgacatttcaaatgctcagtttcacacgtggtgggtggctaccatattggacgtgcagatacgtaacatttccaacagctcaaaaagttctgctctrgggccttgaaccctttttgattaggtcattttggtgttatatgacattttatccttcaatgatattaaagctagaataagctgaatatttattatgtgtcaggcaggattctaagcatattatacatattaactcctttaattgtggtaagacatgttataaatgggggtcatggaagccatttatcccatttatcc

SEQ ID NO: 761119 - DNA, 658 bp, Homo sapiens
agttactaaaagagattttcacactttctcccttttttgttgtcctttgtaggaaggcaaatagaaagaagatgagatagagaaaaagggggtagggaatgagaaggaagatggaagacagagggaagcagtgaagatacttaagagtagacagagcctccctaagccccygtcttctaaactttccatccagcctaaaaccccttagtcacctggcagttatgtaacccccaatcccaaaatcccgggaaccttcaaattacccttgggggaggcttgggattagatgctgaggacagaggattagtgtcacactcaggggtaggtttgtataccaacttgtccccagcgggaacccagattcataggacctatgcctccttgcagggagtaaagaaaccttacctgactttcaaaatcaaccagtcgcagggcttactggattcctaacataaagaaacaaaatttgtttcatattcaatggtgctgggccactctattactatgtagatgtgttagtttcaaacacagaagccaatatataaaagcctatattttatatgattacaacccaggtgtatgtgttttatcttatacttatgatgcttttaaaatatagagtaatttctcttgcaaggaatataataattaacaagct

SEQ ID NO: 761120 - DNA, 638 bp, Homo sapiens
caggtcactgctactttaagtacagatccatcaatcacttgttactggtctttgtcaggaagaagaaccaacgagaagataaactagctatattactaaggatgttacttagttcaattgacatttttttctaatgtaggaaggaatgcactgatttgtattttgtcctgatttgttatttgttagtggagcagtaatggttaggggaaccacactttgagtcgcaatgcactagattgttttggcagaagtcaaagaagaaagtaatgtrgattttgagtaaatgttccagaaagtaacggagatttcaggaatggtacaaaccagacagtaaggaatagaacaagtttaacttttagcctctttttaccctcaaaaatgcaattcaaaaagaatctgccactaagagcacaaacacagaaattgtatactgattatttaccacatgccaggtactatggtaggcaatatacatgcagaatttgtttgggaaacacatccatttgtccccaaataaattagagatccagggaatgtgctttggaaaatgctgactaacatcttatgttttggataatcttgatttctttaaataaaatgaatcacatcatcttccaccctcttcattgttccatgtc

SEQ ID NO: 761121 - DNA, 510 bp, Homo sapiens
tgtcattcatttctaacctaagctgaaggtgcagtagcttggggcaaaatcttctactgactaatggcagtagcattcatcatgggtggcatgaggccagctaacccatcaagcatatttaaagcctatgccatttgtcaggcctctgagcccaagctaagccatcatatcccctgtgacctgcacgtacacatccagatggccggttcctgccttaactgatgacattccaccacaaaagaagtgaaaatggcctgttcctgccttaactgatgacattgtcttgtgaaattccttctcctggctcatcctggctcaaaagctcccccactgagtaccttgtgacccccactctgcstgccagagaacaacccccctttgactgtaattttcctttacctacccaaatcctataaaacggatccacccctatctccctgcgctgactctcttttcagactcagcccgcctgcacccaggtgaaataaacagccatgttgctcaaacaaa

SEQ ID NO: 761122 - DNA, 524 bp, Homo sapiens
tatctcagggactattaagagatggtggaccttgacacaatgaagaatggaaggcccagatttaaggacattgcaaattacatgggactaattccaattccttcagaggacaaatttctttggggtctgagtcatatagtttggctgcacagctcttttcccaatcacctgaatgaccagcgtttggatctgggttcatttagctgcaaggggacctcattaaatgctgtgtacacaaaaggtcaacaattcctcacactgaaaaaagggaaaagaggagcscttccagcaaaacaactgaataaacactgtaaatgttactaaacaggaaagtacagagaagtgcctgctggaaggagatccatggcagaacaaaaatagcacaaagagagattctctgtcatccatcaagatccaaaagcagttctccacgctaaccaatgatttgattaattagagatttatcacgtgttcagatttccaattctttttttttttttttttttgagacggagtctcgctct

SEQ ID NO: 761123 - DNA, 628 bp, Homo sapiens
atgcttttttcctatcttctgagggttcccacaatgtatcactccaatctctgcctccagcttcatgtggcattctcccctgtgtctctatcttctctttcttccttttttttttttttttttttttttgagacagagtctcgttctgttgctcacactggagtgcagtggtgtgatctcgcaacctccacctcccrggttcgagtgattcttgtgcctcagactcctgggtagctgacattacaagcaccacgcctggctaattttatttttagtagagatgggttttcgccatgttggccaggctggtcttgaactcctgagcctcaagcgatttgcctggcttggcctcccacagtgctgggattacaggcgtgagccaccatgcccgccctatcttctcttataaggaacacgcagtcatattggattaagggcctgccctgctccagtatgacctcatcttagctacttacaaccacaaccacagtatttccaaataaggtcacattctgaggctccaggaagtacatgaattttggagaggacaccattcaacccagtacattcagtttctatttaacataaaaaataattcccatactatacaggatgaaaaaatgactta

SEQ ID NO: 761124 - DNA, 588 bp, Homo sapiens
gtcagagtattagcttcctaggattgctgtaacaaattaccatgaactgggtaccttaaaacagcagaaatacgttctcactgttctggatgctagatgtgcaaaaccatgttagcagggttggcaactactggaactctgagggagaatctattccatgcttttttcctatcttctgagggttcccacaatgtatcactccaatctctgcctccagcttcatgtggcattctcccctgtgtctctatcttctctttcttccttttttttttttttttttttttttgagacagagtctcgttctgttgctcacactggagtgcagtggtgtgatctcgcaacctccacctcccgggttcgagtgattcttgtgcctcaractcctgggtagctgacattacaagcaccacgcctggctaattttatttttagtagagatgggttttcgccatgttggccaggctggtcttgaactcctgagcctcaagcgatttgcctggcttggcctcccacagtgctgggattacaggcgtgagccaccatgcccgccctatcttctcttataaggaacacgcagtcatattggat

SEQ ID NO: 761125 - DNA, 659 bp, Homo sapiens
tttaatgcatttttaaaatagataatgtcatttccatggctctttcagattatcgatgggacattttcaaataaaacttgtgtgtgcttaagtgctttatttaataggagacagattttatttccacaagaagcagagattgtaagtattatttggtgtccttccctggcatagcactgtaggaagcaacagagattgtgctcaaaatacagacagctaaaaaacatttgatttccatcgtgtttcttaaaattttactggtagctaaaggctcttatcaatccgtaattttaagtggtccagaacataaattagctgtgagaactgagaaaaacatttctgctggagcaagttcattcttagaaaccaaggcctaccctaccttagaagaggaaaaattatatatgcgttggaaagtttttcagaaaaaaatcaactttttccaattctctatcagaatattggtcaagttagttattcamatctttcaatggatcagaaatgagtgcactatcttccaaagaggatatctatcccacaagaaaatgcctttcctgaaatgtttcctaagctcaatcttacaaagaccatcatactcaagcccgggctgagaaatgcctatatattgggccagccaagaaggtaactacacaactgat

SEQ ID NO: 761126 - DNA, 543 bp, Homo sapiens
gaagacatcgtgctaagtgaaataacccagtcacaaaaagacaagtgctatgattccatttataggaggtacccagtgtagtcagattcatagagacagaaagcagaatggggggtgcctggggytggaggaggagaggtgtgggagtgtaatgggtgcagagtttcgattgaagatgaacacgttctggagatggattgtggtgatgcttgcataacggtgtgaatgtacttaatgccacagaactttacacctaagaatggttaagatgggccgggtatggtggctcacccctgtaatgccagcactttgggaggccaaggcgggcagatcatctgaggtcaggagtttgagtccaacctggccaacatggtgaaactccatctctactaaaaatacaaaaattagccaggcatggtggtgatgggcgcctgtaatcccagctactcggtaggctgaggcatgagaatctattgaacctgggaggcagaggttgcagtgggccaaggttgcaccactgcactccggcctgggcaacagagc

SEQ ID NO: 761127 - DNA, 564 bp, Homo sapiens
cagctgaaatagagttactatttcttcactgcgtattttgtgaactcaacgtaagttctgggcagtgggtattttacctcctgtaggagtcgccgttggggctgcagaactaagccagtgtgcctagcctccagctgtgtaatagctcgcagctgtccccattctcctgtctcwgttaacaggagcatacacggttgggagcctccaagagcatcccatattaatgactgacatgggggtgcaaaagtttgcccgtatctcagctggggcaggaacaatttaatggggtatgacctattctatagcccccagtgggtcagacctaagccaaacttacttgaggctgcttcagtgctcagccaactacccttccatatcctgctttcccacccacacgttcccgtaaagagcagccttccaataactgacgtgtacccaaagccttaaggtgcctccgctccattttacagatgtggaatctgaggcttgcataggatgtcctccagcttggtctgtccctaaaattcaagccctttctgttccttcatcctgcctggatggaat

SEQ ID NO: 761128 - DNA, 549 bp, Homo sapiens
acagcagagagatttttttaaatcagggttttgacaccaacattcagctactaaatcaactaatcctgaaggttccttctacctctggactccaagtttcagtaagtcaataaattttcttattgattaaactagtgaaggttgtatttytaatatctgcagctaataacctaatacaaatgctgtgcatgcatgttattcttttaatccttttattgaactattttaacatttttaatgaagtatattgcatattatagcattcacccttttaaagtgtacagttcaatttttcagtattaatatattcacaaggttgtgcaacctccaccactacctaattccagaacattttcttcacccaaaaggaaacctcataatcagtagcagtcacttctaaatctcctctcccacagctcctggcaatccactttctgactctacagatttgcctactctggacattccatataaatggaattatacaacatgcatcattttgcacctggcttccttcacttagaataatgttttcaaggttaattcatg

SEQ ID NO: 761129 - DNA, 624 bp, Homo sapiens
actcccattggaaataagataactgtggaaaccctttcagataaatacaagctaagtagcgaaggtaccttggaaatatctaacatacaaattgaagactcaggaagatacacatgtgttgcccagaatgtccaaggggcagacactcgggtggcaacaattaargttaatgggacccttctggatggtacccaggtgctaaaaatatacgtcaagcagacagaatcccattccatcttagtgtcctggaaagttaattccaatgtcatgacgtcaaacttaaaatggtcgtctgccaccatgaagattgataaccctcacataacatatactgccagggtcccagtcgatgtccatgaatacaacctaacgcatctgcagccttccacagattatgaagtgtgtctcacagtgtccaatattcatcagcagactcaaaagtcatgcgtaaatgtcacaaccaaaaatgccgccttcgcagtggacatctctgatcaagaaaccagtacagcccttgctgcagtaatggggtctatgtttgccgtcattagccttgcgtccattgctgtgtactttgccaaaagatttaagagaaaaaactaccaccactcattaaaaaagtat

SEQ ID NO: 761130 - DNA, 624 bp, Homo sapiens
actcccattggaaataagataactgtggaaaccctttcagataaatacaagctaagtagcgaaggtaccttggaaatatctaacatacaaattgaagactcaggaagatacacatgtgttgcccagaatgtccaaggggcagacactcgggtggcaacaattaaggttaaygggacccttctggatggtacccaggtgctaaaaatatacgtcaagcagacagaatcccattccatcttagtgtcctggaaagttaattccaatgtcatgacgtcaaacttaaaatggtcgtctgccaccatgaagattgataaccctcacataacatatactgccagggtcccagtcgatgtccatgaatacaacctaacgcatctgcagccttccacagattatgaagtgtgtctcacagtgtccaatattcatcagcagactcaaaagtcatgcgtaaatgtcacaaccaaaaatgccgccttcgcagtggacatctctgatcaagaaaccagtacagcccttgctgcagtaatggggtctatgtttgccgtcattagccttgcgtccattgctgtgtactttgccaaaagatttaagagaaaaaactaccaccactcattaaaaaagtat

SEQ ID NO: 761131 - DNA, 724 bp, Homo sapiens
attactgaatgtccctcaatttggttttgtcagatcttttttcaagattagattccagctacacacttttggcagaaatatcacagaagtgatgctgagttcttctcggtgcatcatatcagaaggcacatgctacagatatatcccatatcccataagccaattaggtcatttggttaaggtggcatatcaggtttctccactataaagttattcttttaccctttgtaattatctcgtgagggaaatgctttgagactatgtaaatatcctgttactcctcaaactttcacctactggttttaagagtcattgaatattcttgtctggattagttattatyatgatgtttgccaaataatgatttgataatttcatcttcctttctatatttattagttggactttgactataagaaagagttttccattttcatttgtttgttttttgtttatctatggactcatggattcttataacactttattcaatacattataatcctttattataattatttattttggttcaccagttgtctcagatttggctattgggagttccttcaagctggcacctgtgtccttttgacctgtccctttgtccatcattatttgagcactcaaagaaattcactcataagaatttatagaagttaggcaactaagctataggaagcagaccctgagaaaaggatccaaatacgagtatttggatttggga

SEQ ID NO: 761132 - DNA, 565 bp, Homo sapiens
agagcttggtggtggttgttttaaaatcataatttcagttcagaaattggaaagaactctgactaccggtactctattaatatttcaattagagagagacatattttcaactttgaaaaattgcagttttaagaggcatatgataattttcttttcaaaatacagatgttcttctaaagattattcaaatacgactgtcttctgaagtttcatctttcttttttttcctcatttaycacatagatcagtacaattaggctaacaccaatgataatgttccttcaaaccaaagctaaagaacctcaaggggctggtaggggaatccagaggggtttgtagtgtctcaacacagccaatcgaggggcaagaactctttacatcaacaataagaccttgctctcctgggaactcttgggctcttgtctccaattccgttctccttcaaaaattccaaggtcttctaccacaccttaataaataactattaagtgcttttttactaactaataaattcaggatcccaggactgggtgagctcattaggagtaattcagatggatttgag

SEQ ID NO: 761133 - DNA, 452 bp, Homo sapiens
atattcagacggtaggcactagtgcagagaagagagttctaacaatcctctccagaaaaatcctggtcaaaacacaggacttcagcaatctgctcttttcacttgctcaggactcgggcttcagctttgggtgtggactgtgtgcagggcctatatttagtgattattttgcatatgttctctcaaaaagtttcacagatgcctsacgctggcagttgggggtatatttccttttagtggggactatctgttgtctgaatttgccaagccgctcatacacagataacggatttcacattcagtttagagggagactgatgggcctttgaatctatgacaagcaagacccaattgtagcatagtagacagatataatagcacaggcttaagagaaaggaaaccacaagcgccccaggttttattattaataataacattaaatatcattgctg

SEQ ID NO: 761134 - DNA, 616 bp, Homo sapiens
tggaggattgcccatagaaaggtagatgtctagcttctcttgaaaaactggaagatttggtaatattgggccctcattggcaaaaatcaacagaactgagtgggggctgcccctggaatagggcacttgtctccagtttgccactgtccccatccagccaggttcactagtttatgtctggcccctatgtgcatgaaacatgctgtttctactgaaaactgatgtactgaaaccaattgctcgaatatcctcaagttactgcatgcttgtagaaaccatcgycaaatggggaatttagatggtacaaggcacaatgaagagacagaacctatttcaagccctcgagaaccatgtttcttcagttctaagctgctgttaaaagaaaaacttcagccaaatcaaatttaaaggagttcagttgagcaaagaacgatttatcaattgggcagcctccggagccagagtaggttcagactccagtgcatccatgtggtggaagatgatttatggacagaaaagggaaagtgatatacagaaaatggaagcaaggcacagaaatagccatattggttacagctctgcatttcccttatttaaacacagtttgaactcttgg

SEQ ID NO: 761135 - DNA, 522 bp, Homo sapiens
cccaagctggtctcaaacttctgggctcctcaagtgatcctcctgcctcagcctcccaagtagtttggattagagggatgcatcactgtgcatacttatgcttttaatattctgtacatttattattgatttaaagtgcgttttacctttttctttaatagatgttggaagttctgatgaatctgcagtcaggtaggattttatagatttaaaaaattatgttaactaagaaaatatagatggaagaaacgaatatctgttgagtgttgtattgtgggctagacatcctaatatgttctatgcatttatcatctcataaagccatcacaacatctgtcttcctataacctrctgtttattaaataaacaactatggattagagctgattaattgcctcatgatcccatagttaacaaagtagctggcctacagtttgaccatcagcctgcctaccttccaaattctgtctcttgctcctcagcatagattgacagatatctgtgcagcccttggatcaaggt

SEQ ID NO: 761136 - DNA, 512 bp, Homo sapiens
cttaatctggctaaccttactctctaagtctcagctcatgcatgatctttaggaaagccatccctgacagcttttattttccttccttataccccagtgcctaacacttagcaggaactcaataagtaattatttagcaaaattaagactgtttatacaaagatgattcaaaagattgtcctctacagtctagcagcaaaggggatcracatgttaagacatgatgtgcagttcaggtggtaaagtgacactggaaaaattgacaaagtactaagggactccaatgaagcagatacccgtgtgtgtggagaaagatagctagaatcaaggaagacttcacacagcattctgagccttttttttttctttttctgttgttggagacaagttcttactctatcacccagggtggagtgcgatggtgtgatcgagactcactgcaacctcaaactcctgggctcgagggatcttctcacctaagcttcttgagtagctgggactacaggcacata

SEQ ID NO: 761137 - DNA, 448 bp, Homo sapiens
gtatttttagtagagacggggtttcactggtcagactggtcttgaactcttgacctcaaatgatccacccacactggccaaccaaagtgctgggattacaggtgtgagccaccacacctggcctaaccatacactttttgtaaataaactactcatatccatgttggtatgccaagtaaaatmacctattactaaatataagccataacccagagatgagtaaccaagataaaaaagtaaaacacatacgtttaaaaagacacaaaagtacattttgatacccattgaccacagtctatcagaagaaaaaaaagtacacacaaaaagcatcaaggagatcattcaatgtagaaaaagagaagaaaacatctttaatatctgagttgaggagaaaaaggatacaggcagttttagaaaaaaggaaaggggcagagagatgtgtgacgat

SEQ ID NO: 761138 - DNA, 448 bp, Homo sapiens
gtatttttagtagagacggggtttcactggtcagactggtcttgaactcttgacctcaaatgatccacccacactggccaaccaaagtgctgggattacaggtgtgagccaccacacctggcctaaccatacactttttgtaaataaactactcatatccatgttggtatgccaagtaaaataayctattactaaatataagccataacccagagatgagtaaccaagataaaaaagtaaaacacatacgtttaaaaagacacaaaagtacattttgatacccattgaccacagtctatcagaagaaaaaaaagtacacacaaaaagcatcaaggagatcattcaatgtagaaaaagagaagaaaacatctttaatatctgagttgaggagaaaaaggatacaggcagttttagaaaaaaggaaaggggcagagagatgtgtgacgat

SEQ ID NO: 761139 - DNA, 614 bp, Homo sapiens
taagttttaccacatttctcctaaattatgattttataacaagtaggtgcctttaaaacattacgtggtcataaaaatacgtaatttgacatattttcagatttgttaaattaatatgaataataacaaagctataccaactaaaatacataaaaagctagttaaagcaaggtactacaagacacagcaatacacttcaattcatctggggaatctagaattaagtgtcgaagaaaatcacttaattaaattttaatttgaaaatacttcaggtgtaaacatttccatttataactacattatggtcttaacatgtggcaatrtaaagacattaaaattactatttcagcagtacagaactatctaccttaaaatatgactctgtgcctaataaaatttcataggtgacacaatgtcttttctcaaagtaaatcatctctcacctcttttatttcctagaaatgaggcatgtttctaagccgatatagtaaacatttttccttttttattaaaacagctttgttgaaatataatttacatactatagaatgtatctgttttgacttaaagttaaaagatttttagtacatttactgagttgtgcagccatctct

SEQ ID NO: 761140 - DNA, 449 bp, Homo sapiens
atttttaccaaagattgatttacccgatttggagtatttcttgcagtctttgatttcatctctagtgactgaacagttggttcaagttgttttgcttcaacttctttcttatattgtttctctttcctttctaattcttctctattttttttgtacagcatattaacatttgttttttcttcattttcttgttttaaggtgcatctgcagataaagacatttatcttaaaattcattttgttaaaaaataaagagttcatcctgtgatatacctctgcagatgtttattatcctaataaaatttctatrttctggattatttttcctttgcagttctcagatatttaatttctcacttcaacatcttcaaaagaatgcatatacttgaaaagtagtaaggaaagaatattctgctaaagtttttgttactattcactctaatatatatt

SEQ ID NO: 761141 - DNA, 532 bp, Homo sapiens
tttcaaaatatttaacttcttgtaactttttagcaaaaaaaaaaaaaatacactactgtccgagtaaaacagggcacttcctatttaaggagaaagccaagctgataatgccatcataccgcctagcattctcatgtatatgacactgatttgacttaraaagaaaaaagttttaatactctcttctacttcccactagcaggcaattccattcttgcctttccttttcaccatttcttctacgatcacctagaaaaatgatgtctggtgcatattaggcccctaataaaggaataaagaaatgtgtgaaaggaatttcttgaataactatttcaaaactttttgagcaagaagactattattaagagtgttcccatgagcaggcaacaaacaatgacaaaagctattattcagagataaaaatgtccaaaacatagataggatataaatctctatcagtgcatgacaggtatctatcaaaaagtctcaaaaaaataccaagaaacatcacaaccaaatgcatgaaacttga

SEQ ID NO: 761142 - DNA, 590 bp, Homo sapiens
tcttgctctgtgggttcaggtgacagctggttgtttaaagcagcccggcaccttccactctcctttttccttccattctcaccatgtgacatgtctgctgttctccagccttctgctgtgactgtatgcttcctgagacctcatcagaagcacatgccagcatcatgcttcctgggtagcctgcagaaccctgagccaagtaaaccacttttctttataaattatccagtcaggtaatttatagcaatgcaaaacaaactaacacaagttactttccctctctggacattatctttaaaaagatgatgtcaccagagcaccttcagcaatccttcctgcgccataaatatcttctataatcaagcaatctattagagattcactaaaatttgcagcactttcaaattaacttactttccctctttctatgarcaatggcaaataatctgtatggttaagagatatttttcagacgttaagactttttttttcaagagaataagcacctgccaaactattttcaggaacaaattccctcagtcctctgaagttatttggagtttgactgtagctgtcaaaatggatagact

SEQ ID NO: 761143 - DNA, 596 bp, Homo sapiens
ctggatcctaaatagtatgtctttaattcttgcttactaattcttgagagcttccagaatcctgccctttccaagctgtagtgatgatccagcttttctgtccatcatatgagctacccagtatccttccataataaagcctttctgtttccygaaaactgccagtgtcagttgctgctccttagaaccaaaggatacttaccaaagatattttaattggacgaaaggaccaagtacctgaacagtgaaggctgttgctaagctgtccaataagaccaatctgcaggaggaacatccatgcattgaccaaaataaaccccactgtggcacagaggccacaagcaattctgagcgacatgcacggatggaggccaaagcagctggtagagggctgagcccaggaaaagcactgtgaggagggctcttacgagatcccccactaggcactggtgaggggatggggctcccccagtggcatcactaaggtaaactgagatgtatctatgttagatgtttccatgttagtcatttaagactcattttaactgcccagtgggttcactttgcccactgcctagacagagctgatttatcaa

SEQ ID NO: 761144 - DNA, 624 bp, Homo sapiens
ggtggagagttctgtagaactttcttaggtccacttggtgcagagctgagttccagtcctggatatccttgttaaccttctgcctcgttgttctgtctaatattgacagtgggtattaaagtctcccattattattgtgtgggagtctacatctctttgtaggtctctgaggacttgctttatgaatctgggtgctcctgtgttggatgcacatatatttaggatacttagctcttcttgktgaattgaaccctttaccattatataatggccttctttgtctcttttgatctttgttggtttaaagtctgttttatcagagaccaggattgcaacccctgctttttttgctttccatttacttgctagatctttctccatccctttattttgagcctatgtgtgtgtctttgcacatgagataggtctcctgaatacagcacatggatgggtgttgactctttatcaagacccatctttgccagtctgtgtcttttaattgggcatttagcccatgtacattgaaggttaatattgttatgtgtgtatttgatcctgtcattatgatgttagctggttattttgcccgttaatttatgcagtttcttcatagcatcaatgatc

SEQ ID NO: 761145 - DNA, 624 bp, Homo sapiens
ggtggagagttctgtagaactttcttaggtccacttggtgcagagctgagttccagtcctggatatccttgttaaccttctgcctcgttgttctgtctaatattgacagtgggtattaaagtctcccattattattgtgtgggagtctacatctctttgtaggtctctgaggacttgctttatgaatctgggtgctcctgtgttggatgcacatatatttaggatacttagctcttcttggtgaattgaaccctttaccattatataatggccttctttgtctcttttgatctttgttggtttaaagtctgttttatcagagacsaggattgcaacccctgctttttttgctttccatttacttgctagatctttctccatccctttattttgagcctatgtgtgtgtctttgcacatgagataggtctcctgaatacagcacatggatgggtgttgactctttatcaagacccatctttgccagtctgtgtcttttaattgggcatttagcccatgtacattgaaggttaatattgttatgtgtgtatttgatcctgtcattatgatgttagctggttattttgcccgttaatttatgcagtttcttcatagcatcaatgatc

SEQ ID NO: 761146 - DNA, 628 bp, Homo sapiens
aaaaaagagcaagaatagctaaagcaactctgagcgaaaaaacaaagcgggggacatcatactacctgacttcaaagcttactacaaatctatagtaaccaaaacagcctggtattggtataaaaataacacagacttatggaatagaatatataactgaaagataaacccctatgttcacagccaactgattttcatcaaagctgccgagtgtatatgttggagaaaggacacctgtttccataaatggtaccgggaaaaccgaataaccaatgtagaagaataaaaccagactctatctctatatgtcaccatatacaaaaatcaactcaacatagattaatgacataaatgataaaactactggaagaaaacagggaaaattcttcaggacactagtctagrcaaaaatgttatggctaagaattaaaagcataggcaacaaaagcaaaaacagacaaatgaaactatattaaactgaaatacttctttacagcaaaagaaataatcagaataacgagaacacctctggaatgagagaaaatatttgcaaactattcatctgcgaaaggactaatataaatatacaaagaactcaacaataaaaaagtaaataatcccattaaaa

SEQ ID NO: 761147 - DNA, 628 bp, Homo sapiens
aaaaaagagcaagaatagctaaagcaactctgagcgaaaaaacaaagcgggggacatcatactacctgacttcaaagcttactacaaatctatagtaaccaaaacagcctggtattggtataaaaataacacagacttatggaatagaatatataactgaaagataaacccctatgttcacagccaactgattttcatcaaagctgccgagtgtatatgttggagaaaggacacctgtttccataaatggtaccgggaaaaccgaataaccaatgtagaagaataaaaccagactctatctctatatgtcaccatatacaaaaatcaactcaacatagattaatgacataaatgataaaactactggaagaaaacagggaaaattcttcaggacactagtctagacaaaaatgttatggctaagaattaaaagcataggcaacaaaagcaaaaacagacaaatgaaactatattaaactgaaakacttctttacagcaaaagaaataatcagaataacgagaacacctctggaatgagagaaaatatttgcaaactattcatctgcgaaaggactaatataaatatacaaagaactcaacaataaaaaagtaaataatcccattaaaa

SEQ ID NO: 761148 - DNA, 526 bp, Homo sapiens
gaatggtgtatatgacatgtgctttgagatgtccaaggagggggattttcagggataatatgggaaatgattaagtgaacaatccctacctttcctagaccagctcaaactttatccactcatgaaccactgtccaatttttrccacatctattaagcaactatattattggctcaatatttttctttaattcacctcacaaattgccacaaatgttttcaaaaggaaactttacatcactgttataagtggaaaaccagtatcaaaggccacaatgggtaattatttaaaaatgaaaatgaatgaactttatcaatttacagtcaaatgttttgctcactaaagagagcttgaggctggctctcttggctacaaaaagattgagtcttaaagttgttaaagaaatattagcatcagagtcttgcctcttaaagcaattagaaatatggaaagagaattgaaaaaaatgatattgcaatgtgagttagtgttatataatctgtttccatagatatccttagtagtt

SEQ ID NO: 761149 - DNA, 526 bp, Homo sapiens
gaatggtgtatatgacatgtgctttgagatgtccaaggagggggattttcagggataatatgggaaatgattaagtgaacaatccctacctttcctagaccagctcaaactttatccactcatgaaccactgtccaatttttgccacatmtattaagcaactatattattggctcaatatttttctttaattcacctcacaaattgccacaaatgttttcaaaaggaaactttacatcactgttataagtggaaaaccagtatcaaaggccacaatgggtaattatttaaaaatgaaaatgaatgaactttatcaatttacagtcaaatgttttgctcactaaagagagcttgaggctggctctcttggctacaaaaagattgagtcttaaagttgttaaagaaatattagcatcagagtcttgcctcttaaagcaattagaaatatggaaagagaattgaaaaaaatgatattgcaatgtgagttagtgttatataatctgtttccatagatatccttagtagtt

SEQ ID NO: 761150 - DNA, 526 bp, Homo sapiens
gaatggtgtatatgacatgtgctttgagatgtccaaggagggggattttcagggataatatgggaaatgattaagtgaacaatccctacctttcctagaccagctcaaactttatccactcatgaaccactgtccaatttttgccacatctattaagcaactatattattggctcaatatttttctttaattcacctcacaaattgccacaaatgttttcaaaaggaaactttacatcactgttataagtggaaarccagtatcaaaggccacaatgggtaattatttaaaaatgaaaatgaatgaactttatcaatttacagtcaaatgttttgctcactaaagagagcttgaggctggctctcttggctacaaaaagattgagtcttaaagttgttaaagaaatattagcatcagagtcttgcctcttaaagcaattagaaatatggaaagagaattgaaaaaaatgatattgcaatgtgagttagtgttatataatctgtttccatagatatccttagtagtt

SEQ ID NO: 761151 - DNA, 564 bp, Homo sapiens
cttctttataccttatacaaaattaattcaatatggattaaagacttaagttttagacataaaaccataaaaaccctagaagaaaacataggcaatatcattcaggatataggcatgggcaaggccttcatgactaaaacaccaaaagcaatggtaacaaaaaccaaaattgacaaatgggatctaattaaactaaagagcttctgcacagcaaaagaaactaccatcagagtgaacaggygacctacagaatgggagaaaatttttgcaatctgcccatctgacaaagggtaatatctggaatctacaaagaacttaaacaaatttacaagaaaaaatcaacctcatgaaaaagtaggcaaaggacgtgaacacttttcaaaaaaagacatttatgcagccaacagacacatgaaaaaatgctcatcatcactggtcatcagagaaatgctaatcaaaaccacagtgagataccatctcacaccagttacaatggcaatcattaaaaagtcaggaaacaacaggtgctggagaggatgtggagaaataggaaagcttttacac

SEQ ID NO: 761152 - DNA, 629 bp, Homo sapiens
ttgatcatggtggattatcttttttgatatgctgttggatttggttagctagcattttgttgagaatttttgcatctatgttcatcatggacattagtctatagtattcttttttatgatatgtcctttcctggttttgatattagggtgatgctggtttcatagaatgatgtagggaggattccctctttctcttttggaatagtgtcaataggactggtaccaattcttctttgactgtctgatagaattcagctgtgaatccatctggtcctggactttttgttgttggtaacttaattaccatttcaacctcactgcttgttggtctgttcakagtttctatttcttcctggtttaatcaaggagggttgtgtatttccaggaatttacccatcccccctaggttttctagtctatgtgtgcaaaggtattcatagtagctttgaatgatcttttatatctctgtgatatcagttgtattaatatttcccttttgctttctaattgagcttattttagtcttctctcttcttttcttggttaatcttgctattgatctatcaattttattttatcttttaaaagaaccagctttttgtttcatttatcttttgtattgttttctt

SEQ ID NO: 761153 - DNA, 629 bp, Homo sapiens
ttgatcatggtggattatcttttttgatatgctgttggatttggttagctagcattttgttgagaatttttgcatctatgttcatcatggacattagtctatagtattcttttttatgatatgtcctttcctggttttgatattagggtgatgctggtttcatagaatgatgtagggaggattccctctttctcttttggaatagtgtcaataggactggtaccaattcttctttgactgtctgatagaattcagctgtgaatccatctggtcctggactttttgttgttggtaacttaattaccatttcaacctcactgcttgttggtctgttcatagtttctatttcttcctggtttaatcaaggagggttgtgtatttccaggaatttacccatccccyctaggttttctagtctatgtgtgcaaaggtattcatagtagctttgaatgatcttttatatctctgtgatatcagttgtattaatatttcccttttgctttctaattgagcttattttagtcttctctcttcttttcttggttaatcttgctattgatctatcaattttattttatcttttaaaagaaccagctttttgtttcatttatcttttgtattgttttctt

SEQ ID NO: 761154 - DNA, 628 bp, Homo sapiens
ctttcttaccttggaactaatattatccagagaactatctgatgcatgaccatatgcctgactcaaactgcttacttaatcaggaaatgtgaatgggctgccaggggctgccatatgacactagagaataatcaggcagagggaatcaaaagttattctcacttgctttgagccatcggctcaatcttatttcccattaccagaaaaataattagcttgagcctccagtatgccaccctcatggtgaaaatgaacacttgctctattgatcacaagaaaacaaatgtcacactacaagttttgagctattgaaagagatcatttgttcccaaatagtccaagaactaccttcctttaggcaaaggaaaggttttcagtctgatatattttactgcaacaaaatcatctgaagtgttatcaaaactggaatgctgtgctaacaattttacagaaaatcttatttcatgctatggctttatggtaatagtgaycaggttttacttttttttttctttttccttttcaaataagtcatcaagtatagcaagcttcctggctctcttccctcacaaacctacacagttagtaccttcacacacaggctcagcattgacacacattcatagag

SEQ ID NO: 761155 - DNA, 603 bp, Homo sapiens
gactatttgttacaatagaggttagaaaacttccccgggaagtaaagataattatatttgaagatattctctacaatagtaaatgttttcaaataattccaaaaattaagttttgctcaaagtcactgtctaaaatgtattacaataagaatgtgactcttggagaatcacattatttatttattccaggagtctctgtatttattaataacacagtgtgttcaaaaagccccattcatccaacaatattaggcaacttaaagacacacacaaatcagaaagtgtggacctagtttgcagagggagaaaaagctatatttttaaaaaatagatggtctggagtctagaagtggttccatccctagaatataaacaagacaaagcaatatacaagtatccctctcgggggtggtagtggcctctgtccactcttggtgggkactcatctggcctggggcaactacagcccactcctgctctgtactggttcctttcctgaaaggagggcccccatgcacatatctctgagggagggtgttgcccttctgagacttctctttcctttcagaccacctggtattcttttaaacctgctcttgccta

SEQ ID NO: 761156 - DNA, 619 bp, Homo sapiens
gggggaagggctataaatagctgctctgggagtgtctgtattatgcagttgagataaggattgaaatacgccctggtctgcagtaccctcaggcttactaggattgggaaattccagcctggtaaattctagtcagaccggttctctggtctcaaaccctgtttcctgttaagatgtttatcaagacaatatgtgcacagtgggacatagaccctcctcagtaattctaattttgcctttgccttgtgatctttattgccttttggagcatgtgttctttgtgacttactccctgtccttacaccccctccccttttaaaatccctaataaaaacttgccggttttgtggctcagggtcatcatggtcctaccaatatgtgatcaatatgtgatgtcacccctggaggcccagctgcaaaattcgtttctttgtactctttctctttatttctcagaccagcygacacttagggaaaatagaaagaacctacgttgaaatatttggggctggttcccccgatagcctgtggctgagaaaagagaatcacttgagcccagaagttcgaggtgaggttagagtgagctatgaccacacctctacactccagcctgggtaac

SEQ ID NO: 761157 - DNA, 609 bp, Homo sapiens
ccatgtgcctataatcccagctacttgggaggctgaggcaagagaattgccagagtctgggaggcagaggttgcagtgagcctcgagattgtgccactgcactccagccggggcaacagaacgagactccacctcaaaaaaaaaaaaaaaagaaaaagaaaaaaaaaagaacatattcaaattcctagatttggaatgtggaaattgtttgtgggggtgtagtaattctgcctgctatatttmtaatgtgtgattatgaaaataaattggagaaagttaggtggtatctttgatattacttctattgctctgcttgaaatatgtttatgtgtctgtaactcaatttcatgcttaaatggcttagagaaatatatccaaaagggatgacaatcaatccatgttaaattgatagcttaacttgctaacaatctttcccgttttccctttccactgaagaggcctaaagtctgattataatgttataattataatcaatgtcatgttcaatataatgttatataataatcaagcccattcaaaaacctggacttgattatttgactttaagaattttaaaaatattagattgttttccttagggaatgattt

SEQ ID NO: 761158 - DNA, 453 bp, Homo sapiens
atttctctctattctttaaaaattgtaaacacatcctcagtgaaatatctacaaataacaaaaagctgttaattctttccgtgtagagttgtgtgactgtctgttatgaacacagtctatacttgcagtggaggtgggaactggcttctcatttgggttctttttgtgrccagtggcagtacagctcattctctctgaaagctacttttagatagggtaacatttccttaaggcaaaactattgcttgcagctcattgaaacctttcctactggctgagctaaatgggcagatgtgttaggtatatttatttttagtgataatataaaagaatgattcacgtttacatggtgatttgcagattactgtggtctactttcacatttaaacctacttccttgacataatatgcaggtgtagtaattgcttaactgatttctgagataaaacacta

SEQ ID NO: 761159 - DNA, 648 bp, Homo sapiens
cagcaattaaaaaagacaaagagggacattatataacgataaaaggactagtccaacaggaaaatatcacaatcctaaacatatatgcacctaacaatggcagtcccaaatttatgaaacaattactactagacctaagaaatgagataaacatcaacacaataatagtgagaaactttaatactccactgacagcactagacaagtcatcaagacagaaagtcaacaaagaaataatggacttaaactataccctacaacaaatggacttaacagatatttacagagcattctagccaatgacagcagaatatacattctattcatcagcacatggaacattctccaaaatagaccatatgacaggccacaaaacaagtctcagtacatttaagaaaatcgaaattatatcaagtactctstcagaccactgtggaataaaactggaaatcaactccaaaagggaccttcaaaacgatgcaaatatgtggaaattaaataacctgctcctgaatgattgttgggtcaacaatgaaatcaaaatggaagttgaaaaattgtttgaactgaattataatagtaatacaacctatcaaaacctctaaaatacagcaaagatggtgccaagaggaaagctcatagcattaa

SEQ ID NO: 761160 - DNA, 605 bp, Homo sapiens
tctcttccaatacagcctgatgaaatcctagacaactcaaggtttatgtcatacttcttgaacagcctcctccatgaatagtctttttctttctccatggataaaaccttctccttttaatctgcaagggggtttcactgtacatcttttatgtcacttatcttaagctacctcaaattatagttttccatgttctaatatcaaatgtttttgcctcttscagttgaatgttaagatggcagtactctccaaattgatctacagattcaacacattttaatcaaaattccagatactctctttgcataaattgacaatctgatcctaaaattcatatggacattcaagggacccaaaattgccaaaacgatctcaaaaataaacagagttggaggaattacaatttcccatttcaaaacttaccccaaagttacagtaatcatgattgtgtggtattggaagaagggtagacatataaatcaatggaatagaatcaagaaactagaaataccttttcacatttatagtaaatgatttttgtcaagggttccaagaaaatgcattggggaaagaatagttgtttaacaaatggtcctgagtcaact

SEQ ID NO: 761161 - DNA, 647 bp, Homo sapiens
ttttgattcatatcaacattaactaatgaatccatgacttgtttttctcttcaaagttaagatacatatgtatttgaagagaaaaataaaataaatttatattgatgtttactattaaaatttaacttttaaaaatttatactttgatttttatgyttttatcatttttctcttatactaaaattcatgggtcttaccacataaaagtaattgcttatttgctttatcttattggatacaaaaaaaatgtgtaaatgtgattgtgtaaaatcccaaaacattaatgtagatatcattaacaacggaattactgaatgaaatttaagacttctctgtagctctatttgttgaagatatttttgaataaaaggagtataattaaaaataaaaataccatatataatgcaaaatgccttcatttgtaatataacctattttaccaatgatacaattgatcttccagttgaatcaatatataacatcattagttatagaagcagcattttaattaaagtataagtcagtagaaatatgtaaggaaaactgttaatgcacttaaatttgctaaacaccccaaaaatgtttgctgggcacagttgactatgcctttgatatcagggttcttgagtgtgctagaggaacacaaa

SEQ ID NO: 761162 - DNA, 565 bp, Homo sapiens
tattaaacctttttcttttgtaaattatccagttttgggtatgtctttatcagcagcatgaaaatggactaatacagtaatgtgatacttgtagagtggggtgttgctgagaagatacccaaaaatggggaagtgactttggaattgggtaataggcagaggttggaacagtttggagagctcagaagaagacaggaaaatgtgcaaaagtttggaacttcctagagacttgttgaatggctttgcccacaatgctgatagtaatatggtcaataaagtccaggctgagatggtctcagatggaaatgaggaacttgttgcaactggagcaaaggtgactcttgttatgttttarcaaagaggctggcagcattttgcccctgtcctacagatttgtgaaactttgaacttgagagagatgatttagggtatctggcagatgaaatttctaagcaccaaagcattcaagaggtgacttaggtgctattaaaggcattcagttttttaagggaagcagagcatagaagtttggaaaatttgcagcctgacaatgcaatagaaaaga

SEQ ID NO: 761163 - DNA, 679 bp, Homo sapiens
aagtctgagttgaactgaaccacagaaaaagaatgaggataagaaggtattaatttgaattatttataaaagggttaaggggctaggttcagcttatatgccaaagagtctcctggtatggcacaatttgttgtttttctcagtcacagttatcaaggtcagtgtggataactaattatatagctgtatgttcatcatgtatagccagttctacccactgacactaatggttagaaggaaactgagaggggtagatcacaaaaatataatgtccttatgatctgtaccaattagtgtggtatcagagcaacattatcagactcktgctaaaattgctctcctacacctcattatcacccagaagagttatgtacagcagagggatttgggggtggggtgggtcaaaggcaatcagtttcaaggatttgtgcaaaattaacatattttgagcaaaattagaatatatatatgctattttcacttaatgtttagattcaccatggaactaaatatatttggagacactattaagttatgattttttattctaggtatttggattattcatagtaaggtatagtgtattattttgaagtaagatgtgcaactcatattcattatgtgtcatacaatgactaaaaagcattataagtaaggcacttcaagagatgaaaagctg

SEQ ID NO: 761164 - DNA, 679 bp, Homo sapiens
aagtctgagttgaactgaaccacagaaaaagaatgaggataagaaggtattaatttgaattatttataaaagggttaaggggctaggttcagcttatatgccaaagagtctcctggtatggcacaatttgttgtttttctcagtcacagttatcaaggtcagtgtggataactaattatatagctgtatgttcatcatgtatagccagttctacccactgacactaatggttagaaggaaactgagaggggtagatcacaaaaatataatgtccttatgatctgtaccaattagtgtggtatcagagcaacattatcagactcttgctaaaatkgctctcctacacctcattatcacccagaagagttatgtacagcagagggatttgggggtggggtgggtcaaaggcaatcagtttcaaggatttgtgcaaaattaacatattttgagcaaaattagaatatatatatgctattttcacttaatgtttagattcaccatggaactaaatatatttggagacactattaagttatgattttttattctaggtatttggattattcatagtaaggtatagtgtattattttgaagtaagatgtgcaactcatattcattatgtgtcatacaatgactaaaaagcattataagtaaggcacttcaagagatgaaaagctg

SEQ ID NO: 761165 - DNA, 679 bp, Homo sapiens
aagtctgagttgaactgaaccacagaaaaagaatgaggataagaaggtattaatttgaattatttataaaagggttaaggggctaggttcagcttatatgccaaagagtctcctggtatggcacaatttgttgtttttctcagtcacagttatcaaggtcagtgtggataactaattatatagctgtatgttcatcatgtatagccagttctacccactgacactaatggttagaaggaaactgagaggggtagatcacaaaaatataatgtccttatgatctgtaccaattagtgtggtatcagagcaacattatcagactcttgctaaaattgctctcctacacctcattakcacccagaagagttatgtacagcagagggatttgggggtggggtgggtcaaaggcaatcagtttcaaggatttgtgcaaaattaacatattttgagcaaaattagaatatatatatgctattttcacttaatgtttagattcaccatggaactaaatatatttggagacactattaagttatgattttttattctaggtatttggattattcatagtaaggtatagtgtattattttgaagtaagatgtgcaactcatattcattatgtgtcatacaatgactaaaaagcattataagtaaggcacttcaagagatgaaaagctg

SEQ ID NO: 761166 - DNA, 643 bp, Homo sapiens
aaattaacatattttgagcaaaattagaatatatatatgctattttcacttaatgtttagattcaccatggaactaaatatatttggagacactattaagttatgattttttattctaggtatttggattattcatagtaaggtatagtgtattattttgaagtaagatgtgcaactcatattcattatgtgtcatacaatgactaaaaagcattataagtaaggcacttcaagagatgaaaagctgtagttgagaagcgctatgcatatttcacaaaccaagtgaaataagcatgagctttgaaytcataaatcttacttgtgtcattgctttaccctttatttgttgaaattgcttcttactattttatccatgcaaaacgtcatcattgccttttcactattcattttaataaaaatgaatgatttgttatcatgaaactttacattttgaaaataattttgtgagtttcttgccagccgagttttttgccaacaatatgctctaaaagtaaaaggaaagataaataagtaaatccttatagaaaattctgatgcacctcagaacagatccattgatgaagagagattacaagattcttgccagccttcctgcccatcatatggtacattttgctttttt

SEQ ID NO: 761167 - DNA, 620 bp, Homo sapiens
aaacactatagcaatgcaaactgtagaaagggagccgtgaatatgcagagtatgcttcagaggaaggttacttctaaagtccttcagttaattgggtgttaactgagagagatattttagtgacttctatggaatataattaacaataagagaaatattctaaatccaggtctgagagaaaggaaaaaagcaacctggaaggaaaaatgaaaaagatgatattttcaaattaatttaaatgaactctgaaaaaaatgctgattttatcagaaagagaaaaacgtctcaagcccactgtagttaataaaacaaaaactatgtctaagtgtaactgaaaacatctgcatgcatgctctttctaagactgagggagatgatacttccatggtatttgggaagaaatctactgttctgcagagccggtttttggctagagayacataatagaaaagaatatatttagccttgcctagttaataaaccattaatggaaaagagcagcaaagaacttaactgaccttctggatcttgtcaaaatcctgtcaagaaaggtgacagtaaaagagtaacagagagtcaatgactaagtgacaagggttggcaagattgattttaatgaa

SEQ ID NO: 761168 - DNA, 667 bp, Homo sapiens
ccagggtcttaggcagctccacccctgtggcttttcagagtacagcttccttcctggctgctttcatgggctggcattgagtggctggctttttcaggtgcaccgtgcaagccatcagtggatctaccattctggggtctggaggacagtggtccacttctcaaagctccactaggtggtgccccagtagggacttaatgagggctctgaccccacatttcccttccatactgccctagcataggttttccatgagagccctgcccctgcagcwaacttctgcctgaacatccaagcatttccatacatcctttgaaatctaggtggaggttcctaaaccccaattcttgacttctgtacactggcaggctcaacaacatgtggaagctgccaaggcttgtggcttgcaccttctgccatagccagaactctatgttggcccttttatctgcagttggagtggctgggatgcagggcaccaagtccctaggctgcacactgaacggggaccctgggccagctcaggaaaccactttttcctcctaggcctctgggcccgtgatgggaggggctgacatgaagacctctggcattccctggagacattttccctattgtgttggggattagcatttggttcctcatcacttatgcaaatatgtgcagc

SEQ ID NO: 761169 - DNA, 578 bp, Homo sapiens
  misc_feature 544: n = A,T,C or G
agaaaacaaactgtaactttaattaaatcattataactcataaaccagctttgtatgtaaaaarggtataatcctactgaatttgttttctgcctatataagcaagaccttaagtttgaagtttgaagcactgaccccattcctttggagtctgtgttacccgaatggctgttctcagacttttgcttaaataaactcttttaaactggattctgatccttttgattatttcaggttgacatgagttctgtgagccattctagcaaattattaaacctgacaagggaatcatgggaactctctgaatttatagccagttgattagaagttcaggtggcaatctgggacttgtgactggtgtctgaagtgaggaaggtcttatgagactaagcctttaacctgtggggtctgtgctaactccaggtagttagtgtctgaattgaattgtagacacctaggtggtgtccagagagttggagaattagttggtgtagggaaaaaaactcacacacatttggtgtcagaagcattgtgaatgaaaacnctgccaagcactcaattacagggctgtggaggtg

SEQ ID NO: 761170 - DNA, 637 bp, Homo sapiens
ggtttagtacttggtgccttcccaattaaactgacaaaagcaaattggcaagagacaagacaaattttatgcatgaatgtacacagaagtttgtagaaaaatatgactcaaggaagtggttaaagttgagggcttatgtaccatctttagtaggggaaggggagtgggacaaagggcatttacaggaaaacaaaagacttttaggaaaggtaaactggcctttaagagaatggatgggagataaagatagttttctggcgatgtttgtttagagaaattcttatcctggtkccaacttctcctctctagccataggagtcaatcttccctggttaactctcaaggaggggatttataatcattgaattcctttgggaggctctgctttcaaaaagatagctaaggagagctcaagaaaaaaatctcttcacatatattcagcattttttcacactcaaatttggattaaatttgaagaaagaaatgagatacttctcttacacccaactttatggagtaagaggtttgtataggctacaaatgcacaggaccctgggagctaaaatacacaaaatagactcaatgggtgacaattcagtgcagattgtttcatcagcgatagactcacactggaact

SEQ ID NO: 761171 - DNA, 575 bp, Homo sapiens
atgaggtcttgcaatgttgcccaagctagccttgaactcctggcctcaaatgaccccgccttggcatcccaaagtactgggattacagatgtgagccaccatgccccagccttgctttcttgagatacgatttagaataccataagattcatcccttttaagcacataattcaatgacttctgtacaaacaaccatgactacaatctaattttaaaatatttcaatcactctaaamaagaaacctcctgcttatgtacagcgactctgtctacctcttaagtgaattctcctacctttaatagccctattttacagttcaggaaactgaggttcagagagacaaagtcacttacccacagcaaagaagcaaggctgggtatcaaatgcaggacccccccggtcctgatgcttttttttttttttttttttcctctgagagagactctcactctgtcactcagtctagagtacagtggcgcgatctcagttcactgcaatctctgcctcctgggctgaagtaatcctttcctcacaagtaaacctcagcctctcaagtagctgggactacaggcac

SEQ ID NO: 761172 - DNA, 628 bp, Homo sapiens
ggggatttgtatgtttatacagggatcctgctccctcactagccaggagcagggacccctactgggtttgttggttgctgctgccccaaagcctggtcacagtgcccagtacatcgtaagtagacacttgggaaagagatgtgaaatgagctaataaataaaatgatggcgcaaaagcaggctccgcgagcacgatttcgcggaatcctaggtgtgtgtcattacccactttgcagaggaggaaattgagactcaggaaggcaaagccgctgccgggccccaccgcagctcagtggtatgtggctatgggatgtagcagaagaagcaaaggtagccccaaaaagcgttcccaattcccgcaaacctcccccccmcacacacacacaggcaggagagacatagcagggtttgcaccgatgggggtgggatggggaccggggacagagggacagtgcaaagcaacttaggggtctctctcctcagtccccagggctggaggtgctgtgctggcagattaggaaatgcttggggttgatggggaagcttccggcgctctatccccagttctggaagctgaggctccgggaaccctgttttgctgaagctgggcagctccagtctccagagc

SEQ ID NO: 761173 - DNA, 627 bp, Homo sapiens
tgagcacaagttctattgcctgtctgcggttctaggaccgcaccagaaagaggtccgtctggttgtctgctaagccctcagtgcctgagattgtgcatccagcccagtaggtggcttaagaagccacagctggaggggaatgaatggcctgggagcaggaatccctggctgttgtcctgcctgctgcgggagggctggctgtgagcttcctctctgtcgccgcttrgagtacagtacctagaagccaagagtgccagatttttctttttccttttttcttttattgagagagggagtttcgctcttgttgcccaggctggagtgcaatggcacaatctcggctcaccacaacctctgcctcctgggttaaagcgattctcctgcctcagcctcccaagtagctgggattacaggcatgcgccaccacgcccggctacttttttgtatttttagtagagatggggtttctccatgttggtcaggctggtcttgaactgccgacctcaggtgatccacccacctcggcctcccaaagtgctgggtaatactggtgtgagacaccgtgcccggcctagagagtgccagatttttcaacagccattggggcaatgctccgtgattagatgc

SEQ ID NO: 761174 - DNA, 556 bp, Homo sapiens
ttgtgctaaaggctttactggcattatctcattcaatccttctaaaactttatgaggtagttactaatctacctattttacagatgagaaaaattgaggcttagagatattaatcagtgtgctgaaggtttgcaaagttagaaaatggtaacaaaattgtgaaatgactttctccatcaatttgcttgttttcgtcattagagtggacatgaaaaaaatttaatctctacatcagcagtccccaacctttttggtrtcagggaccagttccatgaaagaccatttttccacagactgcggggatggggaggggatgattcgagcacactacatttattgtgcactttgttactactattattacattgtaatatatgatgaaataattacacaattcacataatgcagaatatgtgggagccctgagcttgttttcctgcaactagatggtcccatctgggggtgatggaagacagtgacacctgaaatgtgttgcttatgtccagtctactccataatctcattatggtttctctcactacaaaaaaccctgctt

SEQ ID NO: 761175 - DNA, 571 bp, Homo sapiens
  misc_feature 46, 54: n = A,T,C or G
gccgagattgcgccactgcactccagcatgaggtgacaagagcganacacggtncccctcccccaaaaaaagcacatttttgatgccttgcacaaaactggcattgatttgaccaggacaattgagccactatgaggccgtattctgtgtcaagagaaccaggaagaacagagtatatccctagcaccaacaataaccattgtcttgggtctacaaccttgaacaagtcactaaacttttcagattggaatgccaaggcctctgctaactccaaggaagcctcagttacagtactgaaaatacataattatacrtaattacagcagggacccatgaggaaagttctgtaatgcagtatctggcttaaacaacatacgcaaattgtgagcagcagactagttaaccacaagctatgttgcttttgctatcttatttattgctgtgcaagtttgcaaattttccataataaaaaagtttacaaaattgcttctcaatacatttcttaatcagctgttgctttgctatttacctaccacacagttctttctttaaactcgaaattatgtcactg

SEQ ID NO: 761176 - DNA, 501 bp, Homo sapiens
gcactcagtgaagcgatccgtcttgtgatgataattactcctcagaacagctctgccgaagagaaaaggcagaatgcagaacagactcctgtttacaaaagcgtttgagaacctagtaatacatttcagagtatggaagtttttaatatctatttttttgtcatttggggttaagtactgaaaaaacaagtgcccaccattcactataarcttccagattctgactaaattctccttcaatgaatcgattgcctcttattaattctgaagcttctgtaatatttccttttaagatggtcactaccactagatggttttcagcttaaagaaacccaggtattaccaatcctctgtgacttgaagccaaaaccagcttcaaggaggatgatcccccaaaatatcttccaagtctccattctagatgtggacctagagaaaagaagaaaccttgtaattaaaaaatgtgccttcatgcacttaaaatgtgtccaacacattgac

SEQ ID NO: 761177 - DNA, 645 bp, Homo sapiens
tccagagagtgggtactgaatctgaggacaatcacactgcccaaaagtccaagggtaagggagaagttgttgggtttacaaagtgtctattcccaagctatcccaccttcgcctcatgactaacccactaggtatggaatttcattacctccatgtgacagaggtggaaagagaaattttgaagggtcagggctgtggggctcagtaagaagcatggagaccagagacagagctatggaaaggagccttccaagaaagacaccaggtcatggaacatgcttgcgagctacatcagctccctgcatgcagctgcaatgaaaatttaaccacatattaaagaacttctggttggaaaaactctttcactttaagataccaattagattycatttaagatatcaattacaagagtttgaacattcttttttgcaaaaccacatgcagctgacctgtactgaattacaggtttaaagagagtttccaatctcagccactttatagaatatatattcttttttttagccacaaattggacctaggcacaatatttagaggccattatctgtttgaacaactccataaatataaacctccataatagagtaccatataattggcttcaagggaaatagtagctttggataa

SEQ ID NO: 761178 - DNA, 631 bp, Homo sapiens
gcgagtgagctggggccacagtgtgtgattccgccagtggagggaatagtggagaggctttgtttatgaccttgttttttttatggaagactagttgatagggttggtttggttttcctttctgtctcacaagtaaacttttccrtatcttgtgaacagtagtggaatgacaactggaatatcagtgcctctgacaatcgaggtgtaaggctttctgttctctaaaagtttcattcagagataggagtgaaaaatttcagggccactgctcttggatataaaacctatcccattgggcggagttcttccgtctctgaaatttcaagatggggtggtgcccactgtgctccttcactggggaagcctctactcatggggccctgggcccaggttctgtgtgagtgtgtgtatgtgtgtgtgtgtgtgtgtgtgtgtgtgtgtgtttctttcatcacttgtctttcaatttcaccaatctaaagtatatttcttaaggatctgaataagtaattcatgctaatgtcctaatggaatgtacattttaaatgagagacccccttggagcaaatctccacttttacaatctacgtgtttaacgatttggtgttgctggggaaagagaatttaatct

SEQ ID NO: 761179 - DNA, 631 bp, Homo sapiens
gcgagtgagctggggccacagtgtgtgattccgccagtggagggaatagtggagaggctttgtttatgaccttgttttttttatggaagactagttgatagggttggtttggttttcctttctgtctcacaagtaaacttttccgtatcttgtgaacagtagtggaatgacaactggaatatcagtgcctctgacaatcgaggtgtaaggctttctgttctctaaaagtttcattcagagataggagtgaaaaatttcagggccactgctcttggatataaaacctatcccattgggcggagttcttccgtctctgaaatttcaagatgggrtggtgcccactgtgctccttcactggggaagcctctactcatggggccctgggcccaggttctgtgtgagtgtgtgtatgtgtgtgtgtgtgtgtgtgtgtgtgtgtgtgtttctttcatcacttgtctttcaatttcaccaatctaaagtatatttcttaaggatctgaataagtaattcatgctaatgtcctaatggaatgtacattttaaatgagagacccccttggagcaaatctccacttttacaatctacgtgtttaacgatttggtgttgctggggaaagagaatttaatct

SEQ ID NO: 761180 - DNA, 631 bp, Homo sapiens
gcgagtgagctggggccacagtgtgtgattccgccagtggagggaatagtggagaggctttgtttatgaccttgttttttttatggaagactagttgatagggttggtttggttttcctttctgtctcacaagtaaacttttccgtatcttgtgaacagtagtggaatgacaactggaatatcagtgcctctgacaatcgaggtgtaaggctttctgttctctaaaagtttcattcagagataggagtgaaaaatttcagggccactgctcttggatataaaacctatcccattgggcggagttcttccgtctctgaaatttcaagatggggtggtgcccrctgtgctccttcactggggaagcctctactcatggggccctgggcccaggttctgtgtgagtgtgtgtatgtgtgtgtgtgtgtgtgtgtgtgtgtgtgtgtttctttcatcacttgtctttcaatttcaccaatctaaagtatatttcttaaggatctgaataagtaattcatgctaatgtcctaatggaatgtacattttaaatgagagacccccttggagcaaatctccacttttacaatctacgtgtttaacgatttggtgttgctggggaaagagaatttaatct

SEQ ID NO: 761181 - DNA, 533 bp, Homo sapiens
tgggcattggtgacatttcttgaaatcatcttgtttttacattctgtggcaagttcagtcaatcacttatctatatcactatagcaccccagaccaaagcagttgtccaggatggtgactgccttccaggaagtaccacgacctgaagccaagtggagcttcacaggtctttgtttttagctggatcacaggtggctttrataatactatagcaaaaataatctcaaaacagctttgagcaattcagtgacaaaaatcccctttattaccaaattccataacaattctctcaaaatatgattcagtcctttctcattcctatcatataaggaaataaataaaacaacataaaaacatgaagtcttattttgaatcagccctgtaacgcccttccacttcttatataagatgctatctgaggccatgaaaatcattttttattgagacaaaatgtaataagaagtgttgccatgtttgtctgaactctccatgtttccctacataacgacatgtgttttaattccccctctgtg

SEQ ID NO: 761182 - DNA, 580 bp, Homo sapiens
gttaagcccttcacttcctctcacattccatggaattaatttactcatatcatcataccatttgcaaagaaagcttggaaatgcagtctcaatctggttgagtatgagatctgtcacatgattataccatatgtggtggttgagaagttctagtactaaaagaaagtcgtaaggaacagatattggggaacaatttctgttacaagagtggatattgagggacaattaatstctgccaaattaattagatttttaactatatccaaaatacttgcagcagtattttggacagagagtagcataagacatggtcttttccacttatgtaacattcttatttaaaagtgtaagattagctcaatctgttgtaattatcattggaacctgagattatttttataccaagtttgacaaaaattccattcaccatggtcatattttttgatcatcctagcattacctatgagaaaaacttaagtcaaaatattttgcataatgtcatgctgttttatacaagcagaaacataacagaaaggcacaataaataaaactataaataaaacaataataaataaaacaa

SEQ ID NO: 761183 - DNA, 567 bp, Homo sapiens
actataagttcaaaaattattgtttaacatagagatatccaatatattatgctaaatttttaatgttagtaaaatttaaacactgctgccattgaaatccaccaatttatgattattaccccaaatataatcatgcctttcctaattatgttctaaaagaatggttgtaaaacatcgatagggatcgtgtgtactctggatataaaayaaagtcacataatcaagacctcaaagtgtctctcaccagtcttcacaatgcaaattatgaagtagaataaagcaaaaaagtagcttagattgacaaaatgtcttcaactttcttcactctcaaagtaccctcctattctgggttttactaaacttaagtctgtctacatacttgagaccagatcatcattttgttttacagtgagactgtccttgtaccagcctaagagatattgctgatttgataaccctaccaaatgcgtgctgtagtaatatgtgaatattttaagaaggtagtatactgaggtagtgaagaatttggtctcaagagataaactgcctggattccccaaagccctg

SEQ ID NO: 761184 - DNA, 483 bp, Homo sapiens
gcaaataaaatgagtcatatgaatttttttgtttcctagtgcgtataaaagttatgcttacactgtactttagtctattaagtgtgcaatagcattatgtctttaaaaaatgtacacaccttcatttaaaaatactttattgccaaaaagtttttacatcatctgagccttcagtgagtcatatttgcctggatgttgatggctgcttactgaatagggtggttgaagattggggtgaaggttgaaggttgaggtggctgtggcwatttcttaaaataagacaacaatgaagtttgctgcatcagttgacacttcttttcacaaaagatttctctgtagcatgtgatgctgtttgatagcattttaccaacagtagaacttctttcaaaatcagactcaatcctctcaaactctacctctgctttatcaactagattgtgtgatattctgaatactttgtcacttaaacaatgttaatggctt

SEQ ID NO: 761185 - DNA, 483 bp, Homo sapiens
gcaaataaaatgagtcatatgaatttttttgtttcctagtgcgtataaaagttatgcttacactgtactttagtctattaagtgtgcaatagcattatgtctttaaaaaatgtacacaccttcatttaaaaatactttattgccaaaaagtttttacatcatctgagccttcagtgagtcatatttgcctggatgttgatggctgcttactgaatagggtggttgaagattggggtgaaggttgaaggttgaggtggctgtggcaatttcttaaaataagacaacaatgaagtttgctgcatcrgttgacacttcttttcacaaaagatttctctgtagcatgtgatgctgtttgatagcattttaccaacagtagaacttctttcaaaatcagactcaatcctctcaaactctacctctgctttatcaactagattgtgtgatattctgaatactttgtcacttaaacaatgttaatggctt

SEQ ID NO: 761186 - DNA, 635 bp, Homo sapiens
aggttatataacaagtggaatatgcacttacaccctaaactcactgagtcactctggcctggatgtctgccttggcctattccttgaccaaagtacatccgtataccttacaatgggttaagtaggtggctgtcattatacatsggtcacccctgggagcttagtaaggtgcaagttcctgggccccatcccaagagattctgggtcagtggtctgtgaatctacatttgtatcaagcacacagctgataacaacgtaaatgctccatgacctacacaccagatggagcatcatgcaaatccttagccagtagcccaagtcctgtgtatcttaggtgggtcttgcatttccaagggtatttcttccatgactcaataaaacaggctgtctgctatatgatttatgtgggataccactgtacattcaaatgaacttcaagcctgtgtctgtgctataaacagtggtcattccagaacctctccctaggacagggattaggggtgctggaagcagagacagcttgggaggaggggtgatgctgtttgttgggcaaaggaccctgactttatcattgaaatgcaagtagccacaaagatggatgaattatacactagttatgtgtcaatgcattcacc

SEQ ID NO: 761187 - DNA, 481 bp, Homo sapiens
caaggatgatcaatatcactgtcttccacctccacatcttgtctccctggaaggtctatgggtcaatcacaagtatggagctgtcatctcctatgacaataatgcctacttctggaataccttctggaggacctgcctgaatctgttttacacttaactttaaaaaaatataagtaggagtacactctaaaataataataaagtacagtaaatacatagaccagtaacactaatttattatsattatcaaatgttatgtactgtacatagttgtatgtgctatacttttatatgactggcagcgcagtaagtttgtttacactagtatcaccacaaacatatgagtagtgcattgtgctctgacattataacagctaagatgtcactaggagataggaatttttcagctccattataattttatgggatcaccatggtatatgtggtccatcattaaccaaaacattattatggggcacat

SEQ ID NO: 761188 - DNA, 605 bp, Homo sapiens
  misc_feature 600, 601, 602, 603, 604, 605: n = A,T,C or G
tatttgagacattggtagattggtgaattttatctattttaattaaaaattttaactactttagaaaattattttattacatagtatgaattttttaatgaaacctattcctttttgaatgtaaaaataaaatcattgacagtaaactaaacatatccctttaaaaatgcactcttttatacagtcatcttgaaggtagcttgacatcatrataagcatctaattcaaatattatagaatataaaacaagggtctgtacactaaggcccatggtccagaactcacccaaagcctgtttttgtacagccctcaagctaagactttttcacatttttaaagagttataaatttaaaaaacaacaatcaaaaagaatgtacaacagactaaatgtggcctgcaagcctaagctacttactatctggccatttacaggaaaagcttgctggctcatggtataacataatgatatatgtccaatttctgatgtcaaaccaaaggtaattttcatgtagaatcatgggatacttagtctcggaaattaagattttagctaacagtttatcccttttttcactatcattctttgtctaaatttttgnnnnnn

SEQ ID NO: 761189 - DNA, 639 bp, Homo sapiens
atagtttcttcaaaagatagtcatttacatttactggtactaagctatgatagtcttctcaccatgttcttctaaaagtggctttcaaacttttttgatcatgacccacagtaagaaaggcattttggccaggcatagtggtataaccccagcgctttggacgctcargttggggggatcgcttgaggccaggagttcaagatcagcctgagcaacacagtgagaccttcatctctacaaaaaatttaaaaactagctgggtatggtgatgtgcgcctgtagtcccagctgctcaggaggctgaggtgggaggaggccttgagcccaggaagttgaggctgcagtgagctatgattgcaccactgcactctagcctgagtgatagagcaagactctgtccaaaaaaaaaagacatattatggcccagtatataccttcatacataaaaaataaatttgacaaaacaagacttataccctgatgacaaaaaccctgattttaaaaataatactggttgtaacaccctaaattgatttcaccacacaaatagtctgcaacccagtttgaaaaatactgatttagaacacagctaattacctaaatctttgtattttgaaagtgaataactacaattattca

SEQ ID NO: 761190 - DNA, 570 bp, Homo sapiens
ctgtgaaggaggatatttttcagctgtactcaaactgtcccagccagtgctacatgaaagagtcaggccatccctgcagggtcataaataaatataggttgttgtttttaagcttccaagtttgtttgtttgtttgtttgttttttgttttttgcttttttttatagagacagggtctcgctatgttgcccaagctaatcttgagctcctgggctcaagcaatcctcccaccttggcctcccaaagtgctggcattataggcstgggccaccatacccagcctggggtggcttgttgtgcagtaatagataacaagacatttcttctcctcctcctcctgaattctctatctcaaaaaatagtgctactgttctaagtgcccaggtgagaagctggagataccttaaattcttccttcactgacatatcagatcttatagagtctcatttctaactgttactcatacccagcatccttttccattcccacccactgttactgcctaatcatttccctcctagttaaaagcttaacaggtctctctgtcacttggaccctttccataccat

SEQ ID NO: 761191 - DNA, 607 bp, Homo sapiens
ctaaattaactgagacctgtctcaaattttcagcgttcacattttggtaaccacaaagggattctgagtagagatgcccctgcctttgacaaatctcctatcggtgcctggtaccagcatgagctaactttatgtctcaaaccaataggacaatttgctgaggtctgagagcacgccctccagaaagtccctgatctcccaaaatttggtcgagatctaaagtttattttgctgtacaattcctgctttttttttttttttttggagttttacttgcttccaacacaaggaaggcaagtttttcctgcctccatgacgatgtaagacaaataactcytttatggaatttgagcgcgcatccaacagggaagatcagtttactttttcctgcttctaggttggtagagagcagtcctcagcctgagacccatccctaggtaagtaactgaattggtgtttgtcttggctaaagttaagattaacaaacagctggtcttaatttccccttaccattagcgcgctcagtgatgataaggttgggattttttgttgttgtttgttccagtctttctcccaatggatttgaccaactctacctgacttggtc

SEQ ID NO: 761192 - DNA, 430 bp, Homo sapiens
cctgagcacggtggcaggtgcctatagtcccagctacttgggaggctgaggtgggaggactgcttgagcccaggagttcaaggctgcagtgagctatgactgtgccactgcgctccagcctgggcaacagagagaaaccctgtctcttgaaacaggaggaaaaaaaaaagacttaaatataatcattttaacagccacaatgttccctgctctyttaagccttaccaactataaaatataaggtttcaatcaatcccacctactactacaaccaaaaatcacaattaagttgaagaaaaacatattcagttcaaatatacggcgtctttttgaacttctagattgttcatagtgctattttattattatatttggcccatcagctaactaaaagatatataatactatacttatataaatatatatataa

SEQ ID NO: 761193 - DNA, 430 bp, Homo sapiens
cctgagcacggtggcaggtgcctatagtcccagctacttgggaggctgaggtgggaggactgcttgagcccaggagttcaaggctgcagtgagctatgactgtgccactgcgctccagcctgggcaacagagagaaaccctgtctcttgaaacaggaggaaaaaaaaaagacttaaatataatcattttaacagccacaatgttccctgctctcttaagccttaccaactataaaatataaggtttcaatcaatcccacctactactacaaccaaaaatcacaattaagttgaaraaaaacatattcagttcaaatatacggcgtctttttgaacttctagattgttcatagtgctattttattattatatttggcccatcagctaactaaaagatatataatactatacttatataaatatatatataa

SEQ ID NO: 761194 - DNA, 542 bp, Homo sapiens
caatagtttaaaagtatatactgtatctctcttttctttcgttattttgtttatttattttgcttctcagattctttagtgaaactcagacggtctatctgagacctttttccttctatctgaagtatatcccttagaatttcttttggtgataaaatgctggtgatgagctctatttttgttttaatatcttttcttggcttccattcattttttattttttcagaggcaagatctcactctttcacccaggttgacatgcagtggcatgatcatagctcactgcagccccaaaatcctaggctcaagtgatcctcctgcctctgcctccccagtagctgggactaygggcatgtgccaccatgcccagctaattttttaacaatttttttgtagactatcttgccaagtctggtctcgaactcctggccccaagcgatcctcctgcttcagcctcccaaagtgctgggattaccggtgtgagccaccatgcctggccagctctcattcatggaagatattttcattgaagatataattca

SEQ ID NO: 761195 - DNA, 639 bp, Homo sapiens
tgcatccacaatcatacggagaaaacacatcaagggacttcaagtttgagtcttgattcagaaaatatttttaaataaggtaaatgaattaaaatgtatcaggttcagcactggactgtggttggtagaaatattatttttgatacttttagttttgaatcggctgtagtacatggttcaaagagcaaaatgtattcgaagtctgtcagggtattgtgaaagtgatgaagaccatgcataaggatagggcttgggctagtctctcattttgaaacaaatctatgagatttcttatgatgacctatgtaggcacacgatgtgacaatgctgcatyaccgacattatagagtgatttttaatttacaaagggctttagccttcctccatttaacatacttttattaagcacctactgtatacttgacagacaatggaaatgagtgttgtttctttctctctttaacatataaagtgctcttcaaagtttgctcacatatactttttaagagaattttgaaagatttagtatccccttttagatttaaagtataaatagagtagttgaatggatggattttcaccatattgtaaatattgaccttttaaataaaatattgtaagtattgaacttttaaataa

SEQ ID NO: 761196 - DNA, 617 bp, Homo sapiens
aatgttggagggaaatttacaaaccaataaacattttaaatttgcttcccaaacttttacaaatgacacatgccagattcaaatatgtgcacatttctgccacataatactatatgaggcagttactataagcctgacacttgggtgggcacgagttactatgggcccagacttctagaaacttacagcacctgaaccagaataaggaaacaatgaatccatttttaatgactaaacaaatgcatgaataaatgaataaatctatcaagattgaaagaccaagctgtgctcaaggtgaygaggggtcctaagagaaggcacttaactcaacacaggagaaatgatgtcaaaaagataaaaagaactcatagagacaggaggtagaataatggttgccagggcgtagggaaatggggcaatggagagttattgtttaatagatacagagtttcaattttacaagatgaaagggttctgtggatgcatggtggcatcggtaacacagcaatgccatagaactacacacataaaaatagttaagatggtagattttatgctatgtatattttaccacaattaaaatttctacataaatagataaataaaaagtttccctg

SEQ ID NO: 761197 - DNA, 602 bp, Homo sapiens
  misc_feature 576, 577, 578, 579, 580, 581, 582, 583, 584, 585, 586, 587,588, 589, 590, 591, 592, 593, 594, 595, 596, 597, 598, 599,600, 601, 602: n = A,T,C or G
gccctcagtgacacctcatcctgtgaaaaatgacttacaggtttttcatcttttgaaaccattatcactgaccagcagtccctgtagacagaagatggattggattatgaatcccaaccctgctgcaaaacctattactaaaggagcccacctcacactcygcttccttttcccaccccaactgctaagctctcgggctggttagacaaaagctttggaacttgcgtagcgtaccacagtctacttagtgtgcaagactaagccacacttccaagttctgccccaaccattctgcttgggaaattgccagagatgcttcttgcactaaccaggcctctttgctatggagctgggtgtaccaaaatcaagcatctgttgggttgatttgggtggtcttgtccagaaacacaaaggtctggagtcagaagtgaagcagttaaagcagccgaggcatgtttactaagccatttgaagttgatagcccacacggcctggcttttttctctatcttcgtaaaccgcagtgaattgatggaatgacccggacttgatcttcagggcaatatgtctgatggcnnnnnnnnnnnnnnnnnnnnnnnnnnn

SEQ ID NO: 761198 - DNA, 577 bp, Homo sapiens
  misc_feature 99: n = A,T,C or G
ctcccaggtttaagcaatcttcccacctcagcctcctgagtagcttggactaccaggcatgcaccaccatgcccagctaatttttttgtattttttttnttgtagagatgggtttcgtcatgttgcccaggctggttttgaactcctggactcaaatgatctgcctgccttggcctcccaaggtgctgggattactggtgtgagccagcacgcccagccaatgtttctgtgagactgtttttgaatgagatgcacatgtaaataggttaactatgaataaagcagattgccttccataatgtgaatggtcttatccaatcasttgaaggccttgatataaccaaagactggactcaccttagcaggaaggaattcggccagtacatgacctctggacttgaacaacaacactggctcttccctgggtctgcactctgccagcccaccccgcagatttcaaatgtgccagcttccataatttcatgagccaattctttaagtaagtctctctttctatatatgtatatgctattggtactatatatttggaaaaccctgattaatgtacccaccttac

SEQ ID NO: 761199 - DNA, 595 bp, Homo sapiens
ctcccttctcttgccctttcaagcctgtgatggtgatagcaccctatttttttctatgggactgtctctgggtctggagctgaaagagggcaatttggcagcaggtgccagcttatgccacagctatctacagtcacgagggtggatgagcttgcccagggaacatggtgaggatggtacacaggggctgggcttggggaatgtctgacatataggaaccaccagcaggtggggaggcaacgaggggctgaggctggatgggactgaagcctccatttctcatatccccacctggaaattgttacccactgacttctctgtctttgtcaaaaggtgagtggagaacagtaagaggaggtttgccggtctccraagacagcgctcagctctctcgggaggtgaactcaccagcagttctgtgttatccctcctgcctcctgggggttctactgctgtgaatgcagcagccctggctttgtgctctcagggacataggaaggcacgtggaactctctcaagggttatcaggagagcctcatctggaaactgagtgactttctttttgaaaagcctcttccatccccagagccctggt

SEQ ID NO: 761200 - DNA, 582 bp, Homo sapiens
gcccagcaatttctctggattcaagaatgccaggagagattctgtccagcatgtgggatgcattactcattaactgctcgtcactgagcatttgtgcagctccttcaaaatacaccagtgaggctgccagctccccagggtttctgagaagcccagatgctggagcaatattccccagctcctctgatctatggggaacccttgttagagtagggaacctgtragcctcctcaactttggaaactctccactttctaaagctgaaaacttaggaaatccttgacctttgggatcggaggtgagtgttcccaatcttaagccataaggacagggaccaactctgtcttattcactgctcctcttgtccatggtggcatttaaataactgtgaaccaaatggatgaatgactgagtgaacaaattacgtaaaagtcaccgcatcacctccttgcaggaaggctgagtcacttgtgaagtgtgccctctgtcctctctctgaggaggtaggggacaaacatgatgctctagaaaggatatcacctctggggtcagactaactgggtcccagtcctggctctgcct

SEQ ID NO: 761201 - DNA, 625 bp, Homo sapiens
tgtgtatacaccagggggctggagtctgtgggcatcttgaactctgcctaccatggtatgtcatatgttaggaggtgcaaagtgatccagagagaaactaagcaggaaaggggtcacagagtgatgggtggggggggttgcaatttttaatatgtgctcaggaaaggcaccatgagaarcagcatttgggcagaggctgcccaatggtgagggagttagccttggggagtgtgcacccagccgagggaatggcaagggcaaagaccccgaggcagcacattggaacagcaaggaccagagagccagggggagggccacaggggatgagaccagatggtatagggcctctaggcatggcgaggacaccagcttttcaaaagccgactgcaatgcaggatcatcaaaggattttgaggactggcatgatttgacttacatgtttaaaaggtcccttgggctgtggcattgagaatagactgcagagggcaagggcagagcagggagatcagttaggaggcccttgacgtcacccaggggaagagagatggtgccttccaccagggtggtagcagtggaagaggtgagagtcagtcagatactgggcgtcttttgaaagtagagctga

SEQ ID NO: 761202 - DNA, 624 bp, Homo sapiens
actgcgcctggctcctgggatatttatcccctggctccattccccattgtcaagttgccctctgcacttctgagctccacatgtgctgagacagagtaagctcccccactgtttgtggcatcagaggatcccagggaagaggctwcactgtcagcttgcaatggaagcctgcaaggaactatcccctgcaaccatggctgaaatcagaagacaagcatcttgtctcctttgttctccagatgtgaagcagaacatctgatctgtctgctacaatctactttgcagaagtgttaggaagactgatagaccctccaggcttgtacggttcttagcaaattaccatgtaaataacaaacactcacaaatgttctcagtttgtatgtagatgaattgttgaacttctgttagcagcttaatgaatcctacttcgtttaatgttcagacagcagtgctctgtaggggagaatatgctcattttacagatgaggaaactgaggctcaaaaactgactttgcagcttgttcagagtcaaaccactaataatcagaagaacaggtttgtctattctgctttttctactgcaccacaactccctggtgggagaagaaggagccctctctctta

SEQ ID NO: 761203 - DNA, 532 bp, Homo sapiens
gccctttgccttgtgatctttattggcctcagaaacatgtgatctttgtgacctactccctgttcgtacatcccctccccttttgaaatccttaataaaaacttgctggttttgcagctcaggtggacatcacggacctgccaatatgtgatgtcaccctcggaggcccagctgtaaaattcctctctttgtactctttctctttatttctcagactggccracacttagggaaaatagaaagaacctgcattgaaatattgggggcatgttcccccaataaaagattttatgacaaaaatgccaaaagcaattgcaacaaaagaaaaaattgacaaaagggaggcaattaaactaaagagcttctgcacagcaagataaactatcatcagagtgaacagacaacctacagaatgggagaaaaattttccagtctatccatctgaaaaaggtctaatatccagagtctacaaggaacttaaacaaatttacaagaaaaaaacaaccaaccccatcaaaaagtgggcaaagga

SEQ ID NO: 761204 - DNA, 600 bp, Homo sapiens
gcctttgctgcatcatacatatcaccagggaagtggggaaaaccagcagtgacaggtgtcacccagcttccatgcagccagaaaggccagtctcactcccatcatgacccaccaatagcactgagtttatgtccaggcagcaggrctgagatcttcccccaggctaccagcctccccactgagaaagcaagcagggctatcaggtcttgcctctccctgcctgccttattacagaggtcagctagaagcttccttcaccctttggcccctccccaattctgctggctgcctttcccaaggatccctgtgagataaggccagggatggcttccctgggcttggactggagaccaggggtgcctacagggctctttctattgcttcttctacttttatattttgctcggttccttaaatctgctttagctctaggtaaggttaaatccttctctcccatgatctgattttcaggttccctagtggggatgtgggtttggaggcagacttttctccctctcacacattgaaaactcagtttttcagctgccttgcagagtttgcagcggcaagctgcttctttcaaagggtatgtgaattctt

SEQ ID NO: 761205 - DNA, 429 bp, Homo sapiens
agattatttgcagtttcaacatggcacactgagagggtaagatgatttttatttctgattgttctctgggccacccatacaccctgcaaaaggaaaactataagattattacaacttcatcacgtgtgtgtgtgactcacactcaaagattcactacttgaaactcagcctgaaagcatcactcttcatcccactcatatttcctaggtaaccagaataaccagataaaggagctgcacctgcagagaaaaccaaatcccactttctycctgcctgacacgttcccttcttgcctgtgctgtgagggggtgagaaggactgaaatgatttgacagaaaaagacagatgcctttattactagtattaaagtatgttttcagtcaccctcaagggtggctgcgatgtcctgggtaacataaggccctccta

SEQ ID NO: 761206 - DNA, 608 bp, Homo sapiens
ttgcataagtagtacagcgtttctttaggcttatcactcagctttaccttatgaggacatcttacataaccaaagtacaatgatcaaaactaagaaattaatcttgttacaatattattaactaaagtataatatttattaggatttcaccagtttttctactaatgttctttttctggtccaraatccaacccaggatctcacattgcatttagtcgccttgtctccttagcctcctccaggctgacagttccctggtctttcaatgaccttgacactttgggaactactggagaatgtccctcaattaatttttttcctgacattctctcaggattacattgaggttatgtgtcatttggaagaataccatagaggtgatgtcctcttttcagggcatcaaatcgaggatatgttatgttgataggaattattactagtgacattaatcttggtcacttggctagagtgatgtctgccagaattctctggtgtaaaggtactatttttcactttgaaattacgcagtattttggggaaagcaaaggattttaatgttacggagtatgaaaaatttattatgtaattcagatgctaccttgcaacta

SEQ ID NO: 761207 - DNA, 608 bp, Homo sapiens
ttgcataagtagtacagcgtttctttaggcttatcactcagctttaccttatgaggacatcttacataaccaaagtacaatgatcaaaactaagaaattaatcttgttacaatattattaactaaagtataatatttattaggatttcaccagtttttctactaatgttctttttctggtccagaatccaacccaggatctcacattgcatttagtcgccttgtctccttagcctcctccaggctgacagttccctggtctttcaatgaccttgacrctttgggaactactggagaatgtccctcaattaatttttttcctgacattctctcaggattacattgaggttatgtgtcatttggaagaataccatagaggtgatgtcctcttttcagggcatcaaatcgaggatatgttatgttgataggaattattactagtgacattaatcttggtcacttggctagagtgatgtctgccagaattctctggtgtaaaggtactatttttcactttgaaattacgcagtattttggggaaagcaaaggattttaatgttacggagtatgaaaaatttattatgtaattcagatgctaccttgcaacta

SEQ ID NO: 761208 - DNA, 608 bp, Homo sapiens
ttgcataagtagtacagcgtttctttaggcttatcactcagctttaccttatgaggacatcttacataaccaaagtacaatgatcaaaactaagaaattaatcttgttacaatattattaactaaagtataatatttattaggatttcaccagtttttctactaatgttctttttctggtccagaatccaacccaggatctcacattgcatttagtcgccttgtctccttagcctcctccaggctgacagttccctggtctttcaatgaccttgacactttgggaactactggagaatgtccctcaattaatttttttcctgacattctctcaggattacattgaggttatgtgtcatttggaagaataccatagaggtgatgtcctcttttcagggcatcaaatcgaggatatgttatgttgataggaattattactagtgacrttaatcttggtcacttggctagagtgatgtctgccagaattctctggtgtaaaggtactatttttcactttgaaattacgcagtattttggggaaagcaaaggattttaatgttacggagtatgaaaaatttattatgtaattcagatgctaccttgcaacta

SEQ ID NO: 761209 - DNA, 630 bp, Homo sapiens
gagtacatgcccagctgtagttttattttaagtctttccagtgcaattcatagaaataatttctggggagtaatgctagggagtagtataagaacatcttatcttagatattttattaatcattctaaaagtttttagagaaaacagtttttgattggagaaaatgttctcattcatttatttctcttcccctcaagggactttatgtctctaatagtatttgaagtttgtaaagcgttttcacatatagtgcatcatttgatctataagtcaagcctgtcatagaataagagatcatggaatgcttaaaacccagctcctgtatctcctggttcrctatttcccggtgcttctgtaatacaaggacacctcttgctatgtccagtggtgacttctgagacatgccactgcttcacttcaggtcataaaaaccatgaaacataacagcaccacttcctcacagggctgcagaaatccccctctgttggcacgtccagattgtatagtggtatcttgtttagatggaagagtatgtgccttttatagcttggcacttcccaacactttgagaatttggattcctaaagaacctgtgccctttgtttccttttgaacatttgaaaacacaat

SEQ ID NO: 761210 - DNA, 630 bp, Homo sapiens
gagtacatgcccagctgtagttttattttaagtctttccagtgcaattcatagaaataatttctggggagtaatgctagggagtagtataagaacatcttatcttagatattttattaatcattctaaaagtttttagagaaaacagtttttgattggagaaaatgttctcattcatttatttctcttcccctcaagggactttatgtctctaatagtatttgaagtttgtaaagcgttttcacatatagtgcatcatttgatctataagtcaagcctgtcatagaataagagatcatggaatgcttaaaacccagctcctgtatctcctggttcgctatttcccggtgcttctgtaatacaaggacacctcttgctatgtccagtggtgacttctgagacatgccactgcttcacttcaggtcataaaaaccatgaaacataacagcaccacttcctcasagggctgcagaaatccccctctgttggcacgtccagattgtatagtggtatcttgtttagatggaagagtatgtgccttttatagcttggcacttcccaacactttgagaatttggattcctaaagaacctgtgccctttgtttccttttgaacatttgaaaacacaat

SEQ ID NO: 761211 - DNA, 635 bp, Homo sapiens
tttgggttctgtgcataggtttgtaataactctttgcagtgcttggagtcctttttgattcccttccttgcagctttggggcagtattaagttggtctgtgtgtggcagtgtctctttttttccctttcatggtttaggattatcacaccacatgtcagtaattataaaatgcagggctgagctcagragccattgtgctctatgtggctgctaatccccatgctaaatggcaccaccaaggggccttttatgttcttgtctgttttcatagttaaacattccccccacccccaggccttcagctgtgttcacacaaatagctcacctgtcctctgcttataatttactacgtcttgtatccaaacttgttttaactgtgtggtaagagagaactagcatattaactgactcttcttgctaagaatgatatgcaagagcttcagtattcagacttcgccatctgatttgacatctttttgcttacattgaggaatttggcaattcaaagattgaccattttggagatctttatctacctacctacctatctatatgtaatccttccccatttccacaatattaatacacgaacaccttttctctttttccccctcgattatcgagattcagataa

SEQ ID NO: 761212 - DNA, 610 bp, Homo sapiens
gaggaaaaaatagatcaacaaactacaacagattggtcacttagtaattaaaaaagaaaaaaacgaaaagaaaacaacccatctcaaagttcaactcaaggctgaattcctatcagaaactaccagaggccaaagactacatctgcataatattttaaatctgagcctggtctttgagaaaacatttgacaaagattaccaaaacatctatttttctttctttctcctcatttttctcaattattttccctaatccctacacttcactgaccactcctgcgttctcaactgcagtaagcaaatacatactaagttggataacatattattttgtatctatggtacacagctacagkgttggaatggctcctgattcttcctgggttagcaaatgttcacttaaatcaagtgtaccacctatttcagctattgagtctctttcatctttatgggactatattttgaaaatcactagaaactgcgtggttcccatatattgggctcaactgaaactttaaactcatgcaataactgttaatattcaagtataattttacctagcagtaaagttatattttgcacatcaaaagcaaaatgaagcattaagaaa

SEQ ID NO: 761213 - DNA, 595 bp, Homo sapiens
aacttgaaactctgtgttaggctttgaattcacctccagcctgactttaaaaagctaccatgaggcctaactccagctggcagtagtaaacatccctagctatctaacaatatttttataaacaaagcatcataaagaacataacgttcaaacggcatggaaactgttttccacggtccatatttgacaatctttcaaaaaaatgttaatattacacatattagcactgtgtaatatataagatgtaaccccctcttcacaccaagatcagttgcaaaagaacactatgatcatatttcagaaagtaacatgtaaggaaaaagaaaaaataaagaacactatgaccttggcaaaattctcaagtgttcagacagaaacttctagaagtgcttgtttgtttgttttcaaatwctgctttttgaaattactcacttgatttttaggccagaaaggatgcaaacgtctgaatttctgcagtcacctccctcccactgcttttaattgctctataaagcaatccctgtggatacctatcttaaactgccctggccttgccaggacaaatgttggcccatgtattccagtaaagccatga

SEQ ID NO: 761214 - DNA, 606 bp, Homo sapiens
cagcaaatccacccccacctatgtagagcagctcatgttgttggtgacttctctagattgcctgttcgcatgaaaacagaataatcagtagatcctctcacggggctcagaggagaacaacgtcagaggaaaggatacctcaagtctgcttcataattcataattcaatctcagctgggaatcgcatcaactcctgtatagagtaacaagagcagcccttctcaatctgttccccttgctcaccctcccaacccacagtcgcctcatggccactgttcctagacttgcacaaacactcacactctcccaggcccttcaacccgtatgccttccaccctttccaagcccgggatcaatacagccgtgcctggaccaggtgaaaccaaggaaaactataacttatctcccagcctttctcaacagcagggaaatccccacccttttccctcttgttcaagtgagggaaagtctagagggttaagcagtgcagcrtacagggccaggatcagtgctcatcacgtgcaccctggtcaaaggccctgactggacagcactgctgaacgaagcctgagccacatttcaggaatgaatgagttaatcaatttg

SEQ ID NO: 761215 - DNA, 565 bp, Homo sapiens
actgtaccctcctccatggaatcctttctgcccctttcacccttctccctgtctactaaaaccaggttttagatgataaacaacatagcactgcagaatatgtaaatatgcatacagatatccttcacttaggatggggctgcatcccaaaaagcccagggtaagttcaaaacgctataaattgaaagtgtgtggctgactaggagctatggctcacttccactgcccagcaaagcgagagaagtatagtttctacagaatgcaaattgctttcctaccattaaaaactcaaaaatcgttaagtcgaactgtcataactcgkcgaccatctgtatttaagcataaatttccatacatccaaaagaaaattctgcatttgaacacgtttcattgtatataagtggcaaagtattttctttggcattttttaatacctttgaaaggaggttaatgtgtggaaatactgagtttaacaacatttcatgaaaggtttttcattgtatgaatatgctgtcaatctaagtgtgttttcagaatcactgacagtatattatttttaagaaca

SEQ ID NO: 761216 - DNA, 644 bp, Homo sapiens
acattagggaatacatttaatctacaatacaggaaagtcctgttgatatgattttgcctgtgggctgggtgactgtattagtagtgatgattttcttttttcttttttagcttctgtctttaatcttttcttttgcttcttcataaccagcatgagtgcaggggacacacataccatttggtacaagccttrtttgtcttgccttgggtctggaaccacttttgcagtaacacatttagaaaagagaaatcaagagcaaaaaaggcttcaatatagtttatttttttttgccagtaactttcttgttgcacaactattatatatgaaattattctttctaaacatgtgtgtgtgtgtgtgtgtgtgtgtgcacgtactcatgtgtttcagttcccaggttcttttcatggctgcacaacttagctgcaaggccttaggtgccttatttattctttccagatttcatgtccatcatctgcacaatgagcaggggggaatctatgtgctttgaggttgtttctggctttaaaattctataattgtatgattttctttctgcattatctttgtttggtgagagcttgccttaatctgatctattccagagcaaaatctctcaggttgacttgaagctttaattttta

SEQ ID NO: 761217 - DNA, 644 bp, Homo sapiens
acattagggaatacatttaatctacaatacaggaaagtcctgttgatatgattttgcctgtgggctgggtgactgtattagtagtgatgattttcttttttcttttttagcttctgtctttaatcttttcttttgcttcttcataaccagcatgagtgcaggggacacacataccatttggtacaagccttatttgtcttgccttgggtctggaaccacttttgcagtaacacatttagaaaagagaaatcaagagcaaaaaaggcttcaatatagtttatttttttttgccagtaactttcttgttgcacaamtattatatatgaaattattctttctaaacatgtgtgtgtgtgtgtgtgtgtgtgtgcacgtactcatgtgtttcagttcccaggttcttttcatggctgcacaacttagctgcaaggccttaggtgccttatttattctttccagatttcatgtccatcatctgcacaatgagcaggggggaatctatgtgctttgaggttgtttctggctttaaaattctataattgtatgattttctttctgcattatctttgtttggtgagagcttgccttaatctgatctattccagagcaaaatctctcaggttgacttgaagctttaattttta

SEQ ID NO: 761218 - DNA, 505 bp, Homo sapiens
agaaataagtgctttcatcaagctctgagttacagaatttattagagtaaagggaagaggataaccttcagatgtcttctgtggtgaaatgttgaagttaaaaattttaaatgtttgcagactaaagacatcctcggctgtgaggcctaaaagaataaacaaaatgtgacatgttttattttgttacttaacccttgtataaaaaagcacaacaaaaaatgtatataaatcatatttttatktctttctgaaaacacggacatggatttttggtgatgatcttctatgtagtggcatcatgccataggttaaagagtggttagtgtgtatgcaaatagctttattttggtatggcagtttcttaaagcagaaagttttaaaggtatacaacataaattctgtgaagatatgttcttctccttctgttgcaatatgctacgcattccagtattttgctgtagcccagcaatgaacaatgcaaagagatgaagaggggaaaaacaaa

SEQ ID NO: 761219 - DNA, 664 bp, Homo sapiens
gtggcatattaattagatgtgaggatccctgcaaaaatacacatttctgtattcatcatacttgcccttattttagcttagaaaaagttctgcattgtcacattgctataacaattgcatatggaaattaggcatttgttaaaatcatacaagagaccaaaggtaaaaacattcaaaagctatttttgcctgatgttaaatcctcttacattttcatgtgatgttgcaaatacacatatacacaagagtggagccaagaaataggaaaagtttgtaaatatttatacacagataatatacaccatgttcatatacatactacttctaatctcctttgtctaatgatttattttatactctctcaatagacacaatttttcaactgttctatttttcttttgaaatagcagattgtttacgctagtgcttcaaagatatttatgtaattagggttctatttctacgttggcttttaaatccaagttcctcttgttttggaatgtcatgtgcccacaaataagcrtagccatgccacactgcgagtcaagccttccacaggggcagggagggtggtggttaggcgcacagacactcgaaccacattgtctggttttgaattctggctccttcgcctcccagctaagtgacctcacctaccagcatc

SEQ ID NO: 761220 - DNA, 638 bp, Homo sapiens
tcctttctgggtaaagtccccactgcattttggatatggccaatgtcagtggatcaacagcagaaaagaaaatgcgcacgctaagtgcggaatcactgtgtttttttagctgtctcctattaaatgacagtagcattgcctggttcacacacatcttatagtcattctgtgtagaatgaagagtcattatattaaaagtacatgctacttcttcaaagaawgaaaggttaagcgagccaaccttggcatcactagcagcagtgatcatgtaccgggaacttaacccaggcgctgtgttaagcattttacttgtaccatcctgtttacaagggaatttagcaaatggctaagcacacacactttggacccagatttcatggagttcaaatgtcagtcatatttccttctagctgaataatcatgtgcaacttgcttaacctctgtgactcaatttccccaactgtaaaattgtgataataaaactacctacttcataggattgttgtgaacattaactgtgttagtttatatacagcacttaggagagtgcctagcatagaacaagtgtttttcattaacattgcaattattgttattaattaagagggaaataacaaggttgtatataacccatgtga

SEQ ID NO: 761221 - DNA, 675 bp, Homo sapiens
aactcaaaataactcaaaccctaaccaaaagtgagtggtctgggggattcactacttaatggttagcccccagttaagtcaattggtgagaaagtgtctgtatatatttctaagccccatttcccattgtgatggcaaaagggatatggagaataacaagagctatggaagatatgtcacctgcatttggtcaggcaaatccatgataactgtactcattcatccacagccatgaggccacataacacaagccctccagtctcagctctgacaccactttctcagagaggcattccctgagcacctaagaggcctctcacmcttaccctccttattctctaccctggctgctttattctctacctggtttctatcttggctcttatgaattgcagttattttttatttgtttatgaaattggttttggtttgtcatcctcattggaatgtatgctctgtgacagaaggaccaaagtaaacttgtctaccactatgtttctaatgctcacctagtaaaatcatggcacgtaattaatattcaataaacctatgtagtataaattaaaaatcatagttatgtgtgtgtgcatatatatagaaagagagagagaaagaatataatattaacaattgctaggtttattgagtgtatacactgtgtataatattctaagt

SEQ ID NO: 761222 - DNA, 675 bp, Homo sapiens
aactcaaaataactcaaaccctaaccaaaagtgagtggtctgggggattcactacttaatggttagcccccagttaagtcaattggtgagaaagtgtctgtatatatttctaagccccatttcccattgtgatggcaaaagggatatggagaataacaagagctatggaagatatgtcacctgcatttggtcaggcaaatccatgataactgtactcattcatccacagccatgaggccacataacacaagccctccagtctcagctctgacaccactttctcagagaggcattccctgagcacctaagaggcctctcacccttaccctccttattctctaccctggctgctttattctctacctggtttctatctyggctcttatgaattgcagttattttttatttgtttatgaaattggttttggtttgtcatcctcattggaatgtatgctctgtgacagaaggaccaaagtaaacttgtctaccactatgtttctaatgctcacctagtaaaatcatggcacgtaattaatattcaataaacctatgtagtataaattaaaaatcatagttatgtgtgtgtgcatatatatagaaagagagagagaaagaatataatattaacaattgctaggtttattgagtgtatacactgtgtataatattctaagt

SEQ ID NO: 761223 - DNA, 652 bp, Homo sapiens
accaaaagtgagtggtctgggggattcactacttaatggttagcccccagttaagtcaattggtgagaaagtgtctgtatatatttctaagccccatttcccattgtgatggcaaaagggatatggagaataacaagagctatggaagatatgtcacctgcatttggtcaggcaaatccatgataactgtactcattcatccacagccatgaggccacataacacaagccctccagtctcagctctgacaccactttctcagagaggcattccctgagcacctaagaggcctctcacccttaccctccttattctctaccctggctgctttattctctacctggtttctatcttggctcttatgaattgcagttattttttatttgtttatgaaattggttttggtttgtcatcctyattggaatgtatgctctgtgacagaaggaccaaagtaaacttgtctaccactatgtttctaatgctcacctagtaaaatcatggcacgtaattaatattcaataaacctatgtagtataaattaaaaatcatagttatgtgtgtgtgcatatatatagaaagagagagagaaagaatataatattaacaattgctaggtttattgagtgtatacactgtgtataatattctaagt

SEQ ID NO: 761224 - DNA, 589 bp, Homo sapiens
aagtttaatatgagaactaaaactcacctttttcttcaggccaccactccttgtccccagtgatctcttcaagggtaaccacttagattcttagtaatttttatagaaaatttagcatggatatcatacatctgtgtgtgtgtgtgtgtgtgtgtgtgtgtgtgtgtgtgtgcattccaagtcttcacaaatggggttgtattataaatactgatatatacctggctctttcacttaatcagaaggctaagtgaccatctgtttgagtccctagaaatatactgtttttttatgattgyacaatgtctttttttatgacagtatcacaaaatattgtattttagtcttatcaataagtctttggattattttcctgattatttttattataaataattctgtaaagaacattctagtcagtgggaatattatctgttcagtaggctcaatttctaacaatggaatcgctgagtcaaagaatgtttattcattgttgattttgatcattactaaattttaccaatctgtaaggtgaaaacttatatgtgatttgaattttttttacttttgattcagattgatacctttt

SEQ ID NO: 761225 - DNA, 626 bp, Homo sapiens
ccataaatgaatatagagcagcttcatatgtaattgccaaaacatgcaacagactaagatccctttcaataggtgaatgaataaactaactctggcgcaaccatacaacagaacatcattcactgataaagaaatgagcgtccagccttgaaaagacatgaagaaccttaaatgcacatggctaagtaaaagaagccagtctgaaaaggctacatactatatgattccaaccatttgacattctgtgcaaggcaaaaycatgcagagagaaaacagatctgtggttaccagaagtttgagaggaagaagggagtggcgaataggtggaggacagcgaatattttaagacaataaaactattctttataatgcagtgatggtgaatacatgttatgtcattatgcttttgtcaaaatccacagaatgtaaaacagaagacatgaatcctaatgcaaactatgaattttagttaatagtacttttcttctttaaaatttatttccataggtgattggaaaacaggtggtgtttggagatgtacgtttttagtggtgacttgtgagattttggtgcacccatcacccaagctgtatacactgcatccactttatagtcttttattcctc

SEQ ID NO: 761226 - DNA, 626 bp, Homo sapiens
ccataaatgaatatagagcagcttcatatgtaattgccaaaacatgcaacagactaagatccctttcaataggtgaatgaataaactaactctggcgcaaccatacaacagaacatcattcactgataaagaaatgagcgtccagccttgaaaagacatgaagaaccttaaatgcacatggctaagtaaaagaagccagtctgaaaaggctacatactatatgattccaaccatttgacattctgtgcaaggcaaaaccatgcagagagaaaacagatctgtggttaccagaagtttgagaggaagaagggagtggcgaataggtggaggacagcgaatattttaagacaataaaactattctttataatgcagtgatggtgaatacrtgttatgtcattatgcttttgtcaaaatccacagaatgtaaaacagaagacatgaatcctaatgcaaactatgaattttagttaatagtacttttcttctttaaaatttatttccataggtgattggaaaacaggtggtgtttggagatgtacgtttttagtggtgacttgtgagattttggtgcacccatcacccaagctgtatacactgcatccactttatagtcttttattcctc

SEQ ID NO: 761227 - DNA, 625 bp, Homo sapiens
ccgggcgcggtggctcacacctgtaatcccagcactttgggaggccgaggcgggtggatcacctgatgttaggagtttaagaccagcctggccaacgtggtgaaactccatctctactaaaaatacaaaaattagctgggtgtggtgataggtgcctgtaatcccagctacttgggaggctgaggcaggggaatcacttaaacccaggaggcagaggttgcagtgagcygagattgtgccattgcactccaggctgggcaacaggagtaaaactctgtttcaaataaataaataaacgaatttaaaaaaaaaacaattctaggatattctgttattaaagcagaaaataaaataaaagattcgcagaatgtctaattagattttttaaattaacagtatgcttcacacaagtgacatattttagatttaagggcatacatatgttaatggttaaagaatttaaaaaacccataccaataataattgaaagagtgtaagagtggctatatttatatcagacaaaatagacttttagaaaaaaaatctgtcccaacagacaaagaagatcactctctaataataagaggataatttgtcaaaagaatctaacaattaaaaaatatat

SEQ ID NO: 761228 - DNA, 625 bp, Homo sapiens
ccgggcgcggtggctcacacctgtaatcccagcactttgggaggccgaggcgggtggatcacctgatgttaggagtttaagaccagcctggccaacgtggtgaaactccatctctactaaaaatacaaaaattagctgggtgtggtgataggtgcctgtaatcccagctacttgggaggctgaggcaggggaatcacttaaacccaggaggcagaggttgcagtgagctgagattgtgccattgcactccaggctgggcaacaggagtaaaactctgtttcaaataaataaataaacgaatttaaaaaaaaaacaattctaggatattctgttattaaagcagaaaataaaataaaagattcgcagaatgtctaattagattttttaaattaacagtatgcttcacacaagtgacatattttagatttaagggcatacatatgttaatggttaaagaatttwaaaaacccataccaataataattgaaagagtgtaagagtggctatatttatatcagacaaaatagacttttagaaaaaaaatctgtcccaacagacaaagaagatcactctctaataataagaggataatttgtcaaaagaatctaacaattaaaaaatatat

SEQ ID NO: 761229 - DNA, 562 bp, Homo sapiens
ataaagattcatgttattgattcctattgagctcaggtaatattggatgaaaagcaaaaaaattatttgaaatagaaatattgtgaataaagttattgtcaactaaagtaaaaatattatctcacacttgtcatcttatctatagttgtacaatatcaaatgctactttttattaacaattgtacttcatataagtattccatttatttcacccttcttaactgtttcaatgccttctgcacttcatatcagtgaaaarcaggccggctggtgccaggaaatggatgtggtgctattgctactttaagagtaatgatgaagagcacttgtctgaattgttcccaagtggccaacactgttatttggcccaaagtacacacatttcttattttcctctaaatttactgctgaaataaaattcttagctaagaaaggcttgatctcattcaaatatgttttatgaaatttggttgacatttcagtgtgtctgacttaaatggaatattgaaaattttcatgaatccaaatagagtgttacacatgaacaatcttttactaaaag

SEQ ID NO: 761230 - DNA, 588 bp, Homo sapiens
ttactgctgaaataaaattcttagctaagaaaggcttgatctcattcaaatatgttttatgaaatttggttgacatttcagtgtgtctgacttaaatggaatattgaaaattttcatgaatccaaatagagtgttacacatgaacaatcttttactaaaagcctttctgaggcagagcaagattcataaaatttctytataatatagaagaaatgtgttaactctgttcccagtagtcaactctgaacactgagcctctcagttcccagtattcaccctgaggtattcaggaaaatttggtatctctgtaaggagacagaaaaagatgtttgggggagggtcaatacattgtgcataaatgctttctacatgcaccagttaggatcttaatctaattggtctatcatttgcatggctagttactgaatgtagtcatacaattttggtttttgcagctaatgacatctgttacctataagtttcatacaataacttgctcagctgaaacatgaatcttttgttaatttaccctaaatttagggactagatttgcaatttccaacatttcaaagttaaagcaaatcagag

SEQ ID NO: 761231 - DNA, 640 bp, Homo sapiens
cccaagtggccaacactgttatttggcccaaagtacacacatttcttattttcctctaaatttactgctgaaataaaattcttagctaagaaaggcttgatctcattcaaatatgttttatgaaatttggttgacatttcagtgtgtctgacttaaatggaatattgaaaattttcatgaatccaaatagagtgttacacatgaacaatcttttactaaaagcctttctgaggcagagcaagattcataaaatttctctataatatagaagaaatgtgttaactctgttcccagtagtcaactctgaacactgagcctctcagttcccagtattcaccctgaggtattcaggaaaatttggtatctctgtaargagacagaaaaagatgtttgggggagggtcaatacattgtgcataaatgctttctacatgcaccagttaggatcttaatctaattggtctatcatttgcatggctagttactgaatgtagtcatacaattttggtttttgcagctaatgacatctgttacctataagtttcatacaataacttgctcagctgaaacatgaatcttttgttaatttaccctaaatttagggactagatttgcaatttccaacatttcaaagttaaagc

SEQ ID NO: 761232 - DNA, 623 bp, Homo sapiens
cagtgtgtctgacttaaatggaatattgaaaattttcatgaatccaaatagagtgttacacatgaacaatcttttactaaaagcctttctgaggcagagcaagattcataaaatttctctataatatagaagaaatgtgttaactctgttcccagtagtcaactctgaacactgagcctctcagttcccagtattcaccctgaggtattcaggaaaatttggtatctctgtaaggagacagaaaaagatgtttgggggagggtcaawacattgtgcataaatgctttctacatgcaccagttaggatcttaatctaattggtctatcatttgcatggctagttactgaatgtagtcatacaattttggtttttgcagctaatgacatctgttacctataagtttcatacaataacttgctcagctgaaacatgaatcttttgttaatttaccctaaatttagggactagatttgcaatttccaacatttcaaagttaaagcaaatcagagaagagtaatgtgtgtatgtggtatgcattttcttgcccagctatcaaaattcttctcatattgcctttgccactctaggcagccacctaaaatatattccatcctaatttttt

SEQ ID NO: 761233 - DNA, 623 bp, Homo sapiens
cagtgtgtctgacttaaatggaatattgaaaattttcatgaatccaaatagagtgttacacatgaacaatcttttactaaaagcctttctgaggcagagcaagattcataaaatttctctataatatagaagaaatgtgttaactctgttcccagtagtcaactctgaacactgagcctctcagttcccagtattcaccctgaggtattcaggaaaatttggtatctctgtaaggagacagaaaaagatgtttgggggagggtcaatacattgtgcataaatgctttctacatgcaccagttaggatcttaatctaattggtctatcatttgcatggctagttactgaatgtagtcatacwattttggtttttgcagctaatgacatctgttacctataagtttcatacaataacttgctcagctgaaacatgaatcttttgttaatttaccctaaatttagggactagatttgcaatttccaacatttcaaagttaaagcaaatcagagaagagtaatgtgtgtatgtggtatgcattttcttgcccagctatcaaaattcttctcatattgcctttgccactctaggcagccacctaaaatatattccatcctaatttttt

SEQ ID NO: 761234 - DNA, 580 bp, Homo sapiens
ccacttggtcatgataaatgatctttttgatgtgttgttagatttggcttgctagtgttttgttgaggatttctgcatcaatgttcatcagtaatactggcctgtagttttctttttttgatgtatctttgtctggttttggtatcaaggtaatactgaccttgcagaatgaacctggaaggagaaactacttccatttttcagaatagtttgagtagagctggtattaatttttctttaaatgtttggtaaaatttagcagtgaagtcattggatcctsggcttctctttgctgggagactttttattacagctcagtcttgtcagttgttattggtctgttcaagttttggatttcttcatggttaaatcttggtagggtatgtgattaggaatttatccatttcttctaactattccaatttttttggtatatagctgctcacactagtctctaatgatcttttgaatttctgcagtatacatcataatgtctgttttttcatctctgattttactggatcttctctttttcttagtctggctaaaggtttcccaattttgtttatctttcgaaaac

SEQ ID NO: 761235 - DNA, 620 bp, Homo sapiens
aagtgatttgtctaagatcacattaaatagtgatggtaatatgggatcctaagttgttgctgtctttgtttttttttttaaataggtaaatttgttttaaaatttaaaaacgttaaaatgcaataaaatttactgtttttggtgtacaggtctatgagtttggacaaatatgtaatcktgtaaccaccatcacaatgaacatactaaagggttccattgtctctgaaaatgccttcagtctgctcttttgtagtcagccttttccctagctctaatccttggcaacctctgatcttttctctgtccctgtttttttgctttttccagaatgtcatataaatggaattatatggtatatagtgttttacatctgtcatctttgactttacatagtgcatttgtgattcacccatgttgttgtgtgtatcaatagttcatttttactggagagtggtattctgttgtatgaatgtgccacaattagttttgttccatccattcaccagtttaaggacatatgcattttttatttatgaataaagctactgtaaatattcatgtacaggtgcttttgtgaaacaaatactcattccttttaggcaaataactaagagtggaat

SEQ ID NO: 761236 - DNA, 654 bp, Homo sapiens
gtagaatgtgggttctatcaaagtgagattgttagagcctatgtttcctagatttggaggcttcctatttcttggtttacaccatagacagaaggaattcctaggacaggccaaggggtgagtacaggggcagatttctagggggcataatcatggggaaaaatagattatctgataggtttgactataagaaaaatggtatttagaaatggctttagagccattggaatgtgggggaagattaaaccagagagtagaagagaacaatcaagtacatgcaaatcaacattagaaaaaggaaaaggtatcacagagaggaaatatagtcagagtataataccttaatcagcaagcaatatytacttagtcattataactacaattatggatatcaccccacattatgtttcaaccatattggggactggggtgggggggtgaagtgggtatgaggtgaaagttcttatactgtgtaggataccagtatatcagtatagacacacgtgatttagaagcatggcgctaaatgccagaagcagcagctaaaccaatttaacatggttgcatctgggactgagagaaccttgatggtagtgtaaccagcagaagggtggccacaggactgctgtgtttcgagtctttttgcaccatctg

SEQ ID NO: 761237 - DNA, 541 bp, Homo sapiens
aaccaatcacagtaagctggccattttggaaagcatgatcgtattatgtattgtacagcttgggggtggcatgtactgccgcagacattaccttcttgccaggacaatggagattgatgagtagaggagggggaaggcccgaatgtggggctccatcaggcagctgatggaccctatgatccatgcccctctcagttgcttggtttgaggcaagatgagcagagccaggaacagctgagcaaacaaagtaatccagaccatacttgtggtaatggtgacaaactgtaagaaataacatcaatcatttgaaacaatgacggtcttctcagccctgttcacctggattggaggaggaaaaaaargtaagtgtgctattcaatactcttgagtaaaagctcttttcaacagcgatagctttgttgttctcttattactcactctattttgtcctcaatactcactcttcttgttccatctttgctttcagcatcataaagctgacagagtggactgtgaaaccaattcatcgtgtggcctgtcc

SEQ ID NO: 761238 - DNA, 541 bp, Homo sapiens
aaccaatcacagtaagctggccattttggaaagcatgatcgtattatgtattgtacagcttgggggtggcatgtactgccgcagacattaccttcttgccaggacaatggagattgatgagtagaggagggggaaggcccgaatgtggggctccatcaggcagctgatggaccctatgatccatgcccctctcagttgcttggtttgaggcaagatgagcagagccaggaacagctgagcaaacaaagtaatccagaccatacttgtggtaatggtgacaaactgtaagaaataacatcaatcatttgaaacaatgacggtcttctcagccctgttcacctggattggaggaggaaaaaaaggtmagtgtgctattcaatactcttgagtaaaagctcttttcaacagcgatagctttgttgttctcttattactcactctattttgtcctcaatactcactcttcttgttccatctttgctttcagcatcataaagctgacagagtggactgtgaaaccaattcatcgtgtggcctgtcc

SEQ ID NO: 761239 - DNA, 544 bp, Homo sapiens
ggcagatcacttgagcccaagagttccagaccagcctgggcaacatggtgaagccccattactaccaaaaaatactaaaattagctgggtgtggtggcatgcacctgtagtcccagctacttgggatgctgaggtgagagaatcacctgagcctgggaaagcaagggtgcagtgagccatgatcctgacactgtactccaacctaagtgacagagtgaggccctatgaaacaaacaaaaaacaaaagcaaacaaacaaacaaaaaacaagaaagaaagaatatgcacaatcggagcagaaaaaatgaaaaaaaataaaaagaatgaagattgcctacaaggtaaagaaaattacttaaaaataccaaatctaagaattattggtgttcaagaggaatttsagcaagagcaaagggtagaaagattattcaaagaaataataacagaaaacttttcaaaacttgagaaaaaaaaaaaagaaatactgagataacagaaggtcagagaacaccaaataaactgaataggaaggaatacttccaaac

SEQ ID NO: 761240 - DNA, 621 bp, Homo sapiens
agaggttgagaggcttgaagggagcacagagaacggcttcacgtgccacaggttggtgagcacgcgtgaatgggcctgcttcatttttaaaggttgtagaacagtgaaggaacccaatgagaggctacaggtaggtgaaagggaaagacaaaaaggtgatcgttctagaaatgactgttccaaccacaagcagggcagtggaagatattctttctctgtcctttattctataaatatttactaatcctcactatgtgccaggaactctgctttattttagaaccagtaataaggatctttcacagggaagcagaaacagttggaaaagtaacctatagattaaaatgcatggcaaagacttagaaacctgtcatatgggataatttttggatcccaawtcaaacacatttttaaagttcattagacaattgggaatattttaatactgactagctatttgaaatattgttgatgaagtgtcatttcatttgtgttcgataacactattatggctgtgttttcaaaaaatccttctctttcagaaatataccccaaaatatttataaatagaatgaggtcaaaaaataaaataaaaaaatttaaaagttagaatcttatcca

SEQ ID NO: 761241 - DNA, 590 bp, Homo sapiens
taattggcatagagatacttagcagctggcagaaccctcacattggctccctgactggtagtgtgagggctattatggcgggaaaggccaaatggaagccattagagctgcctctacctagaaaaagagtaaatcaaaaacaatatctcatccctggagggattgcagagattagtgccaccatgaaggacttaaaagatacaggggtggtgattcccaccacatccccgttcaactctcccatttagcctgcgcagaagatagatggatcttggcgaatgacagtgaattattgtaatcytaaccaagtggtgactccaatttcagctgctgtaccagatgcagtttcattgcttgagcaaatgaacacatctcctcgtatctggtatgcagccattgacttggcaaatgccttttattccattcctgtccataaggcccaccagaagcaatttgccttcagctggcaaggtcagcaacatacctttactgttctaccttaggggtatctcaactctcctgctttgtgtcataatcttattcggagagaacttgatacgtttttgcttctgcaagataccacactggtc

SEQ ID NO: 761242 - DNA, 613 bp, Homo sapiens
ttccatttgttcatatcctctcatttccttggtggtttgtagttctccttgaagtccttcacatccctaataagttgtattcctaggtattttattcaattagtagcaattgtgaatgggagttcactcatgatttggctatttttctattattggtgtataggaatgcttatgatttttgcacaagctttgattttgcactctgctttgattttgtatcctgagactttgctraagttgcttatcagcttaaggagatttggggctgagatgatggggttttctaaatatacagtcatgtcatctgcaaacagagacaatttgacttcctctcttcctatctgaatacacttcattcctttctcttgcctgattgtcctggccagaacttccattactatgttgaataggagtggttatagagggcaaccttgtcttgtgccggttttcaaagggaatgcttccagtttttgcctattcagtatgatagtgtctgttggtttgtcataaatagcttttattattttgagatatgttccatcaaaacctagtttattgagagtttttagcatgaaggagtgttgaattttgtcgaagtccttttctgcatctg

SEQ ID NO: 761243 - DNA, 628 bp, Homo sapiens
gatatacaaccaagaaacatggtgcataatgaacatatccctcatcttcaaaagcttccttgcaaccctttgttatctccctcccctgtccaatccttatatcccttgttcctatcctcagaaaatcattgatttgctgtcactgtagatgagtttgcattttccagagttttacataaatggaaccatgcagtatggactctgttttctctggcttattttactcacataattgtttttatgaatattatagttatttatctatgttgtgtgcatcaatagttatttctttgttattgctgagtagtattacaatgcatagacacaatttgcttatctgtagatggatgtttgggttatygccagttgtggcgattaaaattaaagctgctatgaacattcgtgtacaaagtctttgtttagacataggcttttatttctcttgggtgaaaacctaagagtatggttggatcatatggtaagtgtatatttaactttttaagtaacagtcagactgtttttcgaagtggttgtaccattctgcatttccaccagcaatgtatgagagtccatttcctccacattcttggcaacatttgatttgatcagtctttttcattttaggcat

SEQ ID NO: 761244 - DNA, 630 bp, Homo sapiens
atgccagctaatttttgtatttttggtagaggtggggtttcgccacgttgaccaggctgggatcaagtgatctgcccaccttggcctcccaaagtgctgcgattttttttttttttttttttgagacagagtctcgctctgtcacccaggctgcagtgtaatggcacgatctcggctcactgcaacctctgcctcctgggttcaagcgattctcctgcctcagcctyccaagtagctggtattacaggtgcctgccaccgcatcctgctaattttttgtatttttagtagagacagggtttcaccatgttggccaggctggtctctacctcctgacctcaggtgatccgcccaccttggcttcccaaagtgctgggattacaggtgtgagccactgcacccggccagcactgatttttgtatgtaaacagttccatattgatggacattagggtattaaatagggaaagtttgatgggaccagatacttggttcttcttgtggcacttaaactttaaaatattttgttttcatttttatcataaagatattttaccacggatactcaaaacagtatagaagtgcacataataaaaagtttaaaatgttctctgattcccatctgcccact

SEQ ID NO: 761245 - DNA, 566 bp, Homo sapiens
agaattccagcgcagcgccggcgggccagcactgctgggggaccccgcgcaccctccgcagctgctggcctgggtgctaagctcctcactgcccggggcctgcagcgccggccggcggctccaagtgcgggcccgtgcagcccatgcccacccggaactctcgctggcctgagagcgcccgcagcccgggttcccgcccgcgcctctacctccacacctccccacaagcagagggagccggctgcgcctccacyagtccagagagggtctcccacagtgctgcggcaggctgaagggctccccaagcgcagccagagtgggcgccaaggccgaggaggcacccagagcgagggagggctgtgagggctccagaacgctgtcacctctaagatttgggggatggtaagtaagcatcggcttccacttaaagtcaccagctgtattaacccataacaagagagtcaacctgtcctttgaagctttgaagccaggtattgacttctttctagctaagaaggtcctagatggcatcttcttccaatagaaggctgttttgtctatattga

SEQ ID NO: 761246 - DNA, 634 bp, Homo sapiens
atgatggagttacacctggataaactcactgtaagttaaaaacatcatatgtctagaacacacttttgacttatatttcaacttacaattggtttttcaggatgtaatcccattgttaagatgaggagcatctgaamaagtaacaatagctttccttgatcctggcaatcagaacctattcatggaaattagataaaaagtttaatcaaatgagtaccccaaatataaaatctttagaaataactttaccaagaaagtagtaagagtcacggaggattctattaaatgtagaggaaagatataaaacaagatataacaaaaggaaatacaaaccctcttcttagatgggagacttactgtcacataaaaattatattttctataactaatatattacaatccaagcactgtttggaaagatatagactgatatagactggataaaataacctcaaaacgtcctgcaagattatatgctttagaatagtgaagatattttaatatcaatgcaaataatgaaatgagacttatcagatttaagaacatacaacaaagctactatgacaaaatctatatggcagtggtatattaataaatcagtggaactgaaagacaattcatcaatagatgccag

SEQ ID NO: 761247 - DNA, 634 bp, Homo sapiens
atgatggagttacacctggataaactcactgtaagttaaaaacatcatatgtctagaacacacttttgacttatatttcaacttacaattggtttttcaggatgtaatcccattgttaagatgaggagcatctgaaaaagtaacaatagctttccttgatcctggcaatcagaacctattcatggaaattagataaaaagtttaatcaaatgagtaccccaaatataaaatctttagaaataactttaccaagaaagtagtaagagtcacggaggattctattaaatgtagaggaaagatataaaacaagatataacaaaaggaaatacaaaccctcttcttagatgggagacttamtgtcacataaaaattatattttctataactaatatattacaatccaagcactgtttggaaagatatagactgatatagactggataaaataacctcaaaacgtcctgcaagattatatgctttagaatagtgaagatattttaatatcaatgcaaataatgaaatgagacttatcagatttaagaacatacaacaaagctactatgacaaaatctatatggcagtggtatattaataaatcagtggaactgaaagacaattcatcaatagatgccag

SEQ ID NO: 761248 - DNA, 634 bp, Homo sapiens
atgatggagttacacctggataaactcactgtaagttaaaaacatcatatgtctagaacacacttttgacttatatttcaacttacaattggtttttcaggatgtaatcccattgttaagatgaggagcatctgaaaaagtaacaatagctttccttgatcctggcaatcagaacctattcatggaaattagataaaaagtttaatcaaatgagtaccccaaatataaaatctttagaaataactttaccaagaaagtagtaagagtcacggaggattctattaaatgtagaggaaagatataaaacaagatataacaaaaggaaatacaaaccctcttcttagatgggagacttactgtcacataaaaattatattttctataactaatatattacaatccaagcactgtttggaaagatatagactgatatagactggataaaataacctcaaaaygtcctgcaagattatatgctttagaatagtgaagatattttaatatcaatgcaaataatgaaatgagacttatcagatttaagaacatacaacaaagctactatgacaaaatctatatggcagtggtatattaataaatcagtggaactgaaagacaattcatcaatagatgccag

SEQ ID NO: 761249 - DNA, 513 bp, Homo sapiens
tttgtttgagcaacatggctgtttatttcacctgggtgcaggcgggctgagtctgaaaagagagtcagcgcagggagataggggtggatccgttttataggatttgggtaggtaaaggaaaattacagtcaaaggggggttgttctctggcasgcagagtgggggtcacaaggtactcagtgggggagcttttgagccaggatgagccaggagaaggaatttcacaagacaatgtcatcagttaaggcaggaacaggccattttcacttcttttgtggtggaatgtcatcagttaaggcaggaaccggccatctggatgtgtacgtgcaggtcacaggggatatgatggcttagcttgggctcagaggcctgacaaatggcataggctttaaatatgcttgatgggttagctggcctcatgccacccatgatgaatgctactgccattagtcagtagaagattttgccccaagctactgcaccttcagcttaggttagaaatgaatgacacgt

SEQ ID NO: 761250 - DNA, 516 bp, Homo sapiens
ggactattaagagatggtggaccttgacacaatgaagaatggaaggcccagatttaaggacattgcaaattacatgggactaattccaattccttcagaggacaaatttctttggggtctgagtcatatagtttggctgcacagctcttttcccaatcacctgaatgaccagcgtttggatctgggttcatttagctgcaaggggacctcattaaatgctgtgtacacaaaaggtcaacaattcctcacactgaaaaaagggaaaagaggagcscttccagcaaaacaactgaataaacactgtaaatgttactaaacaggaaagtacagagaagtgcctgctggaaggagatccatggcagaacaaaaatagcacaaagagagattctctgtcatccatcaagatccaaaagcagttctccacgctaaccaatgatttgattaattagagatttatcacgtgttcagatttccaatttttttttttttttttttttgagacggagtctcgctcta

SEQ ID NO: 761251 - DNA, 658 bp, Homo sapiens
tgatctgtttgtctaataatctggctacacctctgtctgtctcatctagactcttagagaaaagaaacctagctattagtaaactggtcatccacgatttcctggtgcaaagagtctactcaagcattaatcaaaagccgggtaaaacaaagctaaacagaacaaaaatatcagactgaagtcttatccttgaaccattgatcaaagaagacacattttgtgctttcgtatattttcttttatcctgaagtttcttcttccaggagaagcttcctgaagagatgtacagatatgcaatttagaaagaagagtaaaacatacagytttctaggaagagagcatatttttaggaaaggcttctcagtttgatatatgaaagtcagtttggatcttgatgaattatgctcaacataatttgcaattaagatacttgaaaataatcaacttaaataaatcttgtatatgaagcaatataatatagtgatcaaaatcatggagtctagcagcccgaattcaaatcccagatatgccactatttgtgtggccttgagcaattcatttaaactgtataagaccttgtttcctcctgtataaaatgaaaatcatcatatttctacttcaaaaggcattgaggaattaaaccacatgtttaaagttc

SEQ ID NO: 761252 - DNA, 618 bp, Homo sapiens
tgaaataccttgccagatttcagaggtaattttaggtcaccagtcccatgccaaataccttcccattttagaaagactactaatatattaggatggggaacatcagagaagggatttactaagactccatctctattaaagctcttccaatagacattacttcaaagttagatttctttctgtgtttctccaaaaggctgcaataaaaatctgactgctaatgacaactcatttagcaggatgacagttgcttgatgctcacagggaatgaagcaagcattgccagatgtgtgccataccctcttttaacagcctcattgcagagtatcttcactataatgaccattagaataaaccatattctattaatgaagaaaaatcttacactatcaattaatagcctttaaaaaatgtgagagagcagaaggaaactctgagaaatagtagaatgctttattctttgtactagatgaattgatygctacagcatttaaatctatggggtaacaacgcagtagggtttttggaccacagatatatcaacataaatccttatttacattcatttaagaattcatagcaccatttgttatgaggaatatggcttttttaggctgc

SEQ ID NO: 761253 - DNA, 568 bp, Homo sapiens
gaactaatgatgtaatttgtgtgctaaccagagcccactctgaatcacaaccaccagatgtatcaaaacattatgctgtacattacaaatatatacaatgtttgcaaattacaaaagaaattaattaataaaaaaataaaagacagccaggatagaaaaaacaaatgaggcacaaatacatattaatcttaaagcccagcagctggggtgtcccttcccatgactttattcagctggaattctccttctctgagcttctctttctctgaaatccttattcttattcaactgttcctctaagacagaattcttgtcacatttatttggtcattccagttgctaacacagaacctggcatgcaatatgcacycaatagtgtttgatgcacgaatccatgtgaaggaataagctaagtttcttttcttctttgaggtcatcatgagaagataaggagcaaattttgtaaagataattgtaaaatgtgtacatctagtgaggaggttagtcctatctacaacccaaactccttttcctgcaaccaaaaggatccatgttagaggaagacctg

SEQ ID NO: 761254 - DNA, 609 bp, Homo sapiens
tttctctttactctgtggactcaccctaaattcttttcttgcacaagaattaagaaccctctcttggggtctggattgggattcctttccagtaacaacagcaggttacacatttttatcaagctcatatggaatgttcaccaagaaagaccacatactgggctagaaaacataccttaaaaatgtaaatgtataaaaaattcgtacaatgtctcctctcagaccgtaatagaattaaactaaaaatcaataacagtagctagaaaatcctcaaatacttggagattaaattacactcttctaaataacacatggatcaaagaaaaaatctcaagtgaaattgaaaaagatsttgtggtgctgggataattggttattcatatgcagaagaatgaagctggacccttcccctatcaccatacacaaaaattaagtcacgacggattaaagacttaaatgtaagacatgaaacaataaaaatcctaggaaacaccctatgaaaatattttatatggaaataccccataaaaacataggaaatactctttttaatactggccttggcaaataatttattactatgtcctcaaaggcaattgcaacgtaatc

SEQ ID NO: 761255 - DNA, 622 bp, Homo sapiens
tcttgttatttaaatgggttttctttctccctattatatttttcaacactccacctatctagttaccagcacaccattttaagtaatagatgcgtgttgaatgggtcaataaaggtaaagatgtaagaatgaatgagaggcatcctgatgtaccacatgtcaaaggcaaaattttaaccaaggaattctataatactatatttcagggctatgcagatctcagatttttttcttttcttttgttttttgagacagggtctcactctgttgcccaggcaggagtgtgatggcaagatcatggctcactgcagtcttggcctccagggctcaggtgatcctcccactgcagccacctgagtagctgggaccacagtgcatgccatgacgcctggctaattttctaattttctgtagagacagcgtctcaytgtattgcccaggctggtctcaaactccttagcacaagcgatccactcacttcagcctcccaaagtgctgggattataggtatgagccaccacacctggcccttttcatttttaaggagacagttattctaatctgattcttgctctaatataaaaatactgaattgattgaatattggcttcattgtgatttt

SEQ ID NO: 761256 - DNA, 622 bp, Homo sapiens
tcttgttatttaaatgggttttctttctccctattatatttttcaacactccacctatctagttaccagcacaccattttaagtaatagatgcgtgttgaatgggtcaataaaggtaaagatgtaagaatgaatgagaggcatcctgatgtaccacatgtcaaaggcaaaattttaaccaaggaattctataatactatatttcagggctatgcagatctcagatttttttcttttcttttgttttttgagacagggtctcactctgttgcccaggcaggagtgtgatggcaagatcatggctcactgcagtcttggcctccagggctcaggtgatcctcccactgcagccacctgagtagctgggaccacagtgcatgccatgacgcctggctaattttctaattttctgtagagacagcgtctcattrtattgcccaggctggtctcaaactccttagcacaagcgatccactcacttcagcctcccaaagtgctgggattataggtatgagccaccacacctggcccttttcatttttaaggagacagttattctaatctgattcttgctctaatataaaaatactgaattgattgaatattggcttcattgtgatttt

SEQ ID NO: 761257 - DNA, 616 bp, Homo sapiens
aaagctgataaattcctgagaaaagtttctcttcttaagaattctaggtcaagaagtaaaatatggcacagagcattgaaaggaggcaacggatgcccagtgcaagattctgaagaagcaggaattcagcccgatgggagtccgagttcatgtcgtggcggcctcagccctgctgtatttcatcctggtgagttcagtggtgaaaaggcagaaagagtatttttccccagattaatcaactctcagaagartctgaaaggaaatgaactgcggggtggggagacatatacagaacccagggggtcatagggaaatgagtaaactacaaagtttccttagtattacgagattgcatagatgcatgtgtgactgatggcaatgacaatgaaaagggggacagaaattagagtgagcatggaaacgagcaggattgccgtggcactttagaagtgccgctgaagtattttatctcttttagcatcttatcacccatccctcaaaattccaaacaaattatgaaaactaggtgtgtaattcccctaaacggaatttcccatccaggaatttctaatcctgttctagcagtttaggtgcctctagtctagaaataagagag

SEQ ID NO: 761258 - DNA, 616 bp, Homo sapiens
aaagctgataaattcctgagaaaagtttctcttcttaagaattctaggtcaagaagtaaaatatggcacagagcattgaaaggaggcaacggatgcccagtgcaagattctgaagaagcaggaattcagcccgatgggagtccgagttcatgtcgtggcggcctcagccctgctgtatttcatcctggtgagttcagtggtgaaaaggcagaaagagtatttttccccagattaatcaactctcagaagaatctgaaaggaaatgaactgcggggtggggagacatatacagaacccagggggtcatagggaaatgartaaactacaaagtttccttagtattacgagattgcatagatgcatgtgtgactgatggcaatgacaatgaaaagggggacagaaattagagtgagcatggaaacgagcaggattgccgtggcactttagaagtgccgctgaagtattttatctcttttagcatcttatcacccatccctcaaaattccaaacaaattatgaaaactaggtgtgtaattcccctaaacggaatttcccatccaggaatttctaatcctgttctagcagtttaggtgcctctagtctagaaataagagag

SEQ ID NO: 761259 - DNA, 568 bp, Homo sapiens
tctcagactcctgacctcaggtgatccacccacctcagcttctgaaagtgctgggattacaggcgtgagccaccgccccaggcaaatttttataagcttatttaccatctgtattaggtaactttgataaagtaactgtataaatcttttgagaatttttacttggtttatttttcttactgttgagtttgagaactttatatatttgggataaaaaccttttatcagatatgcatcttgaaatgtttttcttgtcttgtctttttttttttttttttgagasggagtctcactctgttgcccaggctggagtagtgcaatcccagcttactgcaacttccgcctcccaggttcaagtgattctcctgcctcagcctcccaagtagctgggattacaggtgcccaccaccatgcctggctaagtttttgtatttttagtagagatggggtttcaccatgttggccaggctggttttgaactcctgacctcaagtgatctgcctgccttggcctcccgaagtactaggattacaggtgtgagccaccgcccagcctgtcttttcattct

SEQ ID NO: 761260 - DNA, 705 bp, Homo sapiens
atgagccaccatgcccggcatattattttattttaaattaacattataatgtaagcattttccacgttataacgaacctgcctttgcaaaatcgtacagtaaaagaaacttgacatagtggactccatcttgcttctgaccttcacactattcttggtcattcctgggtgtggtccaagctaactttaagaggaatttattttatagtttaaccttaaaccaagggttatgatagcccttcccaaaactaaaccatttttgtaaaactaatgaaaggccacaaggataaaattatccaaggggcttgaactctgctaaaatgtagatgtagtttgtgtaatcccttactgctcaggagtcctgttgccagaggtcacaagatttgtgacttccccaattgttcctataaataacatcactattgtagaacctaaaattggttttttgcaagacgtttttcagactgccttcacccagatttatgactcatgactcaatygatcctgtggccccatccagaggcagactcagtgcatgaggaccatttttccacacccctgtgatatcagcccctaccaatcagtagcacccattccctagccccctgctcacaaaatcacccataaacacccctaacttctgagccttcagggagactgatttgtgtggtaactccagttttcctgtatgggatggcctcatttc

SEQ ID NO: 761261 - DNA, 613 bp, Homo sapiens
aaaattcacatagccaatgaatatatgtggacactcgacacagggtagtgatagtattgcagaaaaacaagtgtgcaaatctattagcaataagggtgtgcaattaaaaccacgtgaccctactagcaaagagtaaaaacgtgaaaatctccagcaaaggagtgcaacaagaatcctaataccctcaacatagaagcatacatttaaatattttggctttctccaagattcctgtctcagaaaaaaaagtatgcatatttayatcaaggtacatatataaaactgatcgtgatatcattgttaatgatactttccaacttgaaacatctcaaatgattaccaaaactaaaaagttctgctaaacaactcaatagtcaatggattactatataacaatgaaaatgacggaactacaaatccacacgtgaacatggatggacctcaacacatggggtgaaaggaacatgtcaccaatgaatacatactcatacagcatgagtctatttatatagatcccaattacagaaaaactaaactgtatcttttttaggataggtacataaattagaaaattaccaagaaaagcaataaatccagattttaacacaaatat

SEQ ID NO: 761262 - DNA, 598 bp, Homo sapiens
ggtcgcattccattcctagagctatgaacatctgcttttctgggataggaatcttgatgatgtgaaacctccctgactgcacgtccattcataggctctctgcagggggaagcacatcacatgctgttggctcattctggcagtccaacctggcattgtctttacacaatcctgcatgcaattttttatttacaataatcaggagcatttcatcttttattccatagcaatagtttcagggggtctccctacatctcccccttttctctgatttaaatgaaccatagcaatcatagcttggtgctgatcacaattggatkgaagaatattttttccaattttacacatgaacaataaaccaatagcacaaattatatacaaaacaaaattaacgatagtggatcctcccaaagattttacctattgaatggggttgagattagataatccctcagagataccacctaaaacttcagcaccaggtaaagcagttaagtgtgcttgtgaggcctcaaaaatctgttcttttagcttgcttatgtctaaacttaaattatcttcacttccttgtaaatgacagtttactgattccctattg

SEQ ID NO: 761263 - DNA, 618 bp, Homo sapiens
gattgcttgagcccaggagttaaagaccagactgagcaacatagtaagaccccatctctacaaaaaactgaaaaattagccaggtgtggtggcatgtgcctgtagtcctggctacttgggagactgaggtgggaggaccacttgagcctgggagrtcgaggctgcagtgagctgtgactgcgccactgcactccagctgagcaacagagcaagaccctgtctcaaaacaaaaccaaccgaccgaccaaccaaccaaccaaccaaacaaagcatgtatctgcatgcttgtctgagggactgtggatgagcgggtgggtagagagcttaaccctcttgaacttacactctcctcttgagcatcagtggtgggagttccagaaaggtactgcagctgggctgaggctagatgaagacaccatcttagtaaaaggctgtggggcatcctgaccagatggggacagtttggggaaatattttgagccaccactcaaagaatggcagcagtcccccgctttgcaggtctctctcctctttgaggtcccatttttctgctacatagtcataagacctatttatgctctggcagccttttgcaaagttctctcttacccaccatct

SEQ ID NO: 761264 - DNA, 533 bp, Homo sapiens
aagtgagaggtagaggtcaaggagcaggtgactgggaatcaactctcaagatcttcaactctcctcacctaatatactcaggatgctgaactgattacaaaggctttggcatatttaagctattttatttttataacaatcatcagaattattatagasaacattttgtagtgaaaactaaggcttagagatgttggctgattttccccatttgacacatacagcatactgtagagatgggacctggccaagttccgaagactcccagcccagaattctttcctcccttttcagttgtctcatttctagtgtggggatcttctcaaggtaataacatttcaacttctcacggtgtttctctgcagcattttaatcagacacttgggtactgggaccaaaatgtcaataatttagtcttctaaaggagatttaatgtaactcttttgtttgggttattctaggattttggtaatcttccaataggataatttcaaagatgtttgtggaaatgaaatagtctttataaaaacaat

SEQ ID NO: 761265 - DNA, 577 bp, Homo sapiens
gccttatttttgtgctttttactctgttccattagtctatgtgtctgtttttgtaccagtaccatgctatttttgttactatagccctgtaatatagtttgaagttgggtaatgtgatgtctctgtctttgttctttctgcttaggtttgccttggtgtttggaatatttttttggttccatttgaattttaaaatagctttttttcttgttttgtgaagaacgtcattggtaatttgataagaatagcattgaatctgtaatttgctttgggcagtatggccattttaatkatattgattcttcctatctatgagcatggaatgttttttcatttgtttgtgtcatctctgatttctttgagcagtgtttataattcccattataaagatctttcacctccctggttagctgtattcctggatattttattctttttgtggctattgtgaatgggattgtgtttctgatttggctcttggcttggctgttgtgtaagaatgctagtgatttttgtacattgattttgcatcttgaaactttgctaatgttatcagctgaaggagcttttgggctaa

SEQ ID NO: 761266 - DNA, 536 bp, Homo sapiens
tacaagagcaaagaggatgggaaagaagatgccaacaaaaaatctgggaatttggaaagcagattgacaaatggaaaatggcttagctgagttgaggaaactgattctcaaccagtagagagaagaaccacaaagcaacatcatttgtgctgctgaacccctcagtgctgtagaactcatgacacctggtacctaagaaaacagtggtgaagatggctttaaaaccagtgcattgattgaaactctaagagggaattcaatctcctcctccacayggcccagcctggcacctgcccatcacctaccatggcaaggcacttcaggtttttcttttggagagggtagaacaggtccctggactaaagacacaaggtacaacccaagacaaaaaggaaccctaatggaaataagtctcacactgagtgttaagagcctcaactctcttgaaccatttagtatcctggacacagacttacattctattctctatgactggaaagttcttttctaaggaacctgaataactgaagagaaaa

SEQ ID NO: 761267 - DNA, 618 bp, Homo sapiens
tattgtcttagtaaaatgcatatgatcaaattacatttttttggagttgtaatattgcaatgttttgaaagcaataagatattttcacactgaggaagccaagttcagttgtttgttgataatttgaggaagtgcacatataagtcacatatagaaggcaccattaacttctctggtgaagaaaggcattagtatggggaattcaaaaacaattacattatatcttactctgaatggagtttacaaaattatgcttaaacatgtcaatgtctagtgtcttaaggactaacgatacttcaaattacataatgggattccaatccagtttagtttcacatgcaaccagagctctgaagagaatgaaaattatcacctctaattccaagcaaaactgacttccttatttcttcaagtttactttctctaagcaattaatattttcatttaaataacactttytgtggattagagaaagcttggtgtcagagacttgtatttaagttctgacatcttcttttactagccatgagacattgagcaaggccataaattctttgaacttcaatatcatcatttggcaagtaaaatttataatagagtgataactatactatgttc

SEQ ID NO: 761268 - DNA, 619 bp, Homo sapiens
ctggtaactaggcagagaatgttctcatgtgtctaacatggcatgacactcctctccatgaacggtagaataaatgcattcagatgaagccctgccatcattactttgtcagaaatagattctgtcaataggtcttactggtataagtgtaagagatgagaatacattttaaaagtgttgcagtgatagtatgtggtaattctaaagttttcaaaacctaaagagcagatgsgcagaataacaacttgttggtttctttgattctttgtttgtttgttttgagacagagtcttctgtcaaccaggctgaagtccagtggcccaatctcagctcactgcaacttctgcctccttagttcaagctattctcctgcctcatcctccctagtagctgggactaaaagcatgcaccaccacacctggctaatttttttgcattttttagtagggatggggatttgccatgttgtccaggctagtctggaaatcctgacctcaggtgatccacccaccttggcctcccaaagtggtgggattacaggtgtgagccacctcacccaacaagaataacaactttctaaaggagtcgttttctctctctctctctctctctctctctc

SEQ ID NO: 761269 - DNA, 619 bp, Homo sapiens
ctggtaactaggcagagaatgttctcatgtgtctaacatggcatgacactcctctccatgaacggtagaataaatgcattcagatgaagccctgccatcattactttgtcagaaatagattctgtcaataggtcttactggtataagtgtaagagatgagaatacattttaaaagtgttgcagtgatagtatgtggtaattctaaagttttcaaaacctaaagagcagatgcgcagaataacaacttgttkgtttctttgattctttgtttgtttgttttgagacagagtcttctgtcaaccaggctgaagtccagtggcccaatctcagctcactgcaacttctgcctccttagttcaagctattctcctgcctcatcctccctagtagctgggactaaaagcatgcaccaccacacctggctaatttttttgcattttttagtagggatggggatttgccatgttgtccaggctagtctggaaatcctgacctcaggtgatccacccaccttggcctcccaaagtggtgggattacaggtgtgagccacctcacccaacaagaataacaactttctaaaggagtcgttttctctctctctctctctctctctctctc

SEQ ID NO: 761270 - DNA, 505 bp, Homo sapiens
cttttttgctcacctattccctaaattaattttgacaatgtaccccttcatctaaaatttaaaattttttatcatacctttaagtagctgcaaagcatgcaatatctagcttactataaatattaacatttttagaagaaattgtatacaacttttatattgatccaaagcaatttaaatactgtatttatttactattcaacatcatcaattttaaaaattacatgaacatgctcttctttacagtcaaaattttgtcatctctttttttttcttgaacttgtatattgtccatcttcccccacagaattttactytaaagtaaaatgtatttgtgctgggcaccagatgagctgtccagattcatggtcaacgaaggactttttgctccagctgcaggggaggctctctgcagacaatcttcatctgtcagccccttcaaggattgcctcagctgtagacagccccctttctcaaggtcatgtcccttcctagaatgctacac

SEQ ID NO: 761271 - DNA, 585 bp, Homo sapiens
ccaagagagcactccataattatcaactagcattctaaatttcaattcagaatctattaccttaaatatgggtatgcttgaaagtcttttattaatcactgtcaaatttccttgaatcagtatatctatagaagtcaattttttaaaaaaaattatttttgtgacagattgtgttaagaaacagcttcaagagtaagttataattataggccaggcatggtggctcatgcctgtaatcccagcactttgggaggctggagtgcgcggatcacttgaggttgggagttcaagaccagcctggccaacatagtgaaaacccatctctactaaaaacacaaaaatcagctgggcgtggtggcacctgcctgtaatcccagctactcgggggctgaggyacgagaattgcttgaacacgggaggtggaggttgcagtgagccaagatcataccactgcactccagcctgggcgacagagtaagacttggtctcaaaaaaaaaaaaaaaagatagattaagttataattataattactagcagtatcaaattaagtctaacaacatcattgcaattcttataaataatgt

SEQ ID NO: 761272 - DNA, 585 bp, Homo sapiens
ccaagagagcactccataattatcaactagcattctaaatttcaattcagaatctattaccttaaatatgggtatgcttgaaagtcttttattaatcactgtcaaatttccttgaatcagtatatctatagaagtcaattttttaaaaaaaattatttttgtgacagattgtgttaagaaacagcttcaagagtaagttataattataggccaggcatggtggctcatgcctgtaatcccagcactttgggaggctggagtgcgcggatcacttgaggttgggagttcaagaccagcctggccaacatagtgaaaacccatctctactaaaaacacaaaaatcagctgggcgtggtggcacctgcctgtaatcccagctactcgggggctgaggcaygagaattgcttgaacacgggaggtggaggttgcagtgagccaagatcataccactgcactccagcctgggcgacagagtaagacttggtctcaaaaaaaaaaaaaaaagatagattaagttataattataattactagcagtatcaaattaagtctaacaacatcattgcaattcttataaataatgt

SEQ ID NO: 761273 - DNA, 580 bp, Homo sapiens
tatagaaggatgtagcctttgaatgacattaaaaattcactagaagtgtaaagaataatagtcataatatcacgtaagtcacaaatgtctcaaaacatagattaaaatgttctgaaatattggaatataattaaagtccatatttgagacagaagagaaaataaataatagcttatatattatattaaatttattatgtgaaaaagacttttgggaagttgttccataataaatgaagatataaataactataattaaaatttacaaaaaaaagcattaaaataaactgtgaaaaacttaaaagaatgtaaaatttaaagttattaaatttttcatctcaaaaatcataaaaaagtcatttcatcaatgtcctwtgaaaattaaaataaaacaaacttagtaatgtaacaaataaaaagagtaattaagaaaaaagtaactttcacaaatgaaagttaaaaaaaagaaaaaataatggattccatactttgtgtttaagatcagaacatagtctcaaatggttcagaaataaaaaatgtcagactcccaaatatattgtggtgattataaataataaaaa

SEQ ID NO: 761274 - DNA, 621 bp, Homo sapiens
aatatgtaattacttaattgaggtctccaactggaagtctattagctcaaacttcacatagtgaaagataagttgctctacaacccactgcccaacaaatttactttgtgcctccccaataccaacccaacctattgccagacttccctccctgtcgtacctgaataaatgatgacaccactcttcacagcagttsaggctaaaatccggtcactcttgtctattttactcataaccagcaactacctctacttagtcctaaaagggaaaaaaagtcatcttttccttgtaaacctttgcctttactctatttttctctgcaaaacaaagtttaaactttttatcaagatgtacaaatctttgcaaaatctcatacaaatctagtcttgtgaggaacttctaccttgaaaacctcatgcccctggtcacagtgaaatagatgaagagtagatatatgactcagctttggagaatatttttgctaaggtgttgaattcaagtttaaagtgactggaagcattacatgagtggctagctagcttctacctcacatatgaattgaataacgaagaaagcaggattaactagaaagcagaataaagcaagtgcccagagaggagc

SEQ ID NO: 761275 - DNA, 647 bp, Homo sapiens
taccttataaaacacaaaagatgatagcttctgtattgttccttttcttgaactatagagcaatgccattagaaattatgttctttaagcatttgatgatcccaatttctatttcagattcacttttttctgcagtaaaaaattttacagaaattgcttccaagttcagcgagagactccaggactttgacaaaagcaagtatgttctacatatatgtacatatgtgtatatgtgtgtgtrtgtatatatatatatatatatatatatatatatatatatatatatttaaaagtaaactaacatcactgttgctgaactagctttgggaatttcttgctgttttcttttttttaaatttgtcgaacttaaagtctccgggacgcatgggcagaacgtgcaggtttgttacataggtatacaagtgtcgtttcctgctgttttctgtctttccactctagcacatcctatgtagggctgccgtatctcaaaagacctactttcaacattctgagtggcaattgtgctgctcagaaatgtcagtccctccctcctgccatttgatcagttacaaaatactctgcttaacattgaaggtcctctactgtgtgaccccagctgtttccagttttatttcttgctttttcag

SEQ ID NO: 761276 - DNA, 647 bp, Homo sapiens
taccttataaaacacaaaagatgatagcttctgtattgttccttttcttgaactatagagcaatgccattagaaattatgttctttaagcatttgatgatcccaatttctatttcagattcacttttttctgcagtaaaaaattttacagaaattgcttccaagttcagcgagagactccaggactttgacaaaagcaagtatgttctacatatatgtacatatgtgtatatgtgtgtgtgtrtatatatatatatatatatatatatatatatatatatatatatttaaaagtaaactaacatcactgttgctgaactagctttgggaatttcttgctgttttcttttttttaaatttgtcgaacttaaagtctccgggacgcatgggcagaacgtgcaggtttgttacataggtatacaagtgtcgtttcctgctgttttctgtctttccactctagcacatcctatgtagggctgccgtatctcaaaagacctactttcaacattctgagtggcaattgtgctgctcagaaatgtcagtccctccctcctgccatttgatcagttacaaaatactctgcttaacattgaaggtcctctactgtgtgaccccagctgtttccagttttatttcttgctttttcag

SEQ ID NO: 761277 - DNA, 676 bp, Homo sapiens
ccgtgacctcctgggctccggggatcctcttgcctcaccctcaccatagctatggctacagatgaacaccaaaacacccagctaattttttttttttttttttgtagaaagaggagccttgctatgttgcccaagctggcctcaaactcccrccctcaagagatctgcccacctcaacaacctaagtaacaggttctacaggaaaataccactatgccgggataattatattttattaatttttatttgcatagacaggaggtcttgctgtgttgcccagggtggtctaaaactcctggactcaaaccattctcccatctctgcctcccaaagtgctgaagctacgggcataagccactgcacctggcccgacttaagatttctgtaatctagcatcccatacttcatataattgggaaaagcagtagtggtttttttttaattacttactatttcaacaagaatcaaccatctctcaccattgccagggccctggtcagaaccattatcatctcccacctggaggttgccacagcatggcctccctgcttctacccaaatcttcccacaatctttctcaactcagctgccatgggatgcttttaaatcagtagacagttcgcgtcacctctctgctcagaacccttcctcatctcccatctcagacagaataaaa

SEQ ID NO: 761278 - DNA, 625 bp, Homo sapiens
tccaagtatcaacaactgcctccatttctcccttgtcatgaccctcaaagtaatgtgagaattttagaaggatgcggcaaatcatttactttgtgatctttcggtttcagctaactccatacctctttctacaaagcctattttcccaaaaagagatcatggtctaaggtgaagcattccatgctccaatattccttacctgatgtattccaaaaggaagatgacaaaagggtttgtgttagatatggtccttcctaatttggacacttgaaaacagttcagataaaaaataaaacaaaaaataattataaaagtgttgtttacaaagctgctctggtaatatgtaaaatgttaatgaaagatatgggtttccagtggcagggtctggagaaggggtggcaggcaccagatccagccaycaaagtggcaagaagcagccctgaaatgagccaaggagatgggcgaggaggcgagggcttctaagcagaaacaaaaagaaaagacaaagaaactctggagctgaaagcaaaggctgtgggcaagggtcccctgcccaaaaggttgatttaagaaatctgtccacaagtaagttgttctttgcgtctgaggtgatggtgatccttgc

SEQ ID NO: 761279 - DNA, 602 bp, Homo sapiens
catttaaaaatgaatatgtttataaatgatctagggacagaagaaacaaaaccataattacatatcatttcacagtcaccaaataccagattgatgaaaaccaaaaatgtttctaaaaaacttttaataagaaactgtttatgataacatacagagtgaaaagaataagacgccaaaactgtgttatactatgattccacatagatttaaacagtctcttcctgggagtgctgttagcaagacagcagaataggtagtcccagctcccatctccccaataaaaatattgagtaatcaatgatttatggaccaaaatacctactaagacaataccaaaatccagtgaagaggttgtrgtaccccaggagagcacaaagccaagaaacccacgctgaaacaggtaagaagagtgatttcatcttacccacatcaacccctccctgaagctagcatgcctcagcaccagaagagaatgccctggcccctgacatctctgatgggggaaaggaaagtggtctttgctattctggcttttcagagggctgcctgggtaatggcttaatcttggttcaattgggatactgagggaactgcaatagtgt

SEQ ID NO: 761280 - DNA, 671 bp, Homo sapiens
cttaatgttgcctaatgctgcacagtctttcttgggaaaatttccatggcacttgtttccaaaggaaaacgtgatgatgcaccaaattcacatgccctccctccccttgcagatcaaccagcaaatgcaccctgaggcagcttcaactccaagtgcatgtgccaagaacaaggaaggccaccgcggctgcctcaaagtctgtgtgcttccaggaaatgtctctaatagaaataccatatcaggaaatatgtggacattcctaaaccagacaactaatcacattctaggtcagcagaaacaaaacctcccataaacagacaaacacatggtcgggggcaggacttcatgaaaagatcaaagaaaagaaacatggatggccgggcagagtggytcatgcttataatcccagcactttgggaggccgaggtgggtggatcacttgaggtcaggggttcaagaccagcttggccaaaacggtgaaaccccatctctgctaaaaacacaaaaattagccacgtatggtggcacacacctgtagtcccagctacttgggaggctgaggcaggaaaattgcttgaacccaggaggtggaggttggagtgagcagagatcgcaacattcactccggcctgggtgacagagggagattccagttaaaaaaaaaaaaaaga

SEQ ID NO: 761281 - DNA, 627 bp, Homo sapiens
ctcccaaagtgctgggattacaggcatgagccaccatgccaggccaaagtgggcactattattatgatcttcttatatggatcctaagacctatggaagtagaacaactctcaaggtcacacaaccagaagtcagcagcacgatgggttcaagttcaggtctatgtggctgcagggtctaagtcactgcctggcatgatgctattaggctggcactgggcactgtacattctcgacctagatatctacttcccaaataaacagaatgctcctctggatctcagtctataaacttagagagcagttccaggtagaaggaagtgatgtctcagtttcctatttccacagatacagaatatggctttaaaaagtcaactacaattctaaaggaacacaattttttcacagttttgttyggtgcctgaaaattacgagtaggtaagcaaagttagagcaacaatatccacagaacatggccagtcacgtaaaaaaatgcctttgaacacccagcagtttctattctattacagttctgagtttgccagacccctaattgccaacattacataataaagtgataggaccaatttttcttcaaattgatttcggttatagaaaaaagtccata

SEQ ID NO: 761282 - DNA, 547 bp, Homo sapiens
cccattcccaatgcactgctgaatgtctgaccagagtagtttaccgtaatcccatagatatgttccagatttgtctctgatgacatgtggtgggctgagagaggcttctattctgctagtgtgggtataaccaggaaccctcgtgggaggccaagggccacctcaccttgcctgagaggaggctgcaggtgattacaaagcagaggggaatgtccggctctgaagaacctccagggtcaactrcaggaaccagcacaggaagagggcagagttgctctaggaagggggcttcacaaatggggaagtgagtggactcaagtgaccccctgacatccttagtgtcattatctagggagagtcccagaggtgccacgataccagcacccttggctgtgagaactggaacgccatttcccgccctaagggttaaacagctcgtccatgttctacccttcactttgccctgcatatttctaattaaaagaaagaaaagaacactcttacccatgaggaattttgctcaggacgtaatatccagtatacgagt

SEQ ID NO: 761283 - DNA, 578 bp, Homo sapiens
aataaacaacagcacttaaatcccaacaatctggtgctttcagagatcttgagactcctgaaccagaaatatgcggcccggggccccttgctttgagggcagcagatgggaaagtgctgctttagtcataaagaaacagccactaacagacaggactgtctaggagagctttatggagctgctacagcaatctaataaggaacacaggaacttaactcctttttctatttctgccgggatgagtggtgctgcttgcccaggagaaggaaggaagggcctggtgctggctcctgtgtcctgagcaggtcaccrctcagagaggacccattaaaggaccccatgctgcactgtgactaagccatgcctgtgtgagctggaacggcttcttcagatgcaagagcaggaagctagacagagctgatctcaggtttccatggttatggtatatggtatattatatagagtttctgaactctccctccaaaaccgccttttcatatgattgatctcactttgttttcatagcatccctagggggcagaagttacctttggtcaggtaagaaactgaggcacaga

SEQ ID NO: 761284 - DNA, 570 bp, Homo sapiens
agttcatggccacacctggttctgtgtaggaccacatgccttgtatgtcccattacattgaaatcttttcagactgtgatgaaggaaatacagattttttttttttttttgagacagagtctcgctctgttgcccaggctggagtgcagtggctcaatctcgactcactgaaatcttcacctcccaggttcaagcgattctcctgcctcagcctcctgagtagctgggattacaggcatgcaccgccacgtccagctaatttttgtatttttagtagagacggggtttcaccatgttgaccaggctggtctcaaactcctgaccttaagtgatctgctctcctcagcctcccaaagtgctgagattacaggtgtgagccactgcacctggccaaaatacagattattttwaaaaagacattgaatgtttagaactgaattaaactgataactgcaggtttttgtttgtttgtttgtttgttttgttttgtttgtaagaagggatgcttatattcacagagtttgaaaaacaagtgacctaagccaacccctcattttacagtagaagaaa

SEQ ID NO: 761285 - DNA, 667 bp, Homo sapiens
tttcaaacaaaacggatcctgcttgaaaatgttttgtcaaggaaataaaaatgaaattacaaatgcaagtgattgttctatttgtctttagattattttatcctttgagggaacaaacaccatctataaaatagatctcactatttcatccacaaacaaaatacagtgcttttagtggcatccaagtgttatacagttggcagttacagttatccaaaaagtttgaaccacgatagtacaaatgcaaattatttctcactaaaatgtgggcatttcctctcaaacaattttttttttttttttgagacggtctcactatatcactgaggctggagtgcagtggtgcaatcacagctcatggcagcctcaacttcctgggctcaggtgattctcccacctcagcctcccaagtagctgggactatgggcgtgcaccaccatgcctggctaatttttaaaatttgttgtagagacagggttttgccatgttgcccaggctggtcttgaactcytggactcaagcaatcctcccactttggctgggattacagccatgagccactgtgccagtccaaataatttcttaaattcccatggtaatgcatatacttggacttctcagattcaaaggccattatatattaattgtataagcacttaacacattt

SEQ ID NO: 761286 - DNA, 616 bp, Homo sapiens
ttttagtagagacggggtttctgcatgttggtcaggctggtctcaaactcccgacctcaggtgatccgtctgcctcagcctcccaaagtgctaggattacaagcatgagccactgtgcctggtccactgtttttttattgttaaaatgaycttgcattcctgcaatcaatactacttgatcaagatttattatttccttaaattgctggacttaatttgccaatatttccttaaagattttgtgtttacagtcatgagggatatttgtagtactctgttttagtgatgtctttgtctggttttagtatcaggataaatactggtcttgtaaaaagtactttagaaattagaacaggttcatacatttcccaacttattttagttgtgaagtaagttgggaaatttatgaacctgttccagtttctaaaataatttaagaatagtaattaattattcatgaaatgatagtcacctttgacagacatcatgctagaaggaaaatcatggccatctttttattggcctcttattgctattttccactttaatcgtatgtagcttgatgaagttatattgtacatgattggataattttctattaaatcaaaggcaaaat

SEQ ID NO: 761287 - DNA, 616 bp, Homo sapiens
ttttagtagagacggggtttctgcatgttggtcaggctggtctcaaactcccgacctcaggtgatccgtctgcctcagcctcccaaagtgctaggattacaagcatgagccactgtgcctggtccactgtttttttattgttaaaatgatcttgcattcctgcaaycaatactacttgatcaagatttattatttccttaaattgctggacttaatttgccaatatttccttaaagattttgtgtttacagtcatgagggatatttgtagtactctgttttagtgatgtctttgtctggttttagtatcaggataaatactggtcttgtaaaaagtactttagaaattagaacaggttcatacatttcccaacttattttagttgtgaagtaagttgggaaatttatgaacctgttccagtttctaaaataatttaagaatagtaattaattattcatgaaatgatagtcacctttgacagacatcatgctagaaggaaaatcatggccatctttttattggcctcttattgctattttccactttaatcgtatgtagcttgatgaagttatattgtacatgattggataattttctattaaatcaaaggcaaaat

SEQ ID NO: 761288 - DNA, 576 bp, Homo sapiens
attagcatgtgattttcaacatgtgaaattagtcattttaggtgtcatatccaaatactgaaagtagttgaggggggttatattaaatgtttatttgttttgttttttgagatggagtcttgctctgttgcccagagcagtgcaggagtgcagtggcacgatctcagctcactgcaagctccatctcctaggttcatgccattctactgcctcagcctcctgagtagctgggactacaggcacccaccaccacayctggctaattttgtttttgtatttttagtagagatggggtttcaccgtgttagccaggatggtctcgatctcctgacctcgtgatccgctggcctcagcctcccaaagtgctgggattacaggtgtgagccaccatgcccagcctatactaaatgatttctaatgtcctctctcccactatgttcatgaaataccttagtactaacttaactgtattattcccatcatccagcccaccaaatctacgaccatacccattgcttctttctgtaaacgtaaaaccatttcttcaatttcatcttttgactcttctttaggagg

SEQ ID NO: 761289 - DNA, 627 bp, Homo sapiens
gaggatccaccagactgtttttcaaagtggctgtaccatttacattcccagtggcaattcaaagggttccaatcctcaccaatttatttattataaccaccttagtgtgtttgaagtagtctcccaatgtggggtcttccctaactccaatagttagtgtcagaattgaaatgaattgtagaacacccagttggtgtccagaaagttggagaattggttgtgggggaccctgccccaacatttcatgtcagaagtggtatgagtaaaacayaccagaggaactaaaaagtacagtaactaaaattaaaaaaatacattggagagttccaaaagcagatttgaggaagcagaagaatcagcaaccttgaaaataggacaactgcaatgatcaaatctgagaaaaaaaaaagaatgaaaaaaaaataaacagggcctaaagggtctgtgggatgatataaagcagaccaacacacatgttgtgtgaatctcaacagaaaagagagagaaaagaagcataaaggatattttaagaaataatggctgaaaacttcccaaatttgatgaaatacattaatctataaactcaagtgtccaacaaactccaagtatgataaaagtatgataaac

SEQ ID NO: 761290 - DNA, 583 bp, Homo sapiens
agacaaggatgcccattctcactacttctattcaatatagtaccagaggtctttgccagagcaagtaagcaagagaaataaataaaaggcatccaaacaggtaaggaaatagtgaaattgttgctgtttgctgatgatgtaatcttgtatatrtaaaaccctaaagtccccaccaaaaaaactgttagaactaataaatggatacagtaaagttgcaggattccaaaacaatatgaaaactagtagcatttctggccaggcatggtggctcatacctgtaatcctagcactttgagaggccgagatgggtgaatcacttgcagccaggagttcgagaccagcctggccaacatggtgaaactcatctctactaaaaatacaaaaattagccgggcgaggtggtaggcacctgtagtcccagctactcgggaggctgaggcaggagaatcacttgaacccaggaggcagaggttgcagtgagctgagtttgcaccactgcactccagcctgggcgacagaacgagacttcatctcaaaaaacaaaacaaaacaaaacaacaacaacaaaaaaaaactagtaaca

SEQ ID NO: 761291 - DNA, 583 bp, Homo sapiens
agacaaggatgcccattctcactacttctattcaatatagtaccagaggtctttgccagagcaagtaagcaagagaaataaataaaaggcatccaaacaggtaaggaaatagtgaaattgttgctgtttgctgatgatgtaatcttgtatatgtaaaaccctaaagtccccaccaaaaaaactgttagaactaataaatggatacagtaaagttgcaggattccaaaacaatatgaaaactagtagcatttctggccaggcatggtggctcatacctgtaatcctagcactytgagaggccgagatgggtgaatcacttgcagccaggagttcgagaccagcctggccaacatggtgaaactcatctctactaaaaatacaaaaattagccgggcgaggtggtaggcacctgtagtcccagctactcgggaggctgaggcaggagaatcacttgaacccaggaggcagaggttgcagtgagctgagtttgcaccactgcactccagcctgggcgacagaacgagacttcatctcaaaaaacaaaacaaaacaaaacaacaacaacaaaaaaaaactagtaaca

SEQ ID NO: 761292 - DNA, 644 bp, Homo sapiens
gggggacagaagcttatatgccatcttgaggctacagaaagaatggaggctctggcatggccaaaaacatgttattggggtaaatcaggttacagtgacaagacaggctatgggaggcagagaagaggaggcctggatagcaaaagtggtgttgttatgtagatgaaaccttacaggtagcagccctcaaagagaatagatggtaaatgtttcttttagacctttcaaggcatcagattctcagttaactttggtcctaaatcagacaagggaaggccctcagagaaggcctgactgcatgaatgcagattttctctacagttgcaaatcccctccacaaaagacagctttacrgggttacttcagttttgctggctctctgaacacccatctcaaaatatgtcaagaaagtatatcttagggtaaaatgttttgatttccttcaaggtgaaatgagtccactaatatctaattcagagaaattttataattttcattagaaattttgtcagaatgaaagctcagtcagtggtacaacagatatttgtggggtgggtcagtagtgtgaatggcagaagtcaggtaggtattggtggtggcagtgaaaagtatagaattaagagaatattgcataacagattgtg

SEQ ID NO: 761293 - DNA, 609 bp, Homo sapiens
tattctaaagtataactgaagcacggaacagagacaaaaaaaaatccaaaaaaaaaaaaaaaaagcggcccaagacccgtttgccctgaagaagacaatcacaattaggtgtattaattcttgttattatatttagtgatcctaaaggagttccagaatacccacctattttaaaaagaaaattatatgaatccaagtgacaagaacattagtcagaagcaaatgtgaaatagtagtttctattggcagggattcagaaaatagatgccaatgtttytcaaccttaattgtagtgaaaaagataaataaccacgcaaaaattctagcagaaggagtagcatattgtatctgcccaatccttatgacataagctataattatttgtccaaatcatcaactttgaagatcagatttttagggtacaagatattattagtgaacgtcccataatacatctatggcagaaacctctccatatagaatggcatactgtgctcacaaaataaaaaggtgcttctgagggtaaaacataataatgctgactggaaatgttacctaaaaattaagagttttaggatttttttctctattggtcacactcccaattca

SEQ ID NO: 761294 - DNA, 609 bp, Homo sapiens
tattctaaagtataactgaagcacggaacagagacaaaaaaaaatccaaaaaaaaaaaaaaaaagcggcccaagacccgtttgccctgaagaagacaatcacaattaggtgtattaattcttgttattatatttagtgatcctaaaggagttccagaatacccacctattttaaaaagaaaattatatgaatccaagtgacaagaacattagtcagaagcaaatgtgaaatagtagtttctattggcagggattcagaaaatagatgccaatgtttctcaaccttaattgtagtgaaaaagataaataaccacgcaaaaattytagcagaaggagtagcatattgtatctgcccaatccttatgacataagctataattatttgtccaaatcatcaactttgaagatcagatttttagggtacaagatattattagtgaacgtcccataatacatctatggcagaaacctctccatatagaatggcatactgtgctcacaaaataaaaaggtgcttctgagggtaaaacataataatgctgactggaaatgttacctaaaaattaagagttttaggatttttttctctattggtcacactcccaattca

SEQ ID NO: 761295 - DNA, 589 bp, Homo sapiens
agcaatttactgagcagtttctctgtgacagacattgcacatggatatttcaagcattatcactttaaattcacacatcaagtccatgtgattgtttgtgaatgctttatagataaagaactgaagcttagagaagttatttaatttttccaggatagaaagctttgaaaatgactaagccaacatttaaaatacatttgctggactccaaacgtagtgctccttccagtgttatgcaatgccccccataaagaaattatgaagtgccatgggaaagagcagatgaaaatgggaaaatatagagtgataaactcaatgttaggaaaggctttcatgataagatgtcttcctcctcaagaagatgtgcattttaaaatagcattgtggagaaaagtcaataaytagagttactaccaatatatttgaggtagaggtttctttgtgagggctctcaaatcattacatgtgcacccaggccccagcagagaacagccatctgggaggcaatggtcatgaagagcttggggtgaaatcatacttcctttgacagtattctatgccatagagttggctcatatttttcccctgg

SEQ ID NO: 761296 - DNA, 519 bp, Homo sapiens
cttccatccaatcaagttggcactcaatattaactattacaaatgtctttgctactgtgaatagcacaactatgaacatatgagtggatttgtctttttgtataatagtctattttcctttggtatacacccagtaatgggactgctaggttcaatggcagctttcctttaagttcctagggaaatctccaaactgtttttcacagcggctgaactaatttacattcccacggtatataagcagtcccttttcttagaagcctcaccagcatctgttgttttttgactttttaataatagctattctgacggggataagttgttatataattgtggttatgatttgyatttctctgatgattagtgatgttaagcatttattcatgtttgttggacacttttatgtcttattttgcaaaatgtctgtccatgtcctttgcccattttttaatgaggttgttttttgcttgttgattcgtttcagttccttctagattctggatattagatcattgtcaa

SEQ ID NO: 761297 - DNA, 473 bp, Homo sapiens
gtcccagctacttgggaggctgaggcaggagaatggcatgaacccaagaggcgaagcttgcggtgagctgagatcacgccaccgtactccagcctgggtgacagagcgagacttcacctcaaaaaaaaaaaaaagtgtaggttctaagccttattgactgtgtttggacatggactttactacacagttgttgagtgatctttggcaaattattyaacctccttgtgcctcatatcccatatgtataaaatcaataatacaatgttaccaaacatatcacattgtgtacatgaaatatatacagttatttgtatatcagttgtacttcaataaagctggtaaaaaattcagccacataaaatgtgtactccaataaaaagtggtaccacctgcagagatccatgggattaaatttgcttgcctgtgtacatgggcagcatttaaatcaaaatggcattattaaatactcaatg

SEQ ID NO: 761298 - DNA, 656 bp, Homo sapiens
ttccatcctgagttaactccaaatgattcttataaacagggattaataaagtactgtggaattctcagagggaatattttcttcatttacacatttgtatatttgtccatcacaatttctgctatataagcccttgggtatctgattgtggatttgatgaggaagctattgaattattactaattattgttggactcatatttaaaaagctctggactgaatatgactttaccaaattactatttttaagtataaaatatttaaaaattacatttttaatttataatatacatatgtattggaaggctgaggcgggcggatcatgaggtcaggagattgagaccatcctggctaacacggtgaaaccccgtatctactaaaaatacaaataattagccaggygtggtggtgggcacctgtagttccagctactggggaggctgaggcaggagaatgacgtgaacccaggaggcggagctttcagtgagccgagatcatgccactgcactccagcctgggcgacagagcaagactctgtctcaataataataatagtaataataatattaataatatgtaataagcaatatttgcaatatatatgtaatatgcaatattacatggttgtgtgattaaacaatttaatttcatttata

SEQ ID NO: 761299 - DNA, 656 bp, Homo sapiens
ttccatcctgagttaactccaaatgattcttataaacagggattaataaagtactgtggaattctcagagggaatattttcttcatttacacatttgtatatttgtccatcacaatttctgctatataagcccttgggtatctgattgtggatttgatgaggaagctattgaattattactaattattgttggactcatatttaaaaagctctggactgaatatgactttaccaaattactatttttaagtataaaatatttaaaaattacatttttaatttataatatacatatgtattggaaggctgaggcgggcggatcatgaggtcaggagattgagaccatcctggctaacacggtgaaaccccgtatctactaaaaatacaaataattagccaggcgtggtggtgggcacctgtagttccagctactggggaggctgaggcaggagaatgacgtgaacccaggaggcggagctttcagtgagccgagatcaygccactgcactccagcctgggcgacagagcaagactctgtctcaataataataatagtaataataatattaataatatgtaataagcaatatttgcaatatatatgtaatatgcaatattacatggttgtgtgattaaacaatttaatttcatttata

SEQ ID NO: 761300 - DNA, 565 bp, Homo sapiens
ctctcacaatgactgtcttcctcaagtaggttaccagtcaaatgctcaaaataccaatgctactagatttcatatcaattatttatgttaaagacaaaatcctgaagtatttaacaaattgttgcagtctgtgacgcccataacaattgagcgtagcctgttatagtggacttgtagagagcaatggacttgaagtcaggagtttgaacacttgtttactgaatatgcaactctaagtcagtttatgaacttctttggacctrtaaaacacctgctttcccggctgatggggtctctggaaaatctataaaaaacacagctagaaaaatatttagtgcacacagcgagctagttctcttgtgacctacacatgaaagatgtcattgttattatttttctctttgcaattacagctccatcctttactaggaattctttgtgctttacgtctaaggacatgatagtaattcgttcctcaaatattctgagtacctactggtactaggcactgtggatactgtaaaatcagagcaacagggtcaaaacttaactcagaattaactat

SEQ ID NO: 761301 - DNA, 572 bp, Homo sapiens
attcaggaaaaaaaaatcaggggtatgggttctggaggtgattctaaaggaaaaaaaaaattttgatcattatcaaacttttttatcagcatcaatgtatgccagaaaaaaatgggatcacgtattttatattttcacaggggaaaatttttttttgagacagggcctcttttgtcacccaggctggagtgcagtggcacaatcttggctcactgcagcctcaacttcctgggctcaggtgattctcctacrtcagtctcctgagtagctggaaccacaggtgtacaccaccatgcctggctaattttcatattttttgtaggaatggggtttgttcacccatgttgccaggctggtttctaactcctggactcaagcaatgaccttgtgtcatcctcccaaagtgtttggattacaggcctgaaccacggtgcctgatcagcaaagctccataatattaaaagcaaaaagtagtattataaacttgtaaggactcagaaaacattgttgccaggagcccttccagcggaatctgtgagtggatcagatagctctactcacaaaatgacaaa

SEQ ID NO: 761302 - DNA, 612 bp, Homo sapiens
cttacttcatagcactagttactttttacagaaaacctcaagaaagataatttaataaattcctctatttatgaagttcaggacccatcaggtctgtgtgaagaagagaattctgggtggcaacatagtctctgaattctttctcttagaccacatctccccagagatgaatgtattatgtttaagacatgttctctttttatgtattagataaaatatatttaaamcaccttctggagaatgtttagactcttgaaaagtcacatatagtggtaatggaaaaataatttctagaaataattagtagtacaagaaatagacaattataaaaattatttttattatcaatttattatttattattgaataaaaagagtaaatcaacatctccctttcccaactttttggtgtaagtagaaaaaaaaaacccaccagagttggatacacagtttaagagctgagttatccctagaagagatctgaatagatcagaaaaacaggcctagagttttaaaactctgattttaaatgccagagtcctatcaaaaatagtaagtggaatgcgactggttcctcacttaagatttcatgacttaaggaaaaagcaaaatc

SEQ ID NO: 761303 - DNA, 627 bp, Homo sapiens
cctttaaacataaacacacataaaattatatatttattatttgatgaacatgttatgactagaggcttgcaggaccctaatgttgtatttcccctaggatcaatagtttagtattcactaattcaatgtttgcagtgagtttataggatataactaccacaaataatgataatgagaatcaatagatagataggtacctagatagatagatagatagatagatagatagatagatagatagatagatagattgattaggtaaggacagataratacatagatagctacatacataaatacatagatagatagatagatagatagatagatagatagatagataggacagacagacagatgtggaaagatagagatattgagtgatttttccaaagcaatctgggaagaggagaagggaagaagatgtgcactgagagaagaaatgcctcagatatatcctgagtctggagtaagacctggcttagaatcctggtttatatgtcagataagaaatgctgtttatagagaacgagtacatatatgtcttttactattgtagcttctgaaaacatcagtttcctcattgaacacgtatttatataatactgaacagtatttatataatac

SEQ ID NO: 761304 - DNA, 627 bp, Homo sapiens
cctttaaacataaacacacataaaattatatatttattatttgatgaacatgttatgactagaggcttgcaggaccctaatgttgtatttcccctaggatcaatagtttagtattcactaattcaatgtttgcagtgagtttataggatataactaccacaaataatgataatgagaatcaatagatagataggtacctagatagatagatagatagatagatagatagatagatagatagatagatagattgattaggtaaggacagatagatacatagatagmtacatacataaatacatagatagatagatagatagatagatagatagatagatagataggacagacagacagatgtggaaagatagagatattgagtgatttttccaaagcaatctgggaagaggagaagggaagaagatgtgcactgagagaagaaatgcctcagatatatcctgagtctggagtaagacctggcttagaatcctggtttatatgtcagataagaaatgctgtttatagagaacgagtacatatatgtcttttactattgtagcttctgaaaacatcagtttcctcattgaacacgtatttatataatactgaacagtatttatataatac

SEQ ID NO: 761305 - DNA, 627 bp, Homo sapiens
cctttaaacataaacacacataaaattatatatttattatttgatgaacatgttatgactagaggcttgcaggaccctaatgttgtatttcccctaggatcaatagtttagtattcactaattcaatgtttgcagtgagtttataggatataactaccacaaataatgataatgagaatcaatagatagataggtacctagatagatagatagatagatagatagatagatagatagatagatagatagattgattaggtaaggacagatagatacatagatagctacatacataaatasatagatagatagatagatagatagatagatagatagatagataggacagacagacagatgtggaaagatagagatattgagtgatttttccaaagcaatctgggaagaggagaagggaagaagatgtgcactgagagaagaaatgcctcagatatatcctgagtctggagtaagacctggcttagaatcctggtttatatgtcagataagaaatgctgtttatagagaacgagtacatatatgtcttttactattgtagcttctgaaaacatcagtttcctcattgaacacgtatttatataatactgaacagtatttatataatac

SEQ ID NO: 761306 - DNA, 611 bp, Homo sapiens
accacccaagcaagcctttccaaattcccgattcgcataaactatgaaagataataaaatgatttttgttttgagtcactacattttgggataatatgttatgcaacaatagtaaccagaacacctggtgattgattgctgctgatgcccattagttagcyttcatgtctccaggctctctcacttccagtatacatactacccaccacctacacttatcctgtccatttccagaaattttccatgactcaaattattgaaaagttaataagagaactccttatactaccaatttatgtcaatcctaatctggatctatcttttttccatttcttgtacacaggcctgctagagacccaagttgaaataaaacttttgccttacactttggagactttctcttcaatgtgaatttaccggggtgtttcctttgttctaggacagtgttcctcccatatcttttcctacatatatacacattctacccacccattctggtccagcttgaatttcaccttttaaacgaaagcttttgtaattccttcaaaaagaaaggatcctctccaaaactcggcatatacatctctttttgtgctgtcatattttcatgt

SEQ ID NO: 761307 - DNA, 611 bp, Homo sapiens
accacccaagcaagcctttccaaattcccgattcgcataaactatgaaagataataaaatgatttttgttttgagtcactacattttgggataatatgttatgcaacaatagtaaccagaacacctggtgattgattgctgctgatgcccattagttagccttcatgtctccaggctctctcacttccagtatacatactacccaccacctacacttatcctgtccatttccagaaattttccatgactcaaattattgaaaagttaataagagaactccttatactaccaatttatgtcaatcctaatctggatctatcttttttccatttcttgtacacaggccygctagagacccaagttgaaataaaacttttgccttacactttggagactttctcttcaatgtgaatttaccggggtgtttcctttgttctaggacagtgttcctcccatatcttttcctacatatatacacattctacccacccattctggtccagcttgaatttcaccttttaaacgaaagcttttgtaattccttcaaaaagaaaggatcctctccaaaactcggcatatacatctctttttgtgctgtcatattttcatgt

SEQ ID NO: 761308 - DNA, 620 bp, Homo sapiens
aatttttaaagaattattgatgtaaagcttataagtaatgtttagccttagttcaaaattaatgtttcctggtgaaaagattacagcgtcaataatctaggacaagaagatgatgggaaagaagttctgcaaccagctcccttaaaagacagctcagagttcaccatcaataaaaaatgagctcattcttcagcaagtacagtttcacagtcacatgttctgggctctcatttgttgcaagatgtaaaaaatattttattcctttatcctgggagcttcattgtcattttctttttctggtttctttgacacaactctaagcccaaaagagaattgccatacacacacacaaagccttccttcactagatcatcattaccatcagttttaactgaaaataaggtttaagtttaaaatatatacactattttttcaactccccagtagagtctgtcaargtcagaactggccaaacattacagtggcctcattgtctaattgatgcctgcaggaatctttgcacgaagtggatgaggggataatcattggttacaatttataatactccatggtcatattttattagtttaatgggccttttccagggttttcttgggatt

SEQ ID NO: 761309 - DNA, 582 bp, Homo sapiens
ataatacaatttgctaacagatgctaaggtaaacaaaaaattgattatgatagttaatttacacaaggataagttataagctaaaatatttttttcccttaacaaaatattatgtatcatttatttatttatttttttgaaacggagtctcgctccatcgcccaggttggagtgcagtggcgccatctcagctcactgcaacctccacctcctgggttcaagttattctcctgcctcagcctcccaagtagctggaattacaggcacgtgccaccatgcccrgctaatttttgtatttttagtagagacggggtttcaccatattggtcaggctggtcttgaactcctgatttcgtgatccacccaccttggcctcccaaagtgctgggattacaggcatgagtcaccgcgcctggccatataatttctaaagatcaaaaggaattaaaataaatgggcaaaaatgaaaactcagctatagcttttgaaaactcattcataccttatgagaaagctgttattttaatagctatattggtagtataaaccaagctttgaaaagccatttgtatataacatgta

SEQ ID NO: 761310 - DNA, 582 bp, Homo sapiens
ataatacaatttgctaacagatgctaaggtaaacaaaaaattgattatgatagttaatttacacaaggataagttataagctaaaatatttttttcccttaacaaaatattatgtatcatttatttatttatttttttgaaacggagtctcgctccatcgcccaggttggagtgcagtggcgccatctcagctcactgcaacctccacctcctgggttcaagttattctcctgcctcagcctcccaagtagctggaattacaggcacgtgccaccatgcccagctaatttttgtatttttagtagagacggggtttcaccatattggtcaggctggtcttgaactcctgatttcgtgatccacccaccttggcctcccaaagtgctgggattacaggcatgagtcaccgcgcctggccatataatttctaaagatcwaaaggaattaaaataaatgggcaaaaatgaaaactcagctatagcttttgaaaactcattcataccttatgagaaagctgttattttaatagctatattggtagtataaaccaagctttgaaaagccatttgtatataacatgta

SEQ ID NO: 761311 - DNA, 500 bp, Homo sapiens
ttatgtgaagctaggatggctctttgaagcttaggggaaaaagtgattaccaaactaagtgaactagaaaagccaatgctacattccacaacaaaggaggatctaaatactcagagaagtgagcctgtgagagtggatacaccataaaaggycaaaaatcccatgagataaccatgtccaccggatgaccagagaatacgtccactaggaaagcagtaaggtgagaggagcagcaacatcattgagaagctcagttgtggttctctaagatgatagtagagagtatgttattagagaactacactccctgaaagcaatttagattatagactcctgagaaagcagaggccagccagaagcacgtaaatgtcaaaagcaagatgggcacaattatggaaaagaacagcaaggtggtaagggctatcaggatatcctgaaccatagaacgctaggaagatagtcaatagaacatagaatctttaaagggctgaaagatggga

SEQ ID NO: 761312 - DNA, 649 bp, Homo sapiens
atactaagaaacgggaagcctcacatatttctgatgataaagtaaaatggtacaattttgaaaaacagcttggtaatttcttaaaaacataaatataaacttaccatacaacccagtggttccactcctaggaatctactcaagagaaataaaaacatatgtctacacaaaaatttgtatgtgaatgttcacagcagcattattcataataggcaaacatgggaaacaacccaaatgtccatcaactgatgaatggaaacaatatgtggyatatccttaaaatggaatattattcaacaataaaaaggaacaaaatactgatatatcctgcaatacgaagaacttcaaaaatgttacacaaagagctagaaacaaaagattacatactataattctattaacataaaatgtccagaaaaagtagcaagattaactttctaacaatcaccaccactatcatcatttattgagtatcaatatattccagtattttgtatcttaaaagcttactggcaaacgtcaacatcagtgactatcatcttaacttatacatcgacattttacttgatatagttttaaccaaaaaaaaaaaagttataagttcactaggacttatctagtttatacacaggttaaatgctttaaaaaa

SEQ ID NO: 761313 - DNA, 621 bp, Homo sapiens
gtttcattgatctgtttattcttcactaataccacattgttttaaatattagagttttataatatgtcttgatacacggtaggcaaatttaccttatgattcttgctcaaagttgtgttggctattttgtgcattttctctttcacatgggattttgtagttagcttgtcaattttttttttttttttttttttaatgagacagagtttcgctctgtcactcaggctggagtgcaatggcatgatcttggctcactgcaacctctgcatcccaggttcaggtgattctcccgcctcagcctcccaagtagctgggatcacaggcacctaccaccaaacccagaaaatttttgtagtttttagtagagacgaagtttcaccatgttggccaggctggtctcgaactcctgacctcagatgatctgcctaccttggcctcccaaagtgctgggattagagstgtgagccgccacacctggctagcttgtcaaattttatgaaaaaatattttataattttaattgggattatattaaattatagattaatttgtggaaggttatcagctttagaaatattgagttttccctccaggaacataaatatttctggcctttttaca

SEQ ID NO: 761314 - DNA, 674 bp, Homo sapiens
tttagagggaggaaaatttcactgtgggctgcagtttcagtgaggggggacaacttgaacagaagccttaaattgagaggttgagaaggtgagaaaggagaggacttgctacctgtgagagactccccaccctccttaaatcatgtacaatatcctagtaacgtttccttctcaacatctcctggatctctccttgccattgccttcagagcctcgtgtttcatccattcttaactttcttccctgtgtccatttccacatccttccaacccaccctgctcatttgtgcaatagtgatctttytaaagcacccatctgatcatgttgttctcctggtaaaaagttttctatggctccctctatccacattctaaagtcaaatggtgtcaggaaccaggctggtaagttaaatattttaagtggctttgttcaagacaaagaggagtaagagagactccagtgaagggaatgagagagtttaccatgtcctttctagaggagtttagaatcaataaaagaatgttgcactccaaattataccatgaaggctagcatatggtctctgaactacgggattaaatccaaagtcctcagtatgataccccaggcttttgtgatctgggccctgccttactctcatgcgtttactgttgctttgtcccacacttcaaatt

SEQ ID NO: 761315 - DNA, 496 bp, Homo sapiens
catgatatgtgatacaaactatggaaccgtggtcatagggccatcttatttgctgtacaataggtccccctgctcagatgctatgtcataagggattccatgccggtggattatttattccataagcttgcagatagtggtgctggctgaggctctgtgggtaggaaaggcaaacccacatctgaaataggtatctatctatacctatgaagatgaaycacaggtacttttgaggtaggttggacactcagaggcaacagtagggagatatcttggtaagtggaagtccatattttgagcccacaggtagccttcgtttctgccactgtaacctcttgattcacaggcctttcatgtaagttatatggcagccaatgacaaaggctggctactgtcaattggcaaattcattttgtctacttggctatttagtccctctactgtgatggatactttctggtaggtataattgtgtgatgcagaaatctttatcctt

SEQ ID NO: 761316 - DNA, 681 bp, Homo sapiens
ggctatgcttcactacagacactcctgtaccaaaccttctgggttgtgcccaggctggaattctgcctctacctcttctctaagcagctttccttaccaactcaagtatctgtggtagtcgaggggtctcttcctgctaggaatccaaaggcctatgatgacaacaggttgctccttgcctgttcgattcaccacctccgcagcagtaattgggtgctaggaacaaattccagtgtatggtagccccatgtcaggttcccaactttctccctcttcagccaagcctctgtgtctttcctctgtgtgctctcagtgccttgcctctgaagatctgctagaattgcaccagtctgcacaatgtctctgtccctcagtgtgagatgtgccacttggctgtggctagtcagcaatcttggagaagaaggagttttgttttttaaatttagttttgccattagaaagatgtatagaaaataaaatatttagtcataaaakttggcatttatttatattttcaagactgtcatttcaaatgtaaaatttaagactaatacaaagtatttttacgtcagttacttaagaatgaataacttcagaaaactgaaaaagtttaaagtaacaaataataaattttttgttatgtttgtctctggatccaattgtattactcctaaaatctca

SEQ ID NO: 761317 - DNA, 593 bp, Homo sapiens
atacaatctaccagaattgaatcaagaaaaaaaaagaaagaaaatctggactgaccaataatgagttaccaaattgaagaaataatagaaagtctcccataaaaaaagtgaaggactgttagtttaactgctgaattctacagaacatttaagaaaaaatgaatatcaattcttcaaaaaatattccgataaattgaaaataggagaatccttcaaaattcattgtgtaaggccagtattaccctcatgccaaagccagacaagggcacaacaacaacaaaagaaaattgtaggtcaaaaaaaaaaaaagaaaattataggccaaaaaagaaaattataggccaatattcccaacgaacatagatgcaatgcatcaataatacccaaaacaayctacagattcaatgcaatctctatcaactttccaatgttgttcttcacagaaatagaaaaaagcaattttataatttgtatggaaccacaaaagactgaatagccaaagcaatcttaaacaaaaagaacaaagttgaagtcattacactatctaattttaatctaaactataagtctgtagtaaccaaaacaatatagta

SEQ ID NO: 761318 - DNA, 583 bp, Homo sapiens
ttcagatcctaagatttcagaggatataaagaaacacccagatgttcaggtagaagtatggtacaggggtagagccctcatggataacctctactaaagaagtgcagaggggaaacgtggagttggagcccccacaaatggcccccactggggcactgcctattggagctgtgaggaaagagccacgatcctcaagaacccagaatggtagatgcacaaacagcttgcatcatgcacctgataaagctgcagacactcaacgccagtctgtgaaagcagctgtgggggctttaccctgtagggccagaggggcagagcttcccaaggccttgtgagcccagtccttgcatcgatgttgcctggatrtgagacatgtagtccaaggtgatagttttggagtgttaagatgtaatgactgccctgctgggtttcagactttcatgggtcctgttgcccctttgttttgcccaatttctcccttttggattgggagtgtttgcccaatgcctgtgccaccattgtattttggaagtaactagtaacttgtttttaatttttcaggtttataggtgaaagggacttg

SEQ ID NO: 761319 - DNA, 646 bp, Homo sapiens
ggaagtgccttaatagaattttgtcatcctatttcaagaccttagaatgtttatttagataagcattttgttatttatttttttcatttaagatgcaatggatatatttgttagaaataattgatttttagattaaaatttttattgctatcatgaacagtatattaattttttatatttccttattgttgcaaaggcattttagtctttttctatatgttttcagtatagctacatttattaaatcttagtagttttgatagcttaycatttagtttcagcttatttgattcttaatttcagcactgtttcatctccttatactgaatctttccattcatttttatttttcatttgtagcagaaccaatgaaattagataagcgaatgactcttaaacccgatcattttttttcttttcttttcttttttttcctctcatgttcttaccatgagaggtttgatctaccttcttaacaagtttaagtgtaaacatagcagtacaatgcacaaccttgatctagtctatttacagtaaaggtggcatgatgaaaagatgatcctgttcacttaactaaatgcaactttggtatcctaaacaaaataaaaagtcatttttaatgaataagtgacttatatagccctgc

SEQ ID NO: 761320 - DNA, 703 bp, Homo sapiens
gttgttcaaacctgaactgaccagatcagtacccttaaaacctggatccataattgcatcagatacgcaatgcatttgtcatcataggctgggcacaaaataaatagctatatgtttctgatgcggaagacaccaatgcattgcacacttgtgattcctgccaaaatgtgaccttcttgggcccatggtagaaaaagtcacattttatgggacttttatcctgcctgttctttgaagatagattgcacccttgacatctgaagcactcccagaactttcaatactaatttctgttggcattcttttactttaaggtgtttgtataccaaaataatcagccaacttacaccacacaattgtgaccattgaacttaatgtgtggtatgtttctggctttccagaccatccacagtctcacaagtctgtgccttttgttrcaaatgctgtgcaacaatgggccagtattcaagaaattttactggtaatttcaagccctctaccatctgcaggtatatgatattattgagctgtgttatgaattcctaaaaaatcaacttaaaacattgcctgactctacctcccatactttacttgttcatacaacttagttaaacaatttaattactaagtgttggtatacccagaacaggtcagcttgttttggctaggttttggctaatgattagaatacaaaagtgttaca

SEQ ID NO: 761321 - DNA, 663 bp, Homo sapiens
ttacgtttattcctgtgtatgttgtttcctctatctactgatatttacagaattcttaggtttttttttaatattaacacctcctaaattatgatcttccacaagcatagtccacatgcatagaagcacatattaataacttcttaatcaactatcacacatctactattgactgtacaataaaatctaacccacrtggatattgacccatactgtaaatcacagtgcatacattcgttcatcggacatagcacatttcagtcaagaaatccctcgtcaacatgtatatcccctatcaaattttgctctcttaatctaccaaccactgagaaatcatcatccctctcaggagtggcaccctcctggttccaggcccatgacacttgggggtgactatactgaaaccatacctggcatctggttcttacttcagggccatagaattaagatcgcccacacgttccccttaaataagacatttccatggactaatgactaccaccctattaaccagtcacaggagcactgtcatgtcatgcatttggtacttttaactttgggggatgctatcactcacctggtccctgccgaatccgcagtagaggaactcggatttgattcctgccaaatcaattgtagaagctaaccttatattcatattcc

SEQ ID NO: 761322 - DNA, 731 bp, Homo sapiens
taactggatccacagctctcttcgatgtaaccaagagggtgtatccaagctctgtctctaatcaaaagtctcatgggtggggaagcctggtaagcctggactggaaaagtgagaaggcggtaatgctatgatccagctgtgcgtctctgggatctctgctactctatgatcttcgccattatggggaacagactgatgctgtagcatcggtcaaattcatgccagtcagccagcagaaaccaatccaaggacacaaatggagccacacaaaagcgtgtgaaataagaaatttgatggttcactttaaatgccaccatatttttcagttctatgaaattttttattttacaactgtttttggactatcatgtagaagcaatgtgtatttacaggtgtctactgcacagacctcactctacagtccaatgatttgcttaattatgamaaaatgtaaaacaacagtaaaaacagacaaaattatattataaaataataatacaataatatgtaatagtattatttatatgtatatatatacacacacacacacacaaaaaccccacataaatcaacaggcatttgttgaatacctgccatgtatcatggactttaccatgccccaggaaacaaagatgagtcttaaacagtcctggcctgtgaggtactctctgtttactccataaccaacaggataactgtaaattcttggcagctaggggccacttttctcc

SEQ ID NO: 761323 - DNA, 610 bp, Homo sapiens
atgcgttgagatttatcacaaagtctctttccatggttccttttgtgggactctttggctccgtcagtcctccttatttacatcactgccattttccattcactgtaaattcccagtttacaaacatggggatatgtctgctgtattcactgatgccttctcagggcataaaaccatgcttggtccatatttggagctccagaaatatttgttgaataaattaatgagtgaatttttggaaactatcacaattgaacaaaagctcttgtgttaggactcctttaccataatgaattaaagttcctgaataatcagttggtttaattttttttwaattagtaaattcaattgtctattcttgttaggagttccactttaggtaaaataagccagtgctgtcttcaaactggggcataagtatttctggggatagacaaagatttttcaggtgattcacagacaaaaacacttaaaggaaatcaacattcagatcttcagtttccacatatactcttttctaaaatttattcaactgagaacacacaggtaaaccacctccactgtcattatcatgtttcttacactttacaaaagaaaggcacgtctctca

SEQ ID NO: 761324 - DNA, 651 bp, Homo sapiens
acattaaaattaccatttcaaccatttttaaatatacagttcagtgacattaagtgcattcacattgttgtacaaccactgccactatccatctccagaactcttccatctgataaaactgaaactctgtacccattaaacaataactccccactattmtctcctctcagcctctggcaacatccattctattttccagctttatgattttgatgacactaagtaccttatttaagtagaattatacagttattttttttttgactggcttatttcatttagtacaatgacctcaagtttcacccatattgtagcgtgtatccgaattttcttcttttttaaagctgaataatattccattgtatgtaataccgtaccgcattttgtttattcaaagtgaatactttcagtgaacccttgtattgctttcatattttagctgttgtgaataatactgctgtgaatgtgggtgtataaatatctcttcgaggttctgctttcagttctttgcagtatatatccagaagtgaaattgctgaattatattgtaattatatttttaatttttgaggaaccaccattctattttccactgcagctgtaccattttacattcccaccaacagtgcacagtggttccaatttatccac

SEQ ID NO: 761325 - DNA, 651 bp, Homo sapiens
acattaaaattaccatttcaaccatttttaaatatacagttcagtgacattaagtgcattcacattgttgtacaaccactgccactatccatctccagaactcttccatctgataaaactgaaactctgtacccattaaacaataactccccactattctctcctctcagcctctggcaacatccattctattttccagctttatgattttgatgacactaagtaccttatttaartagaattatacagttattttttttttgactggcttatttcatttagtacaatgacctcaagtttcacccatattgtagcgtgtatccgaattttcttcttttttaaagctgaataatattccattgtatgtaataccgtaccgcattttgtttattcaaagtgaatactttcagtgaacccttgtattgctttcatattttagctgttgtgaataatactgctgtgaatgtgggtgtataaatatctcttcgaggttctgctttcagttctttgcagtatatatccagaagtgaaattgctgaattatattgtaattatatttttaatttttgaggaaccaccattctattttccactgcagctgtaccattttacattcccaccaacagtgcacagtggttccaatttatccac

SEQ ID NO: 761326 - DNA, 651 bp, Homo sapiens
acattaaaattaccatttcaaccatttttaaatatacagttcagtgacattaagtgcattcacattgttgtacaaccactgccactatccatctccagaactcttccatctgataaaactgaaactctgtacccattaaacaataactccccactattctctcctctcagcctctggcaacatccattctattttccagctttatgattttgatgacactaagtaccttatttaagtagaattatacagttattttttttttgacwggcttatttcatttagtacaatgacctcaagtttcacccatattgtagcgtgtatccgaattttcttcttttttaaagctgaataatattccattgtatgtaataccgtaccgcattttgtttattcaaagtgaatactttcagtgaacccttgtattgctttcatattttagctgttgtgaataatactgctgtgaatgtgggtgtataaatatctcttcgaggttctgctttcagttctttgcagtatatatccagaagtgaaattgctgaattatattgtaattatatttttaatttttgaggaaccaccattctattttccactgcagctgtaccattttacattcccaccaacagtgcacagtggttccaatttatccac

SEQ ID NO: 761327 - DNA, 510 bp, Homo sapiens
cacaaaatctgaaatctgaactgctccaatgagcatttcctttgaccatcatgttggcactcaaaaatttttgagtgcatttcggacttttggagcatttcggacttaaaatgtttgaattagggacactcaagtggtacagcaaaatgctgtgcaggtttgtaacctaggagcaataggctatactgtatagtctaagtgtgtagtcagctgtaccattcaggtttgtgtaagtgcaccctatgatgtcctcacaatgaccattgcctaacaacacgtttctcacaacatatgaggygggaaattaaagaaaaataaaattaaaaagaaagagaaataagttttcctgtattaggctgacttgtctcagaggcagcaacaagcacagcccagacctaggaaaagtcttgataatattatctaatgtgctctgaagactctcccagcactcctttaacatagggagaagaaaaacaaattttcctttgttttatggaatgagtttacaga

SEQ ID NO: 761328 - DNA, 652 bp, Homo sapiens
aggatagaatgcagacctaggacacccgtaagcccactgttcaagatggcctagcaaactggtcagttgtaaactttcctgcaggtccctgaaaaaaaaaacaactggatgaggtgttccttttgtctttttttttttttttttttgagatggagtcttgctctgtcgcccaggctggagtgcagtggtgtgatctcagctcactgccagctccacttcctgggttcacgccattctcctgcctcagcctcctgagtagctgggactacaggcacccaccaccawgcccggctaatttttttgtatttttagtaaaaaaggggtttcatcgtgttagcaaggatggtctcaatctcctgacctcgtgatctgcccacctcggcctcccaaagtgctgggactacaggcttgagccactgcgcctggcccccttttgtcttgttttatatctttggacacttgaccttgtaaccatgtggttactttctcttgatttctcttgatttccaacctccagcaaataggaattttggggtccatgtcatagttagccctaaaagttaccttgagcagttaaaatcatttgcaagctcaaaattgtctgctctaggatcctcatgggaagggcaatggagactgcccaatgctgtag

SEQ ID NO: 761329 - DNA, 617 bp, Homo sapiens
tcttgtgggccacaaggaataggataatggatccaaagttctgaaagaaaacaacctgccaattaagaatgctgcatctaacaaaactgtactttaaaaattatggagaaatgaaaactttcctagataaacaaaagctaagagaactcattaccacctgacttgccttataaaaaatacraaaagaagttcttcaagttgaaatggaagaattctagacaaaaacttgaaagcacataaacataaaaatacaaagctctctggtaaaggtaaattttttgacaaatctagaatcctgtattattgtaatgctgatcataaatcagtttaaattctgacatagaatttaaaagacagacatgaaaaataactgtagatctatgttaataaatatacaatataaataaatgcaacttgcaacaataatgtaaagtataaggggtacaaagcaaaacagcagagtttgttgattcaattaaaattgagttattctcagtttaaaataaatagtcataactttaagatgttttatatcacccccatgataagcccagaaaaaatacctatgcaagatacacaaaggaaattgagaaaggaatagaatcatgtaacaaaaa

SEQ ID NO: 761330 - DNA, 622 bp, Homo sapiens
ttgcagatactccccagcaccaccccagagcccaggagctccactgactggctagatccagaagagaaataacaatcattgcagttcatctctcaggaagccacatccctcagtacccacatataggaagaaccctgtgggactaaaaaatctgaacatcagcctttgagccccagactttccatctgatatagcctactcaaatgagaaggaaccagaaaaacaattctggtaatatgacaaaacgaagttctttaacacatgtagatcacactacctcaccagcaatggatccaaaccaagaataaacctctgaactgccagaaaaagagatcagaaggtctattattaagatactcaaagagrcactggaaaaaggtgaataccaactcaaatgcattttttaaatgttacaggatatggatggaaaaatcttcggataaatagataacataaataaaaaacaatcacgttttctggaatgaaggacgtacttagagaaatgcaaaatatgctggaaagtctaaacaatagaattgaaaaagtagaagaaagcttcagagctcaaagacaaagcttttaaattaacccaatccaacaaagacaaagaaaaaagaattta

SEQ ID NO: 761331 - DNA, 622 bp, Homo sapiens
ttgcagatactccccagcaccaccccagagcccaggagctccactgactggctagatccagaagagaaataacaatcattgcagttcatctctcaggaagccacatccctcagtacccacatataggaagaaccctgtgggactaaaaaatctgaacatcagcctttgagccccagactttccatctgatatagcctactcaaatgagaaggaaccagaaaaacaattctggtaatatgacaaaacgaagttctttaacacatgtagatcacactacctcaccagcaatggatccaaaccaagaataaacctctgaactgccagaaaaagagatcagaaggtctattattaagatactcaaagaggcactggaaaaaggtgaataccaactcaaatgcattttttaaatgttacaggatatggatggaaaaatcttcggataaatagataacataaataaaaaacaatcacrttttctggaatgaaggacgtacttagagaaatgcaaaatatgctggaaagtctaaacaatagaattgaaaaagtagaagaaagcttcagagctcaaagacaaagcttttaaattaacccaatccaacaaagacaaagaaaaaagaattta

SEQ ID NO: 761332 - DNA, 512 bp, Homo sapiens
ggttgtcgttatttaccttgagtattagcaaaaagtgaggctaatgaagtcctggtgtgtggaagaaccacagatgtgctctaaatcaggctctaaaggatggatgaagggaggctgtttactacaaacacctaccccttgagaggagaaactcagcaygacaactgctacatcaaagtgcaattatctgtattctcaagacatagaaaacagaaaaggtagactaagcaggaagatgaagccaaataaatttaaacactttttaaaaattgccttagaagatggagaaagaaaaaataaaaagaaataagtgtaatcagctcataaataatctacaagtaagtcctaaaactgcaaatgattcagtagttcacattttgacttcttaagactttgcaaactgccaaagactgtctgcttcttcttgaagaatgcttttgtttctttctcttaactcaggcagctttctcctggtccccatgactgctgagtccagaaatgtgaagcattct

SEQ ID NO: 761333 - DNA, 545 bp, Homo sapiens
gcttgccgtgaagcgtggcgcaagatgaacctttgatcttactgcactagtacttctttgaagtaaatgtgacccttattttaggtcctgatgattatcaagaactagaaggtcctagttattttccaagcttaaaacttcccctaggcattccactaaatacactggtcttaatgtggtattaggcacatttgggacagataagcagacattcaaaaaaawaaaataaacagtttagtaaatattttactaaaatgttataattttggtcacagagcctcatatgctttttgacctttgcttattttctcaaaataccactaagaccaccaacactgtcaaagaaagtgatggatagtttagcaagattcaaacttagaatggaataccactaaaatgtcatgttgttcaatatactggggcaaaataaacccaggatatttggttcatatggaaaccaaaaacaaaacaaaacaaaaaacaaacagagaaatccatgcagtgacccatggagagttgacacatgtgctgatgctctatatcca

SEQ ID NO: 761334 - DNA, 545 bp, Homo sapiens
gcttgccgtgaagcgtggcgcaagatgaacctttgatcttactgcactagtacttctttgaagtaaatgtgacccttattttaggtcctgatgattatcaagaactagaaggtcctagttattttccaagcttaaaacttcccctaggcattccactaaatacactggtcttaatgtggtattaggcacatttgggacagataagcagacattcaaaaaaaaaaaataaacagtttagtaaatattttactaaaatgttataattttggtcacagagcctcatatgctttttgacctttgcttattttctcaaaataccactaagaccaccaacactgtcaaaraaagtgatggatagtttagcaagattcaaacttagaatggaataccactaaaatgtcatgttgttcaatatactggggcaaaataaacccaggatatttggttcatatggaaaccaaaaacaaaacaaaacaaaaaacaaacagagaaatccatgcagtgacccatggagagttgacacatgtgctgatgctctatatcca

SEQ ID NO: 761335 - DNA, 566 bp, Homo sapiens
attagaaaactacagtaataaagacagtatggtaagtggcaaaagaatagacaaatagataaatggaacagaatagagaatgtagaaatagactcacatatagtcaattgatctttgacaaaggagcatcaaatttgatggaaaaaaagtagtcttcaacaaatggtactgcaacagctggacatccacatcctcccaccaccaacaaaagaatctagaaacagaccttacctctttcacaaaattaactcaaaatggatcacagacctcaacataaaatgcaaaactataaaaccrctagaatgtaacataggaaaaagtctacatgacccaattaaaaaatgtaccagagaccttaacaggcacctcaccacatacagatggcaataagcatatgaaaagatgtattacatcatatgtcatcagggaaatgcaaattaaaacaacaatgagctaccactacacatctcttagaatggccagaatctgacactgacaacagcaagtgttaccagggatgtagggcaacaggaactctcatttattgctggtgggaatgcaaaacc

SEQ ID NO: 761336 - DNA, 621 bp, Homo sapiens
tgtgcactattttactttcccaccggcaatgtatgaaagatctaatttctcaatggcctcaccaggctggagtgcagtggtgcactctcagctcactgcaagctccacctcccaggttcacgccatcctcctgcctcagcctcctgagtagctgggactacaggcgcctgccaccacgyccggctaattttttgtattttttagtatagacggatttcaccatgttagccaggatgttccggatctcctgacctcgtgatccacccacctcagcctcccaaagtgctgggattacaggcgtgagccaccgcacccaaccatttgtcattttttattgtaggtacactagtgggtgttaagtgatatctgcttgtggttttgattttgcgttttcttgatggcttgtgatgttaggctttttcttcatgcgcttattggacactcttatatcttcttcacaaaaatgtctatttaaatattttgcctatttttatgtatttttcctttttactgttgagctgtaaaatttatttgtgcattttggatacagatttctaatcaaatatataagttgcaaacattttcttcacttttctggttgtcgttttattttctttgtta

SEQ ID NO: 761337 - DNA, 637 bp, Homo sapiens
ttttttttttgagatggagtctccctctgtcgcccaggctggagtgcagtggcacaatctcagctcactgcaacctccacctcccaggttcaagtgattcttttgcctcagcctcccaagtagctgggattacaggtgcacaccaccatgcccagctaatttttgtatttttagtggaaatggggattcaccatattggccaggctggtctcaaattcctgaccttgtgatccacctgcctcygcctcccaaagtgttgggattacaggcgtgagccatcacacctggtcaacggtgacttttaatgcacagaacttttacttttgatgaaactaatttttttgttatttttttcattccctgtacctttgatatcatatctaagaaatcattgttaaatctaacataaagaatattttctcctattttttttttctaagagtttaagggttgtagttgttacttttaagtctttgatctattttagcttatttttgtacactatgtaagttaagggcccaaactttatattttgcctgtggatatccagtttacccagtactatttgttgttattaatcaattttgcttctttttttttttttttttttttttttgagatggagtttcactctgtc

SEQ ID NO: 761338 - DNA, 637 bp, Homo sapiens
ttttttttttgagatggagtctccctctgtcgcccaggctggagtgcagtggcacaatctcagctcactgcaacctccacctcccaggttcaagtgattcttttgcctcagcctcccaagtagctgggattacaggtgcacaccaccatgcccagctaatttttgtatttttagtggaaatggggattcaccatattggccaggctggtctcaaattcctgaccttgtgatccacctgcctctgcctcccaaagtgttgggattacaggcgtgagccatcacacctggtcaacggtgacttttaatgcacagaacttttacttttgatgaaactaatttttttgttatttttttcattccctgtacctttgatatcatatctaagaaatcattgttaaatctaacataaagaatattttctcctattttttttttctaagagtttaagggttgtagttgttacttttaagtctttgatctattttagcttatttttgtayactatgtaagttaagggcccaaactttatattttgcctgtggatatccagtttacccagtactatttgttgttattaatcaattttgcttctttttttttttttttttttttttttgagatggagtttcactctgtc

SEQ ID NO: 761339 - DNA, 596 bp, Homo sapiens
caagtggatatttggaccactttgaggccttcattggaaaygggaatatcttcacataatcactagacagaagctttctcagaaacttctttgtgctgtgtgcattcagctcagagagtagaacctttcttttgatagagcaggtttgaaacacttttttcatagaatctgcatgtggatatttggaccgctttgaggccttcgttggaaacgagagtattttcacttaaacactagacagaagcattctcagaaactaatttgtgatgtgtgcattcaactcacagagttcaaccttcctttagataaagcacgtttgaaacactcattttgtagaatctggaagtggacgtttgaagaaatttgaggcctacggtgggaaaggaaatgtcatcacataaaaactagacagaagcattctcagaaacgtctttgagatgtgtgcattcaactcacagaggtgtaccttccttttcatagagcattttttaaacacacttttcgtagattctgcaagtggatatttggaccgctttgaggccttcgttagaaacgggaatatcttcacataaaaactagacagaagcatttcagaa

SEQ ID NO: 761340 - DNA, 599 bp, Homo sapiens
tcacataaacattagacagaatcattatcagaaacatctttctgatgtgtgcatccaactcacagagttgaacccttcttttgatagagcagttttgaaacactctctttgtagatctgcaagtggacatttggtgtgctttgaggtctacggtgaaaaagaaatatcttaacaaaaaaactagacagaagcattctcagtaactttttgtgatgcttrcattcaactcacagaattgaacattcctcttcatagagcagttttgaaacactcttttgtagtatctggaagtggatatttggggggctttgaggcctatggcgaaaaaggaaataccttcacatgaaaactagacagaagcatcctcggaaacttctttgtgatgtgtgtagtgaagtcagagagatgaacctttctttttatagagcagttttgaaacactctctttgtagaatctgcaagtggacatttgttgtgctatgagacctacagtgaaaaaggaaatgtcttcatatgaaaactagacagaagcattctcagaaacttctttgagatgtgtgcagtcaactcacagagttaaacctttcttttgatagagc

SEQ ID NO: 761341 - DNA, 491 bp, Homo sapiens
tgtagtatctggaattggatatatggagcgctttgagtcctatggtgaaaaaggtaatatcttcacataaaaagtagacagaagcattctcagaaacctctttgtgatgtgtgcattcaactcacacagtggaacctttcttttcatagagcagattggaaacactctttttgtagaattttcaagtggatatttggacagcttagaggccttcacaggaaacgggaataccttcacataaaaacaagacagaaacattctgggaaacatctttgtgatrcgtgtcctcaactcacagagttgaacatttctttttcatagagcagctttgaaaccctctctttataggatctgcaagggaatatttggacaactttgaggctttcgttggaaacgagaatattttcacataaaaactagtcaaaagcattctcaaaaacttatttgtgatgtgtgcacacaactcacagggttgaacattccttttcata

SEQ ID NO: 761342 - DNA, 631 bp, Homo sapiens
cctttcttttgattgagcagtttggaaacactctttttgtggaatctgcaagtggacatttggagcgctttgcagcctatgttagaaaaggaaatatattaccataaaatctagataatatgaatctgagaaacttctttgtgatgtgtgcattcatctcacagagttaaaactttcttttgattgagctgtcttgaaactctcttattgtaaaatctgcaagtggacatttggagcgctttgaggcctatggtggaaaagtaaatattttcacrtagaaactagacagaaaaattctgagaaacttctttgtgatgtgtgcttacatctcacagagttgaacctttctttagattgagcagtttggaagcactctttttgtagaatctgcaagcggtcatttggagcctttgcgacctctggtagaaaaggaaatatcttcacagaaaatctagataaaagcagtctgacaaacttctttatgatgtgtgcattcatctcacagagttaaacatttattttgattaagcagttttgaaactctctttttgtagaatctgccagtgtacatttggagcgctttgaggcctatggtgtaaaaggaaacatcttcagataaaaactagacaga

SEQ ID NO: 761343 - DNA, 569 bp, Homo sapiens
ttgccacattgtcattggttctcacagtcaggtgccccatcttcagggctcagtagcacaatagaaattgttttccaaaaggcatagagttctccactgcagatggcatgactaagccccagaaacataggagtcctcattatgattctcccacaaggcatgtgttttaaactgtacctggcacattttcccaccactaacacctccygtatcataggatctgtcaggctatatggcccaagtggcagggctgcttacatcctatactttcctactctgggccccactccaagctggaagtctctcatgccttccactataggaactaacattgtgatcccttttttcaccatgggagacgtaagatgcaatactttgccctattctttggatgggatatttcaacatatccttggccactgaatccctaaacattttactaagatggcgggcccctgaatgttcatggaggttatctcatactctctggaatgcgtgtgacttaccaaggcttccaattcttggatttcttgtcatccagccccattctcatgataccactgataaaa

SEQ ID NO: 761344 - DNA, 603 bp, Homo sapiens
aaatggtcagacattatattttttttattgttctctcatttaatgtgggctgcccaaggaaggagtgggcaagacgcctttctgaagctaacataattactgaagggtctgacagtagaagacatcagccaacaacagtccctgctgctaggtcaacaagtctttccttagagggatgtagaaggcacaactcagygttcatcagttccttcactggattttcagctgcatgtctgtcattattcttctagttgttcctgtagggattgcaatataaatccttatcactgtctacttagaattaaagttgtgccacttctcataaaatataaggactttgaagtattatagttccacttattaccatccttagttatattattgtcatatttatcatatctaaatacattataaatccccaatacagtattgtctttttaaaaattaagagaaataaaaaactgtgtaatcttcatatgtgccatatacttactatttctgatgctccttgctttttcctgtacttctacaattacatttggagtcgatttttttcagcctgaataactttttttgctattccttataatgtgaatctgctgg

SEQ ID NO: 761345 - DNA, 622 bp, Homo sapiens
tcagcctgaataactttttttgctattccttataatgtgaatctgctggtgactgattctattttcattcacctgaaaaagtctttatttcatcatcatttttgaatgaaatttttgctaggtacagaattctgggttgaaggttgtttttattcccctgaactttaaagaagtttttttcaaagtattctccctccattaattctgatgtgaatcattctgatgtgagtcattattcatgttgttgcttccctgtagttaatgtgktttctcactgttattagttgtttttttctcccatttcaaatattttctctttatcttcttcaattttcaacagcttgcctatgacatgccaaggtgtgaatgtctttgtctttatttttcttgggtttactgagttacgtaggtctgtaagtttaaatttgggaaagtttaagtcatgtattccaaataatattttctgccctatattctcctttttctctgtctggaactccagctacatgtgtatagactttttcatcttgtcccacaagtcaatctcttttcaatctattttctctttctttttcagaattgacagtgttcatgtattaacctgcaagttccctgataattt

SEQ ID NO: 761346 - DNA, 622 bp, Homo sapiens
tcagcctgaataactttttttgctattccttataatgtgaatctgctggtgactgattctattttcattcacctgaaaaagtctttatttcatcatcatttttgaatgaaatttttgctaggtacagaattctgggttgaaggttgtttttattcccctgaactttaaagaagtttttttcaaagtattctccctccattaattctgatgtgaatcattctgatgtgagtcattattcatgttgttgcttccctgtagttaatgtgttttctcactgttattagttgtttttttctcccatttcaaatattttctctttatcttcttcaattttcaacagcttgcctatgacatgccaaggtgtgaatgtctttgtctttatttttcttgggtttactgagttacrtaggtctgtaagtttaaatttgggaaagtttaagtcatgtattccaaataatattttctgccctatattctcctttttctctgtctggaactccagctacatgtgtatagactttttcatcttgtcccacaagtcaatctcttttcaatctattttctctttctttttcagaattgacagtgttcatgtattaacctgcaagttccctgataattt

SEQ ID NO: 761347 - DNA, 602 bp, Homo sapiens
tgatggaggacccttgcatagtgagaaatttctttctgcccatatggtggtgcaggatatggaaggcatatttagagtcagtattaatattgatttgtagtccctttgcaagagtgagggcccaagttcaggcaatgagttcagcttgctgagagatagtggggggcagagcrgtagcctcaatgatagatgtggaagatactatagcatagcctgcctttgctggtgtgtggcgattaagcctggtggaactgccattgataaaccaagtgtgatcagggtgaggaacaggaaagaaggaaatatggggaaatggggtgaatgtcaggtggatcagagagatacagtcatgggggtcaggtgtggtatcaggaataatgtgggaggccagattgaagtccaggccaggaacaatggtaattgtgggagactcaactaagagtgagtatagctgaaggagccaggtgagaggaagaaaatagattttggaaattatgagaactgtagagagtgagctgagcatagtttgggattttgagggcctctaaaagcattaacacagtggtagccaccacacacagacatgagggctaggctaaaac

SEQ ID NO: 761348 - DNA, 617 bp, Homo sapiens
ccttctgcttaagtcatggtctgtacgaaagacctttttttattgaaggacttgtcaccaattattcttggctggaaaccactatagtaataaagttcaagtgcactggtaaatttagagggaggtagatgaatagaattaaaacagaatattgaggaaatacagaagagaggaaaaagagaatcacattgattttttgccaagactgtgaactaggaaaggctgtcatctccctccacaaaatgactctttgataaattgttgaaacaaagtgggtgtggatatgaaagagataataaacactttgaaaaaaatctaagaagggtacttgaaatggtgttgggtgaataacatagcctggaagggagggtggttggaggtgggaagcaaaggrtaaattgacagaaatggatttagttatgcttttcctcttcactgaataagataaacattaatttattatccatcaaagaaattaccttctctaaagaattgcttttgtcctcaatgctttatatatcctttcttacttattttttgtcaaagaaattacatataagtgacatcctaggtctaaagtgctggtaaagaggatggtcagcatcagagcagtacaa

SEQ ID NO: 761349 - DNA, 611 bp, Homo sapiens
gaaccacttgccctgagttggaaaagactggtagagcaggttttcagaagaagagtaggtgggagtgatagaggagacagaaaaatactggccctctggagtaggggctggaatattagtgggtgtggaggcaccggctatttcttttgctgtcctgtcagcataggcatttccttttgcaataagatcagtaggtttctggtgtcgtttacaatgaatgactccagcattggctggcaggagagcagccttaaggaggatctttattagggaggcattgataatggaagagccttatgtgataaggaagcctttttcggcccagatggcagcatggttatggaggatgtggaaagcatatttggagtcagtacaaatattaatgtgcattcctttagcaaaagagagcacataagttaragcaatcagttcggcttgttgaaaagtggtggagggaagaagtgcagcagcttctataacagaggtgtgggacacgacagcatatccagctttagctggtgaaaattgattgggtttagaagaactgccatcgataaaccaagtgtggtctgggtttggaattggaagaatagaaatataaggaaaggggg

SEQ ID NO: 761350 - DNA, 602 bp, Homo sapiens
ggatacaagaagatagctactttcaaagcagagactagttcaccagacactggatctgctggtaccttatctttgacttcccagacttcagaaatgtgaaaaataaatgtttattgtttatgtcacccagtctgctgtaatttattgtagcagcctgaactgactgagacacatggtatccccgtggctaggaaattaaggccaatcaaggttcataccatgcaaaacttgttctccacaacacggtctgttaatttgagacttgtaattgctgaaaccatttgctaaagtgggagaagccaatytgaagaggaagctgatacaggagatcacaagcttagagaattttaagcaaactatgccagagccttcagcaaactgtacctagaaagtttaattatatgagtcaacatattctctttattgtttaaataagtttgaattgaattttctatttcttggaattaaaatcatcttaaattggtgatggacagaaaagcaaaccgtgatttacatagtaggcacttactaattatgcagtgatagtaatatttttttcattgtgaactactaattatgccctagataaccaaatttatgaa

SEQ ID NO: 761351 - DNA, 567 bp, Homo sapiens
atttatgaagactaaactccttttttttttttttaatcttgcccaaattcctatctaagaggtctagggagtcatgccctacaaaccgtaaattctcatcagatgagttttatgtaacttatatatcatgacttactttccaaactgactccagcgtaacactacgagacaaggaagaaaagcaaaatatttaccccaaatgtgtgtttctttgtcatattttgaaatggccctgcaagccatcctttatgggggaaaatttgcacatgtaaagaatccctattaacatagctagaccttttccttccaggcccctctaattctgaatagataactgagagtctagcacttttaaaagtctgaataggaaacatttgtcatctagtgtttctaagtgcagctgctatgagacttcaaaagaatcwtggtctccaaagtcttttattttaacctgaacattttctttctattgatctcaggtccttagacagaactcaaccaattgtcaaccagagaatgtttaaatttacctataccctggaacccccgtaccctcattgtctaccc

SEQ ID NO: 761352 - DNA, 660 bp, Homo sapiens
acactttcctgatgaatgagcatttttaggctcttctaggtgctttttggtaatgtatataccaccttttggaaactgtcttcaaatcttctatgcatttctaattgtgttattttgcctttcatgttttattagagttctttcactgtcagtatgtcatgtatcttacatgtgtatttcaattaatttctcgcagtccgtggctgaactttttatttgatttgatggtgtattttcatgagcagaaagttttggttctgataaaatctaattttcattttttcttttatagttaggatatttgtgtcatttctaaggaattttgcttrcacaagtctgtaaagatattattctacttttttgatgggaattttaaggtttattgtttactttcaggctaatgatcctattccaattaagttttgtccatgatataaagtttgggttgatctaaatcaggttaattttgtgtctggtgtgatataaagggttcattatattctgtatggattatcaattatttcagcattatttgatgaaatgtttctttcctaattttgtatcttgctacaacatttaaatacattacaatgtatgcgtggtatatttcttgagtcatttctgttcaaatattctataagtctaactttgaacactaca

SEQ ID NO: 761353 - DNA, 660 bp, Homo sapiens
acactttcctgatgaatgagcatttttaggctcttctaggtgctttttggtaatgtatataccaccttttggaaactgtcttcaaatcttctatgcatttctaattgtgttattttgcctttcatgttttattagagttctttcactgtcagtatgtcatgtatcttacatgtgtatttcaattaatttctcgcagtccgtggctgaactttttatttgatttgatggtgtattttcatgagcagaaagttttggttctgataaaatctaattttcattttttcttttatagttaggatatttgtgtcatttctaaggaattttgcttacacaagtctgtaaagatattattctacttttttgatgggaattttaaggtttattgtttactttcaggctaatgatcctattccaattaagttttgtccatgatataaagtttgggttgatctaaatcaggttaattttgtgtctggtgtgatataaagggttcattatattctrtatggattatcaattatttcagcattatttgatgaaatgtttctttcctaattttgtatcttgctacaacatttaaatacattacaatgtatgcgtggtatatttcttgagtcatttctgttcaaatattctataagtctaactttgaacactaca

SEQ ID NO: 761354 - DNA, 616 bp, Homo sapiens
atcaaaggattttcagcaaccaaaaaaaaagacacaggtaacaccagggaattcctttgttcataattaacaaagattatcacctacttccaatagggtggaaggaaaagttatttcataataccactgtacaatggtttcagttattacattaaatttatgtctttacagttctagtaatgtatacaccatttcatttcaggttagaggttcaatattctgtgccacttttagaaatgtctaagttaaatgatctctcgagataatgttatgttatggattagtgaactaagtgggccctgtttgactggtagagacgatattcttttacatagagttggaaaaggcaaacatgtagagatgctgacaaaattctgtcatatgtggcttatttttgtctggctgtgctgtatattccagttggataacccagagtgaagcatgttttttacctgcaacagaagcaattttacaaacayaaaagcaaaataatctcaatctgcgtgatattatatatttgaacattcattcaaagtaagaacatatatacacatataggttgataaacgcactgtgcattaattcaaaaataagaaaatatacatgtatatatagt

SEQ ID NO: 761355 - DNA, 585 bp, Homo sapiens
aattatgtcatacaatcgaacttaaaaggaattaatatattgagtcataggaatatcggagtacttgaagtttaaaattgtattttccatcattttagtgatgaagagaaccaaactcatcctacctatctgtggtagctgccccactctcataataaaggatttaatgcacttataaggccagaamcctcataatatagattggatgttttgccttccaaaacctcatgttgaaatgtaacccccaacgttggaggtgggacctcatgggaggagtttgggtcttgaggatggatccctcataaatggcttggcgcactccctgtggtaatgagtgagctctcactctattagttcatgtgagagctgtgtttagaaaaaggctggcccctcttcctctctttcttgccccctctcttgccatgtgacacacctgctccccctttggcttctgccataagtaaaagcttcctgaggcctcaccagagccgagcagatgctggtaccatgctggtacaacctgaagaaccatgaacaaaataaagctcctttccttttaaattatctagtctcaggcattccttt

SEQ ID NO: 761356 - DNA, 570 bp, Homo sapiens
gttataatgttaaattagttttaaaagtttaaaattttgatataatctccttctcctcaagtagcttagctggttaattcagaaggactaaatgcatctatttctattatatttttctccccgtgtgaaatagacaagtcacctatactaattttctatgataagatgtggagactaggttatgtatccttgcagataagcacactcagaactgaaagaacaaagttgaaagtatgttgtttcattagggaacaatgtgaaataattaataacccacattagttctgtgtgttagaatgtttttgtgggggtaggaaaaatatttattttgcagttaaattatacaattctacttcctaatgcttccgctacagtaacttcttcttgtcttatcacctcaaatccatgtttttkgtgatgtgccattatcttgctttaagctcttcaatttcttccagtggctggtagaaaaaagtgaaaattccttcgtgtgacatttatgagccttgcctggttccagctatcattcatcatgccccacctcatggcctgtgccccagccaatcaaac

SEQ ID NO: 761357 - DNA, 547 bp, Homo sapiens
atgatctatgaagaaaataattgataacctgggcttcattaaaattggaaacttttgctcatcacagccaccatgaagaggagaagataagctgccaactgagaatgaatatttgcaaaagacacatttgatacaggactgctatctaaaatacacaactcttaaaactcaacaataaataactcaattaaaaaatgagcaaaaggcgtgaaccgacacctcactaaagaagatataaagacggaacataaaataagcatatgaaaatatattcarcatatataattaaggaatcgcaaattgaaacaataatgagaaatcactgctagaatggccaaaatccaaatcactgacaccaccaaatgctgaggaggatggggagcaacaggacctctcattcattgctgctgggggctacaaagtggtacagccgctttggaagaccgttttgcactttcttacaaaactaaccggctcttatcatataatctagcaatttcattctcagatatccaccccaaataaactgaaaacttatgttggaaca

SEQ ID NO: 761358 - DNA, 555 bp, Homo sapiens
cttaattttaaaatattttattgctaaaaaatgctaacgatcatctgagccttcagcaaatagtaatctttttgctgatggaaagtcttgactcaatgttgatggctgctgactaatcagggtggtggttcccaaaggttagtgtggccatggcaatttcttaaaataagaaagcaatgtagttgggcatggtgacgcaggcctgtagagtcccatctgctcaggaggctgaggcaggaggataacacaagcacaggaggtggaggctgtagtgcactatgatagcatacgtgaaagccactgcactctggcctgggcaacacagagagacccctgtctctcaaaaaaaaagaagacaacaaagttttctgcatcaattgactcttcgattcacaaaagatttctctgtagcataygatgctgtttgatagcattttacccacagtagaacttccttcaaaattgaagtcagttctctcaaatcctgctctactttatcaactaagtttatgtaatatttgaaatcctttgttgtcatttcaacaatgttcacgc

SEQ ID NO: 761359 - DNA, 366 bp, Homo sapiens
tctttctgttcctttttacttttcctgattaaacttcagctcctcacagaccaacaatttctcttacctcttaggattactttggagtcttaacacctgctttccaagttatcagtttttctaccatatttactaccagttytcattggatggtagaccaagtgcctttttattgaggcttgtcccaagtgaggtaccttttggcccagcctcatgatacaaatacgccccttggttgggacttttacctatagtaatcatttcattctaaactgatgagactgtgatttgtggcagaaaatcttctgtgtgattacatccatcttgttgagtgcaggtctatatgtatttcttcctgtatgtttc

SEQ ID NO: 761360 - DNA, 652 bp, Homo sapiens
ccagttgaactgggacacacgtcgccctagctatatcctactacaaccaacaatacgtgggaatgcctttcatctcacaccttcaccaacaatgagtgttaaccattttattaaaaatcttcactaattttataggccaaaaaatgggaacacttgttttaatctgcgcttcactaattaaatctgggatgaaacttttctttttcatatttacttaagtctttgtatttctttatttcacattgggttcttgctcttttttattgtaagaattatttagaaatttacatggttaattcttcttttcttatcgcacaatgctttcaccttgtcatgcagtgctttctccttgacccatttcagccataaactacattgcaacatacttgctttttaaaaatwtgttttattaactatgtagagcaatcatatgatagaaaaacttgggaaagaaatttgctaaaatgttggcagtctttctctgggcagtgagtctagggtcaattgttttacttccttttgcatttctgtatttttttagtttttccataatgaacatatataacttttattttttattttttacattgattgataaaaattttacaagttaccatgtacaacatgatgttttgaaatatatatacattgt

SEQ ID NO: 761361 - DNA, 626 bp, Homo sapiens
tcctatgagaagctaatgcccttgctgaactgacaggaggcggagttcaggcagtaatgtgaaatctattgatgcaattttgacttctgaagaggctgtacattactcatgtgtgcatactccctttatcacctgtggtgggatgtactaattaatgctactatattaaatgatctgggaatctagtatcttacgttttgggtctgtatttctaatgtgtaagttataagagaaatgtatgaaataatggagttaaaatggtaggagcaaaagcatcatggcatagttgaagttatgtggattcttgtttctgtctttggaaaatcatctagtataacaaagcatctattttgtcattttaaaaataagaataatatctaccacattgaatttctgtgagggtttattgtgataatctgctaacagaactattacacaactgtatcagtccrttttcacactgctgataaagacatacaggatactgggtaatttataaagaaaaagaggtttaatggactcacagttccacgtggctggggaggcctcacagtcatggcagtaggcaaaagtcactcttacatggtggcaggcaggaaataattggtgcagggaaactccccgtt

SEQ ID NO: 761362 - DNA, 634 bp, Homo sapiens
acatacacatacacatatactacaatatatttccatataaatagctcataacctgttactgtattttttaaagtagtaatttagttaatcacgtaggtggttcttaacccatagaagtgatatgatatttttgactaaactttctgctgccagcatacaataaataacataggcaaatctaattaattaatgccgtttatggactaaagctttgtttgtctgttttggtttaraaacaaggtctcactctgttacttaggctggagtacagtggtgtggtcatagctcactgcatcctggagctcctgggttcaagggattcttccacctcagcctcccaagtaactagggttacaggtgctcaccaacatgcctagctaatattcttaatttttagtttgtttgttttggtaaagatgaggtgttgctgtattgctcaggctggtctctaactcggctcaagtgaccctcctaccatggcctcccagactgttgagattacaggtgtgagtcactgcactcagactatttttatgaaataaagtttaaagggtaatatatatcctacacattaatacataccaacaatcaggttattgtagaaaataaatcataagtacaataatcaggaaat

SEQ ID NO: 761363 - DNA, 654 bp, Homo sapiens
tgatgataggtttaatgaaatgttgtgtatatgtctccagcacttgaacttttagacattcctaagaacaagccaggaacctgaatttgttttttcactgtacttatatatgctgtgcactttaaatataggcatttaaatatttgtyaaagaaatacttgatttaaaaacgagaattgaaataaggaaacttaagggaggcaacagaaaattctcatgtaaaaacataacatatttgttaaatcttttcgacatttcaaaacacactttgccaaacaatttacaaaatatttttatatttaaagtaaactcagatagtgattataaataataaaataaattaaaacaaaaaaattttctaactatatttagaccagcactatctaattatgtgtttgataaaaataaaaataaaacatattttggatcactgatatttttatcataattgaatgtcttataaataattctgccattagaaaaattgtatagtgtccttaattctccacaatgagttatattatgttaccactgaaatgaacaaacacaatatacgtaagtggcgaaatagtgttgctcactacaatttaaatatcatttaatttaacatttattaaaaccaacatatttgacaatatgaatttttaatttata

SEQ ID NO: 761364 - DNA, 654 bp, Homo sapiens
tgatgataggtttaatgaaatgttgtgtatatgtctccagcacttgaacttttagacattcctaagaacaagccaggaacctgaatttgttttttcactgtacttatatatgctgtgcactttaaatataggcatttaaatatttgttaaagaaatacttgatttaaaaacgagaattgaaataaggaaacttaagggaggcaacagaaaattctcatgtaaaaacataacatrtttgttaaatcttttcgacatttcaaaacacactttgccaaacaatttacaaaatatttttatatttaaagtaaactcagatagtgattataaataataaaataaattaaaacaaaaaaattttctaactatatttagaccagcactatctaattatgtgtttgataaaaataaaaataaaacatattttggatcactgatatttttatcataattgaatgtcttataaataattctgccattagaaaaattgtatagtgtccttaattctccacaatgagttatattatgttaccactgaaatgaacaaacacaatatacgtaagtggcgaaatagtgttgctcactacaatttaaatatcatttaatttaacatttattaaaaccaacatatttgacaatatgaatttttaatttata

SEQ ID NO: 761365 - DNA, 654 bp, Homo sapiens
tgatgataggtttaatgaaatgttgtgtatatgtctccagcacttgaacttttagacattcctaagaacaagccaggaacctgaatttgttttttcactgtacttatatatgctgtgcactttaaatataggcatttaaatatttgttaaagaaatacttgatttaaaaacgagaattgaaataaggaaacttaagggaggcaacagaaaattctcatgtaaaaacataacatatttgttaaatcttttcgacatttcaaaacacactttgccaaacaatttacaaaatatttttatatttaaagtaaactcagatagtgattataaataataaaataaattaaaacaaaaaaattttctaactatatttagaccagcactatctaattatgtgtttgataaaaataaaaataaaacatattttggatcactgatatttttatcataattgaatgtcttataaataattctgccattagaaaaattgtatartgtccttaattctccacaatgagttatattatgttaccactgaaatgaacaaacacaatatacgtaagtggcgaaatagtgttgctcactacaatttaaatatcatttaatttaacatttattaaaaccaacatatttgacaatatgaatttttaatttata

SEQ ID NO: 761366 - DNA, 604 bp, Homo sapiens
ttcttgttaaattgcctggaaaggagtaactcaaaaatcctcaaatttctgatagaaaaaactaaaagttattacagatgtctgttaatcttatatgttgcctttaagacactgaacaaattagcaaaatattaaaccttaaagaatgttctaatattctgaattttgattagtttaattgctacttgaaattacatttttaaaaagaatatgatattagaatatttaatgctggagtattattgttaagtgtatcttcttttctttaaaaaaagttagtattaaattktattttattaaaggttgagtatacatgctgaaaatagaatcataggaggttgttctatgggtagtctaataagctgagagagaagcccaaatgaatatggcataattatggaaagtattagcactgctcagaagtacttctgtgcattaggaggattacatgtttttacctcctcaaagttagttgtggtcatgagactcaatgacacattaactgaaataatctttcttattcagatatagatgcatttaagatccagcagtgattctctgtatgtttgcctctccctgctgctatgtcgagatgtatatcaga

SEQ ID NO: 761367 - DNA, 604 bp, Homo sapiens
ttcttgttaaattgcctggaaaggagtaactcaaaaatcctcaaatttctgatagaaaaaactaaaagttattacagatgtctgttaatcttatatgttgcctttaagacactgaacaaattagcaaaatattaaaccttaaagaatgttctaatattctgaattttgattagtttaattgctacttgaaattacatttttaaaaagaatatgatattagaatatttaatgctggagtattattgttaagtgtatcttcttttctttaaaaaaagttagtattaaattgtattttattaaaggttgagtatacatgctgaaaatagaatcrtaggaggttgttctatgggtagtctaataagctgagagagaagcccaaatgaatatggcataattatggaaagtattagcactgctcagaagtacttctgtgcattaggaggattacatgtttttacctcctcaaagttagttgtggtcatgagactcaatgacacattaactgaaataatctttcttattcagatatagatgcatttaagatccagcagtgattctctgtatgtttgcctctccctgctgctatgtcgagatgtatatcaga

SEQ ID NO: 761368 - DNA, 600 bp, Homo sapiens
attactatccaattaaagcaaaacgcttgttactggccatgatgtcacctttaccaaaagaggaggtcttttttttttttaatagagcattttctctaggcctggwgctaattaaatgctttgcgtgcatttctcactgatccttataataatccctccagataggtattgctttcacacctccattttacagataaggaaactgaggtctgaagagatgaagtcacagacgtaaggtaacaacctaacagagtacgcgtaagatgacctgtgctttcagacttgactcccaagcctcttgacgtaatttaaaggtgtcatctagttagtatctggtatctgccaccacccatggcagctcacaactgtcttttttcattctgtcaccttactgaagaggctccgctgtctattagtgctgggaacaaaaatgtgtaagaggaaggctctgcgctagagcactggaagctccggtaggaatgctgactgccaggaaggtggggctgagtggctccaaggagccttctagagagaaggcacagcgcagcgaaagtcatggatccagggatgggggattctatctggtggggtgtggggtag

SEQ ID NO: 761369 - DNA, 600 bp, Homo sapiens
attactatccaattaaagcaaaacgcttgttactggccatgatgtcacctttaccaaaagaggaggtcttttttttttttaatagagcattttctctaggcctggtgctaattaaatgctttgygtgcatttctcactgatccttataataatccctccagataggtattgctttcacacctccattttacagataaggaaactgaggtctgaagagatgaagtcacagacgtaaggtaacaacctaacagagtacgcgtaagatgacctgtgctttcagacttgactcccaagcctcttgacgtaatttaaaggtgtcatctagttagtatctggtatctgccaccacccatggcagctcacaactgtcttttttcattctgtcaccttactgaagaggctccgctgtctattagtgctgggaacaaaaatgtgtaagaggaaggctctgcgctagagcactggaagctccggtaggaatgctgactgccaggaaggtggggctgagtggctccaaggagccttctagagagaaggcacagcgcagcgaaagtcatggatccagggatgggggattctatctggtggggtgtggggtag

SEQ ID NO: 761370 - DNA, 600 bp, Homo sapiens
attactatccaattaaagcaaaacgcttgttactggccatgatgtcacctttaccaaaagaggaggtcttttttttttttaatagagcattttctctaggcctggtgctaattaaatgctttgcgtgcatttctcactgatccttataataatccctccagataggtattgctttcacacctccattttacagataaggaaactgaggtctgaagagatgaagtcacagacgtaaggtaacaacctaacrgagtacgcgtaagatgacctgtgctttcagacttgactcccaagcctcttgacgtaatttaaaggtgtcatctagttagtatctggtatctgccaccacccatggcagctcacaactgtcttttttcattctgtcaccttactgaagaggctccgctgtctattagtgctgggaacaaaaatgtgtaagaggaaggctctgcgctagagcactggaagctccggtaggaatgctgactgccaggaaggtggggctgagtggctccaaggagccttctagagagaaggcacagcgcagcgaaagtcatggatccagggatgggggattctatctggtggggtgtggggtag

SEQ ID NO: 761371 - DNA, 627 bp, Homo sapiens
aagtcatggatccagggatgggggattctatctggtggggtgtggggtaggctgactggagtcaaatcagggcgggccctccttcctgaaagttgagttttgactttcacaagagctcctgggttataggcagggaaatgactagatcacatcggtgttgaagaaatatgtttcactgtttacctcctcactacgyaggccctttcatttccagacatgtctgtgagaagtccttaactcctactgtaatctgtttccagaggatttttttttttcctccttggtcttttaagttggctgtttcctccaaggatagaaggaaatcccctggtagcttcaagacctgtgcaggggacgccttgcccaaggaacaagaacctggataaacattgggtcgaccatcgcctccaggtctgatgagcacagatgttttctgaagagttctggaggtaccttgtggcacctgaaccatgctctgttttccttgcaggaggcttttctttttcagtcaccgtttaaaacatgctttctacctgttcagaaaatctagttcaggtcgacgaagacctttgggatgaaatctcaatgcccagcctggagattgggccacatggtttctactagaca

SEQ ID NO: 761372 - DNA, 627 bp, Homo sapiens
aagtcatggatccagggatgggggattctatctggtggggtgtggggtaggctgactggagtcaaatcagggcgggccctccttcctgaaagttgagttttgactttcacaagagctcctgggttataggcagggaaatgactagatcacatcggtgttgaagaaatatgtttcactgtttacctcctcactacgtaggccctttcatttccagacatgtctgtgagaagtccttaactcctactgtaatctgtttccagaggatttttttttttcctccttggtcttttaagttggctgtttcctccaaggatagaaggaaatcccctggtagcttcaagacctgtgcaggggacgccttgcccaaggaacaagaacctggataaacattgggtcgaccrtcgcctccaggtctgatgagcacagatgttttctgaagagttctggaggtaccttgtggcacctgaaccatgctctgttttccttgcaggaggcttttctttttcagtcaccgtttaaaacatgctttctacctgttcagaaaatctagttcaggtcgacgaagacctttgggatgaaatctcaatgcccagcctggagattgggccacatggtttctactagaca

SEQ ID NO: 761373 - DNA, 567 bp, Homo sapiens
ctaatccaataggactggaatccttataagaagagaagattgggacacagaagcacacagagggaagattctgtgaagacacatggagaagacagctatcgaccaggcaagcagagagacctgagacaaaaccaaccctgctgacattttgttcttgaactgctaacctccagaattgtgagaaaatacatttttgttgttgaagttacccagtttatgctactttgtaatggtagacctaacaaactaataacagtatatacattagaaaaacaatgatggrtattaaatcaaaggtataagtttttgcttaaaaaatagaaacagaagaacaaaactcaaagcaagtagaagaaagaaactattaaagataaaagcagaattctatagaacagataacagaataacagagaaaactaaatgaaacccaaatctggttctattaaaaggcaaatataatggacaagtgtgaaaattaataaaatccaaaccggctctttgaaatgaataatgacactgataaaactctagctaaacttaataaaagacaaaaattaaaaccagtaa

SEQ ID NO: 761374 - DNA, 625 bp, Homo sapiens
ggcgggcgcctgtagtcccagctactcgggaggctgaggcaggagaatggcatgaacccgggaggtggagcttgcagagagccgagattgcaccactgcactccagcctgggcaacagagtgacactccctctcaaaaaaaaaaaaaaaaaaaaaaaagttctctgatttratttttgcaacaaatggaaagagacacacttccatgatgagcaaacagtttagagatacatttctaaagctagacccagaattggtgaagtcaaggctacctagcttcaaggcccttgctatcctgggttctaatcctaaaacttttctttgtccaaaatttgggtcccaagttatgtgaaagcttgagataaagaccaaagtttcattgctggtctgataatttttcatatgtaagatctggtttagagttttgtgcctagattggagtgcattccaacctggtttcctggttatctttttaactctggcctacagtgaattaaaccttccaccaactaagttaagaccaagtgtgctgagactgtcatttctgttggacataccaataagtattcagaggttgttttttatgataggcaatggagaaaaataactttctatttttcataagc

SEQ ID NO: 761375 - DNA, 625 bp, Homo sapiens
ggcgggcgcctgtagtcccagctactcgggaggctgaggcaggagaatggcatgaacccgggaggtggagcttgcagagagccgagattgcaccactgcactccagcctgggcaacagagtgacactccctctcaaaaaaaaaaaaaaaaaaaaaaaagttctctgatttgatttttgcaacaaatggaaagagacacacttccatgatgagcaaacagtttagagatacatttctaaagctagacccagaattggtgaagtcarggctacctagcttcaaggcccttgctatcctgggttctaatcctaaaacttttctttgtccaaaatttgggtcccaagttatgtgaaagcttgagataaagaccaaagtttcattgctggtctgataatttttcatatgtaagatctggtttagagttttgtgcctagattggagtgcattccaacctggtttcctggttatctttttaactctggcctacagtgaattaaaccttccaccaactaagttaagaccaagtgtgctgagactgtcatttctgttggacataccaataagtattcagaggttgttttttatgataggcaatggagaaaaataactttctatttttcataagc

SEQ ID NO: 761376 - DNA, 693 bp, Homo sapiens
ccaatatttttaagtgatgagaaggatcctttctaccagatgtcaaaaagtactgagaagtcttatagttgaaataatgttggataggtttatctataaatggagagaggagtgttgcagtttgaaacataaaagtctatamcatagtcattggtgctgtccaacaaatatttctattattcctcttctgtatggggcaccagtgcattgccccacctgccttaaggttaggtgtgatcacatgacttacttttgccagtgaaatgttaatacaagggacctgtgtaatttccagataagaagctttaagactccaggcatcatgcaccatgttctctgtctgtctcatctagtgactgtcattgacagccctgacaccctgggtacctcagcaagaatggtgctgagctcccagacaacccacaatggatgtgtaacatgagagacaaataaaccttttaccctgtatgtcattaagccaggttattactgtgacataatttggtctagactgagaaataaagtggattctcaccagttatctttaaaattccatattctcttatgtgcttgaatatttcagaaaaaatgcctttatgcactccttcttttaaaaagtccttattaaaggttagttaagggcaaaaaaagataacaggtggagagtacttgcatgttactataataattcca

SEQ ID NO: 761377 - DNA, 556 bp, Homo sapiens
aacataaaagtctataccatagtcattggtgctgtccaacaaatatttctattattcctcttctgtatggggcaccagtgcattgccccacctgccttaaggttaggtgtgatcacatgacttacttttgccagtgaaatgttaatacaagggacctgtgtaatttccagatragaagctttaagactccaggcatcatgcaccatgttctctgtctgtctcatctagtgactgtcattgacagccctgacaccctgggtacctcagcaagaatggtgctgagctcccagacaacccacaatggatgtgtaacatgagagacaaataaaccttttaccctgtatgtcattaagccaggttattactgtgacataatttggtctagactgagaaataaagtggattctcaccagttatctttaaaattccatattctcttatgtgcttgaatatttcagaaaaaatgcctttatgcactccttcttttaaaaagtccttattaaaggttagttaagggcaaaaaaagataacaggtggagagtacttgcatgttact

SEQ ID NO: 761378 - DNA, 556 bp, Homo sapiens
aacataaaagtctataccatagtcattggtgctgtccaacaaatatttctattattcctcttctgtatggggcaccagtgcattgccccacctgccttaaggttaggtgtgatcacatgacttacttttgccagtgaaatgttaatacaagggacctgtgtaatttccagataagaagctttaagactccaggcatcatgcaccatgttctctstctgtctcatctagtgactgtcattgacagccctgacaccctgggtacctcagcaagaatggtgctgagctcccagacaacccacaatggatgtgtaacatgagagacaaataaaccttttaccctgtatgtcattaagccaggttattactgtgacataatttggtctagactgagaaataaagtggattctcaccagttatctttaaaattccatattctcttatgtgcttgaatatttcagaaaaaatgcctttatgcactccttcttttaaaaagtccttattaaaggttagttaagggcaaaaaaagataacaggtggagagtacttgcatgttact

SEQ ID NO: 761379 - DNA, 556 bp, Homo sapiens
aacataaaagtctataccatagtcattggtgctgtccaacaaatatttctattattcctcttctgtatggggcaccagtgcattgccccacctgccttaaggttaggtgtgatcacatgacttacttttgccagtgaaatgttaatacaagggacctgtgtaatttccagataagaagctttaagactccaggcatcatgcaccatgttctctgtctgtctcatctagtgactgtcaytgacagccctgacaccctgggtacctcagcaagaatggtgctgagctcccagacaacccacaatggatgtgtaacatgagagacaaataaaccttttaccctgtatgtcattaagccaggttattactgtgacataatttggtctagactgagaaataaagtggattctcaccagttatctttaaaattccatattctcttatgtgcttgaatatttcagaaaaaatgcctttatgcactccttcttttaaaaagtccttattaaaggttagttaagggcaaaaaaagataacaggtggagagtacttgcatgttact

SEQ ID NO: 761380 - DNA, 492 bp, Homo sapiens
ttcgaggcaataataataagattaacaacaatattaataataaaatatactacttgcacacgaacttaaaagtttaaagaaaagaaaaaagatttttaaaagatactaccatattttaccatttattatatcactgattggtggttgtgtttttggcagtggtatttggattttcttagttggtaaggtwatttttttgactgattccacaagtgattacacaagtgaaaaaacatttaataaaaatttgtttactgaatagacaaatgtataaacagccttgacacatttgttgtattggtcaactcaattaattgctgccagatgaatgaatgaatgaacatttgctgagtgtctagcattcatgtaggtactcttctactttgtcctatcaagttctccacttacccaagcaacccactttacaggtagattatttaaaataaggggacccaggtcattgcaaagagggcttgtggggctgtgaaaccg

SEQ ID NO: 761381 - DNA, 527 bp, Homo sapiens
atcagagaactatactttatatggatgctgtattagttatgatagtctaaactcatgctacagtaacaattcttcagtgattaacgtaacaaaagtttatttttactttttttgaagtctgctggatgtctgggtgattccccagggatgtcgatctttcaggaagttacttggcaatctaaggatcttgttattctatgatcccaacctgaggtgttctccagtattatcctaacaagagaagaggaagattggagagttatctggggacttttcattgcctcaagccataaatgacccatatcacttccaatcacatttcatcgatgaatgacaattagattgccttgcccaacwtcaagggggctggggagaggtttttgtttaccaatgaaagagggccatatgcccaggaaatgagatttgttaaaacacatctgctgtataacaaggttggctttatagttaggtgggtatttggttacacatatgtacttatattgttttttacagattaaaattattgt

SEQ ID NO: 761382 - DNA, 478 bp, Homo sapiens
cttataagcacaaatttggcctacttatttatgccctatacatactaagcatctagtaaatgtttgcagttgtcggtgttgatgaaggtaatgattatgcttaattttgtaagtttcttcatccggctttcctgatgtaatcctaaattgaatcttggtgactttacatataacatcaaaatccaaagccartccttacaatgaaaaagaagaacctcataaaaaattagcaaggaacactgcattcccaagagttccaagcaccgcattaggcacatagaagatgtacgtaaaatacttgccaaattattgatttgtgtcagaaatgtcaggtccgtgcgcacacacgcacactcacacacacacaacagagctcaggacactggggttttaaaatctagagcatgtctgaaagctgagaccatgttgtctctgtacaactgaaacaaataaaaataaaacaactaaaataatcaag

SEQ ID NO: 761383 - DNA, 533 bp, Homo sapiens
gtagaaaaggtcacagggagctggaatgaatattctgtggcgtcaggtaccaagtcagagaggcgtgcgtggcagagtaggatcaacttgatgcctggagtcccagagacctgggctggcgtctggctaggtcacaagtcatgtgatgataataagtcggttaacctttgtggttccctgataatggcagataagcayatttcaaattgagagaggtttaaatgagacagtgcttgttgatagtgcatagtggagtgtgaagaaatataatctacttttaccaaatgccagttccccaggatccctcacccttgctggagtatttggaacagggatccttggacacgtgggttggaaatgaggcaccctgagcaatggtaacaggccagcaggggatctctttacagataaaattccagtggctggggtatcctgccctgggaatagaaggtgtgtggtttgcagtttaacagttttatcacactgtataatgtggctgggcatccatagcaagctcagccctgggcttggta

SEQ ID NO: 761384 - DNA, 503 bp, Homo sapiens
aaaaataagatgctgttaatacaagcagaaaagtggggcttagaaaaatatccactgtcaaaagacaaagaaaggtgaaaaagcaaatcgcaagcttttggtacacataccttatcatagcagagacagggtgttttttctagagaaatcacccacagtgagtatctgcaaataatagaaatctgtaatagcatcattgctgaagctagaagagagttaatgtagaaaaggtcacagggagctggaatgaatattctgtggcgtcaggtaccaagtcagagaggcgtgcgtggcagagtaggatcaacttgatgcctggagtcccagagacctgggctggcgtctggctaggtcacaagtcatgtgatgataataagtcggttaacctttgtggttccctgataatggcagataagcacatttcaaattgagagaggtttaaatgagacagtgcttgttgatagtgcmtagtggagtgtgaagaaatataatctacttttacc

SEQ ID NO: 761385 - DNA, 683 bp, Homo sapiens
acatgccagaggaagacggaagggatcctcattagtgctggcagtgttggaagtgcaaacttcccactaggccttccaccctgactgggagggtgaaggacaccttgttacttttccccacatggtctctgctgacactgagttgggggatttttttaccattggaagttggtraaagtcggacttctcacttggccttctctgacatcatgctggtgggaaaggggaggaatgcctcattactactaggttcgtttggaagttttaggctcccaatttggtctctactgacaccccttgtcgtagggcatggctccttgctgtgtgaaagttcagggtcctgactcagcttttgctgatgtgctagccatgaagctgcagttttttcagaatgtttggttgggttagaggagttagttattgtctgaaagttttctatcttactaaactgtccctttcaccatcctttgactagacagagtcaccttttcttgttgtttattgtttgtttctgtctgtgcccattgtgatttctgagttgccagcttgtccctaacccagtatgggatacatgaagcaaaaaagaaacccagggaactcacctctctgtcttttttcaggtttctaaatccctattcagttgtttctcttctttccgcctttcagcattatgttttgtttgt

SEQ ID NO: 761386 - DNA, 586 bp, Homo sapiens
ggttctccactgccaccactgccattgtgtcagctgccttttttttttttttgagatggagtctcgctctgtcgcccagactggagtgcagtggtgccacctcagctcactgcaagctctgcctcccaggttcacaccattctcctgcctcggcctcccaagtagctgggactacaggcgtccaccaccacgtgtggctaatttttttgtattttcagtagagacagggtttcaccgtggtagccaggacagtcttgatctcctgacctcgtgatccacccacctcagcctcccaaagtgctgggattacaggtgtgagccactgcgcccagcctgtgtcagctgctttttacaaagcattatgcaagtagttaatgactaatayatacatatctaatatatatacatctaatgcagaactttttttttttttgagatggtctccttctgttgcccaggctggagcacagtggtgtaatcacagctcaccacagccttgttctcctgggctcaagcgatcctcccacctcagcctcctaagcagctagggccacaggtgcacgccaccactcccagctaagtttta

SEQ ID NO: 761387 - DNA, 512 bp, Homo sapiens
ccttaccctgctcgcccgtctccattggcttgtccctctggatccatcccttcccacttccttgatgtgagtgccataagttgagttttatttctccagcatccctctctctttcggcagcttcctgtcaatgtcagcctcactccagccagtgttstgtactgtcagcctttcacaggcaagggtttaaagagacagacaccctcctcttcgtagctgctcattccctcctcaatgcactgcaatctagtttcttggctcactgctatcctggaactcctttggcagaggtctgccactaaacctgataggtgttttccagttcatgcttttgtccaacacacatttcacaaactgaagtataaggacatatgtaagatgagaaattatcactaatttaaaagtcttgaggaaggtataaatcagaatggaaagtcggacagaggaaaaaaagaacatatggaagaccgtatcccccgataaaagcttggaataaaaacaaaagtgcaact

SEQ ID NO: 761388 - DNA, 510 bp, Homo sapiens
ggaggaggataccatctccttaccctgctcgcccgtctccattggcttgtccctctggatccatcccttcccacttccttgatgtgagtgccataagttgagttttatttctccagcatccctctctctttcggcagcttcctgtcaatgtcagcctcactccagccagtgttgtgtactgtcagcctttcacaggcaagggtttaaagagacagacaccctcctcttcgtagctgctcattccctcctcaatgcactgcaatctagtttcttggctcactgctatcctggaactcctttggcagaggtctgccactaaacctgataggtgttttccagttcatgcttttgtccaacacacatttcacaaactgaagtataaggacatatgtaagatgagaaattatcactaatttaaaagtcttgaggaaggtataaatcagaatggaaagtcggacagaggaaaaaaagaacatatggaagaccgwatcccccgataaaagcttggaa

SEQ ID NO: 761389 - DNA, 672 bp, Homo sapiens
cagtaatcatccaatatgatttagctcttgttaataaaaactcgcatactctgggaaactattaattttttatgtcattaagggaaaacctatcaaatcatgcttaaatatattaaaaagctcgaataaattaataatacagcttccttattgtctcccctacttcacactgagaatgtggtatatactctgacaaaatcaggaaggaattagtaatgccaagtgaacaggaactcagtcttacagtaccagggacaaagagatccttcttaatcgagattttgaaagcatgtttcatgttgacacttcttattttattttaaaggaatctcaaatttagcccctgaaagaaatgtaaacatgtggatgttcattcatctgaataatgtcagtagttaaaaacttccattattactaataaaaatagcaacagtatattgtgctatgaaattctaaactgtktcacaataattaattagtaaatgacatgacaaacgctatctacatactctcattttaataaactatcatgtactatggcttaataggaatgaaatcagcctagatcttacctaattagagaacatttctgtattagaatacactactgaaaactcaatagtggtttccagtggacaagttttcatactatgatctaacaaaaatctctaa

SEQ ID NO: 761390 - DNA, 525 bp, Homo sapiens
aaagagaaatgaagtaggaactttttgcttgtttgacatattcctgatttttttgtaggtgtctctgaggtgatgtagcttttttggacagtacacctgctatgatatgtaatagtttgtactgttttgctaagtgatttttcttcctttaacagaagtatattttaactgtktggtttcttttttctttgtgtgccaatattctttgaggagaatagaaaatggaagaagaaaccttagtaaataagttttttttgtgttaccgagaaactgtttaataataaatgtttcccgatccacttgatgtccacttttttaaaaaatggcctttattgaaggcaaaatttggtttcgattttgcttagatgaaattgcattattttgctattattcaggagactgtttctcacctggttgatcatttcaactgtttctttctgtgcttcaaatcatgagaatcccatttgccccaccgcagacttggcatgtcgaataaatgtgatggcagcaattaacatcacgatt

SEQ ID NO: 761391 - DNA, 525 bp, Homo sapiens
aaagagaaatgaagtaggaactttttgcttgtttgacatattcctgatttttttgtaggtgtctctgaggtgatgtagcttttttggacagtacacctgctatgatatgtaatagtttgtactgttttgctaagtgatttttcttcctttaacagaagtatattttaactgtgtggtttcttttttctttgtgtkccaatattctttgaggagaatagaaaatggaagaagaaaccttagtaaataagttttttttgtgttaccgagaaactgtttaataataaatgtttcccgatccacttgatgtccacttttttaaaaaatggcctttattgaaggcaaaatttggtttcgattttgcttagatgaaattgcattattttgctattattcaggagactgtttctcacctggttgatcatttcaactgtttctttctgtgcttcaaatcatgagaatcccatttgccccaccgcagacttggcatgtcgaataaatgtgatggcagcaattaacatcacgatt

SEQ ID NO: 761392 - DNA, 646 bp, Homo sapiens
atgagacagtcaagtaggagtttttaaaaattacaatactattgtctaataaatgaaaagaagtttcatgtctctcactactaattttctatattgggcatcatcttcatgtacagagcaatcagatgattgttcaaaaaccaagtaattctttcttttattactaaattgctgcaacacaagaaaaggtgacatggtagagtggcattctgccagtgtatgacaactcagtgattgcgatttttcaaccgtattattctgaggacactgtggtaatcaagaactatccataactaatgtataaataactgcttgcttatttctacaataatccaactcaaattatatatacacagcaaaaagcttatgatagaaggtaggaaatgaatatttaaggatatattgtacattatatatttgtgtgtatacatgtttataaaaatagatatttcttgtatatattcttaaraacttttgtaacaaagtttgtggctacatttggtaactaacatgatctttgccttatgaatcaaccttttactttttaaaaatagttgtcttttcatcagtgttgttcatccacaaatgactggatataataagtgggtttttttagtaagacactctattttccaggaatttgata

SEQ ID NO: 761393 - DNA, 627 bp, Homo sapiens
gtttggaatacaaatgatcctgtcaccgagatagtgagcacagtacccaacagttattttttcaaccctggctctcctcccaccctccccgctctaattagtccccagtgcttattgttgccagtaggtgtaagtttctatgcactatgatggtaccacataccactatgaatcaaagacatcctttgattattctagyggtggtgatgagcttcactgcccattcacatttatctattgatgtgctggtaaatattcagtaactggcccttgagggtggaggatagagaagccctgatttgtagcattttaatcgtgtaaatactcccttcatggcaaatttcaagccaccagcaaagggtgacatcagtgaacaacgatcgggaagcaccgcacatgactggctcctgggctccggctccagcacactgctactccatttatcagacagctctgggtaccagcagcacggaattgctcggtgtgactacagattgtcctctctgagaagaaactaagtatttcacagggataaaattagtccatgcttatattacacatgaagtcgctgaataaagtacctgacaactatgtctaaggctcatcttggagagtcttgatcaagag

SEQ ID NO: 761394 - DNA, 627 bp, Homo sapiens
gtttggaatacaaatgatcctgtcaccgagatagtgagcacagtacccaacagttattttttcaaccctggctctcctcccaccctccccgctctaattagtccccagtgcttattgttgccagtaggtgtaagtttctatgcactatgatggtaccacataccactatgaatcaaagacatcctttgattattctagcggtggtgatgagcttcactgcccattcacatttatctattgatgtgctggtaaatattcagtaactggcccttgagggtggaggatagagaagccctgatttgtagcattttaatcgtgtaaatactcccttcatggcaaatttcaagccaccagcaaagggtgacatcagtgwacaacgatcgggaagcaccgcacatgactggctcctgggctccggctccagcacactgctactccatttatcagacagctctgggtaccagcagcacggaattgctcggtgtgactacagattgtcctctctgagaagaaactaagtatttcacagggataaaattagtccatgcttatattacacatgaagtcgctgaataaagtacctgacaactatgtctaaggctcatcttggagagtcttgatcaagag

SEQ ID NO: 761395 - DNA, 612 bp, Homo sapiens
ttttatttaaacaacagccttgccttgcctcccttgatcattaggaatagacttgaaagataagatgttttaggaaggagacagaatagtaaacaagatggcccagtctaagcctgcagtctgggcacaattttgaacagcacctccgtgtgatatcgatagtgtctcaatgctgtctatctcaaagttaccctcagtagaggataagttgttatgtcaaatctaaacaaaggggactccasagcctctgcatgtgttgtgtgcataatctccactctagccctgcagccagaaaccctggtccctcccttgcaggactgtttaaggctcaccatagcaacacatacacactgagacttcccactcacatctggggatcacgcattgctccaggctgtgcatgactcctcccaagtgtcacatttgttctaaatggtacttaagtcactggaggagggatactacagaaagtggccagcttagcaacagaagtgcctttatgagttgcttgtcctataatctgttctctgttgatgccatattgatccccaaatgaagacggccataagagcaatggaaatgtaaaatggacaatgttcttaaaaggttatt

SEQ ID NO: 761396 - DNA, 441 bp, Homo sapiens
atatcatttaaaaattaagataaccataaatagattttcagaaaagcaaatatgataaaatgtattatcatcagacccacattaaagtaaatagtaaagggtactttttagtgaagggtacattaaagtaagtagtgaaagataattatctcagatgaggactcttcaataaataaaggaaaagaaagcattgaaattcaggaaaatataaattgatagtgattgagtacatcaatattagtaatgtcttgaaattaaaatatacattaaaatgaaatacaatacaaaaatkgcttataggttggaacgggagagaattaagtgttctaaggagactgcattgtcaatagttatgtacagacaagagtatatatccttacatatacaagagtgtatatacatacatatatacatacatatactcttgtctgtagctacata

SEQ ID NO: 761397 - DNA, 642 bp, Homo sapiens
aaccaaattgatgagtctaacagtaaatcagatagttctaatgtgaaaattagtaaacaggaatatatatcaatggtaaatattagatgaaaccatcatgagaaaataaaagaggaaaaaaaaacaaaaaacaaaaatgagagtcatacatgatgaaaagatcttgcaggcatgcaattgcaactccaaaatgtaagacgataacaaatgagatagaagcaatctgtgaagagacagaggccaagaattgctcaacgctggcaaaaaatatcaaggtcccaattcaagaaataatgaaaataacaagtaagatattacaaagaaaatgaaacttggaaacatcaaagtaaaagctttgaaactaaagaaaaagacaacamtcttaagggaaatcaaaaaaataaacactcttttaaaaataactataggattaacagctaatttactaacataaataataaaagtcagaaaaaatatgtatcttcaaattctgaaggaaaattctcacctaagaattctatatgccacaaaaatatctatcctgaaaatgaaggtgaaataagtatattttcaggcaaattaaaaaaaaaaaaactaaaatcatccctgaagaccttgaataaaaggagtttttaaagcagc

SEQ ID NO: 761398 - DNA, 615 bp, Homo sapiens
aggcgcatgccctcaaagacagggttgaggaggagggccgaacatatcaataaaaaaaaattatctcacttcactttttcaactcaaatggcacccagtaagggttgactaatttcagctgctcagcaagctctggaacagggtttgagatgtttatgcggcgacgtccacctttacaagtgcctcctcacgtgtatgtggggcaggagggagcacttactttacttcctgactaggtagggaagaagaaagtatttcccccataagcctataattagcttttctaaaggctcaagaccactgatgaggtgatcatctcaggaacatcgtatcgacctctgagaaaccctataaggcttattcagccctgaagtctagaagctccttagccgctgtgcaagattgtatattrtcaaatctcttgttacattgccctgtagattttaaagaagaaatctgggaaacatatttttcagaatcttttgtcagcatagtgtgggcttaactttgccaattacagatacaaaaggttaggaaaactgaagaaacccaaagccattattttctggtgagagctgcaagcaggtatatggtattggcaggtggcagacaaaa

SEQ ID NO: 761399 - DNA, 588 bp, Homo sapiens
tggaaggatatacaagaaatggaaataggaaagctaggggatagggatggcaggatgacttttcactgtatccttttgtgtcttctgaatttgaaccatttaatgtattacttattttaaaaattaaaatgcaaaagccccatcaatctgacctcagccttcctcattagcttttttcctcacctcctatacggcctcttcatgccagtcaaactggtctcttcagtgtctctrggatttgggtcacatttctcgaccacaagcctttgcttaattctgtgctcccatctggaatttcctgtactctttgcataatcaaagcccactcaccctcaaaggtcaggcccaaatgctgcctcctgtgggtggattttcctgatcctctctctgcatgggtgaaccagcccttctttgctcccgcagcctgtccctctgctgtgacccaccgttcctttgctcgctgtgcgtctgtgttctttattggactgtcagctctctgagggcagggacttaaccttccattctttgtgtctccagcaccccctgcaacctgcaatttggcaccttggaatcttttaataaataacc

SEQ ID NO: 761400 - DNA, 532 bp, Homo sapiens
aagctttggggttaacatgaacatgactgcataaaagccctgtttacagccaaaccatgtagtgaaccacgatgacttttttttccacacaattttttgtttctcctggaagtaatgattaccttgctttttttgtttgcttggttcctgtttagcttacacatatctaattcaatctggaagccttcatcaattgtctaattcttccctttgcaattatctggtgacaatttcttcttctaggatatctcccctggagatttctgatgtactccaacatggactggaagtctctatgctgggtgcacagctgtcaccctgggcctttcttccaccagcaaagctctttcatgttggatctctgtgtcaygatcgtgttaccttccagttttggggacacttgtcctcaaggagcttccaggaaaggggtgcatgggagggaaatattttgagaccttctatgtctaaaaatatctttcttcccttttcttgattgattggaactttagaggattgtggagtcccagactgg

SEQ ID NO: 761401 - DNA, 515 bp, Homo sapiens
aggctaggtgagaaatcgagcgcagggccggtgggccagcacttctgggggacccagtacaccctctgcagccactggccctggtgctaagtccctcattgcccggggccagctgctccaagtgccaggccgccaagcccacgcgcacctggaactccagctggcccgcaagtgccgcatgcagccctggttcccgctcacgcctctccctccacacctccctgcaagctgagggagtgggctccagccttggccagcccagaaaggggctcccacagtgcagcggagggccgaagggctcctcaagtgccgccaaagtgggagcccagacagaggaggcgccgagagtgagcgaragctgtgaggactgctagcacgctgtcacctctcactagcttctaggggctgtggcaatgtttggagttccttgccttgtagacatatcactccaatatgtacctctgtcttcacatggttttcctcttgcatttcagatatccctcttctttctctta

SEQ ID NO: 761402 - DNA, 595 bp, Homo sapiens
aaaaagtcaaattattcttgcttgcagatgatacttttgcagaatgtttgcttcttagttaagctaaaaacgggttcttgtcacatgaccaggaaggattaggaatgaggaaacattgaagggtgagtggagcaaaatttattgagaaaaaaagaaaacctstcagcaaagcgagaagggttcctgccaatgggctcccactccacgaattccagaccacaacacgtgagctgaagaggccaggctcttccccacgcacaaggcatgaaatttccatggttttaccccattttgccagtgtgcaggagggttggagattttccaagcaccctcccccttatctgcctcctgcatttatcatccctccacctaaaaaagtacatctaactgccattagaataaaaataaggataagggcaaagactgatcttaactgcttcctgccaatagtggctgctgttttgggaaaaaggcagtcagatctccctcagtggcctatccaaatgtccatggcaaaaggggccctcatctgaggccctgttgcatgatcatttggagttcaaaagcctgaatgcaaggagagacaaactgggtt

SEQ ID NO: 761403 - DNA, 595 bp, Homo sapiens
aaaaagtcaaattattcttgcttgcagatgatacttttgcagaatgtttgcttcttagttaagctaaaaacgggttcttgtcacatgaccaggaaggattaggaatgaggaaacattgaagggtgagtggagcaaaatttattgagaaaaaaagaaaacctctcagcaaagcgagaaggkttcctgccaatgggctcccactccacgaattccagaccacaacacgtgagctgaagaggccaggctcttccccacgcacaaggcatgaaatttccatggttttaccccattttgccagtgtgcaggagggttggagattttccaagcaccctcccccttatctgcctcctgcatttatcatccctccacctaaaaaagtacatctaactgccattagaataaaaataaggataagggcaaagactgatcttaactgcttcctgccaatagtggctgctgttttgggaaaaaggcagtcagatctccctcagtggcctatccaaatgtccatggcaaaaggggccctcatctgaggccctgttgcatgatcatttggagttcaaaagcctgaatgcaaggagagacaaactgggtt

SEQ ID NO: 761404 - DNA, 664 bp, Homo sapiens
tggttttgacttgcatttctctaaacgttagttatgttgggaatttttttcatgtgcttgttggctgcatgtatgtcttctcttgaaaagcatcttgtttatccccactttttaacaggattgtttgttttttccctgaatccagaatctataaacttaaataaattaacagatgcataatttgcaaatatttttctcccattctgtggcttgtctgtttactctgttgatagtttattttgctgtgcagaagctccttaatttaattaggtcccayttgtcattttttttttttgtatttctgttgcagttgcttttggtatcttcatcatgaaatctttgccaggtcctactccagaatggtatttcctaatttgtcttcaagggattttatagttgtaggtttcaaatttaagttttaatccatcttgagttgatttttatatatagtgtaaggaaggggtatagtttcagttttctgcatatggctagccagttatcttggcaccatatattgaatagaagttatttccccagtgcttgcttttttcaattttgttgaaaatcagatagctgtgggtgtacagctttacttctgggttctctaacctgttccattggtctatgtgtttgtctttgtgctgttaccatggtgttttagtta

SEQ ID NO: 761405 - DNA, 615 bp, Homo sapiens
tttcaggctttaaattgtctttggcttgaaggtgaggtttcactggggacctgcccctatctgactaggcatttgactgccttctgtcactattaaaccaaactgcttctgattattattctgatataaataggaattaaagcataatttaggtcaataactgcatatatytgtgtattaagtatcagatattgcattaatttgttagaataagaatacttcatctggaaacacagctgagattggcatatgaatgtgtctacatttccaataactaatcattattatccatgtgctatttgcactgggcaaaatataattctcatagggatatggtaagaatcatcatctcctgtaaccctctttaatctctgcaattatcctagagatgtgatattgctcttgtcttactttcctggcaaaagtcagtagtttgaagggttttcacttgccctatgttttatagtagccctgattccatagatcgagaaaccaattaggaatcttctcatcttctagatataactaattattcccacaacacattgagaggaccagataagtaaccacaggatgagtctataatcacatttgattcattgtgaggcatactgg

SEQ ID NO: 761406 - DNA, 669 bp, Homo sapiens
aagcttcctttttctccatatcctcactagcattcattattggctgtcatttggataaaacctattttaattgggrtggaattatattaatatttcattgtagtttctatttgcactgctctgatgatcagtgatgttgagcacctttttatatacctgtttgccctttgaatgtcttcttttgagaaatatcttttcagatccttgcctatttttaaattgaattattagggttttttttttcctgtagagttgtttgagctccttacatattctggttaccaattccttgttagacaagtaggttgcaaatatttttttcccattctatggattttctcttcagtttgttgattgtttcttttgctgtgcagaagcttttacattgatgtaatcccatttgtccattttcagtttggttgcctgtgcttgtggggtattactcaagaaaactttgcctagtttcatatcctagagagttttcctagtgttattttttagtagtttcatagtttcacattcgtcaaagaaatagaaaattagtcctaaaatttatatggatctacaaaagacccagaatagccaaagccatcctgagcaaaaagaacaaaattggaaaaatcacattaactgacttcaaattttactacagagctgtggtaactaaaa

SEQ ID NO: 761407 - DNA, 669 bp, Homo sapiens
aagcttcctttttctccatatcctcactagcattcattattggctgtcatttggataaaacctattttaattggggtggaattatattaatatttcattgtagtttctatttgcactgctctgatgatcagtgatgttgagcacctttttatatacctgtttgccctttgaatgtcttcttttgagaaatatcttttcagatccttgcctatttttaaattgaattattagggttttttttttcctgtagagttgtttgagctccttacatattctggttaccaattccttgttagacaagtaggttgcaaatatttttttcccattctatggattttctcttcagtttgttgattgtttcttttgctgtgcagaagcttttacattgatgtaatcccatttgtccattttcagtttggttgcctgtgcttgtggggtattackcaagaaaactttgcctagtttcatatcctagagagttttcctagtgttattttttagtagtttcatagtttcacattcgtcaaagaaatagaaaattagtcctaaaatttatatggatctacaaaagacccagaatagccaaagccatcctgagcaaaaagaacaaaattggaaaaatcacattaactgacttcaaattttactacagagctgtggtaactaaaa

SEQ ID NO: 761408 - DNA, 551 bp, Homo sapiens
gctttcagggaattttccaacacatgacttagtcactgatatgaaatcacatgtgagaagtgccccttagactccacggttggtgctcctggagcgttttgtacctcagtcacattttccattgtttcagagcttcctatgtagttgctcctcccccctccctctccctcggtaactggacttttctggggtgcagggtccctgacttactcatctctacactgcctgcagcactgtgccctataaggagtggagtaaatgtctgtataaggaatttcacaaaatattttatagaattgggattgagaatgagcasacctttaggggtggtgaagagccgctagggtagcaaaagagctatccataactgtgagaggtttgaaaatctgttctgaaattcctatcgcaagggatgcatgtcctttgaaatcttacttaaaggaaaggaggctgagtgtttgaatccacttgtcttatgacatacacgtgacctacaggcagtagctgatgaggcgagggaaaaggagctgcagtgacttgcttcatcctca

SEQ ID NO: 761409 - DNA, 551 bp, Homo sapiens
gctttcagggaattttccaacacatgacttagtcactgatatgaaatcacatgtgagaagtgccccttagactccacggttggtgctcctggagcgttttgtacctcagtcacattttccattgtttcagagcttcctatgtagttgctcctcccccctccctctccctcggtaactggacttttctggggtgcagggtccctgacttactcatctctacactgcctgcagcactgtgccctataaggagtggagtaaatgtctgtataaggaatttcacaaaatattttatagaattgggattgagaatgagcacacctttaggggtggtgaagagccgytagggtagcaaaagagctatccataactgtgagaggtttgaaaatctgttctgaaattcctatcgcaagggatgcatgtcctttgaaatcttacttaaaggaaaggaggctgagtgtttgaatccacttgtcttatgacatacacgtgacctacaggcagtagctgatgaggcgagggaaaaggagctgcagtgacttgcttcatcctca

SEQ ID NO: 761410 - DNA, 660 bp, Homo sapiens
acaatcaagtctgcttcatccctgggatgcaaggctggttcaacatacacaaatcaataaatgtaatccactacataaacagaaccaatgacaaaaaccacctgattatctcaatagatgtagaaaaggcctttgataaaattcaacaccctttcatgcttgaaactctcaataaactaggtattgatggaacttatctcaaaataataagagctatttatgtcaaacccacagccaatatcatactgaatgggcaaaagctggaataattccctttgaaaactkgtacaagataaggatgccctctctcatcactcctattcaatatagtattggaagttctggccagggcaatcaggcaagagaaagaaataaagggtattccaataggaagagaggaagtcaaattgtctgtgtttgcagatgacatgattgtatatttagaaaaccccattgtctcatcccaaaatctccttaagctgataagcaacttcagcaaagtctcaggataaaaaatcaatgtgcaaaaatcacaagcattcctatccaccaacaatagacaaacagagagccaaatcatgagtgaactcccattcacaattgctacaaagagaataaaatatctaggaatacaactaacaagggatgtgaaggacctct

SEQ ID NO: 761411 - DNA, 627 bp, Homo sapiens
gttctaagtcacaggatgagataagaggtcagcagaaaatacaggtcgtaaagaccttcctgataaaacaggttgcagtaaaggaactggccaaaacccaccaaaaccaaaatggccacgagagtgataactggtcgtcctcactgctacactcctgccagcgccacgacagtttacaaatgccatagcaacatgaggaagttatcctgtatggtctaaaaagggaaggcataaataatccaccccttgtttagcatattatcaagaaataaccataaaaatgggcaatcagcagccctcagggctgctccgtctatggagtagccattctttaattcctttactttctcaataaacttactttcactttgcactgcggactcgccctgaattctttcttgcgcaagatccaagaaccctctcttgggccctggatcagggtccctgtcctgtaacaacttgaatgagaatataactcrttgtttacattttagagtgacaggaagccagaaggtaaagtcaataaattggataagcgttagaatccaaagagagaggaacaagttgaaagtatgaaccaaatataatttaattgggaataaatataaaatgcttcattaggtttaa

SEQ ID NO: 761412 - DNA, 644 bp, Homo sapiens
tgctgtgactctgaatttctagaggaaacaaaagaactaacaatttaatgccacaactaataggtggtagatttatttttagtacctggttctgtcttgcttcagtaaccctggtatttctattatacacatatcatctggtcattttgacttcttaaaawccaaggcttttcttcctctcttggttcaggatgaattttctgtgtctccttttgacgattctatgaagaccccctcttgactttccacatgacatatattcactgtgccaaggttcatgctgcctagcatcagagtttattgttccatctggctataattattccatttgcacaagatcctgatgtgtctggtgcttccttggtataaggtttctgttttaatggttttatgatgtgctgagctgcatttggtgtgttggatgatttccttaatttgactctgatgtttgtgaagattaagtatttatcagttcacacagttttggtttttgactcataaaactggagcaaatgggcctggggctcaataattcaatgactgctgataagtttcataattttgttcttttattattgggaccactgctagagagactttctctataattttcttctagtcccctaaaacaattgcctgatatt

SEQ ID NO: 761413 - DNA, 555 bp, Homo sapiens
agatatcctgccttttggggccagtgtatacctcctatgtattgatttatatctttacctgtaactcctgcctccctgaaatatataaaaccaaactgtaacccaaccacctcagggccacttactcaagacttcttgggattgtgttttccccaggccacagtcaaccatattagctaagaataaacctctttaaaatattttgtgttttccccaggccacagtcacccatattagctaagaataaacctctttaaaatattttacaaagtttagtttttccattaacagtttggtttttaattcagrccctccagaagcaaccaattttgtagacaatttgatttcagacattaacctccagacctgtaagagaataaacttctgttgctataagccaccagcttgtggtgctttgtgacagcaaccctggaaaaggaggacctcaggcaaagaaccatgaccagcttaggtgcttgctgggtgcaaagggtttagggaataggtaatgggaggagaaggcagtcataaataccagctatgaccatgtgacca

SEQ ID NO: 761414 - DNA, 555 bp, Homo sapiens
agatatcctgccttttggggccagtgtatacctcctatgtattgatttatatctttacctgtaactcctgcctccctgaaatatataaaaccaaactgtaacccaaccacctcagggccacttactcaagacttcttgggattgtgttttccccaggccacagtcaaccatattagctaagaataaacctctttaaaatattttgtgttttccccaggccacagtcacccatattagctaagaataaacctctttaaaatattttacaaagtttagtttttccattaacagtttggtttttaattcagaccctccagaagmaaccaattttgtagacaatttgatttcagacattaacctccagacctgtaagagaataaacttctgttgctataagccaccagcttgtggtgctttgtgacagcaaccctggaaaaggaggacctcaggcaaagaaccatgaccagcttaggtgcttgctgggtgcaaagggtttagggaataggtaatgggaggagaaggcagtcataaataccagctatgaccatgtgacca

SEQ ID NO: 761415 - DNA, 531 bp, Homo sapiens
gggtttagggaataggtaatgggaggagaaggcagtcataaataccagctatgaccatgtgaccagttgcagaaatgaggactctaatagttaggggtatttcttccttattttgtcttgaaaatacgtatatattaagcagatatttttgttttyttcttttatcagtttacatacaatgtagtcataatagtgtgctttgtatcacagtatttaggttacaggatatcaaagcagacgagtgaaaattgcccaagaacttagcattgtcttttgaaggaagagttaacatgctgttggttgtatgcagtatagttgtatcatgttaagcacaagtgtgatttcgttagtgcctttattgggagattaagtatggtttaaggatatgtatatgggtgctcagatgacaagaggtagactgaaatggtcagttttagatgtcaacttcatcagactatagttccctagttatccaatcaaacatgaatctggatgttgttgtaaaggtatttgtagatgggcttaaagact

SEQ ID NO: 761416 - DNA, 603 bp, Homo sapiens
tgttgatgaacacttagtttgtttccatatgttggctatgtaaatagtgtttcaataaacacaggacagcagatatctctttaacatactgatttcctatcctttgaatatatatctagtagtggagttgctggttcatatagtaattcctttttgtgttttttgaggaacctccatactgttttccataattactgaattaattcaaattcataccagcagcatatgagttmccctttctctacatccttactagcattttttttttgtctttttgacaacagctattctaatggggtgagatgctatcttattatggtttggatttgcatttctccgatgattaataatgttgactatgctttcatacatgtgttggctatttgtatgtcttctattgagagatgcctattcagctcacttgcccacattttaattggattatcttttttttcatttgctattgagatgtttgagttccctgcatatcctggatattaattccttgtaggataaatactgacaaatattcttcccattctgaaggtgtctctttactctgttgattatttcctttcctgtgcggaaactttttagtttgat

SEQ ID NO: 761417 - DNA, 603 bp, Homo sapiens
tgttgatgaacacttagtttgtttccatatgttggctatgtaaatagtgtttcaataaacacaggacagcagatatctctttaacatactgatttcctatcctttgaatatatatctagtagtggagttgctggttcatatagtaattcctttttgtgttttttgaggaacctccatactgttttccataattactgaattaattcaaattcataccagcagcatatgagttaccctttctctacatccttactagcattttttttttgtctttttgacaacagctattctaatggggtgagatgctatcttattatggtttggatttgcatttctccgatgattaataatgttgactatgctttcatacatgtgttggctatttgtatgtcttctattgagagatgcctattcagctcacttgcccacattttaattggattatcttttttttcwtttgctattgagatgtttgagttccctgcatatcctggatattaattccttgtaggataaatactgacaaatattcttcccattctgaaggtgtctctttactctgttgattatttcctttcctgtgcggaaactttttagtttgat

SEQ ID NO: 761418 - DNA, 616 bp, Homo sapiens
atgttgtaaagagatcagacacaaagcaataggatgcaggtatcattattattattctcttcaggaaatactgagaaccatgaatgtagcactaggtagcttgtccttccttgagttatgagacagataacagggtcttactctgtcttaaaaagtcttaaagccttgtgttgagtggcaacagtaatatcaatccatatgcattcaaacatcgtaatttctggacattcctttctagggattcactaaacatgtatgtatggtgacctactacgccagacactttttatacactgatacaaaatattaaaaactccttccttcagagtttacattctagtaaagaatataaacamtaacaagagaagtaaaaagtccattgtgttagataaaaataagctataagagaaaaaatacatagagaagaggagatatcaaatcctgatgggaaaagaagatgaaattttagataggatagacagggaaagtcccactaagaaggtgacttgactaaagattggaaggaagttaggccattcttttttcttggagagaccaagcctggctgagggacagggaaatccctgagatagagtgagccatgtgggttcaagga

SEQ ID NO: 761419 - DNA, 521 bp, Homo sapiens
ggtgttactggggccatctgcccctcttctcataccttgccctgtgcatctgttccatctggctgtgccacagttgaatccttcataataaactgggaatagcaagcaaaccacttttcctgagttctggtgaactatgctagcaaattaccaaacgtgaggagggaaccccatatttgtagctggtctgtcagcatgtgaaacccggcatttgtgattcgtgtctgaagtgggaggcaatcttgttggactgagtccttaccctgtgcggcctgccttaacccaaggtagttagtgtcggaatggaattaaattatatggcacccasttggtgtctggagagaattatgcaattattggtgtggaaaacccatactttttttttttgttagtgttataagtaaagaagtggttttcctttacaaataaaaggttgacagtggatttccccaaaggagtatgtctctagcttctatatttagccgtagggtgtcctgccgcccaccatcctggaaagcaag

SEQ ID NO: 761420 - DNA, 701 bp, Homo sapiens
atagatcctgactccaagccgtggatcccaaacaacatctgtggacccacgtgagatccggggaacctgccaccttgaagaaaagcacaccagcgtggctggtttcaccacatactgattgtagagtcctcaggccttgaatgaaaattggcagtagccagacaatgattattgtgagcatagggcaatacatagtgctgtgcttgattccattctaacccagtgcagtctctgcagtggagaccacagggatgmtatgttgctttctcttcccagctccaggcagctcaacacagagaaaaagattccatttgtttgggacacagtaagggaagaaatctaaagtctctgataatccagagaattattcaggatcttatccaaatcaccaaagtggttcctctatgagactgcaagagccacagcctcactgagcttggggtgccccccagtgcagataatggctgcagtgaccaaaatcttagatcacaacatccaagtccctccaaatacctgggaagccttctcaaggacaagtacaaataagcccagactgtgaagactacaataaatgcctaactacttaatgtctaagcatcaatgaatatccacaagcatcaagaccatccaggaaaatatgacctcacctaatgaactaaataaggtaccaggaaccaattatggaaagacaaagatatgtg

SEQ ID NO: 761421 - DNA, 487 bp, Homo sapiens
atccggactctcatgtttattgcagcgccattcacaatagccaagatttggaagaaacctaagtgcccatcaacaaattaatgaataaagaaaatgtggcacttaaaaacagtggaataccattcagccataaaaaaaaataagatcctatcgtttgcaacaacatagatggaattggatgtcactatgttaagtgaaataagccaggcacagaaagaaaaacttcacgtgttctaacttatctgtgggagctaaaaattaaaacaatggaatgcatggagacagagagtagartgatggttaccagaggctatcaaagacagtgggttgggtggaagagggaatggttaatgagcacacaaaaatagatagaataaataagatctagtatgtgatagcacaacagagggattatagctaacagtaatttattgtatattttaaaataactaaaagagtagaattggattgtgcttaaggtaatgga

SEQ ID NO: 761422 - DNA, 666 bp, Homo sapiens
ttagtaaaacatgaactgattcacaaagaaggaaatagattattaataaaaataaaatcatcccattttactaaaaatcagagaagtatatgttaaaacaaaaattagcttgttataaatatcaataatatcaaaaattttaaaataatatcacacaacattgaaaattgtgtggtgagtcacctctcttacagattaaagataaaagtacaggtaggtatagaatttcygcaaagctctttgacaacgtccatcaggatcattaaatatgttgatgccttatgatccagttttgaatttctgggaatttagcacagaggaataataacccaatatgtatacaaaaaacatatacatcaaaatgttcattataacattatttatatgagccaaaattttgaagtaatttaagtgtctagcattaagaaaatataatgcactcattagatactacatttatgaaaaattcttaatgacaagaaaatatgcaataatcttaatgaaatgtacactaaaaatatatatacagtctgggcatggtggctcacagctataatcccaagactttgggaggccaaggtaggaggatcacttgagcccaggagttcaagaccagcctgggtaacaaagtgagacaccatctctatataaaataaaaattaaaaa

SEQ ID NO: 761423 - DNA, 644 bp, Homo sapiens
tcaattcaattccacattacctacctgaagatagcatcggattccacacattgagggctcagtccccaagactgcctcctcttcagacaccagtcacaagtgcagtcctctggaacttatgaccaactggcttcaagttggggttcccatgaccccctctttgrgtttagttaattttctagagtggctcatggaactcagaaacacttatatttatcagtttattatgaaggatattataaaggatacagaagagctgtgagggcaaggtatgggtcaaggggcacggagcttccatgccctctgagggcacaccaccctccaggaaactccgtgtattcagctgtgtggaagctctttgagacagtccctttaggtttttatggaaacttcactacacaggcctgaagaattaaaccattagccactggtgataaacttaaccttgagcccttctcccttccccagaaattgcgaggaggggctgaaagtcccaatcctctaatcatgccttggtctttctggtgaccagtccccgtcctgaagctgcctagagactgccagctatcagccaactcattcacatacagatattggagagtccaaggattttatgagtcatatgccagcaactggggccaaag

SEQ ID NO: 761424 - DNA, 545 bp, Homo sapiens
tttcctccacaccctcttctatttccaatatatgaatgcatatttatagcattaatgaaatcaagcatacgagggcactgaaaggaaaggagatgagtatctaaacccacactgcaagtgtcaacacgcaaaaattaagagaacatttcatcaatttgaggcacaaataaatgtgaccattctgcattttcaatttatattttaatgtggattcttggcccatgaaagtaccacttacagcttatacasaacagtaatcatcagcttctcataacagcaaactcaaagttcatgtattgtgacatactctcttttttctttttgcatacaagtagaaacagcaagatctccaatttcattgtggggggtcagataccacagagtgttttacattttatcaatttctaaatactaactcttcttgagtttatcttgtgtaaatgtgacaaatttttctgcctcaatttactctatatttatgcccaaattccaaagcccatttttattgcctttgtctctctcttttaaggttgtttttagattca

SEQ ID NO: 761425 - DNA, 545 bp, Homo sapiens
tttcctccacaccctcttctatttccaatatatgaatgcatatttatagcattaatgaaatcaagcatacgagggcactgaaaggaaaggagatgagtatctaaacccacactgcaagtgtcaacacgcaaaaattaagagaacatttcatcaatttgaggcacaaataaatgtgaccattctgcattttcaatttatattttaatgtggattcttggcccatgaaagtaccacttacagcttatacacaacagtaatcatcagcttctcataacagcaaactcaaagttcatgtattgtgacatactytcttttttctttttgcatacaagtagaaacagcaagatctccaatttcattgtggggggtcagataccacagagtgttttacattttatcaatttctaaatactaactcttcttgagtttatcttgtgtaaatgtgacaaatttttctgcctcaatttactctatatttatgcccaaattccaaagcccatttttattgcctttgtctctctcttttaaggttgtttttagattca

SEQ ID NO: 761426 - DNA, 696 bp, Homo sapiens
tcctcaaggttttatatgtctcttctctactaagtgactaatggttttttttcttgtcaatcagtcccttgttggtcaagtggctgcaactgttgagaatcgttttactaaaacgttgcctgccggcagaactctatgcggtgcttttacaagagattatygtcacaatgtactaaactgtcaggtatgacatattaattaatgagtttattatcaaattatagagcagtacttatataactgttttgctgggaatctgcaaaacacaagcccttatagaaatcatttcactgaattcacaaagaaaatgaaattgctctaaggaaaatttaaggttgttctactctaaaaagtaagaactaggctcaccatctctaaggatattcacattgtgaactgaaatttcaaatagaaagttatgatatttcattataacttagagagggagtcaagtagatttgacaaacccaatgcattactaaatgactatccaaccttgtctttccattcaaaattgctaggtcttgtgaacaatatttatacttacattgtgatctgaaatttcaaatagaagattatgatatttcagtataacttagaaagggattcaagtagatttaacaaacccaatgcattactaaatgactacccaaccttttctttccattcaaaattgctagttcttttgaatgatat

SEQ ID NO: 761427 - DNA, 636 bp, Homo sapiens
ttacaactttgtttccttctctgctcaagacccctttgaaatgacaaaatggcaatgtttaaagagacaaagactacaggacgatatacatcgataggagatattctagctatttatttggattcctaaaagagaggatatgtgccagggtcatttttctcccctrgagaaactaaatatttgaatgaaaaatcctaatgggtatgagatttgtgtatcttaacaaaatgctgccaataaaatgctgccaatcttaacagtatgatcccatatcatactagatcagtagttctcacctaggaacaatgttgcccctgggagatatttggcaaagtctattttttttaatatgctgacaactgaggaaatgaatgctacagggatctagtgggtagaagctagtgatggtgctaaatatctacaatacacaggacagcttcctgcaacaaagtattaactgattctaaatgccaatattgctgctgctgggaaatcctatgttagataaaacttaccattttacacaaactttaaatcagcttttagcgcctcattattaaatattaatttggtgcttgaagacaaggcatgttatataactgggataaaaaacaatttttaatccagaaggaaaat

SEQ ID NO: 761428 - DNA, 618 bp, Homo sapiens
cagtcaacttattcagtgttggcaggagcaaactctatgtaggccctgtggcagggttcaagaggggacaagtgtaaccataggcagagagaagacccagagtgtgtagctcctatctgtaggcaggttgtcctgatgagtttccasctctcagcaaagaggagacccatagtgggtagctcttttttttttgcaggcaggttgtcccaacaagtgtccagctttctcagtggacagaaagcccgtagcatgtagctcctttcttcagccaagtcatctcaacaagtatgtgagtctagctgagtatgggttttttatgtgcttagaatggaggaagtgcttgctaattggttcatgggtgaccacagacaggcctggaaaaagcaccatccaattggctgaatggtcattaatgaagttctcagtatgggctgcagacttcatctggaactggcagcccagccccccagccttcaggctgtatctggattgaagatgaggttttaccagagacctgctcctttccacctaagaacctgtctgcgtttaacgtgctgtccatgatgcccaggctgtctccactgagaggcatctgcagccctgagccaggccacctca

SEQ ID NO: 761429 - DNA, 618 bp, Homo sapiens
cagtcaacttattcagtgttggcaggagcaaactctatgtaggccctgtggcagggttcaagaggggacaagtgtaaccataggcagagagaagacccagagtgtgtagctcctatctgtaggcaggttgtcctgatgagtttccagctctcagcaaagaggagacccatagtgggtagctcttttttttttgcaggcaggttgtcccaacaagtgtccagctttctcagtggacagaaagcccgtagcatgtagctsctttcttcagccaagtcatctcaacaagtatgtgagtctagctgagtatgggttttttatgtgcttagaatggaggaagtgcttgctaattggttcatgggtgaccacagacaggcctggaaaaagcaccatccaattggctgaatggtcattaatgaagttctcagtatgggctgcagacttcatctggaactggcagcccagccccccagccttcaggctgtatctggattgaagatgaggttttaccagagacctgctcctttccacctaagaacctgtctgcgtttaacgtgctgtccatgatgcccaggctgtctccactgagaggcatctgcagccctgagccaggccacctca

SEQ ID NO: 761430 - DNA, 534 bp, Homo sapiens
tctgcgtttaacgtgctgtccatgatgcccaggctgtctccactgagaggcatctgcagccctgagccaggccacctcaatgccctggggcctcctcctgtgctcatgtggcacccaaagtctgaagggggctgaggttgcaggggactgttgtgkcagcgctgccttgagcacatgcacacctggctgagttgtggcagcacctaggcttcgccacaactttgctctaccccagagtgggcactaggagcagagagaggtcaggagcaggagcaaacattttcaagcctgtgggggcagagtttttcctgggtcccccaagaacacagggatgctggtgtctggagccgtggctgtgtggctgaggctatacctaggagtgcaggctcctgccctgccaacccagtaaggggtggggctcttacctgtacttggctcccaccagctctgtggagcgctcagccccagctgtgccttccgtgctgcagccagcatcctcacaaaggcatctccagaagggccatcactgccatc

SEQ ID NO: 761431 - DNA, 600 bp, Homo sapiens
ctaaatataagcacatttttctaaaacctactgtgaaaggcagtagagcagtctaacatgaatatggttttggcatttttatttcaagctgtgacctcttcaaaaaaaaaaagttactgggatttattattatttagatgataaaagctggtcaagaacccagaatgaagactaaataagttagttcaaggtcctgccttggttaaaaagtgtaagaaaaatstttcaatgcaaaagtaccgtatcaggggtcgctaatatctaaaaatgcatatgaggaggcagtcctttgattatagattttttttcaccattaaactgcaagtattctgagcaatgtaacatcaaaacactgtgagatatttatgcctcaggcagaataaatattaaatcttgttttacttagcatgtgtttccccaaataccaaaactgagaaaaaggctgacacagaggtaatttatttgggaagtgatgccttggagagaaaataagttacagagggagtaaaagagagagagagagaggaaaagccaatacaacaaattaatttggccataggtatgggtaactgggattcaatctcatgggactttctgaag

SEQ ID NO: 761432 - DNA, 646 bp, Homo sapiens
tgctgcttctcttctcagtcataatacactgggcgaaagcaaggttttttgtttcttgttgtttttactagtagcacaggacctatcatatagtatgcactcaaaaatgtttattgtttcattactactattatcacagctatcaacattagcaaagaattgggcttctaatagtaggcagatggtcaagttacatatatcacaaagatatgattttggtttgactcttctatctcaaagttatttgtcctaattctaaatggaatatcatactgtgatattaaagaaaacacaattagcaaattatrtagtctaaatcccatgtccatgatcaggaatgctttgagattttgtttttttccagggtatcctgaagtggcaagtaccctggactagaagtcagcaattctgggtttataatatgaaaactggagcaggtcattttaactccctgtcctcttagcctgtttcagtttagtcatagcatattttactatcagatattatagattcttgcttgcttgctcatccttgtgcctatttgcttggttacttgcttgtcttcctttccattggagtgtaagctccaacaagtcaagaactttgtgttgtccaataggtgcgcaatgtctttctctccctctct

SEQ ID NO: 761433 - DNA, 633 bp, Homo sapiens
ctatttgcttggttacttgcttgtcttcctttccattggagtgtaagctccaacaagtcaagaactttgtgttgtccaataggtgcgcaatgtctttctctccctctctttgatgctttgagtacactcgcaggtatatgtgaaactcttatagatattagatgaatgactgaacagatgaatatacatatatgtgtatatacatgtatgtgagtatatatatatatatttcctgtgcctgtgacactagcacttatatatacctatatataggtatattcatattcatagatatatatatataaatatatatattcatgtgtgctagtgccgcaggcacaggaaaaaatatgagggctttggacccaggccaacctggtatagaacttgattcccccaataaacagctgtgtgaccttggacaggatgacacaggcaacaacatctaccatggagggctgttgtaaagaccasagacaggggctaacagtgtttatcactgtgcctgaccgatagtaggtgctcgataaatgttaactattgtttcatttatggtttcaaataagttgtgcacttcattacacagtcaggtcttctacttctttatgtatcttagagtctctggcacatcga

SEQ ID NO: 761434 - DNA, 645 bp, Homo sapiens
gactgaaaggcatcagagttcagccaactcagagccatttatttattgaaaagtttatctctgtattaaattcttactgaagagggtttcattaggcccacaagaccagtataaacagggagctgctgagttattaggaaaacgaatcgggagctaacttctcagtctgttttttgttcccattgctcacacaccaaggctgccaatggcgccaagagagatgcttgtattcaacttggaatttttttttatttcctgcatttgagcaggccacaatttatatcactcaggtctccttaaattagtccargaggatttcattttacaggcctgcttgactgggatccttttggcacgatgggttcagctttgtatacaactgagattcatattttatgtgtgtgtaaaaaccccagccatgaatctagcatctcaaagcttcaccttcattctttacagctcagttcagagcccggcacattgccataggctgagtctcagggcagctcctggctgagctgaaaggacaaaagctaaaaatagattaacgaactcaggggcgtaagaagagaaaacaggactctttcagttcttctttacatcacacttcccgaattaatatgatgcggacctaatgcctcccac

SEQ ID NO: 761435 - DNA, 621 bp, Homo sapiens
atccgtatccacatggaagaatatagtgtttaggatagaaatatgtaccacaattgtatctgataaatgaatagatcaataaatgaattaatttttaaaagttttagcacaaaagaaaaaaaatcaccaatacttgcaaggaattaattttatttagaataatcatattgatwtaattttagaaatttcaaaaaatgacatgaaaaagaagattataaagatcatttactataatccccattttacagttgaggaagcagaggcacaaaaacttaaatatttttctcttagtgttttaatagtcataaattcaaaaagacatgacaattttcattatgttttgctaactaccttctataaaattacacacacatacacacacatgtgcacaaacacacacacttaaaactaattaataattgacaaacaaatgtttccattagattaaatgatgttaattgtaagattctttggagcttttttgtaagtctcctttcagttactatgttaggttagtagatcattttgtttaattccttaaggttccggatagcctgaattgtatgccatgaaaaaaaatgtgtatttctttactttccttgtcactagctaatttattaa

SEQ ID NO: 761436 - DNA, 588 bp, Homo sapiens
gttagcatgcttttttttctaaagggccagtaagtgtttttggctgtgcatgccatacagtctctgttgcaactattcaattctgctattgtagtttgaaagcagccatagacaataggtaaacaaatgggcatggtggtgtgccagtaatacttcatttatataaacaggtggcaggctgaattttgcctgcaggcgttgcttttttgaggaaagaaagtcattcccttcatgggaaatgtttggtaatgtaaactgctgtttctcatcatgagggattactccaagtgtcaatttttcatttgtaatgaagaaagtattacctttaatcttctagttgggaayatactttggaattcactctatctaaccataatgttttactgtatgtactttgtgtgtgaaagtgtgtgtgtgtgtgtgtgtgtgtgtgtgtgttttctggctactttcaagagttttttttttatttagattttataattttgttagtgatgtatctgggtatggtttttcttttttattataaattcacaattcataattgtatacatttattgggaacaaagcaatgttataatctatgaa

SEQ ID NO: 761437 - DNA, 526 bp, Homo sapiens
tacttctagggcctaacacagggctctcaggaagaatgcaaggggctcttccttcacttcctggaaagatctagattgttactgccgtatatgagctgtctccgtgggagaagtcagaaattcaattgtgtttgaactgctgattatttggatttttttttaactttggcacattgatccatctaaacctggtgggaagaaatstccccacattgtctcatgaagagacttaattgcaactgtgccctccacactatcctgacttacttcagtcttcactctgataccacagtgcagccatgcaaatggttattccagctctggccacacactcttttcacaaaattgctcctaactggaagatctcactttctcctgtggggtaggaactgacaccagtgggagggatgtgcccctgaccattaatgactgctttcttttttttccttaaagaatggagctgttggggagggacatgcacacaatgtaaaacagacaaaatgcattacaactgtggtgtaatgtg

SEQ ID NO: 761438 - DNA, 359 bp, Homo sapiens
agctttcccagactagtaaatcaggggcctaggagtcaaatggacactaattagtgtgaaaactgataccaaaatttaggtctgttatagaatcagttttctttccactcttccatgctttctctttttgtctcttcatgtttaccaggttgctgccacatttacaagaacagaaagccaacttaawattaaccaacacaataaactaaatcttgttacaagtgtttggttttataaaagagttaaatctttaaaatatctttattaaattattaaactcatcaatcatctaacaatgaaaataattgtagagttaaaataatacaagccagagctgaaagattcaggcctacattgtc

SEQ ID NO: 761439 - DNA, 411 bp, Homo sapiens
aaatattataataaaccatagccatggatatcacaataaaagaaacacatacaaatgataaaaactctgtgaaatacggttgatgaccagagagctaacagaacacagtaaaacagtgagcgattttttagggcttaagtagttaactgaatgaatrtaaattaaataagttatttttcctttggttttaaaagtacaatacacttgaataatttaattcctaaaagtacaagtaatgcttaccttctagaccaaagtcacataaaatgatttaacacagacgtgtactgagtcaatatccatgctgaggctgcctaaggctgtcatagtagtgctaaatttttataagcattgctattatatccagccctttagattcaacattaattaaaaaaccataaataaaacaat

SEQ ID NO: 761440 - DNA, 628 bp, Homo sapiens
aagagcttatttcagagaacaataaataaaaatacagaaaacccatatattaaataactaaaagatgtgaaataaaaaaatccctttaaattcacgaccaaaaaaataggccatcaacaaaaactcctaggattaattaaggaaagtagagatgggagaaaaataactaagcatttcttcgtccttctttgctaaggagtcctaagcttctacatatactctatagctatgtttaggaaactacattttaagacttcaacaatgacttattttgtctacagttagygaaagaatgcagaactagaaaatgaaacatctaggttgaagtacataaggcatctatggcagggctaagtcccagaacttactttcatgtcagctccaggcaagtattctgggaaactaatcacatattatgaatatgactgcgcaatgctagtaacctaaatattacttcctcctttatataatgcctgcaatttttaaaagtatgcaattttttattgaccctgaattattcatttattcatctcacacacacacacacacatacacacacacattcctttaaaaagcagtcaaaaatagagttctatgtttctttatcaaagaatgttacgaaaaaaac

SEQ ID NO: 761441 - DNA, 352 bp, Homo sapiens
aggtttaatagcttcttttccctcttgggtcatattgacttagtctttgtaataatcaccaaaaaatgatctatgaattattccatttgacagatgagaaaatttagatttgcagttatagtcacaaagctattaaayggtaaaccaggattcaatttttttttttttttaattcaaagacaagttctcactctgtgcccaggctggagtgcaagcatggctcactataacctcaaactctcgggctcaagcaattgtcctgcttcagcctcccaagtagctaggtctacagatgcaagccgccatgcccggccttccaggattcaaatttaaatccatctaactctagagc

SEQ ID NO: 761442 - DNA, 596 bp, Homo sapiens
tgaccttttttcttcacttgcccaaattcctatctaagacatctggggaatcatgctctacaagccaaaaagtctcaaaagagggctttcatttaaccctacataatgtggcttactttccagcctgactctggcaataacatcacatgacagataaggaaggaaataaaaatattttaaccccaaatatgtttctttgccctatcttgaaatagtcctgcaaagctgtctcttatgggggaaaaaaactatattttgtagaaaatcccttttccccttctcatgcctttttcttgatccaagagagaattaactaagagtctgataccttttaaagtctgasaagaaacatttaccatctagtctctctgaagcctgctacctggaggcttcgtctacatagtaagaacctcagtctccacaaccccttatcttaagctagacatttcctttctattgattccaggtctttaaactctttcaaccaattgccaaacaaaatatttgaatccacctataacctggaaacacaccctcctccagttgtcctgcctttccagaccgaaccattgtacattttacaagtattgattaat

SEQ ID NO: 761443 - DNA, 596 bp, Homo sapiens
tgaccttttttcttcacttgcccaaattcctatctaagacatctggggaatcatgctctacaagccaaaaagtctcaaaagagggctttcatttaaccctacataatgtggcttactttccagcctgactctggcaataacatcacatgacagataaggaaggaaataaaaatattttaaccccaaatatgtttctttgccctatcttgaaatagtcctgcaaagctgtctcttatgggggaaaaaaactatattttgtagaaaatcccttttccccttctcatgcctttttcttgatccaagagagaattaactaagagtctgataccttttaaagtctgacaagaaacatttaccatctagtctctctgaagcctgctacctggaggcttcgtctacatagtaagaacctcagtctccacawccccttatcttaagctagacatttcctttctattgattccaggtctttaaactctttcaaccaattgccaaacaaaatatttgaatccacctataacctggaaacacaccctcctccagttgtcctgcctttccagaccgaaccattgtacattttacaagtattgattaat

SEQ ID NO: 761444 - DNA, 594 bp, Homo sapiens
aaagaccctggccttccccatctctaaccctcccaccaatccccattgccatcagcaggaggcctgcactcatggaactaaatttcagaccccaggacttagcattctgccttttgaatgtcctattctactttatttgctgaaacaacggagcaagtgcaattagcatagggtggttagctgtgtttcatttgaaaggataatgcattattttaaaaataataaggcaatttatttacatctactttttccatctcaattttcacagcagcaagtgataaaaaaaatggggaaaattaccccaacagaaatatttatgagtaaatagctcsaagaaattgtgaggatgctactatctgaatcattctggtcccacccaccaaaacaaagcaagataatattcctgacagcatgattgaattgtgtgtaattactgccaatgttttaaacatgatgataatgagaaaagtattagcattaaatcagaaaggcctaaaaacatttattttcctaagagtatgactactacctctatctttcattgaaggcactggaggaaatgctatccttttttaccattgttcttttctggca

SEQ ID NO: 761445 - DNA, 623 bp, Homo sapiens
gaccattaggtggcagtaatgcatcactgtaaggaaataaatcaatggttcagcttaacacttgagatagaggtaaacatggtccccagcttttattttattataaagacataacttttaaaagccccccaaaaggataagcttaaagactttggatttgttacatgtactccttaataaagccatcatggaattcattccagttgcccaggagttcctttcccagtcatttctccawgttgtagcagactagataattggagtctactgaacttgtttaaattaattacagggaagactttcctatctggagctcgttcctttgattaccaccagaaagagaggagatggagaaatgagcagaaaattgccccacagtttaatggtaccaaatccctgtgtggtttttcttccattgttcagcagaatggacttctgtaccctgctaattttcattttctgtcctttcttctctgcggctgggaataatttacattattttataaaactggaggcacaaaactctaacactgagtggtggaaaccgatctcattaagcaacttccttttttaaaaaggctcagctgaccatctatgcctaagggcttacttctaaatctagt

SEQ ID NO: 761446 - DNA, 581 bp, Homo sapiens
agcatgtacttcatgtgatggtgctgaagattaaataagataatgaacactcagggcttaagtgcttaacatatctgttacctagcaagggttcaatcaatgtaagcctctaccatcatcgtcatcatcatcatcattactatggtcatcattatcatcatcatcattgtcatcactgttgccatcatcaccatcaccatcatcatctttgtcacatcagcagccacatcttcattgttgctattggtatcttcaccatcatcaacctcactattgtcatctttgccatgatgatcatcacagtcatcatcagcccatcatcatcaccatgatcatcrccatcaccttcaccaccgtctttgccatcatcatcataatcaacaccatcacctgactctataggaggtaccattgatttttttttttttttagaaacggtttcctctgttgcccaggctggagtgcagtggtgcagtcttggctcactgcagtctcaacctcctgggctcaaatgatcctcccacctcagcctcctgagtagctgggactacaggcacatgccaccaagcctggcttgctct

SEQ ID NO: 761447 - DNA, 633 bp, Homo sapiens
atagatttcagtctgatatgcaacaggttcttccatgagatgtgagggcttaaaagaaaaggtagagattgaagacgttatcttttaaaagatactcacagcacatttaattgataggggatcagtaacaagattatataaagaacttytaaactcaataagatagcaaaaaaaagtaaaaaataactaagagataaaaacagtcatttcacagaataagaaaaatgactaatgtataaaaaactgttcacactcattggccattgctaaaattccagtaacaattagatgtatttatataattttatgtcttcctgattggtaaatattaagcctagaaatgccaagctttggcaataacaggaaaacagagaccctcgctgactgctgttcagagagtaaatttgtacaacaactttgaagaacagtttgtcattatctaccaaagtggaagatgtgtaacctatccctaagataatctctgcaaggaattctcatttatgcccctgggcacagagacaagaacactcctagaagcatttctagcaatagcaaaataggaaatggcctacatgctcattgatggaagcatagctccgtacccggcagtgtgtacgtctgatgaactgcagc

SEQ ID NO: 761448 - DNA, 532 bp, Homo sapiens
ttggagttaagaagttgggaggataggagaaaggaccacctccacttaaaaagaaaccctactgcatttctaatttaatttactatatatctcattttaattttaattttattttcattctccccagtagaatgcaagcttaattrgggtggttcaatgctgtatctgtagtgcctagaacagtgctgggcacatattaagtcccttataaataattgttgaatgaataaatggaaggaagggagaaagaaaaaaagaaaggaagtaaaggaggaagaagaaagagacaaaggaagaaagaaaaagagaaagaaagaaggaaagacagaaaggtattcatatttgaacactgcagattagttgaagaaagagtcaagtttctctaaaggtgaggaaatgtgtgttctaggagatgactaaagacataaagaagtttaggataaagtgaaagctccaaaggcaacagtggaagagaggggaagggagaggaattagcagaaggatatttttgagggagttaatgagctaaaag

SEQ ID NO: 761449 - DNA, 584 bp, Homo sapiens
acaagaaaatcccataatctcagtgtcttaataaattaaaataacttatttataacaaaatgtctaatgcaaatagggctccttcatcttgtagttactctagaacatggggtctctatggtcacctatggcatgggaaaagggattgaggtgacattcagctctttgctcagcccaagaatgaaactcatcacatctgttttcagtccagtgaccaatactagtcatgtggccccagcataactacaggagaggctggagaatatatgggaacctcctcacattcaccaaatggaatctttggtgaattytaaagattcccggcatgtcccactatctccttttggggctgagaaaatgaaagaaaaaactgacaggccaatgtactgactgctctctcacctgggtctgatcccatctgaagctactttgggtggttatcacaatgtagtttatcatagtgctgtggaatatgaactatgaccatagccagccctatattctagaaccagcatctccatttgtagctatgggtgcttggacaaacacttcaatgttctccatctcagtttcctcatctgaaa

SEQ ID NO: 761450 - DNA, 605 bp, Homo sapiens
tctttttacataatgctattttatttagaagaccacttctaccgaggcgggtggatcacgaggtcaagagttcgagaccagcctggccaccatggtgaaaccccgtctctactaaaaatacaaaaattagtggtggtgcacacttgtaatcccagctactcgggagactaccacttctatattcatcaacagatttaaaggaggggaacatgtgctcagatttataaaggttgataaggcatccaataaaattcagcaggctttcctaataaaattctgaagaagaatagaaggaaatagctaaatatgataagtattatttgtcaaaaacsaacaccaaatattaccaatggtgatatgttaaaacattttcatttaaatctgaagcaaggcaagggtatccactatctccattattattcaacatcattttggaggtgctaacaggttctataagataagaaagtgaaataacttgtacaggttgagcttccctcatctcaaaacctgaaatctgaagtgtcccaaattctgaaaattgttgagcactgacatgtcgccacaagtggaggattccatacagaagtactgaacacaaattttat

SEQ ID NO: 761451 - DNA, 640 bp, Homo sapiens
tggccatcatccagaggctggtatatggataagccaggcccagattctctagcccagggacctccaacccccaggccacagaccggtactggtccatggcctgctaggaaccagccacacagcaggaggtgagtggtggtgagccagcgaagcttcatctgtatttacagccattccccattgcttgcattaccacmtgagctccgcctcctgtcagatgagcagtggcatttgattctcacaggaagacaaactctattgtgatctgcgcacgcgaggaatataggttgtgcactctttatgaaaatctaatgactaatgatctgtcactgtctcccatcacccccagatggtaccctctagttgcaggaaaacaaactcagggctcccactgattctatgttatgtggagttgtataattacttcattatttattaaaatggaataataaaagaaataagatgcacaataaaagtaatgcacttgaatcattccaaaaccatccctcccacccacactggtccatgaaaaaattctcttccacacaactggtccctggtgccaaaaaggttggggacctctgctctagcccactctgtctccgagagctgtaccaggatgcttgcccactgtataggg

SEQ ID NO: 761452 - DNA, 640 bp, Homo sapiens
tggccatcatccagaggctggtatatggataagccaggcccagattctctagcccagggacctccaacccccaggccacagaccggtactggtccatggcctgctaggaaccagccacacagcaggaggtgagtggtggtgagccagcgaagcttcatctgtatttacagccattccccattgcttgcattaccacatgagctccgcctcctgtcagatgagcagtggcatttgattctcacaggaagacaaactctattgtgatctgcgcacgcgaggaatmtaggttgtgcactctttatgaaaatctaatgactaatgatctgtcactgtctcccatcacccccagatggtaccctctagttgcaggaaaacaaactcagggctcccactgattctatgttatgtggagttgtataattacttcattatttattaaaatggaataataaaagaaataagatgcacaataaaagtaatgcacttgaatcattccaaaaccatccctcccacccacactggtccatgaaaaaattctcttccacacaactggtccctggtgccaaaaaggttggggacctctgctctagcccactctgtctccgagagctgtaccaggatgcttgcccactgtataggg

SEQ ID NO: 761453 - DNA, 566 bp, Homo sapiens
ttgacaaagacctggctcaagagatcagtgactggagctatccgtcaaagcagatcaggaagccaggtgaataggtaggtaccaggagacagtcagaaggcccaagtcaaagcaagacagagtgaggcactgagcagtatatgtagtagcagtgaaaatagcttgcaacggaggcccctcctgtcctggcctgggggccttttacatgcttcctgctgagccaggtgctrtgggtgaggctccacacctggccaatctcctgtttgctggcccagaagggatcctgagggagataagtgagtgaggctaaagaggggagcaaacccatctgtctcagtcagtttgggttgtataacaaagtaccatagattgctggcttatcaacaatttattcctcactgttctggaggctggaagtctgagatcacggtgccagcctggtcggtttctggtgagggccctcttccaggttgcagactactgacttctggttgcatcctcatgaggtggaaagagaactagccagctctctggcatcttcttatgaggacactaatcccattcct

SEQ ID NO: 761454 - DNA, 434 bp, Homo sapiens
ccaaggtgggtggatcacacttgaggccaggagtttgagaccagcctggccaaatggcgaaacatcatctctaccaaaaatacaaaaattagccaggcgtggtggtgcgtgcctgtaatcccagctactcggtaggctgaggcaggagaatggtgtgaacccgggaggcagagkttgcagtaagccgagatcgcaaccctgcactccagcctgggcgacagtgggtgactctgtctcaaaacaaaatacaaaaaaaagaaaagaaaaaagaaaaatagcattatatatctccacccctgtgctatatcaatttggaaaggcctagcaaaagtgtatccaaaatatattttaacctaaaactgaaagccaatgtatcaaaataaatattcaacaaaagccaaacatcacgatcacagaaaaccttctgagatata

SEQ ID NO: 761455 - DNA, 588 bp, Homo sapiens
caaatgaagtcagaagcctccagggttctcagatacatcagagagttctaggggcattgcttcctttgtggccagaactataatgtggggagggaaatgctgactttcattgcacagtagaaaatgtcagtcatatttccaagaatctctcaaaggggtcagcatgttcacttcaggatccttggcagtacgggtgacttcacatayagtaaaagatccagtaggctctggcatctaagagcttagaatccagacatggtgaagtttcccatgagccccagatatccacaaaattgcctgtggtcattaaacccacaggactgttaaaaaaaataaaatacagaagtatgcagaacaatgaaggaaggattttctaaaacaaaaaacacaatctttcattgtttcccctgtctttacaataaaaacacagttttggacctgtctggacaaggggactttccagtttccatgtgaggctggacattttgcattcgatacaaattagttcctcaaaatcagaatcaattgtcataaaatgtagggaagtattttcccacggggcaagcatttgtggtaaaactggaaatg

SEQ ID NO: 761456 - DNA, 522 bp, Homo sapiens
ctattcgtagtactctgtgacagtttaattttcctattttgatgatggaaaagtaaaggtgacctcaaggcaccaagtggctaaagatgtccccctagggaaggcatgagcctttcaaataatttctttgcaacaaattaacattgagacttcctgtgtataaaggaattgaatgcaaaaatacataggtaaacacagtttttgtttttaaaagtttataatttagtgaagagaaggggacgtataaaaatgattaaaattaagggttgaataaagggttgacatagratagaaaagggctaattaaagtttcaggaattttgttataggagcatggtagaagaggtgattaatctgaaagagggtcttactagagatttcacattttcatagaaagggtgacatttgggaagctgccatgctttcagttattaaaggctcagattctgcagtcattcaacccaggttctaatccctgctctgccaattcctagtcaggtaacagggcaaattatttaatcc

SEQ ID NO: 761457 - DNA, 583 bp, Homo sapiens
acccttcagaacacagcagtagtgttctgcggacctacgtgcgggacaaacatacagaccctcatagcagtgttctggaatcttatgtgagggaaaaacatttagacacacgtagcagtgttttggaatcgtacgtgagggtcaaacacmcagaacccgacagcagtgttctggaagcttaagtgagggacaaacattcagaccacaacaggagtgttctggaatcctatgtgagggagaataattaagatcctcatagcagagttctggaatcctatgtgagggagaaaaattcagatcccagtagcaatgttttggaatcctacgtaaaggagaaacactcagaacccagcagctgcgttctggaatcctatgtgagggacaatcattcacaccacatctgggatgttctgggtccctatgtgtgagacaaacattcagaccctcatagcaatgttatggaatactatgtgaggaagaacattcagaacacagcagcagtgttctggagtcctatgtgagggacagtcattcagaccccagttggggtgttttggatccctaggtgtgggacaaatattca

SEQ ID NO: 761458 - DNA, 635 bp, Homo sapiens
agcctgggtcaaatggtatttctagttctagatccctgaggaatcaccacactgtcttccacaatcgttgaactactttacaatcccactaacagtgtaaaagtgttcctgtttctccatatactctctagcatctgttgtttcctgacttttaaatgatcgccattctaactagtgtgagatgatatctcattgtgattttgatttgcatttttctgatggcgagtgacgatgaccatttttcatgtgtctgttggctgcataaatgtcttcttttgagaagtgtctgttcatatccttcgcccacttgttgatggggttttttcttgtacatttgtttgagttaattgtagattttggatattatccctttgtcagatgactgcaaaaattttctcccattctgtaggttgcctgttcactggtatgtcttttgcttcacagaagctctttagtttaattatatcccatttgtcaattttggcttttgttgscattgcttttgatgtttaagacatgaagtctttgcccatgcctatgtcctgaatggtattgcctaggttttcttctagggttttcatggttttaggtctaacatttaaatctttaatacgtcttgaattaatttttgtata

SEQ ID NO: 761459 - DNA, 659 bp, Homo sapiens
ttctactttttttccttttaactattgcttccctattctgtattctcactgctccatcttctgatgtaggaggtcatctgtcttcctcttttcctctcctctgactcttaagccctttcctattctctttctcatgaatggctgttaaaatgccaatatggtcatgtaactttcttgtacttartgaacctccttatttacaccatgtttgtgaagtggctgtattcaccctgggtagacacagaatgtttttggcatgtacaaagagaattttatgctgcctgtgtagagctattaatttgtaagtacactcacctttttgtatctgtacttttaatatctgtgtatgtaaacaaacttggatgcaaaatatttgaaataaaatcagacgcttgcatctgtagtgaacatattcagactttttcttgtcattacttcctaaacaacacaactatttacatccacattgtatttggtcttctaagtgtgaaaggaaaataaagattgggactccaaactcattaagctaaagggaaaaatcaagctgggaactcactcatgaaaacctgcctcctccttttggttcctaaataagatggctacaagataaaaagctttttatcttgtagccccccactcatatttttcccacaaggaaa

SEQ ID NO: 761460 - DNA, 659 bp, Homo sapiens
ttctactttttttccttttaactattgcttccctattctgtattctcactgctccatcttctgatgtaggaggtcatctgtcttcctcttttcctctcctctgactcttaagccctttcctattctctttctcatgaatggctgttaaaatgccaatatggtcatgtaactttcttgtacttaatgaacctccttatttacaccatgtttgtgaagtggctgtattcaccctgggtagacacagaatgtttttggcatgtacaaagagaattttatgctgcctgtgtagagctattaatttgtaagtacactcasctttttgtatctgtacttttaatatctgtgtatgtaaacaaacttggatgcaaaatatttgaaataaaatcagacgcttgcatctgtagtgaacatattcagactttttcttgtcattacttcctaaacaacacaactatttacatccacattgtatttggtcttctaagtgtgaaaggaaaataaagattgggactccaaactcattaagctaaagggaaaaatcaagctgggaactcactcatgaaaacctgcctcctccttttggttcctaaataagatggctacaagataaaaagctttttatcttgtagccccccactcatatttttcccacaaggaaa

SEQ ID NO: 761461 - DNA, 433 bp, Homo sapiens
gagtgaaattggtgagtttggtggtgattccggggtgcctggaacggactccagctgaaatgtgggcgtggttggagagtagctgggacagacgggagagtccctgagggatggtgaagacatgagagagactggggagtaacgcagtgaaattggtgagtttggtggtgatttctgggtgcctgcaacrgactcccgctgaagtgtgggcgtgcttggagagtagctgggacagacaggcgagtccctgagggttggagataaagacgtgctggagactggggagtaactcagtgaaagtggtgggcttggtggtgatcccagggttcctggaactgacccgcgctgaaatgtgggcgtggttggagagtagctgggacagactggagggtccgtaagggctgggggtgaagacgtgagagagactggcgag

SEQ ID NO: 761462 - DNA, 512 bp, Homo sapiens
tgtggtgaagccctaggggatggtgaatggtagttccggatccctggtgaggagcttccccttaagcctgagtttctgagaggggagagggagaagctgggtgaggctcgcatggaccttggggtgtccgtgctgggggaccgttcataagaagagccagacaagaccctactgttcttaggtgcagacatgattaggaaacctgcagctcccaggggcycccactaatgttctaactcgcagaaggaaggagtgtgtgtgcgtgtgtgcgtgtgcgtgtgtgtgtgtgtgtgtgtgtttgtgtgtgtgcggtgtgaggtatgggccccttaaggaaatggaaatcaaccaaccaatgggacagacagacagacagacagacagagattcacttgcccaagtgttctgtcctgtcctctgaatccgctttcaagtcgcaagacgctgtgagctccaagtccacgcagagtccgccaaacgctccggccgctgatccgctccgcgaagatctg

SEQ ID NO: 761463 - DNA, 608 bp, Homo sapiens
tatattcatatcagacatttaatttttgttttgtattccttatatgtacttttaattctctagttcctgttttctgcttccttttgcaaacagtgaatatattctttctttttctttttttttttttttttttgagacagagtctctctctgtcgcccaggctggagtgcagtggtgcgatcttggctcactgcaaactccgcctcccaggttcaagtcattctcctgcctcagcctcctgagtacctgggactacaggcacccgccaccatgcccagctaatttttgtatttttagtagagacggggtttcaccatgttgaccaggatgctcttgatctcttgacctcatgatccacccgccttggcctcccaaagtgctgggattgcaggcatgagccaccacrcccagcaacagtgaatattttctaaaatgacaattacatttctttaatgattttaatactctgtttttggcttattatcctagtcagcgttcttgggattacactgtaaatcttaacctatcagaatcagcttcagattcatgctaattcagaatagtttcagttagacacaaaaacattaccgctaccttgctccacaccc

SEQ ID NO: 761464 - DNA, 477 bp, Homo sapiens
cccggagtcaccaccaaactcaccagtttcactcagttactccccggtctcgctcatgtcttcacccccagccctcagggactctcctgtgtgtcccagctactctccaaccatgcccagatttcagcgggggtcagttccaggcacccaggtatcaccaaccaactcagcaatttcactgagttactccccagtctctctcatgtcttcayccccagccccctgggactctcctgtctgtcccagctactctcccaccacgcccagatttcagcgggagtcagcctcccacactccggaatcacctacagactcacagtcttcactgaggtcctccctggtctctctcaggtctttgccctcagcccacagggactcttgtgtctccttcagctactctcaaaacttctctagattccagctggagtcagttccaggcacccacgatacaccaccgaactcacgaatttcactgac

SEQ ID NO: 761465 - DNA, 669 bp, Homo sapiens
atactgtatgctgtacctggataaatttctcctggaaattagaaatttatagacacaaaagaagaagacaggcctcatggttacaccatctcacctgattccttattgtcatttgatttattcaattagctctatgtaaggcgagattaatggctcaaagccattatgcaaactagaattgtcctattactatttasttcataatttccctttttaaactgtgtatccattacttaagttttttttcaaaagttcaactcctaacagaataatgccggtacagcactttgagatgatagcaaaagactacaaaacagacaaaattgaacttaataatgaactccaggtagacttagcctgaaaactactcccttcaaatctcccttcttgctccaaatgtgcctaaaaggattttgacactgactcttaagtgccaattaaccccacctcaatgtgggacgagaccaaaaaccaaaataggtccatcctagcaccaagggccatcaaaacagaactaaaagatgattgatcagtgatgcttttggaaaaagatctggagcacaaaagggaggggaaacgtgaaatttgtctcaatcaaaatagagtcactagtgataacaaaattctgacagctcaagctggggaaggccatgaagagagcattctcat

SEQ ID NO: 761466 - DNA, 583 bp, Homo sapiens
tcactgtattctgaataagaaagaactgcagtcactgtcaggataactaggagaataattttgcatttctacacaaggctttgtgctttttaaaatattagcttttatctccagagataatctccagagatagcccagttttcttacattctacatacagaatttgacaactgataacaaatatatataatagatacatttatataatttttctwtctctttttctctctctccacacacacacaaacgtgtgcacacattcataatatctaaaaccacacacatctttaacaatgctgatggctgtatagcatcagcatttcaatatatcctcattaataatttaccttttgacacatttatttttaaaataaattttattgtgaatatttaaggggcacacatgtgttactatatatgtgtgtatataaatgagatatatatatatcaatcatatatatacacacacacatatatatatataaatgatgactataatagaaacaagtcaacacatcatctcatatagttactcattccacccctcccctgcactgtggggagggcgacctataatctactc

SEQ ID NO: 761467 - DNA, 583 bp, Homo sapiens
tcactgtattctgaataagaaagaactgcagtcactgtcaggataactaggagaataattttgcatttctacacaaggctttgtgctttttaaaatattagcttttatctccagagataatctccagagatagcccagttttcttacattctacatacagaatttgacaactgataacaaatatatataatagatacatttatataatttttctttctctttttctctctctccacacacacacaaacgtgtgcacacattcataatatctaaaaccacacacatctttaacaatgctgatggctgtatagcatcagcatttcaatatatcmtcattaataatttaccttttgacacatttatttttaaaataaattttattgtgaatatttaaggggcacacatgtgttactatatatgtgtgtatataaatgagatatatatatatcaatcatatatatacacacacacatatatatatataaatgatgactataatagaaacaagtcaacacatcatctcatatagttactcattccacccctcccctgcactgtggggagggcgacctataatctactc

SEQ ID NO: 761468 - DNA, 590 bp, Homo sapiens
atttaaacaaaaatattgtgatggcatcattgaaacatggacatatcaattaatactttgggtataatttttaaattaactttaataatgatttaaattaccatatttgtaaaatggggtcaacacctacactagacttttgagagtcctcaattgcagccagtttttataacctaatcctgccctgtctcctaccagatcagcatgaaataaatgtgacctcatgacmtaaactaagccctggaatctggagtagcatcatgaaaactctaatcagttttatttggatgcctatactggggagtcacataacacaggaagtcgatagcgatgaatggcttatgtgcaaattaggcagggcaaaacagtttaaagagagcaatagagtagagggaagctcaagaaggaggttgatgaggtatcccataattatggagctgtaaggtagatgcagtaataatgtgaggagcttgttgggtcctggatacactcactttctgctggattcctggagacatctagtactctggtgtcaccccaattgatctgaagtaggctcttagcactattgccaatcacagtaactgtcc

SEQ ID NO: 761469 - DNA, 607 bp, Homo sapiens
gccttacagaggatgttgagagagatcagagaagaaaggttattcaaaaaaaaaacagcggagaacttttcaaacctagaaaaagatgtgaatattgagggacaagaaggtcaaagaacaccaagcatattcaatccaaataagactatctcaaggcatatactaatcaaaccctcaaaagaaaagaaaggattgtaagagcagcaaaagaaagcaaataacatataaaggagctctgatatgtytggaagaagactgttcaatggaaatctttgaacagaggctgtgggatgacattttaaacgtgctgaaggaaaaaagtttcaacctagaatattgtatccagaaaaattacccttcaaatctgaaggagaaataaaaattttctcaaaaacaaaagctaagggatttgggcaacatcagacctatcttacaagaaatgctaaaggaagttcttcaatctgaaagaaaaagacattaacaagcaagcagaaagtatctgaaggtatacaactcactggtaaaagtaagtacatttaaaaaatctcagaataatactataatttcagtgtatcatacactcatcttttttttcaactttaagttc

SEQ ID NO: 761470 - DNA, 607 bp, Homo sapiens
gccttacagaggatgttgagagagatcagagaagaaaggttattcaaaaaaaaaacagcggagaacttttcaaacctagaaaaagatgtgaatattgagggacaagaaggtcaaagaacaccaagcatattcaatccaaataagactatctcaaggcatatactaatcaaaccctcaaaagaaaagaaaggattgtaagagcagcaaaagaaagcaaataacatataaaggagctctgatatgtctggaagaagactgttcaatggaaatctttgaacagaggctgtgggatgacattttaaacgtgctgaaggaaaaaagtttcaacctagaatattgtatccagaaaaattacccttcaaatctgaaggagaaataaaaattttytcaaaaacaaaagctaagggatttgggcaacatcagacctatcttacaagaaatgctaaaggaagttcttcaatctgaaagaaaaagacattaacaagcaagcagaaagtatctgaaggtatacaactcactggtaaaagtaagtacatttaaaaaatctcagaataatactataatttcagtgtatcatacactcatcttttttttcaactttaagttc

SEQ ID NO: 761471 - DNA, 622 bp, Homo sapiens
cctttgctcattagaagcagggagctctcttcttcttcccctggatccttcctttaaaatagtttcttttgtcttaagttttcatttctacgtttgtcccttcattcagtctcttaaatgacggtctcaagcagtaacagtagtaattgctgtaatgacggtctcaagtagtaaccagggcactctgccacaagtggcacctgaacagggactaacagggactatcaagaacaaacggagacctgaagagacctgaagggaactgaagaggtctgcagggacaaatagagataagtagggataaatagagataaatagagacaaatagagataggtaaggaatgacagggacttgcaggaagtaacagggaccayagggacagatagggatagataaagactagcaaagactagccgagattagcaaagaccagcaaggactagcagagactagcaaagactagcagaaacttgcagggacaggcagagacagatagggacagatagggtcctacagggacttgaacgaggaagatctgctggaaaagaaaagaactacaaccaaccagacgaacaagaaaccctgttacaagtctgctggcagcaacataaggtcagtgct

SEQ ID NO: 761472 - DNA, 399 bp, Homo sapiens
catagcatctaatagacccacctgtacagtacaaattgaaggcttaaggattgtttttttactatgttattgcacgagagggagaggcttcgatttgttttctctgtgccttctgttaatcagaaagagcctgcttctcattatcaatggaaagttttaccccgtggcaattaaccaaagagggagaggctgagctgtagcttgtagaacaratgcttctgcaatggcatgcctcccggcttacagccacctttgcttctgttttggtagatttactaacttgggggaccagggtatgcttgtttttgcaggaaatgaacaaaaagtgtgggtgcccccaaggtgtgtactaccatggaatgggagattggagggacacatggatcccaaccgtgggcc

SEQ ID NO: 761473 - DNA, 692 bp, Homo sapiens
aaaattctctcccattttgtaggttgcgcatttactctgttggtagtttattttgttgtgcagaagttctttagtttaattagatgccatttgttttgttttgttttgttttttgtttgttttttgagatggagtctcgctctgtcacccaggctggagtgcagtggtgcgatctcggctcactgcaagctccacctccctggttcacaccactatcctgcctcagcctcccgaatagctgggactagaggcgcccaccaccacayccggctaatttttttttttgtattttttagtagagatggggtttcaccctgttagcaaggatggtctcaatctcctgaacttgtgatccacccgcctcagcctcccaaagtgctgagattacaggcgtgagccaccatgcccggccagatcccatttgttaatttttgcttttgttgcaattgcttttaatgtcttcatcatgaaatttttgttcgtgtctacatcctgaatggtattgtctaggttgtcttccaggctttttatacttttgggtttcacattaaagtctttaatccatcttgggttaatttttatatatggtgtaacgaaggggttcagttttaatcttctgcatatggctaaccagttatccccataccatttattacataaaaaatcctttccccattgcttgttttttgtca

SEQ ID NO: 761474 - DNA, 692 bp, Homo sapiens
aaaattctctcccattttgtaggttgcgcatttactctgttggtagtttattttgttgtgcagaagttctttagtttaattagatgccatttgttttgttttgttttgttttttgtttgttttttgagatggagtctcgctctgtcacccaggctggagtgcagtggtgcgatctcggctcactgcaagctccacctccctggttcacaccactatcctgcctcagcctcccgaatagctgggactagaggcgcccaccaccacatccggctaatttttttttttgtattttttagtagagatggggtttcaccctgttagcaaggatggtctcaatctcctgaacttgtgatccacccgcctcagcctcccaaagtgctgagattacaggcgtgagccaccatgcccggccagatcccatttgttaatttttgcttttgttgcaattgcttttaatgtcttcatcatgaaatttttgttcrtgtctacatcctgaatggtattgtctaggttgtcttccaggctttttatacttttgggtttcacattaaagtctttaatccatcttgggttaatttttatatatggtgtaacgaaggggttcagttttaatcttctgcatatggctaaccagttatccccataccatttattacataaaaaatcctttccccattgcttgttttttgtca

SEQ ID NO: 761475 - DNA, 600 bp, Homo sapiens
ggaaagcctttagctgagatgggcagatcacctgaggtcaggagttcaagatcagcctggccaacatggtgaaacccagtctctactaaaaatacaaaaaattagctggatgtggtggcacatgcctgtagtgggaaatcagggaaccagagagactgataggattcaggaggatttattaaggtgtacaatggctcagcggacttccatccagaaagtctgagccccgaacaaagaaggcaagggccttttatgcatcttgaggcgggaaaaacatgaagcaggaagtgggtttacggaagtgagaaaaaaagcagttaatcgtcttgtgacatgtcatacatcttaagaaaaacatgttttgcagagtatgcttctctgscttgtgaccttgcagctgttcagcaggaaaaacaggaatttacagaccttaaaaaatatgcagagggtagatatggttaatgtttcacagggaggcagttaatattgtttcttaacttcaatgggttactctgtacccatttcagtcttaactgtagacagcaatttttaataaattataataattatcttcttttctttttctatttcatcctgtaa

SEQ ID NO: 761476 - DNA, 639 bp, Homo sapiens
ggtaaagagaacttgtgacattggtatcacttattattgatattatttggatatcttaaaaacaatagctagtaccccaccttttttacatgtacacaaaatcctttacatgaaggtttaacaaaccttttctggtaaacagacacatagtaaatatttttactttgctgatcatgcaatatctactacaactattataattcaggaattttagagaatcataagaaagaaatgaatgagcagtgtgttccaaaatctttatttctaaacacatatgggccaggcacagtggctcatgcctgtaatcccagcactttgggaggccaargtgggcagatcacctgaggtggggagttagagaccagcctggcaaatatggtaaaacccagtctctaataaaaatacgaaaaaaaaaattacccaggcttcgtggcgggcacctgtaatctcagctgcctgggagactgaggtgggaaaatagcttgaatccgggaggtggaggtctcagtgagctgagatcgcgccactgcactccagcctgggcatgacagagggagactccatctcaaaaaaaaaaaaaaaaagaagaagaaaagaaaacaaaaaacaggctgggagcagtggctcacacctttaatc

SEQ ID NO: 761477 - DNA, 601 bp, Homo sapiens
aggatccctggaactgggaagaccaaggttgcagtgagctacaatcgcaccactgcattccagccaaggtgacaaagtaagaccctgtctcaaaacaaaacaaaacaaaggaaagaaaagaaaaaaggggaaaaaaaactgtcagccaaaaacattatacacagcaaagctattctacagaaatgaagcaaaaataaaagttttccagacaacaaaaagctgagagatttcacaccactagccaggccttacaagaaatgcttacagtgtgattcaagcagaagtgaaaaaataataatagttgccataaaaacaaaagagtatgaaactccctggtagaggtgaacatataatcaaattcagataactccattactgaatggtagtatattaatcttccagatctctattatgaagagtaaacctcagagtggtcaataataactacagttacaatawattgttaagaaacacacaatatataatgatgtaatatagactacaacaaaataacacatcatcatttcttacacggtgaagctaaaccttgggtatacaatgaaataaagatggcaaaaatagacactggggactactacag

SEQ ID NO: 761478 - DNA, 463 bp, Homo sapiens
aactattggatactatgcaatatagccatgtaacaaacctgcacatattccacctgaatctaagataaaagttgaaattgttaaaaaaaaaaaaaaaagtttgagggatgggaaagtctgcagtatttgtatgtgaacaaagttaagttttatcagcttaaaatagtttattataactataagagttttaataagtcccatggtaacaataaagaaaaaaaatacagcagaaaagaaagagcaataaatctgtttagcagtayagaaaaccaccaaaacataaaaataagcaacaagagaggaagaaaggaacaaacaatttacaaaactacaagaaaataactaacaaaatggcagaaataagtcttgatttttcaataataagcttgaatttaaatacattaaattcttcaatttaaagatatggagtaggagatggatccccactctctatgatgtgctt

SEQ ID NO: 761479 - DNA, 611 bp, Homo sapiens
gaaatcatagcaaatttacctgcataaggctgtgatttcatttgaggaaaacaagaatctgtgcagaaatttaaaaggaaatcctgatgacaatagggaaccctgaaaatctctgacatatttctggggatcccaggttaagttttttttttttttttttccagacagagtctcgctctgttgcccaggctggagtgcagtggcccgatcttggctcaccgcaagctccgcctcccaggttcacgccattctcctgcctcagcytcctgaatagctgggactacaggcgcccgccactacgcccagctaattttttgtatttttagtagagatggggtatcaccatgttaaccaggatggcctcgatctcctgacctcttgaatccacctacctcagcctcccaaagttctgggattacaggcgtgagccaccatgcctggccgttaagttgtattctcacccatataagacctgggaaaggaaaaggcaccactcactcacctctagttggcttgaaagtgttgcgaaaactgcaagtaaaagctaagactattttgtaaactgcctgaagtttgaagaggtatctttgcacatagatctccactgcaga

SEQ ID NO: 761480 - DNA, 611 bp, Homo sapiens
gaaatcatagcaaatttacctgcataaggctgtgatttcatttgaggaaaacaagaatctgtgcagaaatttaaaaggaaatcctgatgacaatagggaaccctgaaaatctctgacatatttctggggatcccaggttaagttttttttttttttttttccagacagagtctcgctctgttgcccaggctggagtgcagtggcccgatcttggctcaccgcaagctccgcctcccaggttcacgccattctcctgcctcagcctcctgaatagctgggactacaggcgcccgccactacgcccrgctaattttttgtatttttagtagagatggggtatcaccatgttaaccaggatggcctcgatctcctgacctcttgaatccacctacctcagcctcccaaagttctgggattacaggcgtgagccaccatgcctggccgttaagttgtattctcacccatataagacctgggaaaggaaaaggcaccactcactcacctctagttggcttgaaagtgttgcgaaaactgcaagtaaaagctaagactattttgtaaactgcctgaagtttgaagaggtatctttgcacatagatctccactgcaga

SEQ ID NO: 761481 - DNA, 611 bp, Homo sapiens
gaaatcatagcaaatttacctgcataaggctgtgatttcatttgaggaaaacaagaatctgtgcagaaatttaaaaggaaatcctgatgacaatagggaaccctgaaaatctctgacatatttctggggatcccaggttaagttttttttttttttttttccagacagagtctcgctctgttgcccaggctggagtgcagtggcccgatcttggctcaccgcaagctccgcctcccaggttcacgccattctcctgcctcagcctcctgaatagctgggactacaggcgcccgccactacgcccagctaattttttgtatttttagtagagatggggtatcaccatgttaaccaggatggcctcgatctcctgacctcttgaatccacctrcctcagcctcccaaagttctgggattacaggcgtgagccaccatgcctggccgttaagttgtattctcacccatataagacctgggaaaggaaaaggcaccactcactcacctctagttggcttgaaagtgttgcgaaaactgcaagtaaaagctaagactattttgtaaactgcctgaagtttgaagaggtatctttgcacatagatctccactgcaga

SEQ ID NO: 761482 - DNA, 639 bp, Homo sapiens
tgttttttctgttcctttaaccatctttccttccaataggtttgaataactagatgacagcaagattcatattacttttgcttgtgtaaatgaaatagagtgtgactgactatactgacacaaaatgacacaatcattataagaaaattcaaagctgggttggcatgacttttgataaatagtcatctattttatttatgcaataatacaaaaatgctatgcctttttaaataactttttgtacagctagaatttttcaaacatatttataatcatataagttttatggctgaatttctaaacaattaatgtatttaagattaaaaataatttaataaatcataattagtctcttctaattaatgctacatattaagaccccaggaaatattttctgggtattatctgtgctattttaaattattcatcaatttctactytatcctcaactatataagaaatttttcataaattcattattagaatgatggagtttataatgacattgaagattactgaagtcaatatacttatattacagagtagggaaaaactctcaaatttaatgacgattaaggtagtagcagtaagtctcaaacagagtcaagttcttgtaccactcttagtttttctctatcc

SEQ ID NO: 761483 - DNA, 654 bp, Homo sapiens
gtgaccagcgccatgtccagccaggtggtgggcagtgagccactacatcatggcagagccggccaggcctgacagtccaaagggctcctcggagacagagacccgagcctcctgtggccctggcccctggtccagctcccacccactgcctcccaggccacaagraagaggaggatggggagggggctgggcctggcgagcagggcggtggaaagctggtgctcagctccctgtccaagcgcctctgcctggtctgtggggacgtggcctccggctaccactgcggtgtgtcatcctgtgaggactgcaaagccttcttcaagaggaccatccaggggagtatggagtacagctgtctggcctccaacgagtgtgagatcaccaagcggagacgcaaggcctgtcaggcctgccgcttcaccaagagcctgcgggagcgcgcctggaccgcgtccggggtgggcgggagtacaagcggtgccagaggtggacccgctgcccttcccgggcgccttccctgctgggcccctggcagtcgctggaggcccccagacgacaggcccagtgaatgcactggtgtctcatctaatggtggttgagcctgagaagctctatgccttgcccgaccctgctggccctgatgggcaccttcca

SEQ ID NO: 761484 - DNA, 654 bp, Homo sapiens
gtgaccagcgccatgtccagccaggtggtgggcagtgagccactacatcatggcagagccggccaggcctgacagtccaaagggctcctcggagacagagacccgagcctcctgtggccctggcccctggtccagctcccacccactgcctcccaggccacaagaaagaggaggatggggagggggctgggcctggcgagcagggcggtggraagctggtgctcagctccctgtccaagcgcctctgcctggtctgtggggacgtggcctccggctaccactgcggtgtgtcatcctgtgaggactgcaaagccttcttcaagaggaccatccaggggagtatggagtacagctgtctggcctccaacgagtgtgagatcaccaagcggagacgcaaggcctgtcaggcctgccgcttcaccaagagcctgcgggagcgcgcctggaccgcgtccggggtgggcgggagtacaagcggtgccagaggtggacccgctgcccttcccgggcgccttccctgctgggcccctggcagtcgctggaggcccccagacgacaggcccagtgaatgcactggtgtctcatctaatggtggttgagcctgagaagctctatgccttgcccgaccctgctggccctgatgggcaccttcca

SEQ ID NO: 761485 - DNA, 654 bp, Homo sapiens
gtgaccagcgccatgtccagccaggtggtgggcagtgagccactacatcatggcagagccggccaggcctgacagtccaaagggctcctcggagacagagacccgagcctcctgtggccctggcccctggtccagctcccacccactgcctcccaggccacaagaaagaggaggatggggagggggctgggcctggcgagcagggcggtggaaagctggtgctcagctccctgtccaagcgcctctgcctggtctgtggggacgtggcctccggctaccactgcggtgtgtcatcctgtgaggactgcaaagccttcttcaagaggaccatccaggggagtatggagtacagctgtctggcctccaacgagtgtgagatcaccaagcggagacgcaaggcctgtcaggcctgccgcttcaccaagagcctgcgggagcgcgcctggaccgcgtccggggtgggcgggagtacaagcggtgccagaggtggacccgctgcccttcccgggcsccttccctgctgggcccctggcagtcgctggaggcccccagacgacaggcccagtgaatgcactggtgtctcatctaatggtggttgagcctgagaagctctatgccttgcccgaccctgctggccctgatgggcaccttcca

SEQ ID NO: 761486 - DNA, 565 bp, Homo sapiens
ctggaaataatggatgaaaaaaatgatgttttttatagcccttgataaatattgcatatataaatactctcataatttggaaaatatatccattttgcaaagccatataaaaataatttttataatgggacacattccctattaaatacattttaaaaagcattaaaatactggktaatgtagtttgtgtcctattatttaatagtggtatactcaagacaacaggggaaatgaccaagcacgatgtgaaaagttaataaaataagctgatgaagctataaacctgagtatacaatgctccatatatcatctgagtacctctaaaaaccatcctgatttttgttcacaaattagcctttaattttctagtcataatcattctaagagaaacaaaccacagactaagagataagctgcggtgtccaaaagctggaggatcttcatttatgaccgcccatggtcataaacactttcttatagcttgactgtttccctttccttgcttgtgaaatgtcttgaccactcaacatgggttttctgctgcctcccgtggcccttacctcct

SEQ ID NO: 761487 - DNA, 565 bp, Homo sapiens
ctggaaataatggatgaaaaaaatgatgttttttatagcccttgataaatattgcatatataaatactctcataatttggaaaatatatccattttgcaaagccatataaaaataatttttataatgggacacattccctattaaatacattttaaaaagcattaaaatactgggtaatgtagtttgtgtcctattatttaatagtggtatactcaagacaacaggggaaatgaccaagcasgatgtgaaaagttaataaaataagctgatgaagctataaacctgagtatacaatgctccatatatcatctgagtacctctaaaaaccatcctgatttttgttcacaaattagcctttaattttctagtcataatcattctaagagaaacaaaccacagactaagagataagctgcggtgtccaaaagctggaggatcttcatttatgaccgcccatggtcataaacactttcttatagcttgactgtttccctttccttgcttgtgaaatgtcttgaccactcaacatgggttttctgctgcctcccgtggcccttacctcct

SEQ ID NO: 761488 - DNA, 511 bp, Homo sapiens
agagatttacccacgtatttattaacagcaagccagacattagcattgtttctatagatattagattaactaaaagtatcccttatgggaaatgaagggatgggccgaaataaagggatgggtttggctagttatctgcagcaggagcatgtccttaaggcacagatcgctcatgctattgtttgtggtttaagaatgcctttaagcggttttccgctctgggtgggccasgtgttccttgccctcattccagtaaacccacaaccttccagcgtgggtgtcatggccatcatgaacatgtcacaatgctgcagagattttgtttatggccagttttggggccagtttatggccacattttgggggggggggtgctgttcccaacatgttccccttctttgatttgcaaagcaataaaagccaaggcagctttgtcatggtgagctacttctcgcgggagtcaggatccgcatctgcagactatacacacaacacaaattaaaagcacact

SEQ ID NO: 761489 - DNA, 511 bp, Homo sapiens
agagatttacccacgtatttattaacagcaagccagacattagcattgtttctatagatattagattaactaaaagtatcccttatgggaaatgaagggatgggccgaaataaagggatgggtttggctagttatctgcagcaggagcatgtccttaaggcacagatcgctcatgctattgtttgtggtttaagaatgcctttaagcggttttccgctctgggtgggccacgtgttccttgccctcattccagtaaacccacaaccttccagcgtgggtgtcatggccatcatgaacatgtcacaatgctgcagagattttgtttatggccagttttggggccagtttatggccasattttgggggggggggtgctgttcccaacatgttccccttctttgatttgcaaagcaataaaagccaaggcagctttgtcatggtgagctacttctcgcgggagtcaggatccgcatctgcagactatacacacaacacaaattaaaagcacact

SEQ ID NO: 761490 - DNA, 546 bp, Homo sapiens
aggaaagcttctagctcgcatatctatgctttcagcttgacttttcaggctgctttctgttagaaaaatggtttgagggctgcattttattaaaggaaaattccactgagaactcttttaccctttctagctgcctaactttaattccttaacaactcctgtattattctcccctcaggagatgtaaccctaactgcttttagggggtgttggatggcgattctttctggctacttcctgcttaaaaggggcatcacgtgaggggacagcagttggggctgctcctgaggcygatctaagggttctcagaagaatggcaagtccgtgtgcggctctgttcgcagcaccatttggagtttgcttctcggtgaaaagagacaaattttataagaaggtttaaaatatagggctagaatatgagtattaagattaccactattagtggggttattatggaccataactatgttatatactagaatttgatagctattagttacatcaattgattgtaatatcactttccctccaccagatgtcactgta

SEQ ID NO: 761491 - DNA, 510 bp, Homo sapiens
agaaaagccccttttgtgaataggaaagctctgccttcaacagttaggagtaaaatgtcctttgtagccaaattttagttccaatactgtcccatctacagaagaaattgccattaggcctctacattcatttcaggcacctattctgtctcccaattaaaatagtacttgattaggtaaggggattttaagtttagaatgtaaccggaaccattttccttaagggtgaatgttttagcacggggccgtaatagcaggcaactagcacattccctccgttaaagaagccttkctcaaaagtgactattacagtctttcagagatccattttttcagagccaggcagatcacacaagttttggaaatcaaaatggattcacaggaggataactaaggctgtgtgggtaaagcgtggttaaatcccattacttagttcatccacttccatggcttggagggccacacttgcaaccatggccaggacatttaacatggtgccaggactcagga

SEQ ID NO: 761492 - DNA, 550 bp, Homo sapiens
actcaaaagaacacataaaggtacagaagaaaaaatatcagtaaatacaaagaaagaacaatagaaagcacctaatatgaaaatagagacaattgataggaaaaaaatgaactcagtttaaggtacctgtggaacaataataagagatctaatattttcagtcctaaaaaactactagaagaaaatacatctgaagactgtagatttgtaaataaacatgaactttcgagttcaagaagtcaagtgaaacctaaacacaataaacataaagaaatccactctaaggaacattatcattaaacttcttttaacctttatttyaggttctagggtacatgtaggtaaattgaatgtcacagaggtttgggatacagtttattttatcaccctagtaataagcagagtatctgataggtagttttttgaccctcactctccttccaccctctgccctcatgtaggccctttgtgtctattgttccctatttaaaaagaatactctagagacagtatgatattggcatccaaataagacaactagatcaaaata

SEQ ID NO: 761493 - DNA, 646 bp, Homo sapiens
ttctaataaattacccgagttagaataagattcttccattatctttcaatcttcatcatcacacacatatcaagtagcattccaagtttacatgtaacaatgttgcctactgttattaccctataaaacatcttaggtcccataaatttttacctmcgttaattttaaaatataaatggcacattaaatcacatttaaatacatggcattgaaacacaatatctgatatacatgttataagcttttcacataataaaatgaagaggtatatactatgaacagagagaaaatgattctcacacacgatacagcttataaacactacagtttggaatggcattttatactctattatttttagaggaatcccaaaatattagtcctttgtgtattatccatgctcaaatttcctctcattaaaggattggaagtgtggagattattgtatctccagcactcacaaaaagttaattataaaatattttcaaatgtcataaaattgagaatatcttttgcttttccctccaaggtcacatcttttgtccatgaggaaacacaatcttcttagtcatatctgcagtgtgcttgagtattgagctaatggaatgactaataataaagtcctaatccagtacgctctaattaa

SEQ ID NO: 761494 - DNA, 538 bp, Homo sapiens
taaaatgaccatactgctcccaagatctatagattcaatgcaatccctgtcaaaataccaatgctatttttcacagaaatggaaaaagcaatcctaaaatttgtatggaaccaaaaaagagccagaatagccaaagtaatcttgagcaaaagaataaagctagaggcatcacatcacctgacttcaaaacatattataaggatatagtaatatcaaaatagattggtataggtataaaaatagatacatagaccaatggaacagaacagagaacccagaaataaagctacatatttatagtcaaacaatatttgacaaagctgctaaaaacatacattggagaaaggaaaacctckgcaataaatgatgctggaaaaactggataaccacatgcagcagaatgatactacatctttatctctcaccttatacaaaagtaaactcaaggtagattaaagacttaaatgtaaaagccaaaacttcactagaagtaaaaatagggaaaactcttcaggacatttgtctaggcaaatatttt

SEQ ID NO: 761495 - DNA, 537 bp, Homo sapiens
aaaggcatattgattacctgatgctgaggtttgaagtatggttgaacctgtcacccagtgagcataataccctataggtagttttccagcccttgctcccctttctctcttccccaactagtagtccccaatgtatactgctgctatctttatgtccatgtacatctaatggttagctctttcttataagtgagaacatgcagtattttgttttctatttctgtgttagttcgctaaggataatggcctccagctgtatccatgttgctgcaaagacatgattttgtycttttatggctgcatagtattccctggtgtatatatgccacattttttggacattatttggcaccaatccaccatttatgtgcacctggattgattccatgtctttcctaatataaataaagctgtggtgagaatatgggtgcatgtgtctttttggtagaataatttattttcctttgagtataccctcagtaatgggattattgggttaaatggtagttcaactgagctatttgagaaatctccaaa

SEQ ID NO: 761496 - DNA, 480 bp, Homo sapiens
gactgaaacacagcatataaaaatttcttaccattatcttaagatgaacagttcagtacacatactaaagtgttactagggaaaggttttgagctaggtgtatttttattaaaattattaataaggttttattaaaattattttcttcagtttaaaaatgttcccattgttgaaatacataatttttcatggtttctgatcctatgggagattgtaattgattttggtataatatatcaattatagtattattttacaacttaaataatttcctgtcttttggttctaactctagatatttaaacactttcactagttacctggagaaagyaaaaatattagtcattagttacctaaagaagtaaatactactcttctaagagaaacattttaatcactcttaaaagaaaggtctaaatttattcatgtgtttcttatattcttttacttaacagtatttgttttatgtaggacaaataa

SEQ ID NO: 761497 - DNA, 542 bp, Homo sapiens
atgcatatcagtgttctagagataaatgtgtacagtacttaaattataaagagttgttacaggactgaaaccattgcctcttatattttatggaagagactcatgtttcggattttattattttaaaaatctttgcaatttacatttcttctaaatatattagaaaccttttaaatctgtaatatttatgaggtctattaattacaatgttagaattacacaattctaagtttctaatgttgctttactggagattcctccataaatattagagctaagcattcatactgacataaaatccagtcaggctttttcatcatggtgatatgccatggagataaatacaggttytacatgaatagagataggattccataacataagtagcaaatgaaggataattatttcccacatagttattcaaaagttagcatgctttataatccatactatttgtatggcatctacatgtgctactttaggatatttaaggttttttaatccttaaaataatcctggccgggcacggtggtgcacacctg

SEQ ID NO: 761498 - DNA, 714 bp, Homo sapiens
catctgttgtcatcttcatctggatcctttagatccaattttccttcctagggctttgacccaaaacttagaattgagttttggacaaaaatgtgtcttgggggaggagttgcatggactccttaacataagccagctgctaaggtgaaaatgtggaactgagtcttcctccaagaaggaagagaaaaggatgtcttgtgacacacccagataactggtagctgcagttacgcttgctaggatttgggtgcatggtgcttggctatggttagctcccttggttttactttcccaaaaaaggaaacctccaagtggtgagcattctatttattcccatcacctggcaggatttgcaggataattgctcagaactagagtattgatccagatttttacattgcccatccctcttgttctttctgaactgcagctggaagytgatggttggttcacaggaacaagaagggttactctaaaatgtaggtgaaaacttaagaacaattaatgacaaatgtacgataagttttgaaacataatttctctctctccagtcctcatttttgttaaaaaaaaaaaaaaacccacaaatcatcatcaaaggactgagtcatttgcaaaacagactttagtcttatacttgtcctgattatttgaatgaagtgcagcaagagtaactatttcctcacacctttggattggctttgatgaaactct

SEQ ID NO: 761499 - DNA, 714 bp, Homo sapiens
catctgttgtcatcttcatctggatcctttagatccaattttccttcctagggctttgacccaaaacttagaattgagttttggacaaaaatgtgtcttgggggaggagttgcatggactccttaacataagccagctgctaaggtgaaaatgtggaactgagtcttcctccaagaaggaagagaaaaggatgtcttgtgacacacccagataactggtagctgcagttacgcttgctaggatttgggtgcatggtgcttggctatggttagctcccttggttttactttcccaaaaaaggaaacctccaagtggtgagcattctatttattcccatcacctggcaggatttgcaggataattgctcagaactagagtattgatccagatttttacattgcccatccctcttgttctttctgaactgcagctggaagctgatggttggttcacaggaacaagaagggttactctaaaatgtaggtgaaaacttaagaacaattaatgacaaatgtaygataagttttgaaacataatttctctctctccagtcctcatttttgttaaaaaaaaaaaaaaacccacaaatcatcatcaaaggactgagtcatttgcaaaacagactttagtcttatacttgtcctgattatttgaatgaagtgcagcaagagtaactatttcctcacacctttggattggctttgatgaaactct

SEQ ID NO: 761500 - DNA, 611 bp, Homo sapiens
attttaaaggtttcttttaatatttaaatgacagagttaatttactggcctagaacataatagttgctgaatcaatgttagcaattgaattctttttataaaagattggtaaaaatggatacaggagagtttaacacttacaatctcttgttatatccagatattggtctttggagtaggttatttaaaagaagtttctagttatactttttgttggtaaattattttactgcttgctacaaaatttgtgggttgtgaaataggaaaaattttttctttttttaaattaacacttgattgtttgggtaactcccaggaaataactgtaatgttagcgtgttgttctatgtgctttatcttctattagtctgcaaagtttgtatactataaacaagcaagtacaaggagttaatgctccaaatatttctttttctarcatagttaatattgaatgatccgtcagttttttgcctaaattttattcttataacaaagtatcatacaaattagttttattgggtcacatttatatgattgctttcaagatttaagagttaaatgactttagcttgtaaattttaaaaaactcccaaaatatatatttgcatttt

SEQ ID NO: 761501 - DNA, 604 bp, Homo sapiens
catatagctacatgacactgctaggaagcgtctctctgctaacaccatgagcctcatcatgttcagcactcactagggtcaggatttagcacacttgggagtatctacagagctaaaagatatttctctgctgaggttaccaacactcagctcagcagaaagcagacctcagagaaatgggagtgcagtctacaattatgtgaaaaaaattaagtgatctgaaatacactgaaacatctgaaaccataataaatataytaaagtaggctctttatatcacaaaaggagaaaaattttaatagattgctctgggatagtaacagtatcaaaaaatgcagtaaactcttgagatttatactttagaaaacagcaatgttcttctaccaggcattgactgcagaggaacccaattagatgaataatcgctctgagataatgtggcattctgcatgtacttcaaaactactgttatattgaaactcaagtgaatgaccacctccacatcccccaaaattaaaattttgagtgctgatattgagtgctttctatgtgccagatattgttccaagtctatttattaatttatttaaccctctcaccaagt

SEQ ID NO: 761502 - DNA, 620 bp, Homo sapiens
ttcttaatatagaggagggaaatattttccactttcaggactttcttctaaagtgatatcagcaaaataattactgaaatggatataattcaagagtaagttgagcatttatcatttgtgtaaacaattcctcatttctgttgaaacttctctggggtagaattgtaatttgtagatcataaacctggctaacttcaataagtttatagaaagaaagaaataactatattgcaaagggtgacccataaagtacccagaatataagaagamatattcataattaatccattatgaaattctgggaattttatgagagcagatagctaccttttcttacatttctctagtatacagctgggattagtaaacattttgtgtagaggtccagaaaataacaatttgaggttttgagacacctgtggccttgatcacaactatgccataccattaaagcagagaatacaaaaacaaacaaatgagtgtggctgtatcccaataaaactatttacaaaaacaagccatgctcattgatgactcctgatctagaatccgaggtccacaaggacaaagactattttctattttatttggtgatgtattctcaaggcctagaacagtgt

SEQ ID NO: 761503 - DNA, 631 bp, Homo sapiens
gtgtatgtgggtaaaattgatatgggaatttaacataaggaaaaatcataactcctgtcaccccagtagttttctaatagtttggaaggcttgtgcttggaccacagtaataaaaaactattaatttcattcaaaagaattggaagcaacaaaacaaaataggaataaggaagaagacctactgaatgggaatctttaaacaaatatatataggtattaattctaaagtaaagtctccasaacttagcatagttatttgcactgtgtaaatgctcagatatatgttctatcaattaaattgaaggctatctctggttcctggcaaacatatggtaatgttaacaaatacaggaaagatcttagggcaaaaagactaaagtaagcattgtaaagaagaaaaattaggaagaatggatgatgatttattaggaaatgatctactcttttcaaattattcaaagtttttatgccctttattagtgaatgaacccctaatttttaataaaagtacaggtttgttaagaaaattcaaagctagatcaagcctcaaattagtgagaaatcataggaattgaagaagttcaaaaccctgggaatggacaaataaatactgagataatatatttgtaaa

SEQ ID NO: 761504 - DNA, 631 bp, Homo sapiens
gtgtatgtgggtaaaattgatatgggaatttaacataaggaaaaatcataactcctgtcaccccagtagttttctaatagtttggaaggcttgtgcttggaccacagtaataaaaaactattaatttcattcaaaagaattggaagcaacaaaacaaaataggaataaggaagaagacctactgaatgggaatctttaaacaaatatatataggtattaattctaaagtaaagtctccacaacttagcatagttatttgcactgtgtaaatgctcagatatatgttctatcaattaaattgaaggctatstctggttcctggcaaacatatggtaatgttaacaaatacaggaaagatcttagggcaaaaagactaaagtaagcattgtaaagaagaaaaattaggaagaatggatgatgatttattaggaaatgatctactcttttcaaattattcaaagtttttatgccctttattagtgaatgaacccctaatttttaataaaagtacaggtttgttaagaaaattcaaagctagatcaagcctcaaattagtgagaaatcataggaattgaagaagttcaaaaccctgggaatggacaaataaatactgagataatatatttgtaaa

SEQ ID NO: 761505 - DNA, 551 bp, Homo sapiens
ccacacgtttgtgagacaaaattgataaaatacagcattgttgcaatataaatttccattctgccacatagcagcctttgttataatttgttttgtgtttcactgttaaggcattgtttcaatcacattagtggtattttaaatatgacaaaacaatactatgtatgtaactttttytcttttttcatcagtaaagtatctttttttcaggtcacagataggtataggagtctatgtgcattttggaattactcacctgataccatgaatggcagctggtcttcagagggctgtgagctgacatactcaaatgagacccacacctcatgccgctgtaatcacctgacacattttgcaattttgatgtcctctggtccttccattgtaagataattttccccttcatatttataaatgttgctttttctgttttttttccgcatcattcgagacaatatttaattttttatatatttttcttgggtttagatagcacatttagtataagagataaaaccccaacaggatctttctttctgtctgttttccta

SEQ ID NO: 761506 - DNA, 590 bp, Homo sapiens
catccccctctccaagaaacacccaagaatgatcaataaatacttaaaaaaaaaaaaaagtcaagacacaacagatgctggcaaggctgtggaaaaagagaaatgcttttacactgttggtgggaatgtaagatattatggcaattcatcagagacctagaaccagaaataccatttgactgagcaatcccattactgggtatatacccaaataaatataaatcattctattataaagatacatgcacacaaatgttcatagcagcactattcacaataggaaagacatagaaccaacccaaatgcccatcaatgataggctggataaagaaaatgtggtacawatacaccatggaatactatgcagccataaaaaggaacaagatcatgtcctttgcagggtcatggatgaagctgaaagccattatcctcagcaaaactaacacaggaacagaaaaccaaccaccaaatgttctcacttataagtgggagctgaacaattatgtcatgtgtttcacatgacacaggggaggggaacaacacacactggggcctttcagagtcgggggatgtgggggagaacatcagga

SEQ ID NO: 761507 - DNA, 590 bp, Homo sapiens
catccccctctccaagaaacacccaagaatgatcaataaatacttaaaaaaaaaaaaaagtcaagacacaacagatgctggcaaggctgtggaaaaagagaaatgcttttacactgttggtgggaatgtaagatattatggcaattcatcagagacctagaaccagaaataccatttgactgagcaatcccattactgggtatatacccaaataaatataaatcattctattataaagatacatgcacacaaatgttcatagcagcactattcacaataggaaagacatagaaccaacccaaatgcccatcaatgataggctggataaagaaaatgtggtacatatacaccatggaatactatgcagccataaaaaggaacaagatcatgtcctttgcagggwcatggatgaagctgaaagccattatcctcagcaaaactaacacaggaacagaaaaccaaccaccaaatgttctcacttataagtgggagctgaacaattatgtcatgtgtttcacatgacacaggggaggggaacaacacacactggggcctttcagagtcgggggatgtgggggagaacatcagga

SEQ ID NO: 761508 - DNA, 499 bp, Homo sapiens
cccaaatcatactttaacccagaccatcaagaaaacactgttaagaggcacatgagcctcactatggagttcactgcttgttctcttctgtagaccaaggctggaggtagaagaaccaccagagaacttggctcactaacagcaatggggatactaggmccctaaagcaatagagacaagtaaacagattttaacaccaaaagctaggagattattattttcataagaacagacaagatcagagtaatagccaaggaagcctgacctgcagagaactatggagatggtttaatataacatggtctatccctttgggtaaaatagatggacttccaacctaatcaatagaaaacgataattgatattgtttgacaacactgaagcctattgttcaaataaagccacattcccttgcccagtttttggactcaagccagttttcagactgggatccactgactcaagagagtgaggatctcaggggaaggaccttattaca

SEQ ID NO: 761509 - DNA, 573 bp, Homo sapiens
catcaaagaccaaaggtagataaaaccacaaagatggggaaaaaaacagggcagaaaaactgaaaattctaaaaatctgagcgcctctcctcctccaaaggaatgcagctcctcaccagcaatggaacaaagctggacggagaatgactttgacgagttgagagaagaaggcttcagacgatcaatctactcggagctaaaggaggaagttcraaccaatggcaaagaagttaaaaaccttgaaaaaagattagatgaatggctaactagaataaccaatgcagagaagtccttaaaggacatgatggagctgaaaaccacagcacaagaactacgtgacgaatgcacaagcctcagtagccgactcgatcaactggaagaatggaaccaagttcacagccaaattctaccagaggtacaaggaggagctggtaccattccttctgaaactattccaatcaatagaaaaagagggaatcctccctaactcattttacgaggccagcatcatcccgataccaaagccaggcagagacacaacaaaaagagaattttagaccaatatccctgatg

SEQ ID NO: 761510 - DNA, 573 bp, Homo sapiens
catcaaagaccaaaggtagataaaaccacaaagatggggaaaaaaacagggcagaaaaactgaaaattctaaaaatctgagcgcctctcctcctccaaaggaatgcagctcctcaccagcaatggaacaaagctggacggagaatgactttgacgagttgagagaagaaggcttcagacgatcaatctactcggagctaaaggaggaagttcaaaccaatggcaaagaagttaaaaaccttgaaaaaagattagatgaatggctaactagaataaccaatgcagagaagtccttaaaggacatgatggagctgaaaaccacagcacaagaactacgtgacgaatgcacaagcctcagtagccgaytcgatcaactggaagaatggaaccaagttcacagccaaattctaccagaggtacaaggaggagctggtaccattccttctgaaactattccaatcaatagaaaaagagggaatcctccctaactcattttacgaggccagcatcatcccgataccaaagccaggcagagacacaacaaaaagagaattttagaccaatatccctgatg

SEQ ID NO: 761511 - DNA, 606 bp, Homo sapiens
actcctccttgatttgtgtgacagcagcgtctgatcactatctggacctcaccttaggaagtatctacctgtttgctgtctgtcgctccactagagtatacctgcaggaaggcaaactttgtctgttgactgctgtcctctgaggatatgcagcaatgaatacctgcagagcttagtgtgaggttgaatgaattctgctgcttgtttattccttttttttttttttttttttttgagacagggtctcattctgttgcctgggctgggaatgcagtggcaccatcacggctcactgcagcctccaactcctgggcttaagcgatcctcccacctcagcctccctaggagctgggtctacaggtgtgtgctaccgcacctggctaattttggtatttttttgtaraaatgaggtctcactatgttacccaagctggtcttgaactcttggactcaagcaatcctcttgccttggcctcccaaagtcctgggattataggtgtgagccatcgcgcctggccttgtccatttattcttaaaaagagaccagcaccccagccactcgcatacagaaactatcacttggaaatctgtgcctggtctctgctc

SEQ ID NO: 761512 - DNA, 626 bp, Homo sapiens
tctaagttgaagaaaatgcaaccccattttgaaacttgaccctttcgtggagatgagtcactgggcgatttggtgtcgctggttccgctctgttcattttaagggagcatctccactttgtccttgctgactgatgggatggctggccagtggtactagagagcagaagattttcctagagaagctgggaatctaggcttttttttctctaaaatctctggattttaaattataagaaccttcactttttagctatagcgtagctcagacaacatctctgctgactctcagtttcctgcctctggcttagaaggtttccctccagtatctacatattctggcaaaagcattttatagtttgctgtgacctgaggtggaagatgtcttcccaaaaatgatgcatgtggtgattctccaactgcagtgcccaggatccgtggcactccaaggggtgagacagcagygggcatggggctggagccagtccctaaccccgctcccgccccagacatattcctgttgcaatgagagcacctccaatcagatgtgttgtcaacattaggcctccaacaagtctttcattcaaataatgaaagagaaaagaagaaatgaaacaataaatgaaa

SEQ ID NO: 761513 - DNA, 575 bp, Homo sapiens
ggtaaaaatgtattttatatagaaaatatttctagtttcagattaccggaccaggcatcaaaatatatgatttctagtcaggtacaaacctttctgtaatgtatactgtaggtaaagagtaaaaatctcctgcagtatayaaaaaaattggggtgggaattatctgctgtagataactattatgtactatttgtactgatactctttttcttttattggctttccatatagtaattgctacgttttgtaacaggaacctaactttaaaagagatgctttacatgcatactatttaaatatgtttacatcggaaaatgcatgctttattacactttagctatttgcaattcactatatcctgcaatatattgatgataagttttaaaagctggcagaggcaataatggatggaatgctgaatataataagtggcctctctctgaaagatttaaatcaataccaacaatcaagagaaagaatttgcaatgagaagttctttgaattttataacttggcctcaaataatagatttaaacaagattcaatgactgataataaaaaagaatcactcttca

SEQ ID NO: 761514 - DNA, 575 bp, Homo sapiens
ggtaaaaatgtattttatatagaaaatatttctagtttcagattaccggaccaggcatcaaaatatatgatttctagtcaggtacaaacctttctgtaatgtatactgtaggtaaagagtaaaaatctcctgcagtatataaaaaaatkggggtgggaattatctgctgtagataactattatgtactatttgtactgatactctttttcttttattggctttccatatagtaattgctacgttttgtaacaggaacctaactttaaaagagatgctttacatgcatactatttaaatatgtttacatcggaaaatgcatgctttattacactttagctatttgcaattcactatatcctgcaatatattgatgataagttttaaaagctggcagaggcaataatggatggaatgctgaatataataagtggcctctctctgaaagatttaaatcaataccaacaatcaagagaaagaatttgcaatgagaagttctttgaattttataacttggcctcaaataatagatttaaacaagattcaatgactgataataaaaaagaatcactcttca

SEQ ID NO: 761515 - DNA, 567 bp, Homo sapiens
ccttgatttcatggaaacagaaaattcaggatccattttcataagtaagcataaaaaggatttttgaaataaaagaaatttatgagtagcaacctatttaagaaaaatgcttataataacagtgactaacaaaatatttagcaaagaggatagaatgctgtcatagcaaaaacatagcaacaaaaggcaggtactctttgggttagtggcagtaagttacttaatttataaatttcttagatgacataggtaagttcaaaagagggtaatattcttagccttctgtgtagctagtttatttttcttataaaattagatgctttgtcatactcctctaataatgaatgcacatatatttttagattgatataaccagattcaaagaacagaagtgattatgtcagatttatattgttctttgcaatrtggtgttgacatgttaatgattcctatcaggtgctagatgtattttttctctaatacttctattcttcacatattctcaagtgggtgttactagaataaacttgcactggcgccctagatcctctgattatgttgtcatca

SEQ ID NO: 761516 - DNA, 599 bp, Homo sapiens
ttgattgtttatattggcttgtaaacctgacagctattctagttgcatgctacagcataagttctagctaaaggtattcatcaattatgctccaatggatttttttaatagggaaaggaaacaaaaaaaaaggatgaagtttattatggtgacagagacatcttgatctatgattttgagaaagctgtccacatctaggatgccgtctgcttctgggaggaaatttttggtatattttatcttaaagtctcaaacaggtatatagttttaggagtctgaagggccctttggagttgtgagaggtagacccaaggcttaaggctctgaagagttactgtagtgtggttggtcagaagaacttgatgtggttcattttaatacagtttaagggcagcctttttctgatgttatttttagataacccaatctccaggtttcagaccttagaggatttgaatgtctytagtgtatttcgattttttttccttgtgaaagtatagtttggcaaaatgtagcaaaggattgtagtacattagggtttaggagattgggagataaataaggttctattattagaggtgcagcctttttagtgggag

SEQ ID NO: 761517 - DNA, 636 bp, Homo sapiens
aacagagaatcacaaaattaagccacatacttatagccaactgatctttgataaaggtgacaaaaacatacacaggaaatacactggggaaagaaaggacactcaattcaacaaatgtattgggaaaattggattgtcatatgaagaatgacactggaccccttagttctcaacacatacaaaagttaattcatgatggattaaagacttaaatgtaagacctgaaaatatgaaaatcctgraagaaaacaggaaaaactcttggacattggcctaggcaaaaaaattcatgactaaatcctcaaaagcaaatgcaacaaaaacaaaaatagactaattgtgtttaattaaactgaaaagtttttgcacgacaaaagaaataatcaacagggggaacagataccctgcaaaatgggagaaaatatttacaaactacgtatgtgacaagggactaatatcctgaatctacaagaaactccaacaactcagcgacaacatcaacatcaacaacaacaacaacaacaacaacaacaacaaactcaactagtcccattaaaaagtggacaaagggcatgaataaatatttttcaaatgaagacatattcatggccaataagcatatgaaaaaatgctcaa

SEQ ID NO: 761518 - DNA, 601 bp, Homo sapiens
aaattcttaattcaagaactgatttaaagataaatttttctttaaaaacacatatattgtttactctttatttttggtttcacatctttacttttatcttcttactattcttcattttttgtctttgtctaacaaatcgtaatggaaaaatactcatttatctctcaaaagctgaaattatacttgtttacctttaatgaaaatgatagacaattcttcattttaagagaatctgaaacttcctggatgttgaaaccatgatatttcacactgaaaactcttccatgaatacaaatcaaaaaaatacatactgagatttaatatgaaaamatttgcaaatttaatacaatattgaaaattaaatacaaatacattttacagataaatcaatttttattaaatttgttgtattgtgtgtgcttcctaggtttaggagggatttttaatgttgttttttaaaatgcttaaaataaacagcatagtaaaacactaggtcttgcattagtgagaatggataagtctatttttgaaatttgtatttgattaactataatctttcacctactctttttcctccagacatagtgcccgaatgtttttc

SEQ ID NO: 761519 - DNA, 565 bp, Homo sapiens
aagcacattcaatttatttatttgtaagtttaaataaataaatatttaaagcttactaggatgtgtgataggggtttctatgggccgtatggatgttttatgtgtagcttagctaaggacaaaggtcagagggtttgaacagaaagtaaacttttacttacatttctctaataaacagattgtaagtttttagtatactgatcttcattctcctctctaacgcattacctcctctgcacaatagtagttagcgactagtttctgaactggaaaacaggaatacggtctcttttaatttgttatatcagtttaagattgcctyaccaccaccacatgtttaataaagatcccagtgctgtgtctacaataaatggatcttcggaatctgtccttcaatgtcaggtatcaatatgcatgtgcaattattgttccagctccaacaaaaaggacacccaaggtcagcatttctcgtttatatggggatagatttagctgaaaatgaatttagaagtagaggcttcatcttattcatgtggtagaaaaataatatatttcatttttctaa

SEQ ID NO: 761520 - DNA, 570 bp, Homo sapiens
gagctgttcctattcggccatctttgttgccagcctcatattctggtattaaattcttaacaaatttatgacttgaaaaattttcctccattctctaggttccttttcagattcttgataaacttttttgataaataaaagtttttaattttaagaaagtccaatttatctattattttcttgttcaaatctaagaatccattgctagatcctaagtcatgaatatttttacttatagtttccatagtctgcttatattacccatctgttcttgcatgttgtcaactttttagagttctttacatattaatgttggttgttttaaattctctgtctgatataaatccaaatcagtgttatgcttgattctggctctgaagtttgcttgattttttcagactgtatttgtaattactttttggtataagtkgtagctttttgttgaaagccagacatattgtactgggtgataagaactgaggaaaaagtgtcacaggatccttgggggtgtcacttcaccaggcagaaatctctgtggccagtggcacctctgtccgagtttttactcag

SEQ ID NO: 761521 - DNA, 685 bp, Homo sapiens
gaactgaggaaaaagtgtcacaggatccttgggggtgtcacttcaccaggcagaaatctctgtggccagtggcacctctgtccgagtttttactcagccccactgggtttattctgcccactcagcctggcaggctgcacttggattgcactaccagcctgagtctcatgcccgccaaggktgagccaggtgcagagatgagagggttgtgtgaatgagccattgtggggtctggccaccgtgcacagccaggcatgctggctgcagcagggtgggcagctccaggtgccagctccctgaaaggctgcagctggaccaagcatactgcaagcagtattcactgctggcaccaggaaatgtggtggtgctcagaagcttggaagtgcccaggaacctcagatccccaaagaggctgttacagccctggctcggggtgctccctaaagggccatggttcttctctccttctctcttctctctttcttgttgcacacaacatggtgagcaaggggagtgtttcagtcctgtttgtgttacagctctttcagtcccaacattcagcaggtcctgaggtcttgtcctgtgtcctggaagaatgaggtacgtgaacaagtggagggtgagcaaagtgaagaggagctttattgagcaacagaatagctcaaaggagacctgcaatgggtct

SEQ ID NO: 761522 - DNA, 624 bp, Homo sapiens
agacatattgtactgggtgataagaactgaggaaaaagtgtcacaggatccttgggggtgtcacttcaccaggcagaaatctctgtggccagtggcacctctgtccgagtttttactcagccccactgggtttattctgcccactcagcctggcaggctgcacttggattgcactaccagcctgagtctcatgcccgccaaggttgagccaggtgcagagatgagagggttgtgtgaatgagccattgtggggtctggccaccgtgcacagccaggcatgctggctgcagcagggtgggcagctccaggtgccagctccctgaaaggctgcagctggaccaagcatacygcaagcagtattcactgctggcaccaggaaatgtggtggtgctcagaagcttggaagtgcccaggaacctcagatccccaaagaggctgttacagccctggctcggggtgctccctaaagggccatggttcttctctccttctctcttctctctttcttgttgcacacaacatggtgagcaaggggagtgtttcagtcctgtttgtgttacagctctttcagtcccaacattcagcaggtcctgaggtcttgtcctgtgtcctggaagaatgagg

SEQ ID NO: 761523 - DNA, 685 bp, Homo sapiens
gaactgaggaaaaagtgtcacaggatccttgggggtgtcacttcaccaggcagaaatctctgtggccagtggcacctctgtccgagtttttactcagccccactgggtttattctgcccactcagcctggcaggctgcacttggattgcactaccagcctgagtctcatgcccgccaaggttgagccaggtgcagagatgagagggttgtgtgaatgagccattgtggggtctggccaccgtgcacagccaggcatgctggctgcagcagggtgggcagctccaggtgccagctccctgaaaggctgcagctggaccaagcatactgcaagcagtattcactgctggcaccaggaaatgtggtggtgctcagaagcttggaagtgcccaggaacctcagatccccaaagaggctgttacagccctggctcggggtgctccctaaagggccatggttcttctctccttctctcttctctctttcttgttgcacacaacatggtgagcaaggggagtgtttcagtcctgtttgtgttacagctytttcagtcccaacattcagcaggtcctgaggtcttgtcctgtgtcctggaagaatgaggtacgtgaacaagtggagggtgagcaaagtgaagaggagctttattgagcaacagaatagctcaaaggagacctgcaatgggtct

SEQ ID NO: 761524 - DNA, 602 bp, Homo sapiens
ctctttcagtcccaacattcagcaggtcctgaggtcttgtcctgtgtcctggaagaatgaggtacgtgaacaagtggagggtgagcaaagtgaagaggagctttattgagcaacagaatagctcaaaggagacctgcaatgggtctctccataggcagggcatcccmgtgagtgttcagctctcagtagagaggagcagaggggagcagttgttagctcctctctatagctggtgcttctgatatctgcccaactcccagtagagaggagaccctggagtggtagctcctctctgcagctggtagtcttgatgtctgcttgagtctgactgagtctggggtttttatgggcttcagagggaaggaagtacatgctgattggttcatggggggccatgggcaggcctggaaaaaatatcataagttcaattctggtccatcagcctggcctccaggcttcaggctgcccctggtttgaaggtgggccttcactggggacctgcccctttctgcctaggagccagtctgcctcctgctgtcacacacagtgtccaggctgtttgtgaccaggggcacctccaagccgagctgccatcaggatcc

SEQ ID NO: 761525 - DNA, 631 bp, Homo sapiens
agtgagcagtagcaagatttattgcaaagagcgaaagaacaaagcttccacagtgtggaacgggacccgagcaggttgccactgctggctggggcagcctgcttttattcttttatctggccccacccacatcctgctgattggtagagccgagtggtctgttttgacagggcactgattggtgcgtttacaatccctgagctagacacaaaggttcttcacgtccccaccagattagctggatacagagtgtcracacaaaggttctccaaggccccaccagagtagctagatacagagtgtcgattggtgcattcacaaaccctgagctagacatagggtgctgattggtgtatttacaaaccttgagctagatacagagtgccgattggtgtatttacaatccctgagctagacatataggttctccaaggccccaccagagtagccagatacagagtgtcgattggtgcattcacaaaccctgagctagacccagggtgctgattggtgtgtttacaaaccttgagctagatacagagtgccgattggtgtatttacaatccctgggctagacataaaggttctccacatccccaccagactcaggagcccagctggcttcacccag

SEQ ID NO: 761526 - DNA, 580 bp, Homo sapiens
tccctactgaccctctggtctgagctgccatcatctcagtagattggggtgagcactgctctaatagacttccctgcttgtactccagttccctgttgtccatgctcagcacagcggccagggtgcttaaccattaggtcagattttgctgctctttgctcattcttgcaatggcttcccactctactaaaaataatagccgaagtrtttaaactacatgactgatccctatttgctcgccgacttcaccagctatgggtcctttgctaactcggcttcagatacttttattttattttattttccaacactcctgcttaggccgttggtcctggttcatctgtctgcccaggctagtctttctgcggatatttaaatgcctcattgtttaactccttcaagttttgctcaaatcacgcccactcaatgaacccaacttcagctaccttattaacaatgtcaagcaaccatcaccacccaacatggcattcaacattcccttcatctattctgattttttatctgtttttcccatggccccttattgtattctaatttacaacataatttacttatttgt

SEQ ID NO: 761527 - DNA, 639 bp, Homo sapiens
gtgatataaccccctcttgcctcagtacctagacttcctcatttgggaaaccaatatagtccattatagtacagccctcataatatcattgttactagaaaggagttaacacatgtaaagtattaggatgacatctggaacagagyatgtgctaaactaatgtaagctattattcttacaattaatattttgtcagtttttcatattatggacctgagacttagagaagccaattaacttggccaaggtcacatagatagtaaagaggcatttaggcctttgaccccaaaactgtgcttttaaccaccatgcaacaagaaacacaaaaagaaaagtcttttggggggaaatatgatgagttgaaatatggatttttatatcttcaccccaggatattttccaactaaatttagacttcctagagaatatcaaatttctagctatatgtttaattttctctccaagctggcataaagcagacttgatctttggaagacagcagaattcatgtgattattttcatggcctttgccaaaagtcagtcatttaagcatcttcacggcacgagaccaactgctttataaatcagctgctctgtgaaaaagtttaaaatctgatagatttgctgacaagcatatt

SEQ ID NO: 761528 - DNA, 620 bp, Homo sapiens
ctttacaaaaaggaaaaattagtatggcatggtggtgcacacctgtggtcctagctacttgggaagctgatgttggaagattgcttgagcccggaggttgaaactgcaatgagcgttgattgatcatgccactacactcgatcctgggcagcagactagacactatctgaaaacaaaacaaaacagcaacaaaaacaactcagtgagtcactgttcattttaaaagctagggactgaggaccaaagatgttctcacatgtacaagttgacatagtgagcagcagagcaggaatttgaatctagactcctctctttcagtggcttttctacactggatttggacaagtagggacaaaaggaaaagccagtctagttggaggaaagagtgttatcaaaggcaaggaagagagaacatctaaataccgtatcaggagtatgttagttggtgagccaaagggataaacargaagtttaaaagtcaattggaatcagatcattaaagggcttaaatgacaggctgagatgttagagtgagtctatagaacacagaaggcactggaggcctttggagaagaagttggtatggcttaatctgggctttatgttgtaaaatgagtcac

SEQ ID NO: 761529 - DNA, 557 bp, Homo sapiens
acataaatgtcttcaattttcttgggtataaacttaggagtggaattactatgttatatggtgactctgtttaactttttatttgacctgctgctgagttaggtcacatttattctttaattgtttgagtatttccatgtcagtattgaacattacatttatttcactgttaaagatatccccagcctggcgcagcgactcatgcctgtactcccakcacttttggaggcctaggtgggtggattgcttgagcccagaagttcaagatcagcctggacaacatggtgaaaccccatctctaaaaaataaaaataaaaaaataccagaaatttgtcagggcacggtgctatgctcctgtagtcccagctaatcaagaggctgaggtgggaggatcacctgaatctggaaggtagaggctgcagtgagctgtgattgcatcatgtactccagcctgggtgacagagcaagaccctgtctcacaaaaaacacaaaaagaaaaaagaaatcccctgatcatatgaccctctatcctactattttcttttagtgcttagttg

SEQ ID NO: 761530 - DNA, 590 bp, Homo sapiens
taacagactcacctaaagtcgtgcaactatttggtggaagatgatggcttttgatgccagcatttagagttatagaattttagtgctagaagggatttaatcaaatatcattttacagttgaggaaactgaggccaaaagggattgaatatattgtcctccaaaaattacagaaagtagtgtaagaactggcagtcaccccaattctcctgaattttagccatacacttttcccgcaagaccaaaatgggagcycccaggaactattgcgtatacataagctgctttgtaatgatactgtagatgtccatgacaaacttttcccctcttcctatttatctgcttataagcaatagcatggaaatattttttgcaccaaagaattcagtggagtgctcttatcagactaggtgaggagggtccctgcactccccctctaccctcaacacacacacacacaataatcctgatcacccggcaggtacaggaagatgttcctgaaacacttgccttgaaagaaattgggaagaaaattagtgttcttcttcaccacctctctgttcccttttcttttaccttgtccacctaaag

SEQ ID NO: 761531 - DNA, 590 bp, Homo sapiens
acacaaaaaaatttaatcagtcataagatacattagttttactctcttctagtatccttgcattggccttcaaaactgtacccatttctcgaataactcccagtaagtccttcctttgtaaatggtcctatataaggtaaayaaagtctgactatgtagttggagttactgcctgagttttacatatatcctagacttggtctcagtcacagattaatgagcattcactaagagttgatgtagaccatgatctctaagagcacaataattctaactgtcttttcttggtcagctctgcctagccatcactagcacaatgcccagcacaaagtcaccactcagtagatatttgtcaaatcaataaataatgacagaatccaaaatcgtaataatttatcccagtgctcagcactgactatatgtttaataaatatttattgaatttcattgaatattgtgcttaaagagagaatcatgccatgcattccaaattaagtaggcattacatttgaattatcagctgtttgggattatctgtgtggctcctccccactgttagggtggtaaattgagatcttactccatcagca

SEQ ID NO: 761532 - DNA, 612 bp, Homo sapiens
tgtaatgtattcaagttgttattaaaaagttactgaatgttatctgaagatgtgaaatgtgtagtcaagtaaaaagttggcgtatactttcttgggctgcatatccaatttaattaaaaaattaaatctcagtttccttctaaattttgatagaactatattaaaagcttgtatacacagcattctaggaaatttctcttaactatcttttttttgttttttttgttttttttttttttttttgagaaagagtcttgctctcttgcccagtgcagtggtgccatcttggctcactgcaacctccacctccgggttcaagcaattctcctgcttcagcctcctgagtagctaggattacaggcatgcctacctaatatttacatttttagtaraaaccaggtttcaccatgttggccaggctgggcctcagcctcccaaagtgccaggattacaggtatgagccaccatagccggcctcttgtatcctttttgtccaatttcaaataatgtgtgaatcttgcctaactgctgttgcccacgttgaagctaaagagtaaaaacctattcatgaacaaagaaggcaggtgagacccggtaacaaactgtctctct

SEQ ID NO: 761533 - DNA, 505 bp, Homo sapiens
tgttgtcttaactgtctgcaagatggtaagggttgatttttctttctgtatgttagtggtgtgctaaatgctttacatgcattatgtcatttaatttttatcatatccttatgaggtaggaactgttattatcttcattttacagatggagtaactggggccaagggagattaccaacttgcccaagatgtcaacattastaagagaaagagccaaatttcaaactcaggtagtttgactctacaatctgctatctcaaccagatttccagcccagctcttctcagtcttgacacactgtttttctcatcaaagaatgattaaccatattattttggaattgcctaggtaaaacttccacatggcctggacaagacctcggaggtgataaaaatcttgtatgaccctgggattctcagatttgaaatcagaaggctcgctatttcagaataaacacaaagctaatatagatatagttgaaaatttacagcccaaacttagactta

SEQ ID NO: 761534 - DNA, 539 bp, Homo sapiens
caatttctattcatccatttaatcagtggttggagttcacataacagaaattacactcagaagaaaacataggagaacatccctgagcaagtcaaagtcactgattttttaggttatttaggcctgatatgtaatattttccccactggcccttctagatagagatttaaataagactgcactattgataggtcatctttttgtaaattaaaaactaataaataagttttataaatttgccatctcatataataaaattagtttaggaatttgctggaggtattgttaaatttcaaatagctatctcatgtataattatttcatttaaattatttaaaacatttctaacctttcataccaarcaacctttcttttatttgtgacacagaaaatagagtgctcaaaataagtatagctgatagaaccaagaagaatttgaaatgattttcattctaaagtgcccttttttttttttttagaattttggaagttgtgtctttctttattgaggagattcttggtataagttcaattagtga

SEQ ID NO: 761535 - DNA, 513 bp, Homo sapiens
gggaagcttggtttaagaacacggacaaagcccaggtgtggcgactcatacctgtaatcccagcactttgggaacccagcatgggtgaattgcttgagcccaggagtttgacaccagcctaggcaacacggtgaaaccccgtctttacaaaaaaaaaatacaaaaattagctgagcatggtggcacatgcctgtgatcccagctacttgggaggctgatgtagaaggatcgaggctgcagtaagccatggccattgcactccagtctgggcaatagagtccctgtctcaaaaacaaataccttccccctgcaaaaaaaaaaaaaaaaaaaaaaaaarggaaaagaaaagaaaagaaaaggacaaatacaggatgaggtacagggccttggaagagacccacgtaagtgcgcagtcctggtgattaagtttcattagcatcactgcaaagccccctgggtctttgaccaatgctaaaaggcagcggcgtaaaacctgtggtgcaattagcaaaa

SEQ ID NO: 761536 - DNA, 624 bp, Homo sapiens
cttttcagaggatgtctcaaacaaaagtcaccaatttacttagggtcaatatagcagaaaaaaataaagagtttgtcccttaatatagtctcggcagaattactgtcaaatctaacaattcataatgatagtagtgttgtttaggtttctattgctttcttttcatcattttcgtaggatcatgcttcctcgatttttctcagactgtgttgctagtggttcactgatttcaacccagctgcaattcttcggatatctgtcaggaccctttccagggtctgagcaggtcttatttgcagagtgctcactcggaccaatgaagcagaggcagccagctgggcgcatcagcagttggcatgccttccccactcggtttctaaccatatgcctcgttccacgttttggcacgggctccgcgcgtgtgtgtaggagcagcctaatggacagctgcagcctactcraaggaggtaacccttctgagataatcagatctgcttcctccacggctctgtgaattttaccttgcccctccacagggcgagagtctgtgatgattgccatggtgatcaatttgtcccctgggaaccagctagagaccatcacactgattctatgtaggccatt

SEQ ID NO: 761537 - DNA, 541 bp, Homo sapiens
ccagaacactgagctgtttctcttccacctatcactagatgctgttacatccgctagttttccctgcagcccccctcaagagatgagagtaaagctgaccattccctttacagggagcaagttaaactcagcggcccctttccttgatgccatcttgataatctatgtcttaatttatgttatcaagatgtattcatttgaacagctactaarcaacatgttttagaccatttctgataaagttttcctcttctatattcctataactgatgatctttgtcagcctaacaaaactagcaaagtattatgcactaaatgtgtaacaaagtaatgtgctaggtaaaaactaagagcgtgtaatcactgcaaatgcacatatacaccaaataaacaggacctaaacagtcacgcttaatggacatttagtagatgcttccagaagatgatggtgatgattcatgagatttggttaagcaaatcacagctgctcaaaatatgattgaaaattccttaattttagctgatggcctcaaaactattt

SEQ ID NO: 761538 - DNA, 551 bp, Homo sapiens
ttacctggccctcttccctgtgtatctctgtgtatcttctagtcttcctcttcctcctcctcctcctcttcttccttcttcctcctcctcctcctcttcttcctcctcttcttccgttgttgtcatcttgctctgtggcccaggctkgagtgtgcagtggcgggatcatagctcactgtagccttgaactcctgggctcaagtgatcttcccacctcagcctcccaagcagctgggaccacaggtgtgcaccgccacacccagctagtttaatttttttgtacaaatggggtctcactgcattgcccaggctggtcttgaagtcctaggcttaagtgatcctgttgcctcagcctcccaaagtgctggagttacagttgtgagccacaggccaaatctctccctccttctaaggacactagtcattagattcagagctcaccctaatccaagatgaccccgttttagcttcattacacctacaaagaatttatttttaaataccatcattttctgactttcctagtggacattaattttggagggacacta

SEQ ID NO: 761539 - DNA, 603 bp, Homo sapiens
cctcaaaatcctcagctcaagtgttcctcccacctcagcctcccaaagttctgggattacaggtgtgaactaccacacctggcctaaacattttctttatctgttcatctcctgctggttaggttgtttgcatatcttggcttttgaaaataatactgaaatgattatgggagtgcatgtatctctctgagatactgatgtaattttctttggatataagctcagtggtgggttggctggatcatatggtaatgtacargggttccctttcctccacaccttgttatctatcaactttttgatcatagccgttcaaacaggtgtgaggtaattttcattgtggttttgagttgcattgctctgatgcttagtaatattgatcatttttcttgtacttgttggccatttgtatgtcttcttttgagatatgtctggtcagttctttggcccgtttattttcttgttactgagtttttgagttccttatttaatttggatattagctccttattagatgtatcacttgcaaatattttctctcattcagttagttgtctcttcactttgttgattgtttcctttgctgtgtagaagcttttcagt

SEQ ID NO: 761540 - DNA, 603 bp, Homo sapiens
cctcaaaatcctcagctcaagtgttcctcccacctcagcctcccaaagttctgggattacaggtgtgaactaccacacctggcctaaacattttctttatctgttcatctcctgctggttaggttgtttgcatatcttggcttttgaaaataatactgaaatgattatgggagtgcatgtatctctctgagatactgatgtaattttctttggatataagctcagtggtgggttggctggatcatatggtaatgtacaggggttccctttcctccacaccttgttatctatcaactttttgatcatagccgttcaaacaggtgtgaggtaattttcattgtggttttgagttgcattgctctgatgcttagtaatrttgatcatttttcttgtacttgttggccatttgtatgtcttcttttgagatatgtctggtcagttctttggcccgtttattttcttgttactgagtttttgagttccttatttaatttggatattagctccttattagatgtatcacttgcaaatattttctctcattcagttagttgtctcttcactttgttgattgtttcctttgctgtgtagaagcttttcagt

SEQ ID NO: 761541 - DNA, 678 bp, Homo sapiens
ttgtttatggtgtgagatataggtctaatttcattcttctgcacgtggatatccagctgtcccaacaccatttattgaagagacttttctttcactattatgtattcttggcacccttgtcaaaaattagttgaccatatatgcgtgggtttatttctgtgctttttattctcttccattggactatatgtctgttttcacatcagtatgatattgttttgattactaaagcttcgtaatatacttggaaatcagggaacgtgatgcctccagttttgttcttctcaaaattgctttggctatttggtgtcttttgtggttccaaattttagaattgttttctgtatctatgaaaaatgcaattggaattttcatagggattgcattaaatccgtagattgctttaggtagtatggacatccaatttcacatcttaagagactagaacagcaagagcaaactaagctcaaagttggcagaaggaaggaaataatgaagatcagagcagaaataaatgaaatagagattagaaagataatakaaaagattaattaagagttttttgaaaaaatcaacaaaattgacaaacctttatttagactaaccaggaaaaaaagatgaatcaaatgaattatgaatgaaagaggagacattacaactgataccacagaaaaacag

SEQ ID NO: 761542 - DNA, 544 bp, Homo sapiens
aataatgacaacaaattggataaccaagaagaaacaggcccaggagtggtggctgatgcctctaatcccagcactttagagacctgaggtgggaggcttacttgaggccaagagtttgagaccagcctggacaacatagcaagacactgtctctacaaaaataataataaaaaggttagccagccatggtggtatgtgtctgttgcytgagaggctgagggaggaggatcatttgagcccaggagttcgaggctgcagtgagctatgatagtgccattgcactccaacctgggtaacagagtgagaccctgactcagaaaaaaagaaaaaaacctaagaaggaagggacaaatttctagaaatccgcaaaaccaaatcacaaagaaacaaagtctaaacaaaccaataatgaataaggagattgaatcaatagtcagaaaacttcccaacgaagaaaagtgcaggaccagataacttcataaataaaatcttacaaacatctaaagaattaataccccttatctcagactctttcacaaactct

SEQ ID NO: 761543 - DNA, 640 bp, Homo sapiens
ttcaaaatccagagcccaaacactttgggaaaaacattttccatgctttttaataatttttagctcttccgatttgggaaaataatgtcatattccgtaaaagggctgtgctgtgatctcagaattatctattgtcagaaatatattaaataaagattccaagaaaatggccaggcatggtggctcatgactgtaatcccagcactttgggaggctgaggcaggcggatcactttaggtcaggagtttgagaccagcctggccaacatggcgaaaccccgtctctactaaaaatacaaaaattagccgagtgtggtggcagacacctgtaatcctagctactcggaaggccgaggcaggagaatcacttgaaccagggaggcagaggttgcagtgagccgagatcaaaccaccgtactccagcctgggkgacagagcaaaactccatctcaaaacaaaaaacttccaggaaaatgtttagctcttttttttttttagtgacttttaacctctattaactacacatttttgttgttcttttctagtgctaattccacttctatttataattctttgcttctgctttaatttttgttttcttactttattgtatgattcctttgtgcgagtctcctcaaacc

SEQ ID NO: 761544 - DNA, 607 bp, Homo sapiens
catgagagaaggtcaaaatatcaacattagcaggggtttggaagaaattgattccaacccttgtggatgactctgcagggttcaagatttcagtaacttcaggaggaagttactgcaatgtggtagaaatagcaaaagaattrtaactgaaagtgagcctgaagatgtgattgaaatgctgcaatatcatgataaaattttaatgaatgagaagttgcttcttacgaatgagcaaagaaagttgtttcttgagacagaagttattctttgtgaagatgtagtgaaagctgttgaaatgacaacaaaggctttagaatattacataaacttagttagtaaagcagtggtaggattcgagaggattgactttgtattagtctgttcttgctctgctataaagagatacctgaggctgggtactttatagaggaaagagtttcattggctcatggtcccacaggctgtacaggaggcatagtggcttctgcttctgaggaggccttaggaagtttccaatcatggcgaaaggcaaagatgagcaagtcatctgtcatgactggaacaggaggaaagttgggagagatgccacacacttttaaacaatcag

SEQ ID NO: 761545 - DNA, 605 bp, Homo sapiens
acatctttttcattatttatttttagcccaccttaataatagaatgttgctattgttgatgaaaaaagccaaactcagaaaatatttgaaaaggtttatgctgagccaaatttgaggatcatggcccttgacacagactcaggaggycctgagaacatgtgcccaaggtggttgggctacagtttggttttataaattttagagagacagaaattacaggcaaagacataaatccatgcgtataaaatatacattggtttggtcaggaaaggtgggacatcttgagtagtggggctcccagccaggtcatgagtgaattattttctgattgacaattggttgaaagagttaagctatgcctgaagaattgaagtcagtataaatacttgagttaagataaggcaagttctggaagccaagattcttgttatttagatgaagcctccaggtaacaggctttggatcaaatagatgattaatatctcttatcaggcctaaaaatgtgtcagactctctggaaaaggaagttccggatagaatattaaattgataaggaatgaagattctctacagagtgtaaacttcttcctcaagggacagctttg

SEQ ID NO: 761546 - DNA, 534 bp, Homo sapiens
gaatgcattatttaattatacttaccttgtctcaaaaataattgaataattttaagatcttacaactaataagcaaatttggaacatgtatctgtctgatgtcaagcttttgccctgtcaacaaaattatcccatgattccttaggcagatgaatgtattaataactaggcaaattgtttttatgaattctttttttctctacctaaaatagtttaaggttattggattgaattaagattaggatactaaagctgawtttatctatcctccaagagtaatttaaatttatataggtcattaaaaagttgttttcacatctaagaaaagtcatcacaattctaagatgactcaagtacttcttaaaaaactcttgacttcataaggaaacatgtctcctcagcattataattccttcagtggtcatttttgtagcttgtacactggagactgtttcattaatactttggtgagaatttttcttttttttttttttttttttttttttgctaaacaaaggacaaagtcttgctctg

SEQ ID NO: 761547 - DNA, 644 bp, Homo sapiens
tcagggcaatatgagttatcttgtgatggaaatgttctccagcttgactgtatcaatgctaatatgttggctgcaatattgtattacagtttaaaaagatgttatcagtgaagtaaactgttctgcagtatatgggactctataattgcatatgaatttacaattatttgtaattttttaaaaagtttaaacagaaaaaaatatgmacataccagatactcagtaaagtttagatgtctttcctgaaaaaaaaaaaaagttgggttgaacagcccctgtttccatttactatgatgaagaaaaaaatgcggatattgttacttgaaaaacatattatgttagagaaagatccctggaatctagaatttagaagaccagagttatctctgttgctctgttactaatgaacagtgatccaataaatgagccacttaattctttaacttcacttctcttatgtgaaatgcatgtgaatttgttcagatgattataaagtttgcttctaatttatgaaatgatgattattgaataaattcaagtagatttcctccaaaagcactcaatatagtcattttacataaatgtctcttgctgtttaaaattacatattcttattttccaaaacatgaggtatatgctttcct

SEQ ID NO: 761548 - DNA, 516 bp, Homo sapiens
aagaatcccaatggaattggtctgaagtttttaggagggaaaaggcttatttgtaatcaccttggatgtggtactaatttaacagggaagagaagcagggcctgagtggaggtctaaattctccattcaattctgaagagaggctttcagagggactaagagaaacatgcatagatcttactttccttctcatcaaaatgtttgtacagagtattacaaatattctcaccataaataacttcaaggcttttttttagttttattgcagtgtaatgaatgaacactaaactatgtatatgtkgtctaatttaagactttgatatatgtaaatacctatgctatcatcattgtaagttactaattaatatgtgtgtcatcctcacaattttcctcatgtgttttataaactttcttccctaccctcttcggtatcctcatagtagctgaactcttttttcttttctctcactacagattagtttataatttgctagaactgtgtataaatgactgtgt

SEQ ID NO: 761549 - DNA, 516 bp, Homo sapiens
aagaatcccaatggaattggtctgaagtttttaggagggaaaaggcttatttgtaatcaccttggatgtggtactaatttaacagggaagagaagcagggcctgagtggaggtctaaattctccattcaattctgaagagaggctttcagagggactaagagaaacatgcatagatcttactttccttctcatcaaaatgtttgtacagagtattacaaatattctcaccataaataacttcaaggcttttttttagttttattgcagtgtaatgaatgaacactaaactatgtatatgtggtctaatttaagactttgatatatgtaaatacctatgctatcatcattgtaagttactaattaatatgtktgtcatcctcacaattttcctcatgtgttttataaactttcttccctaccctcttcggtatcctcatagtagctgaactcttttttcttttctctcactacagattagtttataatttgctagaactgtgtataaatgactgtgt

SEQ ID NO: 761550 - DNA, 598 bp, Homo sapiens
aagcttcggtgctgatgtagcagctgtagtcagcacggctgcttaagaaatcttggaccactagataacttttctcccctggattcatttcctgattatctctacctcacagtctaatttgaagttttggtaacatgctgtggttatacactttttttctgttccacctgcttagccttcgttaacttcccmtaagagtaagttttatcatattgtttactcccagtgaaaattttccctgacatttccagacaccaggatttatttaagtcatcggattacattgtctcttttagaaaatcttcattttatatattattatttgcatttaggtatcatgaatatatcaaaactattgagcaactgttatgtgacaatcataatagtcactagatagagatgggttgataaaaagtacagatatggtacatgatctctggaatcttactatttggaaagacaattataagtgagcaatgaaaataacatttatgatcaattcataaggtaaataaaggaatgtatgtcaagtagaccaaactgagtataaggcccactcttgaaagtcttctctgtggaaagaatgcttcatttgaag

SEQ ID NO: 761551 - DNA, 559 bp, Homo sapiens
aacaaccgagcagggctatgaggtgcattctgtgaacaacttaccattactcggcattgggcaggacaccccagcccccatgccttccaggggagtgaggacaaatcagtgcagttcaacagttcatggagtccactgctcccaaaacaagtcaagacacctccagagagccagtgaccatagacgctcccaaaatgcaaatggagaattgagcaatctagggctccaggtgctgaagaatgatctgtaccttcgagcctgctgagacctaaagatctggcaaaccatacctgaaggaccatcttrtaagagggtcaaagctccaactggaagaagatctgccagcccagcctcattgttttgacattgaaatgcccttgacccaaatactttttcttcttagaacattgagtcccaggcccaaaatatgtacagaggagatccatattttgtatctttgtattttggccacttcccaaggtcacaacatccactaagaggacaggattgacctgggtcattgggagcacaggatccctaagtctcaggtcctagggac

SEQ ID NO: 761552 - DNA, 615 bp, Homo sapiens
ttccctttgaaaactggtacaagacagggattccctctctcaccactcctattcaacacagtattggaagttctggccagggcaattaggcaagagagagaaataaggagtattcaaatagaaagagaggaagtcagattatctctgtttgcagatgacatgattttataattagaaaaccccttcatctcagccccaaaactccttatctgataagcamcttcagcaaagtctcaggatacaaaatcaatgtgcaaaaattacaagcattcctatacactaataagagacagagaaccaaatcatgagcaaactcttattcacaactgctacacagagaataaaatacctaggaatacaacttacaagggatgtgaaggacctcttcaaggagaactacaaaccactgctcaaggaaatcagagaggacacaaacaaatggaaaaacattccatgctcgtggataggaagaatcaatatcatggaaaatggccatactgcccaaagtaatttatagattcaatactattcccatcaagctaccactgactttcttcatagaattagaaagaactactttaaatttcatatggaaccaaaaaggagcctgtatag

SEQ ID NO: 761553 - DNA, 504 bp, Homo sapiens
cgtgagatattttaacaaaatactagtaacagtttttgtctttttaaaaaacttttatttaagttcaggatatatgtgctgatttgttatacagctaaacttatgtcatgggtgtttgctgtacagattatttcagaacccaggtactcaagcctagtacccattagctgttttcctgatcttctccctcttcccaccctccgccttccaacaggcctctgtgtctgttgttcccctctatgtgttcatgtgttctcatcatttacctcccacttrtaagtgagaacatccagcatttggttttctgttcctatgttagtttgctaagattatattaacgtaaaccttctagtggacagtattgaaatagttaagtaaaagaggaatcttgtagtgaagaattacatttgaattactttcttaaatatagatacatgtctttggaaagagaatttgctgagataatttgccagtggcaattactggagaattaaactgatggat

SEQ ID NO: 761554 - DNA, 646 bp, Homo sapiens
gataagactttggactgtggactttggggttaatgctgaaatgagttaagactttggggaactgttgggaatgcatgattcattttgagatgtgaggacatgagatttggaggggccagggtgggatgatatcgtttggctctatgtccccacccaaatctcatcttgaattgtactcccataattcccacatgttgtgggagggatccaatgggagataatttgaatcatcggggcagtttctaccatactgttctttttatagtgagtaagtctcatgagatctgatgggtttatcaggagtttccgcttttgcttcttcctcattttctcttgctgccaccatgtaagaagtgcctttcaactcctgccatggttctgaggcctccccagtcatgtggaactgtaagtccaattaaaccyctttttcttctcagtcccaggtaagtctttatcagaagtatgaaaattcactaatacattacctcatataaacttaattacttccaaaagtccctatcccctaatactattccaataggggtcagggtttcagcatataaattctggggggacacatttagtccatagcaatatccttaatacatattaatcaattataaatttaaaaagttcaccacttcag

SEQ ID NO: 761555 - DNA, 551 bp, Homo sapiens
tacctcaatctcgcaggctggaatgctgtggtgggatcatagctcactggagccttgaacctttgggttcaagtagctggggggctgaggtaggactacagagatggggttgcgccatgttgctaggctgctcttggcctgaagggtcctcccgcctcgaacgcgccagacatagttttctatttttgaccaacataaacactgtgctgggtctgaatttttcacctacccttcttcagccggcaacacacaggacctggcggggaggtcgctcttaccagtccccactctgacgagaagactgcccagctccaggaaccgtagcgccccagtgacgtakccgaacacccgcgcctctgacgccgccaaaggcccacctctatggtgtcggcgaaagcgcgcccttgtgacgtcacggagggcgcacccttgtgacgtcacggaagcctcacgtcacggaaggcaccactgcactccagcctggcaacagagggagactttgtctctcaaaaaaaaaaaaaaaaaaaaaaaaaggggggggacactttttt

SEQ ID NO: 761556 - DNA, 551 bp, Homo sapiens
tacctcaatctcgcaggctggaatgctgtggtgggatcatagctcactggagccttgaacctttgggttcaagtagctggggggctgaggtaggactacagagatggggttgcgccatgttgctaggctgctcttggcctgaagggtcctcccgcctcgaacgcgccagacatagttttctatttttgaccaacataaacactgtgctgggtctgaatttttcacctacccttcttcagccggcaacacacaggacctggcggggaggtcgctcttaccagtccccactctgacgagaagactgcccagctccaggaaccgtagcgccccagtgacgtatccgaacacccgcgcctctgacgccgccaaaggcccacctctatggtgtcggcgaargcgcgcccttgtgacgtcacggagggcgcacccttgtgacgtcacggaagcctcacgtcacggaaggcaccactgcactccagcctggcaacagagggagactttgtctctcaaaaaaaaaaaaaaaaaaaaaaaaaggggggggacactttttt

SEQ ID NO: 761557 - DNA, 631 bp, Homo sapiens
tgaaagaagccaatctaaaaaggctacatactatacgattccaactatgtaacattctgacaaaggcaaattacggagacagtaaaaagataagtggttgtcaagagttgtgggtagggatgaataagtggagcacagaggatttttagggccgtgaaactattgagtatgatcctataatggtggatagatgtcattatacatttgtccaaactcacagaattactacaaccaagagtgaatcctaatgtaaactgtggactttgagtgattatgaygtgtcaatgtaggttcatcatttgtaacaaatgtaccactctgttgggagatactgataactggaaaggttatgcatgtgtgggggcagcaggtatatggaaaagtctctgtgccttcctctcaattttgctgtggacctgaaactgttcatatttgaagtacagcaagaaaaggaatcaaatgcataagaactttattttacacagcaccatgtcctatttcttgacatgcataacccaaagaatcataaaagttgttgttaactgaggtcctacctggtcgaattgtactatctcttccaaatagatgaaggcgtcttctaccaagacaaaaatgctcaattatatgaaaa

SEQ ID NO: 761558 - DNA, 617 bp, Homo sapiens
tcttggctcactgcaacctccgcctctcaggttcaagtgattctcatgcctcagcttcccaagtggctgggaccacaagcacgtgccaccatgctgtgctaatttttgtatttttagtagagatggggtttcaccatgttggccaggctggtcttgaactcctggcctcaagtgatctgcccgcctctgtctctcaaagtgctgggatgacagacatgagccactgcgcccagcagaattttattttaaartctccaaaatcaagatcaatatctgttcctgttactaaatatttattttgcaccaggtgtcattaacatcactatgacctaaattctacatgccctaatccactaatttatcaaaatctcatgagtatttctcatgctgaattattttttaaatcatttttcgccgaactctcaccagtatgataaactgctacattaagtaaataagataaaaacctcctggatggctactcaggaggctgaagcaggagaactgcttcaactgggaagcagagttttgcagggagccaagatcgcaccactgcactccagcgtgggcgacagagcaaggctctgcctcaaaaaaaaaaaaaaaaaaagataaaa

SEQ ID NO: 761559 - DNA, 617 bp, Homo sapiens
tcttggctcactgcaacctccgcctctcaggttcaagtgattctcatgcctcagcttcccaagtggctgggaccacaagcacgtgccaccatgctgtgctaatttttgtatttttagtagagatggggtttcaccatgttggccaggctggtcttgaactcctggcctcaagtgatctgcccgcctctgtctctcaaagtgctgggatgacagacatgagccactgcgcccagcagaattttattttaaaatctccaaaatcaagatcaatatctgttcctgttactaaatatttattttgcaccaggtgtcattaacatcactatgacctaaattctacatgccctaatccactaatttatcaaaatctcatgagtatttctcatgctgaattattttttaaatcatttttcgccraactctcaccagtatgataaactgctacattaagtaaataagataaaaacctcctggatggctactcaggaggctgaagcaggagaactgcttcaactgggaagcagagttttgcagggagccaagatcgcaccactgcactccagcgtgggcgacagagcaaggctctgcctcaaaaaaaaaaaaaaaaaaagataaaa

SEQ ID NO: 761560 - DNA, 581 bp, Homo sapiens
tcagggccttgtaggccatgctaaggatttggatgttagtgtcagtacaaacaattgagtcataagcagaaagtaaaagcatgattccatcaaatgtttttctctaaacagtaattttataaatacaggttaaatgtgtgtggtcccagctactcaggaggtcccagctactcagtattccttttcaacaaatattaggtgcctactattagccaggtacagcccttagctactttgaatgaagcatatattacaaactggcagaawttcttaaagaatctaaagattgtttatacaccataatctcggtattttataaatttcttgaaattatttttatttacactgctttgcagaattttaactggctttgaaataaacaatgacaatagtcctccatgttactagtttcaaattttcccaatacctactaagacattacttaatccacagatttattgtcaatagtttgtatcaaattgtgataacatatttgaaattaatatttcaaattaaagcaaaatcacaaatttatactttatattatgaatgagattcacaaaaggagcatgataatatat

SEQ ID NO: 761561 - DNA, 506 bp, Homo sapiens
ggatgttagagatttaagtatgatagattcattcttcttattcagtagcctcctctctcagattaacacaaacaaaagaatttgagaaaagtctgtttagaaaagtaggaatatgaataaatgtgaaagcaaaaggattttaaacctccttcatttttcataaaggatataatcttacagataaacctctatttctttaataagtaaaaaagaataatgaggattaaatgtgtccttcaattccagtttaggatttttttytcagcctaaatgattgcttttggggtaacttattcaatgccttcaaagtgtatcatgttacaggatcaacaggttcatatgcctgctgtgcagtaatagaccaatgtacagagagagtagggtttgcaatagagaaagagtttaacgattgcaggatggctgagtgaggaaatgggaggggccctcaaatccatctccttgaggagttctgagctggagtttttacagggatcatgaagtacaag

SEQ ID NO: 761562 - DNA, 581 bp, Homo sapiens
atttattttatgtgaagtttattgggctttctgtatctgagaatttgtgacattcattagttctgcaatattctaagccattgtttctttaaattttacctttaatccattttatcttttcaacaattatgtattttttgagtgcttaacatgtgccaagcacacttctaggtactagggatatgtatctgatcaaaacagtcaaaaaacatctctattctagtggttctagaaaatctgcatacaaaaaaaaagcaaaatccatagcatttaaaagactgttagtrgttattacaaaaaaaattaatgaaacaggaaaagaaggcagagagtgtcagaggcatagttacaatttaaatagtgtgttcagagaaggcctcaatgaaaaagtgatacttgtgcaaatacatggaggaggaaagggagtgagcctcctgtatatttgggaaaaagagatctcaggaacagggattcacaagtataacaatcctgacttgagaacaagtctgatgtgttcacaaatatgtaaggaagcttaacaggcttgtgcaggataatattttcatttctttaatccttct

SEQ ID NO: 761563 - DNA, 666 bp, Homo sapiens
catctcgaacagcaagcttatgggatcctaagcccgtgttctatcctaaggcaccccactccatgatagagtgacacagaaagacaaattcatagcacagagtacactagattcactacagcttaagactagactctcaaatcgtttttctcattaattaaaactttgcaagagatactgattttttaccattcccacaaccagtttgcaaagacayagaatgagaaagagagacagaagcattgcttgcagcaggatggggaaggtgaggatttcagggaggcaagagaaagacccacccattacagcaatactgaatcaaagttcaggtggccatttgtcagttgcaaatagctcttttccagcagtcccattacctctcaggtttccccttttgaggagaaaaagctccccatattcgatgattctttacgtgcctaatcctttcactcatagccatcagcaataagtgtaagacagattaatgcaaagagaatagcagttaaaatcccataagacaagtcaatttttaaccaagagagactttactgagaggaggacctctaaacctatcccatcctttactcaggaaaaatgtatccattactgacccaaagtcagtcaattggtgctgcagtctatttcctttggatctggatagtaact

SEQ ID NO: 761564 - DNA, 666 bp, Homo sapiens
catctcgaacagcaagcttatgggatcctaagcccgtgttctatcctaaggcaccccactccatgatagagtgacacagaaagacaaattcatagcacagagtacactagattcactacagcttaagactagactctcaaatcgtttttctcattaattaaaactttgcaagagatactgattttttaccattcccacaaccagtttgcaaagacatagaatgagaaagagagacagaagcattgcttgcagcaggatggggaaggtgaggatttcagggaggcaagagaaagacccacccattacagcaatactgaatcaaagttcaggtggccatttgtcagttgcaaatagctcttttccagcagtcccattacctctcaggtttccccttttgaggagaaaaagctccccatattcgatgattctttacgtgcctaatcctytcactcatagccatcagcaataagtgtaagacagattaatgcaaagagaatagcagttaaaatcccataagacaagtcaatttttaaccaagagagactttactgagaggaggacctctaaacctatcccatcctttactcaggaaaaatgtatccattactgacccaaagtcagtcaattggtgctgcagtctatttcctttggatctggatagtaact

SEQ ID NO: 761565 - DNA, 657 bp, Homo sapiens
ttactcaggaaaaatgtatccattactgacccaaagtcagtcaattggtgctgcagtctatttcctttggatctggatagtaactaagctaaaaagttaacaggtttaatttttttttttatcaattagttgcttaagtttttatttgcctattataaagtcttcaaataaaaacactgaaatctttttagaagtttctgcttatcaatagacatcccgagatgagactaatttggaaaccgtcattttcaaatgcacttcagtgcagttttgttcatttggaacattccactgtaagttatctttagtaatatttcaccacttctgcaagactttgctacatctgaggcctaacacttaggcatgtataagccggaaggaactcagttcttcagaaattaagatcccatttttacctaagttattggcyttactcgcaggttcccttgattaactttttcctacctaagtgtacaagaaaaatgaaacacaagggtagaacacaaaaatccctgcaaatttctaaaagccaaattttacaccccctgcaatattgccatttactaccagtttctttctgacccaaatgtaagaggcctctaactggatccaaccagttaattaccatatcaaatctgatcccagacccagtccagt

SEQ ID NO: 761566 - DNA, 445 bp, Homo sapiens
caggatgctgtttttcttactctacaggtataactgagagatacctaaggttcagtttctgaccgcttcgataaaggtaatattgcaataaagtgagtaacattttttgtggtttcctagttcatataaaagttatgttcactgtgatatattaagtgtgcaacagtactgtgcctaaaatawaccatgtatataacttaattaaaaatactttattgctacaaaggtccaagagtcatccgagtcttcagcaagactgatctttttgctgatatagcattttgcctcagtgttgatggctactgactgatcatggtgatagtttctgaacgttgagatagctgtggcaattttctaacatacgacaataggatggggttaaaaagctgaccaagaaagccaaatagaaccctccagtgatcattctcccacaggaacaccaaac

SEQ ID NO: 761567 - DNA, 627 bp, Homo sapiens
gaatccagaatctggctttttgaaaagatcaacaaaattgatagacttctagcaagactaatagagaagaaaagagagaagaatcaaatatatgcaataaaaatgataaaggggatatcaccacctatcccacataaatacaaactaccatcagagaatactataaacacctctatgcaaataaactagaaaatctaggagaaattgataaattccttgacacatacaccctcccaagactaaaccaggaagatgttgaatctctgaatagaccaatgacagactctgaaattgaagcaataattaatgtcttaccaaccaaaaaaaagtccaggaccagatggattcatagccraattctaccagaggtacaaggaggagttggtaccattccttctgaaactattccaatcaatagaaaaagagggaatcttccctaactcattttatgaggccagcaccatcctgataccaaagcctggcagagacacagcaaaaaaagagaattttagaccaatatgcctgaagaacatcggtgcaaaaatcctcaataaaatcctggcaaaccgaatccagtagcacatcaaaaagtttatccaccatgatcaagtgggcttcatccctggg

SEQ ID NO: 761568 - DNA, 609 bp, Homo sapiens
ccatatcctacaagaaaaagatctatctttagttttcaacctatcctaattttaggggataaaaagtagtatgatcttatactgtcaaactgatttgatacactatcttcctttctttgcttgacactgtaatggaaattttttaaaaaaatttgaatggagatttatgttgagcacaggtcatgtccaattatttaattagagtaatgggaatattttctagtgaactcatagcatttgctctagaggttttgtcttgtataaagggtttctaaaaatctaaagtgattgaagtttgatgaatggctagataggcatgtcatataaaaactaaataaagaaactmtaaaaataaaaataaaaaaataaaaaaataaagatgtgtgtcgctatttgccagcataatggtgcaacaagaaacaggaaatatctagccatttcaaagtcttatagatacaggaatgagttaacactaataccaggaacatgaaatgctttcatcggtttctggttagacctggtgctgctggaggaactgaggtaaatggagtgttgtcccaagttcatcatatagaaatcaattgttagtttttcttatttgatttttaa

SEQ ID NO: 761569 - DNA, 609 bp, Homo sapiens
ccatatcctacaagaaaaagatctatctttagttttcaacctatcctaattttaggggataaaaagtagtatgatcttatactgtcaaactgatttgatacactatcttcctttctttgcttgacactgtaatggaaattttttaaaaaaatttgaatggagatttatgttgagcacaggtcatgtccaattatttaattagagtaatgggaatattttctagtgaactcatagcatttgctctagaggttttgtcttgtataaagggtttctaaaaatctaaagtgattgaagtttgatgaatggctagataggcatgtcatataaaaactaaataaagaaactcwaaaaataaaaataaaaaaataaaaaaataaagatgtgtgtcgctatttgccagcataatggtgcaacaagaaacaggaaatatctagccatttcaaagtcttatagatacaggaatgagttaacactaataccaggaacatgaaatgctttcatcggtttctggttagacctggtgctgctggaggaactgaggtaaatggagtgttgtcccaagttcatcatatagaaatcaattgttagtttttcttatttgatttttaa

SEQ ID NO: 761570 - DNA, 612 bp, Homo sapiens
acttttctctccatcattagaaaaaagtaaatgcaaattttagttttgaaagttcaatataaggataaataatctcctttcacttaaatattatacaataaaacaaggaaaaactaagaacaaaagcacccaataattccttttcaactatttgaagagcatcatcatgcatttctaaaattggtttctagatacagtactgacaactgattaggtcactttcatcacyaaaatcttcaaaccagtgtcacacttgaatatttttgttttcaagtacacacataaaggtccatccaagataaatggctcaggatcaaaggtcaccagaaagtctcacagttttagcactacataatgctaatgaatgtcatttaattttaataatagtaagcacaactaaagtagtttgagaaaattcccaatcaatacaacttccttaaatataaggccaataattctttaacattataattttgtacccacgtcacagtttttcgtcattacccaatgggaaagatctgaaaccaactcaaatcattgactaagttgaattaccttggaggtagacactacttaaacatttttattctcccctgcttttttaaataacaa

SEQ ID NO: 761571 - DNA, 557 bp, Homo sapiens
gcatgcaaggttataatttttcttctgagcactgctttgactgcattccacagtcctaatgagacatatttttattatccttttgtttaaaatgttttctaatatcttctacaatttttctaatatttaactcaagggctattttgaagtatattgcttaatttccaagcaattgagatactttaaaagatatttttgttattgatttctaggctgaagcttgctttgctgatttgcttgmtttgctaaggcttgctttatagcccagaatatactcagttttgctgaatgttccgtgtgacctcataaagaatgtttatattgccattgttggattagattacctatatgtgtcactgaggccaagttggaaattatgctgttcagctcttctataatcttattggatttttttgtttgttccatcagctattaaaataaatatgttaaaatctcccaccatgattatgtattagtctatttctctttttaattctttcagatttttgcttatgtatttaaaggctatttttagtggttatatacagattgatctt

SEQ ID NO: 761572 - DNA, 625 bp, Homo sapiens
ttaattagaagtacttaccatgtgatagctcttgtgctagatcttgggatacagagatgaaagaacatttttctcaagaagcttatagtctaatgcagtggttctcaaagtatggtttgtaggcctctggtggtctctaagatcctttcaggtcaaagcttttataataatactaagacttctttggggggctttatttattgtgcagacatttatactaatggcacaaaagcaatggtgatgtgttagaactgctggtgacttaaaccatatcaagaaactgataccaaaccctattgtattcttttttttttttttttttttttttgagacggagacttgctctgtcacccaggctggagtgcagtggcacgatctcagctcactgcaagcgccgcctccggkttcatgccagtctcctgccttagcctcctgagtagctgggactacaagcgcccgccaccatgcccaactaattttttgtatatttagtagagacggggtttcaccgtgttagccaggatggtctcaatctcctgacattgtgatccaccctccttggcctcccaaagtgctgggattacaggcgtgagccaccacgcccagccagctctattgtattatt

SEQ ID NO: 761573 - DNA, 637 bp, Homo sapiens
aaaatatttttggctgataaatagtaaaaggagcaaactcttcataatagtaaaaagaaaggatttaaaatagcaacaagattcccttttccacctgttgtctggaaaaaatctttaaaaaatggactacctctagtgttggcaaacaggttgagaaacaggcactttttcttttcttttttttgaggygaagtttcactctggttgcccaggctggagtgcagtggcacaatctcggctcacttcaacctctgcctcctgggttcaagcgattctcctgcctcagcctcccaagtagctggaattacaggcgtctgccaccatgcccggccgatttttttgtatttttagtagagatgggatttcaccacgttggccaagctggtctcgaactcctgacctcaggtgatccactggcctcggcctcccaaattgatgggattaaaggcatgagccaccgcacccggtcaaaacaggcacttttctacactttcagtagtataaactgatatagcctttttgagcattatttgactatcaatcaaaaaatatgtgtatttgtaacctatgacccagaaatgccacttttggaaactgaaccttcagaaatactaatgccagtgtgtaaagatatgtg

SEQ ID NO: 761574 - DNA, 527 bp, Homo sapiens
aaattttattttattgtgatcatttaattagaagtattttttaataagctttttcttacctgttttctccaccatttggggtgggaggcagcaggtaacagaaggcttgttagaggaaatgatacttaatctgacatcagaaaggtgaatgagatttatctaaataaggtgggtgtaaagatawtgaatgtggaaggtaggttgtatcattataattaatgtttgctcattaacaatgtacccaaataagaggtaccaaataagtctgggatctaagagaattatttatagttaaggagagaattaaaataagccaataaatagagttaatttgggagctatttcatgtaatgtattgagtatgcttttattcttgaaaatctatttctataaatgtagtaaactgaactttatacatttcacatagctcgatatttattcttcagaagaattttttctgttcagtcactgcttgggccattgcattaaaattttttaaaatacttgcaacattacttagagtagaa

SEQ ID NO: 761575 - DNA, 544 bp, Homo sapiens
gacatgatgggaacataataacagtggtatggaagggcactgggctggctgagctgggacatagacctcccaccaccccaggaagactcatccgtctctttgcatcctctgatattcctgggggcttttgtctgttaatttccaggggaaaagggggtttggatggggcagtgcagcaggatagcagagagatggagggccacaktgggccttggactagatttgaggtctgaagttgatgggactgttttcacaggcggctttctagggtctaacacagtggggctcctttggtgctcagtccccactgctgcacactggtacgggaggatgagccactacaggatagtgtcctttcgtgcgaatacatgaaagatacagagacagtgtcctttccatggtccatggcattctcacgatgagattccagtggttcaaggtagaacttttccgcagtgggatccagggcaggggataaagtcaggggtggcatgaggtagcaatagctaagagggtgacttgcaggtgtacatgaggcctgcct

SEQ ID NO: 761576 - DNA, 544 bp, Homo sapiens
gacatgatgggaacataataacagtggtatggaagggcactgggctggctgagctgggacatagacctcccaccaccccaggaagactcatccgtctctttgcatcctctgatattcctgggggcttttgtctgttaatttccaggggaaaagggggtttggatggggcagtgcagcaggatagcagagagatggagggccacattgggccttggactagatttgaggkctgaagttgatgggactgttttcacaggcggctttctagggtctaacacagtggggctcctttggtgctcagtccccactgctgcacactggtacgggaggatgagccactacaggatagtgtcctttcgtgcgaatacatgaaagatacagagacagtgtcctttccatggtccatggcattctcacgatgagattccagtggttcaaggtagaacttttccgcagtgggatccagggcaggggataaagtcaggggtggcatgaggtagcaatagctaagagggtgacttgcaggtgtacatgaggcctgcct

SEQ ID NO: 761577 - DNA, 575 bp, Homo sapiens
tgtgaggttaatattatgatctgcactttgtggaggaggaactggaaacgcagagggatgaaggtcaatggtggaccctaactgagatcagggcagtgaagatggcccaataaagtggcacactggagctccatatgctcactgcgtagcagtgcctcttggctttcttctctgagtggtcctggagagcctaagaaagagtgagaaaattctaagctaattctatattggctttgtgttgactcccamgttaagagaacctccaaatacctcccccagggcctgccatacattatgaaattttattcagagattcatgtacttgaatcttaaagactcataagcctcctcctcaattgtactgaagaccagaccggagtgggaaccagtttttggcctccattcccaaccgactctggagactgttacagtgagactttgtgctattggagttggcatcaagcctacttgtgtctgagtgctgattctgctattataatctctttgagactcattttccttatgtgcaagtaggaattataatacctactttctagcagtttggtgaggaatac

SEQ ID NO: 761578 - DNA, 656 bp, Homo sapiens
gctaatattttagataaaaatggggtccttaatttctaaaaatctcatttctttctggcgtatacattaggcccaggaggcagcaaagtcttacagaaagggtaaaatcttgctaaagataacttacagtggaacattccaaatgaacaacaatgcactgaagtgcatttaaaaaaaaaaaaaaagaaagaaaaaaagattttcttttgtgttgcgtttggcctccaaggttatatagtgtggcaagcagggttaggtcactagggccactcagggaagggaacccagatacctgatatgccaacaaaagggtaaaagttcttatcagtcacacttctagcctctctctgtgcaaatcggttggatgaatggtaaaaatcatggtttatatcctctgttaagttttrattaatgggaaaaaggattcatgaggctaatgttgagctgtagtgaatctggtgtgctttgtgtgtctttctgtattgttctatcatacagaggggtaccttaggatagaatgtgagcctaggtccccataagcccgctgttcaagatggcccagcaaactggtcagtcatgtccttgggagcatgacattgtaaccacgtggcagtactttctcttggtctgtgctcttaccacagcagcccaggttc

SEQ ID NO: 761579 - DNA, 656 bp, Homo sapiens
gctaatattttagataaaaatggggtccttaatttctaaaaatctcatttctttctggcgtatacattaggcccaggaggcagcaaagtcttacagaaagggtaaaatcttgctaaagataacttacagtggaacattccaaatgaacaacaatgcactgaagtgcatttaaaaaaaaaaaaaaagaaagaaaaaaagattttcttttgtgttgcgtttggcctccaaggttatatagtgtggcaagcagggttaggtcactagggccactcagggaagggaacccagatacctgatatgccaacaaaagggtaaaagttcttatcagtcacacttctagcctctctctgtgcaaatcggttggatgaatggtaaaaatcatggtttatatcctctgttaagttttgattaatgggaaaaaggattcatgaggctaatgttgagctgtagtgaatctggtgtgctttgtgtgtctttctgtattgttctatcatamagaggggtaccttaggatagaatgtgagcctaggtccccataagcccgctgttcaagatggcccagcaaactggtcagtcatgtccttgggagcatgacattgtaaccacgtggcagtactttctcttggtctgtgctcttaccacagcagcccaggttc

SEQ ID NO: 761580 - DNA, 626 bp, Homo sapiens
acctcaagatccacttatactcaaattctggatgagttagctatcttgggaagaaaagtgtgatcagtaagtttccaatctgacatagcttctaaaaatgttcaagaattccagtacatgtgggttaagacaaaagaaataccttagaaaaaacaggtattaactcaattagttagtaacaacttcactaaattacattccaatgaattacagtcatgcattgcataatgatggggatagactctgagaaatgcgtcattaggagattttgtcattgtgtgaactttgtagagtgtacctacacaaacctagatagtattgcctactacatacttaggctttatgaaataacctattgccccttggctgcaaacctgtacagcatgtgactgtactgaatactgcaggcaattgtaacacaatggtaagtatttgtatatctaaacatatctaaacacagaaaagatacagtacacytacagtactagagtcttataggatcaccattgatcttatggaatcaccattgcatatgcagtccatcattgatcaaaacatcattatgcagcgcatgactgtatatctcttgattataatgccctttaatttatttttattttatttaa

SEQ ID NO: 761581 - DNA, 544 bp, Homo sapiens
aatggaatggaatggaatggaattaacccgaatagaatggactggaatggaatggaacggaacggaatggaatggaaaggaatggaatggaatggaatggaatggaatcaacccgattgcaggggaatggaatggaatggaatgcaatggaatggattcaamttgaatggaatggaaagaatggaatcaacacgagtggaatggcatggattggaatggaatggaatggaatcaacccgagtacaggggaatggaatggaatggaatgcaatggaatggaatcatccgtaatggaatggaaaggaatggaatggaatggaatggaatggaatgcaatggaatcaactcgattgcaatccaatggaatggaatggaattaacccgaatagaatggaatggaatggaatggaatggaacggaacggaatggaatggattggaatggaatggaatggaatggaaaggaaaggaatggaatggaatggaatggaatggaatggaatggaatggaatcaacgcgagtgcaggggaatggaatgaaatgg

SEQ ID NO: 761582 - DNA, 599 bp, Homo sapiens
ttccattccattacattcggattgattctattcaactcccttactctccattacattccattccattcgggttgttccattccattccattccattccactccattccattgcagtcgggttgattccattccattccattccattccattccattccggaagattccattccattgcattccattccattccattcccctgcactcgcgttgattccattccattccattctattctattccattcccttcctttccgttccgttccattccmttccattccattccattccattccactccattccgttccgttccattccattccattccattctattcgggttaattccattccattccattcgattgcaatcgagttgattccattccattccattccattccattccattccattcctttccattccattacggatgattccattccattgcattccattccattccattaccctgtactcgtgttgattccattccattccattccaatccatgccattccactcgtgttgattccattctttccattccattcaagttgaatccattccattgcattccattccattcgat

SEQ ID NO: 761583 - DNA, 599 bp, Homo sapiens
ttccattccattacattcggattgattctattcaactcccttactctccattacattccattccattcgggttgttccattccattccattccattccactccattccattgcagtcgggttgattccattccattccattccattccattccattccggaagattccattccattgcattccattccattccattcccctgcactcgcgttgattccattccattccattctattctattccattcccttcctttccgttccgttccattcccttccattccattccattccattccaytccattccgttccgttccattccattccattccattctattcgggttaattccattccattccattcgattgcaatcgagttgattccattccattccattccattccattccattccattcctttccattccattacggatgattccattccattgcattccattccattccattaccctgtactcgtgttgattccattccattccattccaatccatgccattccactcgtgttgattccattctttccattccattcaagttgaatccattccattgcattccattccattcgat

SEQ ID NO: 761584 - DNA, 430 bp, Homo sapiens
atggaatggaatggaatggaatggaattaacccgaatagaatggagtggaatggaatggaacggaacggaatggaatggaaaggaatggaatggaatggaatggaatgtaatggaatggaatcaacccgactgcaggggaatggaatggaatggaatgcaatggaatggattcaacttgaatggaatggwaagaatggaatcaacacgagtggaatggcatggattggaatggaatggaatggaatcaacccgagtacagcggaatggaatggaatggaatgcaatggaatggaatcatccgtaatggaatggaaaggaatggaatggaatggaatggaatggaatggaatggaatggaatggaatcaactcgattgcaatcgaatggaatggaatggaattaacccgaatagaatggaatggaatggaa

SEQ ID NO: 761585 - DNA, 430 bp, Homo sapiens
atggaatggaatggaatggaatggaattaacccgaatagaatggagtggaatggaatggaacggaacggaatggaatggaaaggaatggaatggaatggaatggaatgtaatggaatggaatcaacccgactgcaggggaatggaatggaatggaatgcaatggaatggattcaacttgaatggaatggtaagaatggaatcaacacgagtggaatggcatggattggaatggaatggaatggaatsaacccgagtacagcggaatggaatggaatggaatgcaatggaatggaatcatccgtaatggaatggaaaggaatggaatggaatggaatggaatggaatggaatggaatggaatggaatcaactcgattgcaatcgaatggaatggaatggaattaacccgaatagaatggaatggaatggaa

SEQ ID NO: 761586 - DNA, 445 bp, Homo sapiens
taatggaatggaatgcaacggaatggaatggaatgtaatggaatggaatgcaatggaatggaatcaacccgagtacaatggaatggaatggaatggaatggaatggaatggaataccttgaaaccgaatggaatggaaaggaatggaatcaacacgagtggaatggaatggaatggaatggaatggaatggaatggaatgatacggaatagaatggaatggaacraaatggaatgaaatggaatggaatggaatggaatggaatggaatggaatggaatggaatcgttccgagtggaataggagggaatgtattcgagtggagtggaaaggaatggaatcaaccagagtggaatggaagggaatggaatggaatggaaactaatagaatggaatcaacccgagtggaatggaatggaaaggactggaatggaaaggaatggaatg

SEQ ID NO: 761587 - DNA, 483 bp, Homo sapiens
tggaatggaatcaacccgagtgcaggggaatggaatggaatggaatgcaatggaatggaatcatccggaatggaatggaatggaatggaatgcaaagcaatggaatcaactcgattgcaatggaatggaatggaatggaaaggaatacattggaatcaacccgagtggaatggaatggaaagactggaatggagtggaatggaatggaatggaatggaatggaatggaatcaactcgattggaatggaatggaatggaatggaatggaattaacccgaatagaatggaatggaatggaatggaamggaatggaatggaatggaatggaatggaatggaatggaatggaatcaacccgactgcagggtaatggaatggaatggaatgcaatggaatggattcaacttgaatggaatggaaagaatggaatcaacacgagtggaatggcatggattggaatggaatggaatggaaagaacccgag

SEQ ID NO: 761588 - DNA, 626 bp, Homo sapiens
atggaatggaatgtaatggagagtaagggagttgaatagaatcaatccgaatgtaatggaatggaatggaacggaatggaattgaatggaatggaatggaatgcaatggaatggaatcaacccgagtacaatggaatggaatggaatggaatggaatggaatggaatggaatggaatggaatgcaatgraatggaatcttccggaatggaatggaatggaatggaatggaatgcaatggattcaacacgattgcaatggaatggaatagaatggaatggagttgaatggaatggaatggaattaaaccgaatagaatggaatggaatggaatggaacggaacagaacggaacggaacggaacggagtggaatggaatggaatggaattgtatggaatggaatggaatggtacggaatagaatggaatggaaagaattggaatggaatggaatcgaatggaatggaatggaatggaatggaatcaacccgagtgcaggggaatgtaatggaacggaatgcaatggaatggaatcatccggaatggaatggaaaggaatggaatggaatggaatggaatggaatggaatggaatcaaccagagtgcaatggaatggagtggaatggaa

SEQ ID NO: 761589 - DNA, 580 bp, Homo sapiens
tacactgttgggagtgtaaattagttaaaccatggtggaagacagtatggcaattcctcacagacctagaagcagacataccatttaacccagcaatcccattactgggtatatactcaagggaatataagttattctattataaagacacatgcatgcatatgttcactgaagcactattcacaatagcaaagacgtgaaatcaacctaaatgcccatcaattatagactgaataaagaaaatgtgatacatatataccatggaatactatgcagccatgaaaatgaatgagattatgtcctttgcagggacatggatggaggtggaagccattatcctcagcaaactaatgcaggaacagaaaaccaracaccacatcgtgttctcacttataagtgggagctgaaggatgagaacacatggacacatggtggggaaaaacacacattggggcctgtcagagtgggaggtgggaggaggaagagcatcaggaagaatagttaatggatactgggcttaatatctaggtgatggtatgatctgtgcagcaaaccaccatggcacatgtttacctctgta

SEQ ID NO: 761590 - DNA, 579 bp, Homo sapiens
acatgcagcatgatttcctccatgttaaaacatgagaaaatgaaaaatttcctttcttaggcttcttttacttgtaatctgtacgtatatataatttttttttttttaatcagagtctcactctgttgcccaggctggagtgcagtggtgcagtctcggctcactgcaactttcacctcctggattcaagtgattctcctgcctcagcctcctaagtagctgggattacaggcatgcgccaccacacctggttaatttttgtttttttagtagagatggggtttcgtcattttggccargctggtcttgaactcctggcctcaagagatctgcctgccttggcctcccaaagctgtttggattacaggtgtgagccactgagcctggcctgtatatataaaattatatttaaaacctggtggacttctttccatgtcaatacatatacagctttgtctgatttctaaaagttatatagtattctgtgtattattacgtagagactgtttaaataggattatcaacaaagttgcactgaacatcctatatggacatctttgtaccttttcttgattccta

SEQ ID NO: 761591 - DNA, 620 bp, Homo sapiens
tacctggccaagttatcccattctgtagtaaatttttctaggaacacttcaacaacattcatacagtcatggtaatctcttgttctctgaagatcctcttccctttgcaagcacaggttgttagactgacggcacaaatcgagccactgatcatttaaatgatttatttccttgtgttcaggcgattcctycttctttgttaacttattcaccttttctattatggtgttcacggatgcctgtttgctctgtagtttcttaacaaaatcctaaaggataacagcaacaaaaaatatgtaatgtgttaagaaatgcccaaataaatatagagagcaacacagacataagacctttaaacactctaagttccttaatatgaaaaaaactgaagaatgtataataagttatgggaaacaaagagaaaatctaaaaatcaccatacctctttatgaacgttaattcccacgtgtgcaagattcagggtagctgtggtatattcttttattgtactattccaagaggcataaagaaaaactaatacatgtgaaacattacagtcattaatgaaaaaagtcattatcttaccttgaagtgcggcctttgttttctaagaattttta

SEQ ID NO: 761592 - DNA, 612 bp, Homo sapiens
ttgcagcaagacatagtgaaaatgagaagaaagtgacttcataaatacagaaatcaaaaacgaaaatggagacacttcttcaaataagaatgcactgctatttatctaaaaactttcaactttcccttaacaatttaggtaacttgtgaagattattagtcattttatgctaaatacgtatttaaaaaccctattcttaacttacaaaacccacatgtaacatgctataatcactccaaaaaatacatatraaaagaattatggctgaagaagctactgtctatctcaatagtaataataataataataataataataataataataatgacacagtgcctcagaatgtggcaggccctgcattacctgcttcccatgtattgactcttttcatcttcctgagaaccctaagaggtatgttatttcattaccttcattttacagattaggaaatcaagacacagaaaaacaacttgctttaggaaatctaaatatcggaaaagtagaatattagcctctttggtcctccattattaacttagttgtctataaaaataatttcatcacactgaattctcctacttttcctcattttttgtattaagaaattac

SEQ ID NO: 761593 - DNA, 591 bp, Homo sapiens
agccccagaagaaacgctcccaccccgctcctcaggccctgcccagccttgtggcctcccttcacccgccgccaccatccgcggagccaaagcggagccctggtctcccgcggccggggatgggggctggaagctsccggatcacctcgctgccggcaatgctccacctggcagtgctgcccgatgtccaactccgccatctctccggcgccgtaaggggcggggcaaagcctgaggggcggggcaatgagcgcgcgcggcgcctgacgggagagtggcggacccagaggcggagtctacaggtgggggcggggcctggaaaccagctgtgcgatttgtcctaggtgcattcgccgtgaccaggaaaggccactgttctgtgagtgttcttctcggagcggaaggcctctcgcctagtccttaaagaaatacccacctgcagccgggcgcggtggctcacgcctgtaatcccagcaccctgtgaggccgaggcgggcggatcacctgaggtcaggagttcgagaccagcctgaccagtgtggcgaaacccccgtctctactaaaaatgcaaaattagccgggcgtggtggc

SEQ ID NO: 761594 - DNA, 616 bp, Homo sapiens
ttatttcacttatatatggaatctgaaaaaaaaaggagttgatatcctagaagcagagactggggaggagaggaagctagggaagacagaaaactgttggtcaacaggaagaaagttacaattacatagaaggaatatgttgtggtgttttattgcaaagtgggatgacaatagttaagagtaagtcwttgtatattataaaatagctaaaagaaaggcttttgaatgttctcaccacaaagaaatgataaatgtatcggataataatgaatatgctaaataccctgttttgattattatataacatataggtaccaaaacatcaaattttactccatgaatatgtataactgcaatgtatcaataaagaaataaagcaaactttaagaggaaatttaaagaatgaaaaaaaaactgatctcactagcaatcaaagaaatataattgcaactacaagaagacactacattggcaagaatgtgttgtgaaaacagtgttctccctagagtatatggaaatgaactctgtgcattcctgatgggagtgcaaatttctttaagaatatttgtggagctgatttaggaatatgcagcgaaaccattaaaaacattcatag

SEQ ID NO: 761595 - DNA, 616 bp, Homo sapiens
ttatttcacttatatatggaatctgaaaaaaaaaggagttgatatcctagaagcagagactggggaggagaggaagctagggaagacagaaaactgttggtcaacaggaagaaagttacaattacatagaaggaatatgttgtggtgttttattgcaaagtgggatgacaatagttaagagtaagtctttgtatattataaaatagctaaaagaaaggcttttgaatgttctcaccacaaagaaatgataaatgtatcggataataatgaatatgctaaataccctgttttgattattatataacatrtaggtaccaaaacatcaaattttactccatgaatatgtataactgcaatgtatcaataaagaaataaagcaaactttaagaggaaatttaaagaatgaaaaaaaaactgatctcactagcaatcaaagaaatataattgcaactacaagaagacactacattggcaagaatgtgttgtgaaaacagtgttctccctagagtatatggaaatgaactctgtgcattcctgatgggagtgcaaatttctttaagaatatttgtggagctgatttaggaatatgcagcgaaaccattaaaaacattcatag

SEQ ID NO: 761596 - DNA, 506 bp, Homo sapiens
tattcattagctcattttttttttacttcagctagttttctgaaagggttatagttaataactttttgtcaccttattttggaaaaataaaatctatcttatttactctatactttcctttagaggaagagtatattgaaagaagtggctttgctcaaagaattttaaatatagaaagctgctacttgactagctgaaaactggacatttttctataatgtcaaaacacatcacagaaactgagaaacttcctggattttctactacttatccaagttctcttcctcagttgcaatttccactaactggatgttagccagcccccttccrctctatcctcttctctacacggaagtaatttgctgactccaaacccaggctcttctacagattatcccctgagtgccagccctacagtaatgaactggcattaaacttctccacttcgatgttgaaaaccaaacggatcctcttcctcccacctacatctgctcctcctcctaaaa

SEQ ID NO: 761597 - DNA, 573 bp, Homo sapiens
tttatccagtcacccattgagggatacttggattgtttccagttttgtgatattatgagtaatgctatgaacaatttcatataatgttttgtgtgaacatatggctttatttctcatggactgagaaattctacttccctaagagtagaagtgtttgatcatgtaacaagtttaactttttaaagaaaccaataaagtttttgaaagttgctgtattctattctcacttgtactgtacgagagttttagtttctctatgtcctcacaaacatttgatattatctctcttttrgattatagccattctcttggataggtagtgatatttcattatagctttaattttcatgtttctaatgattttttgatattgatatcatgccacatgctttttagccattcatgttttcttcaatgaaatgtctgttcacgtcttgcccattttttaaaaaacctgggctgtttatcttattcagttataaaatctttactttagatattaatcctttatcagagatacaatttgtagatattttcttgcagtctgtaggtgtcttttcatcctcttaatgg

SEQ ID NO: 761598 - DNA, 569 bp, Homo sapiens
cattttgcccttgctgctttcaagatattctgtttgtttgactttcagcagtttgattatgatgtattggggtgtagatctctttctgtttctcatgctttggcttcattgagctttgttgacttgacagattaatgtwttatatcaaactttggaatttgttagccattatttcttcaaatactttttcactccctttttctctcccttctccttcttggactgtcattacttgtatatctgtataccctgtgttgtgcaaaatgtctctgaagtgctgttcatttttcttcaattgcttttttctctgatcttcagattgaaaatttctattgatcttcaggttcacagatttatatttcggtcatattaaatctcctgttgagcccctcttgttaatttttcagttactgtgcttttcaactccaaaattctcaattgcttattttttaactgttctttctctttattgagatttttctatttgttgactcattatcattatccttatcattaattcaattttttctagtttatttcatgtacgtaatggttgcattaaaaatcac

SEQ ID NO: 761599 - DNA, 569 bp, Homo sapiens
cattttgcccttgctgctttcaagatattctgtttgtttgactttcagcagtttgattatgatgtattggggtgtagatctctttctgtttctcatgctttggcttcattgagctttgttgacttgacagattaatgttttatatcaaactttggaatttgttagccattatttcttcaaatactttttcactccctttttctctcccttctccttcttggactgtcattacttgtatatytgtataccctgtgttgtgcaaaatgtctctgaagtgctgttcatttttcttcaattgcttttttctctgatcttcagattgaaaatttctattgatcttcaggttcacagatttatatttcggtcatattaaatctcctgttgagcccctcttgttaatttttcagttactgtgcttttcaactccaaaattctcaattgcttattttttaactgttctttctctttattgagatttttctatttgttgactcattatcattatccttatcattaattcaattttttctagtttatttcatgtacgtaatggttgcattaaaaatcac

SEQ ID NO: 761600 - DNA, 569 bp, Homo sapiens
cattttgcccttgctgctttcaagatattctgtttgtttgactttcagcagtttgattatgatgtattggggtgtagatctctttctgtttctcatgctttggcttcattgagctttgttgacttgacagattaatgttttatatcaaactttggaatttgttagccattatttcttcaaatactttttcactccctttttctctcccttctccttcttggactgtcattacttgtatatctgtataccctgtgttgtgcaaaatgtctctgaagtgctgttcatttttcttcaattgcttttttctctgatcttcagattgaaaatttctattgatcttcagrttcacagatttatatttcggtcatattaaatctcctgttgagcccctcttgttaatttttcagttactgtgcttttcaactccaaaattctcaattgcttattttttaactgttctttctctttattgagatttttctatttgttgactcattatcattatccttatcattaattcaattttttctagtttatttcatgtacgtaatggttgcattaaaaatcac

SEQ ID NO: 761601 - DNA, 456 bp, Homo sapiens
ttggggccgtttagagatagcttcaattgactgccttttttcctgagtatgcttagattgaccttgtttctttgagtgttttgtacatttttttgaatacaagatattttaggtgatacactgtagcaactcttgattcttaatctctgtctcctatagtggttattattattttgtctgtctgtttagtaacttgcctggactaaatctgtraagtttgtctcctcagcaatgtgtggtcactgatgtcttttctcagtgtttttttcctcattttatttttaagcctggctttcttgtatttctgcatagcttaatgttcagtcaacagttggtcataaattttgcttatatacctcaaactagtaagatttttacactctggtaatggatctgtatatagtctaaggagtgtatttaaagttaaggtcattttcaagtatgctgtagatttta

SEQ ID NO: 761602 - DNA, 647 bp, Homo sapiens
aaaaatatgagtggggggctacaagataaaaagctttttatcttgtagccatcttatttaggaaccaaaaggaggaggcaggttttcatgagtgagttcccagcttgatttttccctttagcttaatgagtttggagtcccaatctttattttcctttcacacttagaagaccaaatacaatgtggatgtaaatagttgtgttgtttaggaagtaatgacaagaaaaagtctgaatatgttcactacagatgcaagcgtctgattttatttcaaatattttgcatccaagtttgtttacatacacagatattaaaagtacagatacaaaaagstgagtgtacttacaaattaatagctctacacaggcagcataaaattctctttgtacatgccaaaaacattctgtgtctacccagggtgaatacagccacttcacaaacatggtgtaaataaggaggttcattaagtacaagaaagttacatgaccatattggcattttaacagccattcatgagaaagagaataggaaagggcttaagagtcagaggagaggaaaagaggaagacagatgacctcctacatcagaagatggagcagtgagaatacagaatagggaagcaatagttaaaaggaaaaaaagtagaa

SEQ ID NO: 761603 - DNA, 647 bp, Homo sapiens
aaaaatatgagtggggggctacaagataaaaagctttttatcttgtagccatcttatttaggaaccaaaaggaggaggcaggttttcatgagtgagttcccagcttgatttttccctttagcttaatgagtttggagtcccaatctttattttcctttcacacttagaagaccaaatacaatgtggatgtaaatagttgtgttgtttaggaagtaatgacaagaaaaagtctgaatatgttcactacagatgcaagcgtctgattttatttcaaatattttgcatccaagtttgtttacatacacagatattaaaagtacagatacaaaaaggtgagtgtacttacaaattaatagctctacacaggcagcataaaattctctttgtacatgccaaaaacattctgtgtctacccagggtgaatacagccacttcacaaacatggtgtaaataaggaggttcaytaagtacaagaaagttacatgaccatattggcattttaacagccattcatgagaaagagaataggaaagggcttaagagtcagaggagaggaaaagaggaagacagatgacctcctacatcagaagatggagcagtgagaatacagaatagggaagcaatagttaaaaggaaaaaaagtagaa

SEQ ID NO: 761604 - DNA, 572 bp, Homo sapiens
ttctgtgagcaaatcttattcaataaaatactactctttatactaaaaaacaaaaacagtggtgatgtgtggtcattatcgtcagcaaactaatccagggaaagaaaaccaaacgccaccttctcacttataatgggagctgaaaagtgagatcccatggacacaggaaggggaacaacacacactggggcctttcgggaggcagagcgttaagaaaaacagctactgcatgctgggcttaatacctaggtgacgggttgacaggtgcagcaaaccaccatggcacacgtttaccttagtaacaaatctgcacatcctgcacatataccccagaacttagaaacgaaacgaaacaaaagaaaacgaaaaagcaatagcaaaacgctaaaggcaaaataaagtttcaaactcagaaagtgacagaccaamgtttggttcaaatcatggtcctaaacccaggtgccataaggtcaggataaagaatttgattacatattgtaaatatgacatgcagtaaatgaccagaaagattattctccacatatgtgtgtcttctaattcaatggtgacgc

SEQ ID NO: 761605 - DNA, 580 bp, Homo sapiens
ctgaatatttgtcccacacctagggatccaaaacaccccaactggggtctgaatgactgtccctcacataggactccagaacactgctgctgtgttctgaatgttcttcctcacatagtattccataacattgctatgagggtctgaatgtttgtctcacacatagggacccagaacatcccagatgtggtgtgaatgattgtccctcacataggattccagaacgcagctgctgggttctgagtgtttctcctttacgtaggattccaaaacattgctactgggatctgaatttttctccctcacataggattccagaactctgctatgaggatcttaattattctccctcacataggattccagaacactcctgttgtggtctgaatgtttgtccctcacttaagcttccagaacactgctgtcgggttctgkgtgtttgaccctcacgtacgattccaaaacactgctacgtgtgtctaaatgtttttccctcacataagattccagaacactgctatgagggtctgtatgtttgtcccgcacgtaggtccgcagaacactactgctgtgttctgaa

SEQ ID NO: 761606 - DNA, 635 bp, Homo sapiens; identical to SEQ ID NO: 761458

SEQ ID NO: 761607 - DNA, 570 bp, Homo sapiens
cgtcaccattgaattagaagacacacatatgtggagaataatctttctggtcatttactgcatgtcatatttacaatatgtaatcaaattctttatcctgaccttatggcacctgggtttaggaccatgatttgaaccaaackttggtctgtcactttctgagtttgaaactttattttgcctttagcgttttgctattgctttttcgttttcttttgtttcgtttcgtttctaagttctggggtatatgtgcaggatgtgcagatttgttactaaggtaaacgtgtgccatggtggtttgctgcacctgtcaacccgtcacctaggtattaagcccagcatgtagtagctgtttttcttaacgctctgcctcccgaaaggccccagtgtgtgttgttccccttcctgtgtccatgggatctcacttttcagctcccattataagtgagaaggtggcgtttggttttctttccctggattagtttgctgacgataatgaccacacatcaccactgtttttgttttttagtataaagagtagtattttattgaataagatttgctcacaga

SEQ ID NO: 761608 - DNA, 524 bp, Homo sapiens
agtgctgggattacaggtgtgagccaccatgcccggccaacactgtagtttttaacaatcacccacaaagctgcttcaaaacatacatgtctgggagtttagcccccactgggaataattctgatgcacctccattattagtaactacctctagggttcttctttctttttttcttttcttttctttttttttttttttaraggaggttttgccacattgcccaggctggtctcaaactcctgaactcagacaatccacttgccttggcttcccaaagtgctgggattacaggtatgagccaccacgcccagcctaggatttttttttttaaactaataaataaatacccagcaatcccacttctaggtatttacccaaaagattcgaaaacagtatgtcaaagagatgtctacactcccatgttcattgcagcactattcaaaataccaagtacggaatcaacctaagtgttcatcaacagatgaatggataaagaaaatgtggtcctaaataagtatacata

SEQ ID NO: 761609 - DNA, 615 bp, Homo sapiens
attccctctactcttggtttcagtagtgtcacatgaaaagaaaattccctagaacccttccttcagagttttctggtaagtcttcattcttagctatgaacttctaaaattcgtcaaaatgaagaaaccacctttttatttttcagcttttctttagatcaagcaaacaaaacaaacataaatcctttgaatattaactaatgatggagatatcagtaactctcataggactgttgtaaacgttcctatttttgaaaacttaatctcttttttaccttttttgctattcactgctttcagtttacccgctttggttgccgggttaatttcaccaaaacactcctttcattctgtcactcctatctataaaaactttgaatggctttctatcgaaaactggataaagwcttagttctcagtctagtattcaagattttctattgtctggccccattccactttgtgtgtgtgttttgtctcttcagctgtatagcaaaagcccttaacttaaagccagagctgttagtttgcgtctttttgttggctggtgttctgtttgtacaccccccattctcccatccctaccctgtggacacaataggtgtttttaatata

SEQ ID NO: 761610 - DNA, 547 bp, Homo sapiens
agagagggtagctcctctctgcagctggacgtctcatcatctgcagtgctctggctgagcccagggcttttatgggcctcagatgggaggaagtgctgccaattggtctgtgggcggccatgggagggcctggaaaaggcaccacaagttcccactccagtcagcagtacyagcagcctggcctgaaggtggggcttcaccagtaacctgtcctcttccacccaggagccgatctgcctcctgccaccatccatggtgcccaggctgcttgtgcaaaagggcacctgtaggccagtgctgggttgccctcaggcgcccctcggcttccccccagagctccttggggcccaaattccggaaaggaccaagacagcagggggctggtgtgtcagctctgctccaagtgtgcacacacctggccagactgtaacagtgcctgggctcagccccaaccctgctctgagattggagcaggcaccaggggcagggagaggccaggcagcaggagcagacaccccccaagcctgaggggggagggggactttcc

SEQ ID NO: 761611 - DNA, 515 bp, Homo sapiens
ccaggaataatttactaaaatgataagaaaaagccatcacatatcaataataactttgcacgtaaatgaattaaactttccacttaaaagatgtagactggctgaatggattttttaaaagacccaattatttactgcctataagaaacagatatcatgtggaaagacacatatagactgaaagtaaaaagatggaaaaagatattccaagcaaayaaatcaaaagtgagcaggagtagctacacttagataacatgaacttgaagtaaaaaacaataaaaagagacaagatatattagtcagcattctctagagggacagaactaataggatatataaaggggagttccttaagtattaactcacaagggccatcaataggacccacaataggccatctgcaagctgaggagcaaggagagacagcatgagtcccaaaactgaaggacttggagtctgatgttcaagggcaggaagcatccagcatgggagaaagacgtaggctgggaggctag

SEQ ID NO: 761612 - DNA, 579 bp, Homo sapiens
taatttttttgtatttttagtagagacagggtttcaccatgttggtcaggctggtctggaactcctgacctcactcaagtgatctacccgcctcggccttccaatgtgctgggattacaagggtgagccactgcacccagcccttcttggctctctctattccagctgcactggccttttcycctggcatactctgttcccatcttggagcttaacttctcctcatacttataatcttgccttaagtatcacagtatcagagaggactacgttcccctattgtacctctacagagttccctgtctatcttcttcaaggcacatgtcaaaactttaactcattaatgacttgtgcaattatttaatgcctgtctttcttaccagactgcaaacttctgggggatgcagagatggtatgtgtcttgtttaatgttatattctcctgttcctggaacacagtagactcttaacacaatttcttgaatgaaaagaataaatgaataagcagggaaagggagatttcctcttgacactgaacaaaataaagcgaggactgggcacaaatgtagataagctaaaa

SEQ ID NO: 761613 - DNA, 555 bp, Homo sapiens
agcccctgccacattgcttggatcctcagcgtggcaaaattccatagataagttttctgtagtcactgtctccagttccttacctttcattctcctgtaagtctactccagtcatgcttttgcttcattcaatccactgaaacttctcttgtcaagaacacctgtgatgccaaaccccatgatctgttcycagtctccaggttccttgatctattagtactagacacagttgatgaggttctcctgcttgtgcactttgtcacttgacttccaggattccacactctcttgattttcctcctatcatgctagtcatttcttcttagatgtctttcctcgttcttcctcttctcttctcacactcactcccttgatgatttgaactagtctcaaggccttaaatagtaattaaacactgaggaccctaaatttatatctcaagacctctctcatgagttctggagtttcatccgactgcctgctttatatcaccattcatatagctatctcacacttaacctgtctaaaacaactttttttcttcttccaaaatga

SEQ ID NO: 761614 - DNA, 555 bp, Homo sapiens
agcccctgccacattgcttggatcctcagcgtggcaaaattccatagataagttttctgtagtcactgtctccagttccttacctttcattctcctgtaagtctactccagtcatgcttttgcttcattcaatccactgaaacttctcttgtcaagaacacctgtgatgccaaaccccatgatctgttctyagtctccaggttccttgatctattagtactagacacagttgatgaggttctcctgcttgtgcactttgtcacttgacttccaggattccacactctcttgattttcctcctatcatgctagtcatttcttcttagatgtctttcctcgttcttcctcttctcttctcacactcactcccttgatgatttgaactagtctcaaggccttaaatagtaattaaacactgaggaccctaaatttatatctcaagacctctctcatgagttctggagtttcatccgactgcctgctttatatcaccattcatatagctatctcacacttaacctgtctaaaacaactttttttcttcttccaaaatga

SEQ ID NO: 761615 - DNA, 570 bp, Homo sapiens
ctgaaaaactcttatcaccccagagaatgatgaatgaccacctctgtctcagctctatccctggaggttcccaggtgctaactgccttgaggtcttccttgccacacagagaagttagtctccattcattcctgcatgttaacttcacttgagtttagtgagcagtgaacactttattcactcccaattcaaatcaaaataggggtttaatttgcttccctgtcttctggggctaatctccattcattgaacactcayactcccattaactcaaggagagcaaccccctaagcagcctttgaatgaggcactgaaggactaattgttcctttggaagcttgcatatagctcctgctggtatcaatgagtacctccctttgtgtaccctgcattccaggccagaactgagtataagacatgattttatgtgactagtcatggataattaacaccctacttacttctgagctcagcactacatttccaggatgaatatcatcgtgcttggtgtgccctgcagacctaccatttgcaggtggaataccaggacatcaactcctgctaagtgtc

SEQ ID NO: 761616 - DNA, 343 bp, Homo sapiens
cttgtcggattacttaggtagaaggagacaaaaacaaaatacaaacaggactaggcaaaaatttgtcttcttggctcaggtaagatgtttcatgattctacggtactgggtatgattctaggttctttggatgatggaatgaatcacagtaacactyagatacagaaaaagcagaactctgcttcttacagctccaaatgaggcaaagggcacacaggaaattgtacccaggaacagaactacagcaagcggggactgttggaggtagcttgcgaatggaaaatggcatagagatggctaggctttgcaggcctccggaggattgggtattttaaataatttt

SEQ ID NO: 761617 - DNA, 502 bp, Homo sapiens
acttcaaagcaacagcagtttaaacaaacaaagagggacattatataatgataaaaggattagtccaacaggaaaatatcacagttctaaatatatatgcacctaacactggtgctcccaaatttataaaacaattactactatacctaagaaatgagayagatggcaacacaataatagtggaggactttaacactccactgacagcactagacaagtcatcaagacagaaagtcaacaaagaaacaatggacttaaactatattctagaacaaatgaacttaacagatatttacagaaaattctatccaacaactgcagaatacacattctattcatcagcacatggaacattctccaacatagaccatacgataggccacaaaataagtctcaggaaatttaagaaaatcgaaattatatcaagtactctctcagaccacagtgaaataaaattggaaatcaactccaaaaggatccttcaaaaccaggcaaatacatg

SEQ ID NO: 761618 - DNA, 484 bp, Homo sapiens
ttatatgtcacaatgtctcttctcctattaggctgactctagttctctttttactgaaaccgccttgctttttgtatcatcgttttaggcttggagaattctaaacagcctctaggaaatatacatggttgagttgtttgacaggttatgaacacawtgtgatcaaatgcagtgactgtttataaaatgggtgccttgcagaggagagtttaagcaaagtttaagaattgggaaaatccttaatcacatctctacagaaagaaaaaaagctgtaagagaaagcagaatggtacaggaaatactcctcagagaacagcggtgagggagggataatatgaactacctataaaatatgctcttgaccaaccatatatcaccttcagcctgttctttttgacgcgtgactcactatctagggatccccttctgttggctcacttggcagcctctgagattagttttcccaaagcaatttattacccag

SEQ ID NO: 761619 - DNA, 585 bp, Homo sapiens
gcctctctcatccccggccctgtggacactgtggcaggagagctccttgctgtgaggctggcctgtgcattgcagaggattcagcagcatccccggcctccacccctagatgccggtcaccctctgccgccccgccacacacacacacgcaatacacccatggctgcaggcattgccaatgtccccaggaatccagtgtggccgccagtgagcaggaccgccctgggcccatgagtgctggaacaggcatcacacagtcatggccccccgctgggccccaccccacagtgacttggctcccagggacccraaggacaactcgtagttgttcaagttcgttcagagaccctcagatcctcgctagtctgggccccgcttatccccggcagacaggggaagggggaaccacttgactgtgtagaaaccttatcactttctcatatcgaaatccacattttaaatgtctgagacttttaaaaagtaaaagccagctcaggcttccctgtccagatgtcagtgggagccgtctctgtgcaccgtgggtgttgtaatctgggtgtccgtgcctcttcccctcgggttccc

SEQ ID NO: 761620 - DNA, 585 bp, Homo sapiens
gcctctctcatccccggccctgtggacactgtggcaggagagctccttgctgtgaggctggcctgtgcattgcagaggattcagcagcatccccggcctccacccctagatgccggtcaccctctgccgccccgccacacacacacacgcaatacacccatggctgcaggcattgccaatgtccccaggaatccagtgtggccgccagtgagcaggaccgccctgggcccatgagtgctggaacaggcatcacacagtcatggccccccgctgggccccaccccacagtgacttggctcccagggacccgaaggacaactcgtagttgttcaagttcgttcagagaccctcagatcctcgctagtctgggcccygcttatccccggcagacaggggaagggggaaccacttgactgtgtagaaaccttatcactttctcatatcgaaatccacattttaaatgtctgagacttttaaaaagtaaaagccagctcaggcttccctgtccagatgtcagtgggagccgtctctgtgcaccgtgggtgttgtaatctgggtgtccgtgcctcttcccctcgggttccc

SEQ ID NO: 761621 - DNA, 531 bp, Homo sapiens
aggggatcctgtgggaagaaaatgatctttgctggaagctgcactgtctgaagttagcctcatttaaacgtagtctctgactctcagccacttgtatccccaacgctcagccgcttgcatccccgactgcttgcatcagccagctgaagtcttttttttttttctgagacagagtctcgctctgtcaccagactggagtgcagtggcccaatctcggctcactgcaacctccgctcccaggttcagacgattctcttgcctcagcctcttgartagctgggattacaggcgaccaccaccatgcctggctaatttttgtatttttagtaaagacgggttttgccatgttggcgatgctagtctcaaactcctgacctcaggtgatccgccctcctcggcctcccaaagtactgggattacaggcccgagccacggagcccagccagctgaagtctttttatggacacaggctatgggtgggatgggccaaaatggcaattatttggcggggttgcggtgtggagaaacggg

SEQ ID NO: 761622 - DNA, 603 bp, Homo sapiens
caaaaataatgcttcatttcctggatcagaaaagaacatattcttgtaacttactgtcaaagtttatctttcatatttaagtctacaaacatctaaaatagaattttgtgtatattgtgatacaagaatgcaatttaacacattttaaaagtttattttattaaggtattgtytacataaagtccatccatcttaagtgaacagttttgtcaatttggggaattatatacagcactgtaacctccaccataaccatgatacagaacaattctctcaccttaaagaagtttcattgtgagacttcactcccagccctgtggcaaacgctgatctgattttcatccctttagttttgcctttttaaagatttaattctaatggaagatagagtatgtagtcttagatttgacttttttcacttagcactgttttgagattgatcatggatttcatttctttttattgctaagtggtatttcataatatgatatgtcaaatttgtttatctttaccatttgattagttggcaccatttgaatttgctatattcagtctgcatctattatgaataatgctgctatgaatattcacataaaagagttt

SEQ ID NO: 761623 - DNA, 603 bp, Homo sapiens
caaaaataatgcttcatttcctggatcagaaaagaacatattcttgtaacttactgtcaaagtttatctttcatatttaagtctacaaacatctaaaatagaattttgtgtatattgtgatacaagaatgcaatttaacacattttaaaagtttattttattaaggtattgtctacataaagtccatccatcttaagtgaacagttttgtcaatttggggaattatatacagcactgtaacctccaccataaccawgatacagaacaattctctcaccttaaagaagtttcattgtgagacttcactcccagccctgtggcaaacgctgatctgattttcatccctttagttttgcctttttaaagatttaattctaatggaagatagagtatgtagtcttagatttgacttttttcacttagcactgttttgagattgatcatggatttcatttctttttattgctaagtggtatttcataatatgatatgtcaaatttgtttatctttaccatttgattagttggcaccatttgaatttgctatattcagtctgcatctattatgaataatgctgctatgaatattcacataaaagagttt

SEQ ID NO: 761624 - DNA, 643 bp, Homo sapiens
aaatctatatttacttttctatctatacatactaaaaattgtaaatattctgtaggcagaataatggctctccaaagatgcccatattctaattcctaaaacctgtaaacatgttagttaccttatgtggcaaaagagacttcaggtagtagctggaattaagcttgctaatcagctgctcttaataataggaagttttgctgggcgcggtggctcatgcctgtaatcccagcactttgggaggccgaggcaggtggatcatgaggtcaggagatcgagaccatcctggctaacacggtgaaaccccatctctactaaaaaatacaaaaaaattagctgggcrtggtggcaggcatctgtaatcccagctactgaggaggctgaggcaggagaatggtgtgaacccaggaggtggagcttgcagtgagccgagattgcaccactgcactccagcctgggcgacagagcaagactctatctcaaaaaaaaacaaaaaacaaaaaaaaaagaagtttttttccagaattatacaggtacatccaatggaatcacaagggaccttaaaagtgaaaaaggaaggtagtgatgcaatgtgagcatgcctcacctgtcattgctggctttgaagatggaggaagagggc

SEQ ID NO: 761625 - DNA, 600 bp, Homo sapiens
caactccagagggagacattcctataacataaaatgtgaattgtacatcctagagttacacaacgcaagaacttgaggcaaaaaggatgtgaggagaagtatgggagaaataagtcccttatcatgtttcatatcaagtagtcaacaagtattgtttaaaagtgaaacawacaattgaaaggaaacgatggctctacacttaatgatctttgtgttctttcagaaacttaatatttatatactgatatatcgtgtatatgaataattgaagtttaaactcctcgttgtcattcagctgcttctattaaattcaagtaaaaagaaattatattatagttaagaatagcaagaattgtgaaatctcacttttagatacttaggtatctgtgagtaactttttgtggtctttcttattttgctggaatttttaataatatttaccaaaaaaatcattttttttaataaaaatcccccaaacaatgtcctttttagcactgtgacctctccttctcatggcctctagtactcacttttacactgaaggcaatttagatttattttgccagtcagtaactattataaagccatgaagttaatctc

SEQ ID NO: 761626 - DNA, 593 bp, Homo sapiens
acctcctgggtggattttagctaagatgtatgcacatatagataatatggctttgatgtaattttcaaagaacaccacacaaactatatacattttagtttagcttcctaatacattgttttttaacttcaccaactcccctcactatttaacccataatctgaattcatgaccatttgtataagttttttcaggaaaagaattattttgagtagttttaatctgcttttgctaccattggtttacctcaatttattctgctaatcatatcctgaaatttaaatgacttttattttattttattttatttygttttattttatttatttatttattgagacagagcctcactctgtagcccaggctggagtgcagtggcacgatctcagctcactacaacctctgcctcccaggttcaagtgattctcctgcctcagcctcacaaatagctggggttataggcgcctgccactacacccggctaatttcttgtatttttagtagagatggggtttcaccatggtggccaggctggtcttgaactcctgacttcaggtgatccacccaccttggcatcccaaagttctgggatt

SEQ ID NO: 761627 - DNA, 600 bp, Homo sapiens
tgggcaaatttttgtgccaaagatgtaggagctgggctttggaatatactacaggttattctgttggtcaaaatgtggacatttttgctgagagcagagaggtgtaattaaccgtggctctctcagaactataattctgtctccaggtgtctagaaaaggtatgcttaaaattaaaaggagaaatcttacgataatargtaatttactctcttactataaattacagaattaacctccaaatctgttttttctccacataaactacagtaggcagtattctttaaaagttatattctgtgaagcagtgaattatagggtttctaaaactactagctatcatcatttttagaaacatacaactctcttcactaatgcaactgtacttacccaaagttaaaatattatttatttaggtgttgaaaaatttatatagatgcttctttgccaacccatatcatttacagacctatggtaatgtggtgacattttgatttaggcatataaaaatttccctttattagatattttaaataaagtaaagaaaaacttctggaagagacagttttatttttgaggcttctgacagttgtaaatctcag

SEQ ID NO: 761628 - DNA, 621 bp, Homo sapiens
atattaacagatttgcaatacagaaagaataaaaaaacatatcacggatcacattttagccagtattttcacattgcttttcctattttctgatatttatattatcgtaattactgtaaaaccctttcaggaaattcaaaaatgccatgagacttagactatgttggcaaaattgcaaaaatgtatttagaaaagaaatatatttatatttctataatctaggcattacattataaatgacagtaggctagtacaaaaaccatattaaccataggaaataatttgtcaaatcaattgctttgaatttcttgacttataattttgaaggagatatttctgaacaattttctcatgctttcatatagattatcaacactgaatactacaggagggaagaaatatggaggaactgggtaaagggaagtaggatataagcttcaagagatagtagtgaccataactgtattattcaccrtaaataaacctatctctggctcagtgcttggaaaagagtagacattcaacaaatactgttgaatggatgaatatgtgaactaaaactttccagtgcttactctgagtcgattatcactcaatttttacagcaaccttgtgaaataa

SEQ ID NO: 761629 - DNA, 684 bp, Homo sapiens
  misc_feature 140: n = A,T,C or G
aatgaagatgtttagcacagaaaggaggtgtgttcatgttcaaggactgcattataccacagataatgttagacagtcaacagtgagtcatttttgctgagttcataaacacaagctttgtgattggagttctccagctntagatcaactctgtcattatcatgttttaaaatcacaatttaaaacaaaagagtaaaatattgttaagggtcaaccactgaaagctcaggttatgattatataccaaatatgagaatatcgacaagctcctccaagccagggactgtgtcactgcatctgtatatacatgtttgccagatacataagtttcttttcttttttttttctttacatccttaacagcatttgatgatgccactggttttttaactgttgtgatacatgtgtaatgatatttcatwgtggtttttttttacatttctattttttaattatagcatgttaagttttgggatacacgtgcagaacatgcaggtttgttacataggtatacatgtgccatggtgatttgctgtacccatcaatctgtcatctacattaggtatttatcctaatgctatgagtttattttcacctttaagttatcccgcttgagtcaattataatatcaagaaattatatactgcaaaatgtgagagcaataagcacaaaacttacaaaggt

SEQ ID NO: 761630 - DNA, 679 bp, Homo sapiens
ccctggcgtacaggaattgggtgacaggtatgccaagatatggatcccctcaacccttgggagagctggtagattttttttgacataaagagccttgttaactacccttagattgctataaaaatattttcattttttatgtgtgtcatgatatgaaaagtttcagtgtaacgctaggaactaaaatatttttgtagtcaacactggctagcagtacaaaaatttactttagcattcttagccacaatttctaattggtaagcaaacttagaaattccttctttttttctctccaccctcttcacagatggaaatctgaaaaaaatccctatgcattaccaatatgtcagaattttattgaaattttactttgaagtacwctaaattattaaattaaaataatgaataattctttaaaaaatatagtcttctattgaacagaaatgtgtgaggtgtgtccacttagtcaggtttatgttatatcgcttaataattttttagcattctttaggtgggtcacaaaatctctcactaatattaaaccataatactgtacatgcatcaattattaaaatatatatggttttttcattataaattgaacatcttttatttgtataattgattaccattgttacaggaatataagtgaccacatattttttgttcatctgacaag

SEQ ID NO: 761631 - DNA, 559 bp, Homo sapiens
agtgagaccatcagatagccatatatctgcatcacatatgacattttaatattaaactttcagattcaagggaaataaaagaacaacaacaacaaaaatcacttctgtcttgatactaaatctgatttaaaaggcatggtatatacatgttccctgtaaggtcaataatcaattaattttataattaaacactaaaaaaattgacttcakataaaatttgatacaccacttctataagacaatgaaaaatatgtaatctctttttacccagatttccaagaagttcatagtgaaattaaatgtttaatagctgtaactatattgtttttctacttctgttttactaggcataatatatgagagtttaaaagatgtcaaatcacttttaggaagaggaagatcatacagatacctacaatattagtcatgtgcatcaaatgcagatgtgtcgcccaatgtagtttaaatgattttaaatgaagttgttgagctgtattgtaatttattgcattaagaatgttaccctatactttctgactacagtgttactttctcatga

SEQ ID NO: 761632 - DNA, 587 bp, Homo sapiens
caagggatccaggcacatgccaccacacctggctaatttttaaattttttgtagagtcagggtctcattgtattgctcaggttggtctcaaactcctggcctcgagtgatcctccttcctcaacctcccaaaatcctgggattacaagtgtcagtcacctggcccagctagtacatgttttaaagagatgtaaatatttgccatattactgtggagagagtagatgaggggaaaagagtttagtctgtttagtttcctgtgagtgaattcagactagaccctgaaagagtccgtgagtctattaattaactcattttaataaatggcagcctttctgggaaacctcwtggtttctagatgactgctctgggactgtagactcctcctagcagatgtgggacagagatgttactgatgtgaatttatagcatccttaactgccatggaggaatggaaaaccacagatggcagagccatctgctcacagagattctagacactcactcggatggtccaatttcccattggtgttcattatcactgagtggaatggtgatgtgaattttagaaacagaacgtcattggtc

SEQ ID NO: 761633 - DNA, 612 bp, Homo sapiens
tgaggtgttggattcggcagccccttgggtgacgggtgatagcacccgaggccctgccagcctccctgtccctggaggggaggaggcagcagctgtggccccagcacagagcctggccctggggttgtggggagcaatcattgctgagaattgctgtgttctcctaggctccagcatccctggcacccacccttccttgagaactgcccccagtgcccgggygtgggtgtgtgtggggtcactgtgtccctttctgctcacatctttcacaccctttgttccacctgccttttagggggaacctcttcacccggacactgagtgatattgtgagcaaagaggacttcgtgctggattctgaatatctcgtcacacttctggtcatcgtccccaagtgagtgctgggcgatcacgaaggaaaccggccctgcccagtggagaggaaggtggacccgttggtgacttgggcagtgtggacgaggatgctccctgcccagccccagttctcgggaagcagtcattccttcatggggccctgcctgcggctgtcagtagggacagtggttgggtgatggtggttgtggccacgatagaagcagccatttattgagc

SEQ ID NO: 761634 - DNA, 601 bp, Homo sapiens
tcacaggccacctgaaagcctgcacagatgactctggaaatacctggagtctggcggcagcccctatgggcatgggctctgagaaacaggaagggtgaccctgccagcatgccagcatgctgtgagatcgtgtctgggcctgagggctcccacttccagtcttctggccaataggactcagagatgcttagactcctggccccaagaattcctgagttgctagagacagtggccccagtggtcctgtgttgagacttgcttgggaggctgtgtcccattaggactttgtgatattggaagtgaaatggaccttgtaggatagtttccaccactctgctttactatcaggcagcacgtcagagccagggacaccctgtgccagctgyggtgacggaggcccaggagggcttggtctctcaggaatttgataagcgggagctaaagcccaggcccctacactccctgcaccccgaggccccctgaggccttagcctggaggggtgtggaaggggcaggagggaagggcaggcagccaggagttaggaaatctcagggagtgtccttggttccccagccctcagctgctgccatggaccccagg

SEQ ID NO: 761635 - DNA, 601 bp, Homo sapiens
tcacaggccacctgaaagcctgcacagatgactctggaaatacctggagtctggcggcagcccctatgggcatgggctctgagaaacaggaagggtgaccctgccagcatgccagcatgctgtgagatcgtgtctgggcctgagggctcccacttccagtcttctggccaataggactcagagatgcttagactcctggccccaagaattcctgagttgctagagacagtggccccagtggtcctgtgttgagacttgcttgggaggctgtgtcccattaggactttgtgatattggaagtgaaatggaccttgtaggatagtttccaccactctgctttactatcaggcagcacgtcagagccagggacaccctgtgccagctgtggtgacrgaggcccaggagggcttggtctctcaggaatttgataagcgggagctaaagcccaggcccctacactccctgcaccccgaggccccctgaggccttagcctggaggggtgtggaaggggcaggagggaagggcaggcagccaggagttaggaaatctcagggagtgtccttggttccccagccctcagctgctgccatggaccccagg

SEQ ID NO: 761636 - DNA, 588 bp, Homo sapiens
tgcccagtgtcgcctgccccgcacaggctagcaggagactggcactgtgctgccccttcgtcccagctgccatctgcatgggcggaagagtgccctgggccctggtggtgcaaggagggcgggagacagaccctcgcattcctctggtctcagggtcgtgggcctgggtggagggggcacacaccctactggaacagggtgctccaggctgtgcccatggcctcgacactctgcacttcttaaaggggaaatgacaaacggcagcctgttmtttctcttcctcaccctctgaaactacttcctgcccattgaatttctgatacattttaattgaaaaattgatatacagataaagcaaattgggggtaggttggaatgaatagttggagcacagaggatttttaggacagtgaaactactgtgtctgatactataagagtagatgtgtgtcatctccatctgtccagacccatagaatgcacaacaccaagtgtgaaccctaatgtaaactgtgggctctgggggataatgaggtgtcaatgtaggttcattgtaacaaacatgcgggctgctgcggtgtgggatgtt

SEQ ID NO: 761637 - DNA, 599 bp, Homo sapiens
agtagagacgaagtttcaccgtcttggccaggctggtctcaaactcctgatctcaagtgatccacctgcctcggcctcccaaaatgctgggattataggggtgagctaccactcctggccggaaaccttcactttcactatatatatcctttttgtactttgggtttttgtttgtttgtttgagatggggtctcactctgttgtctaggctggagtgcagtggcacaaccatagctcactgcagcctcaagctcctgggttcaagcatttttctcacctcagcctccccagtagctaggactacaggcacacatcaccacatctagctattttttttttttttttttcttaraaacaaggtcttttggctgggcatggtggctcatggcctgtaatcccaacactttgggaggtcgaggcaggtggatcacctgaggtcaggacttcgaaactagcctggaacacatggtgaaaccctgtctctgctaaaaatacaaaagttagctgggcatggtggagggtgtctgtagtcccagctactcaggatgctgaggcaggagaatcacttgaacctgggaggcggaggttgcaatgagcca

SEQ ID NO: 761638 - DNA, 522 bp, Homo sapiens
gaaaggagttaatgggatatgtggtctgtggaattatatgcatagtctcccaacttgtttcaccctttgttgtttttttttttatttttactttttagaaacaggatctttttctgtcacccaggctggagtgcagtgttatgatcacagctcactgcagcctcaactacccaggctcaagagatcctcctacctcygcctcccaaatagctgggatcacaggcatgcaccaccatgtctggctaattttttttctgtttttttttttctttcccatagtgatagggtcttactatatctttgtttattgaaaacaatagaaactctgtgtgccactaataatggctatttttcgctctttttctttatcaggtagactatgaatgggtaaaaaatgacatcttttttgttaagcaacaatttttttgttctttaatgtatatttgaaagtctttaaaattattttgttttcaacatctcagagtgtcagaatttagaagtcattatattttgtgaatttgc

SEQ ID NO: 761639 - DNA, 563 bp, Homo sapiens
tttatatatacattttagaatcggcttgtcaatccctaaaaaaaaaagtctgctgagatttttgactacttaatctgtagatctatagatcaatgattactctgggaagaattgacatcttaatactgagacttctggcccactgacaatatatttctctatttatttaggtcttctttaatttatcttttatactttttggtatatgggttttgtacatcatttctcaaatgtatamctgagtacttcatatttttgatgctattttaaatggtgtttaatggcctatcctctgttcaacaaatattttctgtgcaactaccatgtgccaggatccaaagattctagtccatgctgatgttttctcttttgctcttaccgcctataatacttaatcagtaccatttattctaattgcaccacaaaacttaaataattttttatatgctgctgtattctttaattctttcttgtacatgtcttatctacccaactaaattgcaagccctttgggaatgaaaactataatttatatttatttgtaaatccataatgcttagagt

SEQ ID NO: 761640 - DNA, 598 bp, Homo sapiens
ccatcaacactgtattttattgactgcacggaatgcacagaagtgaccagacaccacacgtttatggggattagcactgtctttccatccctatgatccttggtatcaagatgttaagtgcaacaagttgtaggagtctgttttcttgtgccagatgtgccttttgcaatcagtcactgagtctaggagtttctaagaagagaactccatgagaaaattcatcttcagttttcagtaccacctgatagtttctaagaggtgcatagcagtgggcctagagatgaagccagatggaaatgatctagcawtgtgcaatgggcagtgccctgaggaaaacacccacaaggggtggatggcctcaattctcatctccatgacgatagatcacattaccttagagccttgggccacgtgagtccaattctgaggcctctgacccagctccatcagcccagccgatcttacacaagtctcacccttaggagtacattgtgttaagatggggacagattgcctcacccttacctttctttctggctgggttcacaacttctcttgctctatcatccgatttactccattttctcttcctaaggcc

SEQ ID NO: 761641 - DNA, 533 bp, Homo sapiens
tattatatttccctaaaaggcacatttcacacatttagtagaaaagatacaagtgctaactgtgattagcagttcactttcattaacacattcaaaatgaataggggtttcctaatatttattttataaaataacaggtgttaggaaccgtccagctccacacaatgccttggtgccaatcctagataaggatcacttgtttaggtcttagggtccaggatgtttcgttccatacctgtcaacaatggctcctaaattttggccagaaactaatcagtctgcaggtccttcaaacttccactgctgcccaccgctgccttcctagaacccaatctattggccctggaccaccacasaagttcgttttctgttcctcacttgccttactgccaactaaagggtcaacacgactcctgaactcttcttcagccttagcttaggacactagtgcctagtcaacctcatctccttaagctaatacctagtttcaatcatatcttccgggccctaattatagtctaaacaaaataata

SEQ ID NO: 761642 - DNA, 645 bp, Homo sapiens
tattgcctaactgggataggcctggggtggggctgctgagagctgacaatgccaggccaggaaaggcaagctaaagaccagcaggcaggcctcggggttggaaagctacacagtaaacgggtggagtaccaaagcttagttgtgtgtctagagaattcagggygtggtgagtgatcagctcctggaagagcaaagattagtatttaatacatatgcatttattagcgtggctgggtctctcgtcaaaaatgtcataatttcacagatcaggattttaaagcaaatagaattattgatatatatctcttccaacagccaataaacatcccgcagagaggacagcttacgcatgggctcacacaaagaaaattgcagagtctttgcttaagctacagcctgaaatattaaaattctgattttcatgcgctgttagaaatagttttcaaagaattccttcctccagccccatcacaacccctgcccatgtgagaggttaggagtaaatcatatgttttttaaaacatttgctgaaacctcctcccttttccaagtctaccaaatttttatctcaaaaaaaaaaaaaagaaagaaagaaaaaaatgggactaatatgacaacaagatttttaccttcacagtaaatagt

SEQ ID NO: 761643 - DNA, 642 bp, Homo sapiens
gttagagacagaagccaacatccaatatcgtacagagtgttggctccatttccctcctagcttattttctaccttatgcactcacaagtatttattaagcacctactgtgtagagagctcagagaagcccatgaaatattcaccataagaagaaagaaacagttataaaaccctatcgtggatgtagaataaaaccccagtaacttaccctctccttcataatctggccttttcctggacatttgactctttcttctcccacctccccgatacccaccactttggccacactggcccctttctgtgtttcaaacacttcagcctcatttccrcctcagggcttttgtacttcacattcgctctgccagaaggtcatttctccacctctttacatgtttggctccactttatcatttgagtctcagtttaaatttatttccacagagaggctttccccgattgccctaaagttgccacctgccgtctgccctcatccattgtcatgctctttgacattatgatatttctgtttctttcttatattattattgcattgtctcttattagcatatacttttctatgagagtaggatatggcagtgtcttgtttactgtcatatctgttaatatttgttgaatgaa

SEQ ID NO: 761644 - DNA, 642 bp, Homo sapiens
gttagagacagaagccaacatccaatatcgtacagagtgttggctccatttccctcctagcttattttctaccttatgcactcacaagtatttattaagcacctactgtgtagagagctcagagaagcccatgaaatattcaccataagaagaaagaaacagttataaaaccctatcgtggatgtagaataaaaccccagtaacttaccctctccttcataatctggccttttcctggacatttgactctttcttctcccacctccccgatacccaccactttggccacactggcccctttctgtgtttcaaacacttcagcctcatttccacctcagggcttttgtacttcacattcgctctgccagaaggtcatttctccacctctttacatgtttggctccactttatcatttgagtctcagtttaaatttatttccacagagaggctttccccgattgccctaaagttgccacctgccgtctgccctcrtccattgtcatgctctttgacattatgatatttctgtttctttcttatattattattgcattgtctcttattagcatatacttttctatgagagtaggatatggcagtgtcttgtttactgtcatatctgttaatatttgttgaatgaa

SEQ ID NO: 761645 - DNA, 642 bp, Homo sapiens
gttagagacagaagccaacatccaatatcgtacagagtgttggctccatttccctcctagcttattttctaccttatgcactcacaagtatttattaagcacctactgtgtagagagctcagagaagcccatgaaatattcaccataagaagaaagaaacagttataaaaccctatcgtggatgtagaataaaaccccagtaacttaccctctccttcataatctggccttttcctggacatttgactctttcttctcccacctccccgatacccaccactttggccacactggcccctttctgtgtttcaaacacttcagcctcatttccacctcagggcttttgtacttcacattcgctctgccagaaggtcatttctccacctctttacatgtttggctccactttatcatttgagtctcagtttaaatttatttccacagagaggctttccccgattgccctaaagttgccacctgccgtctgccctcatccattgtcrtgctctttgacattatgatatttctgtttctttcttatattattattgcattgtctcttattagcatatacttttctatgagagtaggatatggcagtgtcttgtttactgtcatatctgttaatatttgttgaatgaa

SEQ ID NO: 761646 - DNA, 468 bp, Homo sapiens
ctcgaccccccaagtgctgggattacaaacgtaagccactgcacccagctaactatttatatttacgtgtaactcacacactgaaaaattttgtgtttaccatctttatttcacctgacaatctgtcctgtaagtagagtatatagcctatttatattttggaaagtaattttaattacctattgcctttttagctataactctttttattaattttattggatgttctaggaatttcaggatgtatccttggcttttcaaagtttacctagagtaaatattgtactagttcttgaaaaatctatacaccttgcaacattatagatwcatttacctctcccaattcccttacactgtagttgtcttacgcattccatctaaatccattacatacactagaatgttataatttttgctttagacagacctaggtattgtgtaaaattaagataaaaatagtctttttta

SEQ ID NO: 761647 - DNA, 625 bp, Homo sapiens
gccttacccttcccttgatcaattaaacccatatattttttaaaatcaaaaagtcaaggtaaactgtgaaagagtgtattgcttataactagtcctggacaatagggattgacattgcctggttgaacagatctggtttctccaaaatatttcaaagctaagtaaggtatcctaccttattgatggttcacacaatgcctgtaagcccctgtaacttggccctctgcacatcagttatgaagatggaagaggacagaagatagacagaagcagcacaggtattctggaaacaaacaatttgctgtactgtgtgaagaagtgatggaacasaaagctgtgttggtgggaaaagctgaattatgaaggactccatgtgtggtactacgcagtttggattttttcatatagcaatagagaacttgtgaagggttttaaacagtagatcacatgaagagccagagacatcctaataggcaaaatggtgacaaagaacatccatttttatttatttattttgcatcaatgtactagttctgaacatttgatccgagtttctaagtgaaaacctaaaagctcgttattcttaaagttatcacattagactcctttgaaactcacaatttat

SEQ ID NO: 761648 - DNA, 620 bp, Homo sapiens
cctactatgaatttattttcctactctatcccctcttagtcctggcatttggatttcaactttcttaaagtatcttccataacatcttggtgtcaccaactcacaaggctcatctgtgtgtgtgtgtgtgtgtgtgaaggaaatagatattgatatttggcttgtttcccaacagcatcttctggcctgatatctttatgatcacaaagcaagaacttacttttattgagtatccacatatacatggtcctcagtcacacaacatggctcaggacataaaacaggttatggaaacacgaactctcaggtgctaggttgtcatggacccttcatcttccctcccacccttgctgccccggccacttctgttctaatgtctactcatttctttatcatttmtcttgactctaaccttgcacctgaatcttgttaactgaatttggtcccctcattttgacctttggtcttttctagggacatgactttaaatcacctctgggtgctcacttttcttgattactgcaggttactacaccaatcctgattctagtactggatgacggggatggtttcgtaagtgaatatactctaacatccagtgaaaggagatcccgcccaaa

SEQ ID NO: 761649 - DNA, 603 bp, Homo sapiens
tagtgccagagaaaccatgacggtcccatatgtaaacaaagggtgtatctctggtccaataaaactgtgtttaccaaaacaggcagaggacaagagttggccagcagactggtttgccaacaccctgtcctaggctagtcctgattcagagagaggttttcacaaagattttgtaaacttccaaatgacaacagcctttttagcagcccccatcaattctactcacctcccataaaccacccacaatactaccccttctctatacagtgggtttctatcgttctttactatttcagctaggcttgaacctggctccttgacagcccacggccaaccttgaatatcctaaactttgtataccagctcragggaagtctgcattcgttgccattcttacatgtagacttgtttacaggaatattatcactgaattcaaggtctggcagatatttttgcttacacaaatacattctaactcaattaactgggaggtgaaggaaaaaagaaagacaatacggaaatgtcaagtcatttggaaccatctgctgtaagagagctcctgagtgtctgtacacaaatattaatctaactcaacaggcatat

SEQ ID NO: 761650 - DNA, 560 bp, Homo sapiens
attctattttttttctttctttctttctttctttctttctttttctttcttctctttctttcttctttctttcttctttttttcatttttttttcttttgagacacactgtcactctgtcccccaggctggagtgcagtagtgcaatctcggcttgctgcaacctctgcctcccaggttcaagcaattctgcctcagcctcccgagtagctgggattacaggtgcacaccaccacacccggctaattttgtatttgtttagtagagacggggtttcaccatgttggccgggctgctctcgatctcctgagctcatgtgatctccccacttcagcctcccaaaatgctgggattamaggcgtgagccaccacacctggcctatttttttttcttagaccctgaaaataatctgaattattctaccctttgaacattttacctttaccaatgattaaattattataccccaaacagtaggaaatgtattaatggtatttctgctatttctggtgtctggggtcatcatagactgggaatagaagctgattagggaggatcag

SEQ ID NO: 761651 - DNA, 608 bp, Homo sapiens
ttctcagaagccaaattattgtttccctacacaccacctcttatgttctgaccaatgacttagaaatcaatgagaacttggcttgcaaaaagcaaacataaagcttcgagtccagttaaattgtggcagctttcaggaagctaatttcgccgattcattaaaataatcgacttttaacagatactgtgacgcacgcaaagatgtagatggcctactctgcctacagagaatttacaytctggcagaggagacaggatgtgtacaccactggtgaaaatactggacacaatacggtaagctaagtgtcaattgcaggatgcatgcttcctgctgagaatttacaagccaataggatcacttccagttgggaggaattagggcaggcttttgagcagggttttgaagatggcttttcctgattctcagaatcaccaaacctctcaaataaacacgttctcagcccccatagcccttttcatacctgttactttgtcattatttttgtggttacgaattaatgtctgtcttcccctctagactggaagctgcatgaggacagggaacatgtctggttctgctcaccataaaatccccagcagctggtaagg

SEQ ID NO: 761652 - DNA, 608 bp, Homo sapiens
actctacacctggcatgggccccgtgtactctcatttattcctcacaatgatgccttgaaacaggtgtcattctctctgaggaagctgaggccaagtgaagctcaccaatcctattgattgatattcttcagtcttaggttggtcaggctgcaaaacctgtgcagcttctacaatctgccttgtggggtagagacagggcaaagggagcaaaatggatggagggcgtgcctgagagaagtggctgcggctgagagcactgtcaaagatgtcttcaaggagcgcaaggaggctgggtgaactgggccctggaagaagacatctcactggagttgttatgtggtcactggttctgtgtgcctcccctagcctggtagttctgtccccctccccatacaactggccccagtaaaaaccaaccagtggtccttggtgcctggtatgattgaaggcttyccattgacaccactagcttttcgtgtaccctgctttccagttggttccaaacttgaccttgacccacccataccccctccctatgacctgtggcttagtcctgtgttcgtggctctcactgcaggctttcctccccagctgtaagccacactca

SEQ ID NO: 761653 - DNA, 590 bp, Homo sapiens
ggcactcaatgccagcccttgagagcagctgaaagggatgaactctgcaaagccacaggggtggagctgcacaaggctttgggggaacccttccaccagtgtgtcttggatgtgacacatggagtcaaaggagattattttggggctttaagatttaatgactgccctgctgggttttggacttacatggggcctgtggtccctttattttggccaatttctcccttatggaacaggagtatttacccaatgcctatattaggagtgactaacttgttttttattttacaggctygtaggtggaagggacttgctttgtctcggatgagactgtggacttttgagttaatgctggaatgagttaagactttgaaggactgttgggagggcatgattgtattttgaaatgtgagaaggacatgagatttgggaggggccaggggcagaatgatacggtttggatctgtgttccacccaaatctcatgtcaaattgtaatccccagtgttggaggtggggcgtggtgggaggtgattggggcatgggggtggatccttcatgaatggtttaacatcattcccttggtgctat

SEQ ID NO: 761654 - DNA, 612 bp, Homo sapiens
cttcaatcagcttgtgccctcctgtaaaaaggcttccatgaattctcttgtcacaggaaatattgatcaaatcacatttttgatgccacgaagctgagggcagacctgggacagatggtgtctcccactgagggagcggaggcccctgggaggtcagtttctcctgctgctgaacaccatcttccaatcacaacagcaaggaattgggaatgtgtcattttagctgtaaaggaatgtacatgcaaaatgtcctgattaatgatkattaaaggaaagaccatttctcttttccccaaacccaacctctttgtcacttcagacccctaagggagcctgtgcaacatcggtgaaggttgctattgacacagggtaccgacatattgatggggcctacatctaccaaaatgaacacgaagttggggaggccatcagggagaagatagcagaaggaaaggtgcggagggaagatatcttctactgtggaaaggtgagatcttgccttcagcctccactggggacagtgagaaggtttcagttgttcattttattattcatcttccgtgtgtgtgtgtgtgtaattgcactcatgagtaggcagtacttaataacagt

SEQ ID NO: 761655 - DNA, 466 bp, Homo sapiens
tgggtaataaaagctcagtggatggctaaatagtagattagatatggtagaagagaaaatttgggaactggaagactagttagaagaaattactaagattataacacagagatacagggaaatgaaaaatatgaagaagtaaaaagttatgaaaaatggaattaataagtctagcacatgtccagtcaaagtctcagaagaaaagaattgacaraatagagaagagataatattcaagggaataatggctgaggactgataaaagatgtaaatccactgatataggacacacaacaaataccaagccagataaatatgacaaaatccaagtacattgtattgaggttaagaacacagaatgtaaaaaaggtgattaaaagcagccaaaaagtaatgaaagaacacctgcaaacgactatagttacagcagactcctcacaataggctgaagatggtggaatatctt

SEQ ID NO: 761656 - DNA, 623 bp, Homo sapiens
gtcggtctggctgatctcaaactcctgacctcaggtgatccacccgcctcagcctcccaaagtgctgggattacaggcatgagccactgcgcctggcccaagtttattgtttaatattcgttataatctcaaaaatcctttttttaataaagcatatgactagttaagtagaagtaagatgttttgttttctatcattttccactgtgattctgtggtatgtcaacacctgcagaaaggccatgtatttccagccctgctctgagagacgagctcattattaaaagtaatttgcataatgactycttttcctctggatagatatccagtagtgagatagctggaccaaatggtagttctacttttagatctttaaggagtctctgcactgttttctatagtggttgtactcgtttatattccaaccagcagtgtaaaagtgttcccttttcaccgcatccccaccaatatcaattattttctgattttttgattatggccattcttgcaggagtaaggtggtatagcattgtggttttgatttgcatttccctgatcattagtgatgttgaacgttttgtcatgtgtttgttggccatttgcatatcttattttggaattgtc

SEQ ID NO: 761657 - DNA, 623 bp, Homo sapiens
gtcggtctggctgatctcaaactcctgacctcaggtgatccacccgcctcagcctcccaaagtgctgggattacaggcatgagccactgcgcctggcccaagtttattgtttaatattcgttataatctcaaaaatcctttttttaataaagcatatgactagttaagtagaagtaagatgttttgttttctatcattttccactgtgattctgtggtatgtcaacacctgcagaaaggccatgtatttccagccctgctctgagagacgagctcattattaaaagtaatttgcataatgactccttttcctctggatagatatccagtagtgagatagctggaccaaatggtagttctacttttagwtctttaaggagtctctgcactgttttctatagtggttgtactcgtttatattccaaccagcagtgtaaaagtgttcccttttcaccgcatccccaccaatatcaattattttctgattttttgattatggccattcttgcaggagtaaggtggtatagcattgtggttttgatttgcatttccctgatcattagtgatgttgaacgttttgtcatgtgtttgttggccatttgcatatcttattttggaattgtc

SEQ ID NO: 761658 - DNA, 504 bp, Homo sapiens
cagtgcctgtgatttccccagccctcagtgctgcgagcgaggcggcccgtgagtaatagcagcgcagcccactctgcagtatgtgggaggacaataaaggtcaaaccacagagtgggcttccagctgccagcacggtggcctctgtcctttcactgcgagggggcttgggaggctcggggaggaaagggaaggctgggtgttaacgtgaggtcctgtcatggtttccgtggtaaaccatgggttttccaggtcttcagattccaggcccaccgccctgtggttgccatctgccagcccctctrgaccagatcaagtgaagtctctctcccagtacccttctagtgaggaagcagacatctggctccttatcattgaagagagaaagcacttatgaaattggattttgatttgtgagagattcaggaacaacagaataataaaactagagatcagtggatccaggcgctttttaaaaaagtcggcattctggggcactttcattg

SEQ ID NO: 761659 - DNA, 564 bp, Homo sapiens
cacgcccggttaattttgagacggggtttcaccaagttagccaggatggtttttttttcccgacctcctgatccgcccgcctcggcctcccaaagggctgggattacagccgtgagacaccgcgcccggcacgcccagctaatttttgtwtttttagtagaaaccgagtttcgccatgttggccaggctgatctcaaactcctaacctcaggtgatccacccacctcggcctccccaagtgctaggatgacaggcgtgagccattgtgcctggcccctcagttcactcttagttcaaaaaaggataattgaatataagctcataatcccgaataatccaacacaaaaaccagtcactggagtcagagtcagcagaaatcatctacagaattagctctacaaatatttccaattatagaaagatggagaccataagtaacgtgtttaaaattgaatgggacttaagctagcaatgagtgagagacttttaaaaaggagatagctattaaaaacaaatcaagtaaacaaaaacacaaatataataggcaaacaataactaaaattg

SEQ ID NO: 761660 - DNA, 625 bp, Homo sapiens
ttgcttaatgatgtgaatacattcttggaagtgcatacaattttatcatcatgcaaataccataaaagtattcttatataaacctatatgttatagtctaccacatacctaggctgtgtgatatagcctattatacctaggctacaaatctgtaaagcargttactataatgattaggccatttaacacaacagcatttgtgtaactaaacatagaaaaagtacagtgaaaatattgcataaaagataaaaagtggtatatctatataaggtacttattatgaatggagctgaaagaactggaagttgctctggatgagtcagtgagtcatggtgagtgaatgtgaagaaacaggatattagtatacactactatagactttataaacactacatttatattaggctacactaaatttattttaaaaattatttctttagtaagttaaacttagtttactgtaacttttttggtgctgtaaattttttatctttttaaaaaacatttcaacccttataggaatgcttaggttaaaacacaaacccattgtttagctgtacaaaacaatattttctaatttaaaaatttttaatctttaaattttttactttttaaaacttttctt

SEQ ID NO: 761661 - DNA, 592 bp, Homo sapiens
ccaatgtcacctgtattattttgcattgctgctagcaatgtctgagtttcaggtgctctacattgtcactagtacttggaattttcagttgtttgtgtgtatgtgtatagttttttgtttgtttttgttcatttgttttkttttggacattctaataacagcgatatgctattccatgtttttaatttgcatttccctagttacatgatgttgaacattttttcatgtttttatttgcttttcataaaacctgtttggtaaagtaacttaaaatatcttacctaattatatatttttaagttactttttgtcttttttatacattgtacatataagtcatttatgagatacatgtttgcaaatatctttttcatatctgtagattgctgtttcattttcttaacagtatattttgaagagcaaaatatcttaattttgattaagcccaactttttatgttttatggttcatactttagtatcccatctaggaaatatttgtctaatctaattttcttctttttttttctagaagtattattcattagctcttacatttaagtttgttaattatttttattcaaaatttataa

SEQ ID NO: 761662 - DNA, 592 bp, Homo sapiens
ccaatgtcacctgtattattttgcattgctgctagcaatgtctgagtttcaggtgctctacattgtcactagtacttggaattttcagttgtttgtgtgtatgtgtatagttttttgtttgtttttgttcatttgttttgttttggacattctaataacagcgatatgctattccatgtttttaatttgcatttccctagttacrtgatgttgaacattttttcatgtttttatttgcttttcataaaacctgtttggtaaagtaacttaaaatatcttacctaattatatatttttaagttactttttgtcttttttatacattgtacatataagtcatttatgagatacatgtttgcaaatatctttttcatatctgtagattgctgtttcattttcttaacagtatattttgaagagcaaaatatcttaattttgattaagcccaactttttatgttttatggttcatactttagtatcccatctaggaaatatttgtctaatctaattttcttctttttttttctagaagtattattcattagctcttacatttaagtttgttaattatttttattcaaaatttataa

SEQ ID NO: 761663 - DNA, 592 bp, Homo sapiens
ccaatgtcacctgtattattttgcattgctgctagcaatgtctgagtttcaggtgctctacattgtcactagtacttggaattttcagttgtttgtgtgtatgtgtatagttttttgtttgtttttgttcatttgttttgttttggacattctaataacagcgatatgctattccatgtttttaatttgcatttccctagttacatgatgttgaacattttttcatgtttttatttgcttttcataaaacctgtttggtaaagtaacttaaaatatcttacctaattatatatttttaagttactttttgtcttttttatayattgtacatataagtcatttatgagatacatgtttgcaaatatctttttcatatctgtagattgctgtttcattttcttaacagtatattttgaagagcaaaatatcttaattttgattaagcccaactttttatgttttatggttcatactttagtatcccatctaggaaatatttgtctaatctaattttcttctttttttttctagaagtattattcattagctcttacatttaagtttgttaattatttttattcaaaatttataa

SEQ ID NO: 761664 - DNA, 592 bp, Homo sapiens
ccaatgtcacctgtattattttgcattgctgctagcaatgtctgagtttcaggtgctctacattgtcactagtacttggaattttcagttgtttgtgtgtatgtgtatagttttttgtttgtttttgttcatttgttttgttttggacattctaataacagcgatatgctattccatgtttttaatttgcatttccctagttacatgatgttgaacattttttcatgtttttatttgcttttcataaaacctgtttggtaaagtaacttaaaatatcttacctaattatatatttttaagttactttttgtcttttttatacattgtacatataagtcatttatgagatacatgtttgcaaatatctttttcatatctgtagattgctgtttcattttcttaacagtatattttgaagagcaaaatatyttaattttgattaagcccaactttttatgttttatggttcatactttagtatcccatctaggaaatatttgtctaatctaattttcttctttttttttctagaagtattattcattagctcttacatttaagtttgttaattatttttattcaaaatttataa

SEQ ID NO: 761665 - DNA, 465 bp, Homo sapiens
atacagggggaggaaagtgtattttctttcgattgtaaataacatgaaggatgtgttttaaattgcttcaggaaaggttgaccttaactgctacttgcagtttccttaaactaagtacactatatcatgcttctgtctctttgcaaatgctatttcttcttcttggcacacgtttttttttttttttyttttgcaagttttttttgacttcacctaccaagcaaagttttccttttcttggcttgtaaaaaattgcatcatcattgttcctgcgttttgcttttatatctcctcccaggcaaaaatcatattttattcacctttaattccccattttatcccagggtcttgaaaatactgttgtttgttgaaaaagtgaaaagttaaatgaaaaaaaaactcttgattaaaaagttataggttaacaaaaataagtcattgggggaaaaaagtgaaacttttgac

SEQ ID NO: 761666 - DNA, 465 bp, Homo sapiens
atacagggggaggaaagtgtattttctttcgattgtaaataacatgaaggatgtgttttaaattgcttcaggaaaggttgaccttaactgctacttgcagtttccttaaactaagtacactatatcatgcttctgtctctttgcaaatgctatttcttcttcttggcacacgttttttttttttttttttttgcaagtttttyttgacttcacctaccaagcaaagttttccttttcttggcttgtaaaaaattgcatcatcattgttcctgcgttttgcttttatatctcctcccaggcaaaaatcatattttattcacctttaattccccattttatcccagggtcttgaaaatactgttgtttgttgaaaaagtgaaaagttaaatgaaaaaaaaactcttgattaaaaagttataggttaacaaaaataagtcattgggggaaaaaagtgaaacttttgac

SEQ ID NO: 761667 - DNA, 653 bp, Homo sapiens
ttggtgctctctattcatttaagtgtttcttatcagcttctgcctagggataaccttctaataaaaatacacatttccttgcccatatgtcacaagtcagctgttcctctaaaggacatacctgtgatcttgaacaatgggttcaaaatatattataaaccagtataatattctaggttttgtttgtttgttttttgttttctgagacagaatctctctctgtcacccaggctggagtgcagtggctygattttggctcactgcaacctctgcctcccaggttcaggtgattctcttgtctcagcctcccgagcaggtgggattacaggtgcatgccactacgcccagctaattggcatttttagtagagacagggtttcaccatgttggccaggctggtcttgaatttctgacctcaagtgatctgcctgcctctgcctgctaaagtgctgggataacaggcatgagccaccatgccaggccctagtttttttatttttattttttattgtttttattgttgctgttgtttgagggaaatactgaaactacaaataaattaacagtcattgccaccaactcatttgatgaaaaccgtttattctaattgcaactgaaaacctggcttttgtgccctcagatcagatgatctg

SEQ ID NO: 761668 - DNA, 614 bp, Homo sapiens
ttgtagattctggctattagccctttgtcagatggatagatcgcaaaaattttctcccattctgtaggttgcccgttcactctgatgagagtttcttttgctgtgcagaagctctttagtttaatcagatcccatttgtcaattttggcttttgttgccattgcatttggtgttttggtcatgaagtctttctccatgcctatgtcstgattggtattataggttatcttctagggtttttatggttttaggtcggacatgtaagcctttaatccatcttgagttaatttttgtataaggtgtaaggaaggggtccagtttcagttttctgcatatggctagccagttttcccacaaccatttattaaatagggaatcctttccccattgcttgtttttgtcaggtttgtcaatctcataccagttagaatggtgatcgttaaaaaggcaggaaacaatagatgctggagaggatgttgagaaatgggcacacttttacactgttggtgggagtgtaaattagttcaaccattgtggaagacagtgtggtgattcttcaaggatctagaaccagaaataccatatgaaccaacaatcccattactgggtatata

SEQ ID NO: 761669 - DNA, 463 bp, Homo sapiens
agaaatgcttcccaggagctaagcgatgctttgtgactaagctctcaccaatggagcaagagtggaagtgacaggcagacctgctgagccacctccttaaatacaatgtgtttcctctttactttctctctttcctcctcaccatgaacaggaacttggatacatagtgtgaaccattcttacctaggtaggtgasaaacacactggagggtgacagagcaccatgggagaaggaagaaggaagaagtatccacccatggatgctcgggtaatttagtggagaggagctacctacagcatgcatcacatgcctaacggatctgaggaaaaattagaagttgacctggacccagaatactgaatttttgaatcccattctttaccagccatctattatccttttaggtgcacaagaaaattgtatatgtaaatgaggatttagtttcaaactctagttctctgc

SEQ ID NO: 761670 - DNA, 616 bp, Homo sapiens
tattttggagctcattgaggcctatggcaaaaagggaatatcccaggataaaaactagaaggaagctatctgagaaactgctgtgcaatgtatgcattcaactcgcagagtgaaaacttttctttctttcagcagtttggaaacactgtttttgtagattctgtgaagggatatttgggagcgcattgtggcctctggtgaaaaaagaaatatcaacagataaagtctagaaagaagctttctgtgaaactgctttctgatgtgtgcattaatctcacagagctaaacctttctttggattcagcagtttggaaacactgtttatttcaatctgggaatggacatttttgagctcatgaggccaaagatgaaaaaacgaatatcccaggataaaaactagaaggaagctatctgagaaacagctttgagatgtgtgcattcatcttgcagagttcaacctttcttttcrttcagcagtttggaaacactgttttggtagaatctgcaaagggatatttgtgagctcattgaggcctatggtgaagaaagaaatatcatcagataaaaattagaaaaaagccttatgagaaactgctttgtgatttgtgcattcatc

SEQ ID NO: 761671 - DNA, 484 bp, Homo sapiens
tttctgagaaactgctttgtgatgtgtgcattcatctgacagatgtaaacttttctttggattcagcagtttgcaaaaactggattcagccgtttttgtccattctacaaatggacatatgggagtacattaaggctaatggcataaaagcgaatatcccacgataaaaactagaataaaactacctgagaaactgcttcatgacgtatgcattcatcttgcagacttaagcctttctttttattcagcagtttggaaacaatgctttttatttttttttttagaatctgtgaagggatatttgggagctcrttaaggccaaaggtgaaaaagtaaatattctagtataaaaagtagaaggaagctatctgagaaacccctttgtgatgtgtacatttatctcacagagttaaacctttcttttcattcagcagtttggaaacactgtttttgtagtatctgccaagggatatttgggaacgca

SEQ ID NO: 761672 - DNA, 552 bp, Homo sapiens
atatatatatatatatatgaaaattagccaggcatgatggcatgtgcctgtagtcctagctactcaagaggctgaggctggaggatcacttgaatccaggagttcaaaaaagctgtagtgacctacgatcacaccactacactctagactgggtgacagagagtgagatgctgtttccaaagagagagagagagagacaacactgcatttgttattcagtcattgaataaatatttgttaagcatctattgtgtgcttygtattgatctagacactgggacacaatggtgaaaacacggacaaggtcccagttctcatgacatttatattctagtgtctgtgtggggaagagatacataataaacaagtaacaataaatgaagatgattttagttgttaagagcaataaagaaaatggagaagagtggcatggttgtgcttgaatgatagaggatgagtgaggatggagtaatttagactaaaggattggaggaattctcactgagaaagtgatgcttgagctaagactgcaaagatagacctgttaagata

SEQ ID NO: 761673 - DNA, 561 bp, Homo sapiens
tccaaacagcttagtttcctattccaccagccatactgggtggcaatggcctatgcagactacgagtgcatcacatgtgccttcactcctcctgcttgtctatctcaggctcatggtgctcaaagaacaggggtggaatgggtctcttgcatgtgccatgatgagtactgttcattatctgttcagaagactactaaatcccttcaatttttcccagtccacatcgatagtttcccttcccctctgctccaaaaatcttttagtttagataaaaatcacatgtctaaactgcaaatgctttttaactgcaactaatcccagaggccaattagaagcttaaagccatattccttctaataaactatatatattattratgagtccaaagaatattcaggatattatttattttctatcaattcaaaggaataattatttccagacttttttaaaacctttttataattttcttttttttagagaaagggtctcactgtggtgcccaagctggactgcagtggcacaatcatagctcactgtgactcaaactcctgggctcag

SEQ ID NO: 761674 - DNA, 663 bp, Homo sapiens
agggttactgcccatgccatacaactgaggtctcttcatcaccattggatccattgggctgccctgtgaagacataaaagaagtcggtttattaattcattctttattacaaaggcacaaatttgtgttatgtcaacatatgcattaataacacaactatccttaagttttaaaaatattaaaacaatgacctgacaaaacatccagcaagacattaaagaaaaaacctagatggatacaagaaattttattttttacttttaggagtttttaacaaytaagagagctctagactaaacaaaactaaaaacgagggtggaccataagcagagagaaaacatttgcatctaaaattctattatgcgtacaggaaaagagcatgatagttaagctcacccacctccttttagcttactagtaataagagcagagggtattgagtgattaacattttctgccttcaaagtattcttagaacaatgattttattttagaactgagtctgcaagtcttgatcaaaccttagtgcaaccgagtgttcattaaaaagtgaaaagatagattttagatcatgcatatgtccagggtaaagattttgttcagagaccagcagtgtgtagggatgagcactcagactatgagtcacagcacctctccccatgt

SEQ ID NO: 761675 - DNA, 618 bp, Homo sapiens
gtggcctactgctttgtattctaaaatgcttttggaagtggagtaacaggaggaataagtcctgaccactggatttggcaagaaccatttcagtgggatgttcatgacagcagcctagtatagacgactgctggggtgttttgcgctaaagagaatcagataattagggtggtarattgagggagatgtggggagattcattttaagttgggatataacatagaatatttgtgagctaatcagaataatctggtaaaaagagagaaatgtatgatgtaggagagaaggggataatttcaacattgataactgtgaaaggctgaggaggaatgagattccatatccaaagagagcttgacaaaagacaggagggggccacttcttgcattgcggtggaagagaagcagagaatttgggagtatcaatgcagataaatggtggatttgatgttagttctttcagggaattcttttctgattacttttatttttcattagtgtattagggttctccagagaagcaaaaccaatagaagatatatgtgtagatataaataaaaagagatttattatggagattggcacacatgattatggaggctgagaagcgacatctcta

SEQ ID NO: 761676 - DNA, 618 bp, Homo sapiens
gtggcctactgctttgtattctaaaatgcttttggaagtggagtaacaggaggaataagtcctgaccactggatttggcaagaaccatttcagtgggatgttcatgacagcagcctagtatagacgactgctggggtgttttgcgctaaagagaatcagataattagggtggtagattgagggagatgtggggagattcattttaagttgggatataacatagaatatttgtgagctaatcaraataatctggtaaaaagagagaaatgtatgatgtaggagagaaggggataatttcaacattgataactgtgaaaggctgaggaggaatgagattccatatccaaagagagcttgacaaaagacaggagggggccacttcttgcattgcggtggaagagaagcagagaatttgggagtatcaatgcagataaatggtggatttgatgttagttctttcagggaattcttttctgattacttttatttttcattagtgtattagggttctccagagaagcaaaaccaatagaagatatatgtgtagatataaataaaaagagatttattatggagattggcacacatgattatggaggctgagaagcgacatctcta

SEQ ID NO: 761677 - DNA, 548 bp, Homo sapiens
tccttcaatgttggtagaattcagagaagccatttgggcttttttctttctcagaaggcttttaattgtggcttcaattcccttgtaatagatataggaatattaggatatctctcttcttgagtgagttttggaagtttgtatctttcaaagacttttttctacttcatctaagacatcaatttataggcatagttgctcataatatttcctttttatccttttaatgtctataataatgtgatatctataataatgtcctatctttcattcctgatattggttggtttgtgttatctctttcttggtaagtcaggctaaagattgatcaatattattaacattttcaaaaataattttgttgttgtattgattttattgattktttattggttttcaaattttaaaaatatcactgatttctgtttatcttttcatttttcttccttctacttgctttagttttaatttgcttttatttgtctagattcctaagatcaataattggatgtctgatttgagatcttcattcttttctaatataagca

SEQ ID NO: 761678 - DNA, 626 bp, Homo sapiens
caattaatgaaataagaaatacaaccaagagaatctgcaatagaatagatcaagcagaagaaaaaaatgtctgaacttgaggacaggtcttttaaaataacagaaaaccaaatactgcatgttctcactaataagtgggaactaaatgatgagaactcaggaacacaaagaagggaacaacagacattgggatatacttgagggtgaagggtggatggagggagaggaccagaagaaataactattgagtattaggcttaataccagagtgatgaaataatctgtacaacagacccctgtgacacaagtttacctgtataacaaaccttcttatgtacccccaaacctaaaataaawattttttaaaaacctagttagaacacaaaggagaaaagaatgaaaaagaatgaagaatgcctgcacgacatatgggacattataaagtgacaaggattcaaattttggtgtcccagaagatgaagagtaaaccaaaggcttagaaaagctatgtaatgaaataatagctggtaagttcccaaatcttgcaagagatgtagacttccagatagaggaagctcacagatccccaaacagattcaacccaaaaaggtcttctccaaggaatg

SEQ ID NO: 761679 - DNA, 626 bp, Homo sapiens
caattaatgaaataagaaatacaaccaagagaatctgcaatagaatagatcaagcagaagaaaaaaatgtctgaacttgaggacaggtcttttaaaataacagaaaaccaaatactgcatgttctcactaataagtgggaactaaatgatgagaactcaggaacacaaagaagggaacaacagacattgggatatacttgagggtgaagggtggatggagggagaggaccagaagaaataactattgagtattaggcttaataccagagtgatgaaataatctgtacaacagacccctgtgacacaagtttacctgtataacaaaccttcttatgtacccccaaacctaaaataaaawttttttaaaaacctagttagaacacaaaggagaaaagaatgaaaaagaatgaagaatgcctgcacgacatatgggacattataaagtgacaaggattcaaattttggtgtcccagaagatgaagagtaaaccaaaggcttagaaaagctatgtaatgaaataatagctggtaagttcccaaatcttgcaagagatgtagacttccagatagaggaagctcacagatccccaaacagattcaacccaaaaaggtcttctccaaggaatg

SEQ ID NO: 761680 - DNA, 575 bp, Homo sapiens
tttagtaaaatgaggccctttaaataatattttgcaattatcttttcaggaacagagtcctttgcatgaaaaaaaaaatctaagaagtaaaatttaaccagaatcttcacttgttaaaactgataagtttatagctgctctgatcctcacgttgcaggtgggatagggcagcaggtgcaaagaaaggaggatgacttcagtcccaaaccattctactcacccacagtctcccacttcaaactgagccaaggttaaggcactcttttcacttccggcacacatagraactgataatgtttgtgtagctcacctaggcagatggatgggctgatggcaggactgggtgaaagtgaatgacttgggggtttagcttagacttggcggggggtctaaggtcacttcaaagctgagggaatgatgaattgggtacacctaggtcaatctgtagcatgctagttggaaatcagctcttccttaagacacaaacatagaacaaaagactcctaagagcagttcaaaaaccactagttggtccctgagccctctttgggctcagagaatggccaggtaaacaa

SEQ ID NO: 761681 - DNA, 631 bp, Homo sapiens
gtatcaggcttaaatactaggtcttctaatcagtagcttgggaaacttttaatcatcttttcccatatgtagactgaggatgattataacattacccataccctaggtttgctgaaagtattaaaaataaatcaagcatgtaaagcacttagctcaccgtctggaacacagtaagcayttaatgaaatgtagctggcatactcatcaatagcatcttcaataccatcagtattatcatttttattattacttaggaagactgttaattgaaaagaatgagattacatggttcaccaaaacatttctcccttttggaaaagaacatcaatattttcttagtaaataattttataggtagttctgcttctatttagaatgtattaatttggaaagaatgtcaatccctcctacacaaacaataaaaaagaaaagctggataaactggaaaatcacaatatttattatcattacacctcaaagaggtggattggcagagaaatcaagtaggctgaaatccaaggagaaataccctacctcacccccaaggagaagtgggacactagacgacctcatctgtaagagaggaaaagaaaaacatggggccaccataaaaataggttaaaaggtatca

SEQ ID NO: 761682 - DNA, 631 bp, Homo sapiens
  misc_feature 594, 595, 596, 597, 598, 599, 600, 601, 602, 603, 604, 605,606, 607, 608, 609, 610, 611, 612, 613, 614, 615, 616, 617,618, 619, 620, 621, 622, 623, 624, 625, 626, 627, 628, 629,630, 631: n = A,T,C or G
cttcatctcaaataggtttatctgcttgtaaatataatattctttgttgtagtttaaaatccattcacctcattaatatgtaattatggttttatgttggttttagactaaggaactgaatacaattaatttgaaattttgaaattaatttgtattttaatattttgctttaagtttcatattttcaataataggtgggcttaagtataagacttattcaaggctaattttgcatcacttctggttcagctttcagactttttcagttcttcartagggccccccagaaaatcatctctagggaagaaagttggaagggacaccaatcttactctcattctttcttgctagtacaagaatgaaaacaagttaacaggtataactgtttttctctttctgctaggctgaatgacccaagggtattttttttctttttttttaaagagaactctatctacttaggtctaaatatggttcttaaaagcaatttttaaaatataaggcattgtatttgctaaaattcaaagtgatatatggggaaggccaaaatcccagcacaatgtcaaagagcacaagaaagaataactgaattcnnnnnnnnnnnnnnnnnnnnnnnnnnnnnnnnnnnnnn

SEQ ID NO: 761683 - DNA, 578 bp, Homo sapiens
gcatttggccctggagctgctactgaacgtacattgcagtggtggttcaagaagttttgcaaaggagacagagccctgaagatgaggagtttggtggcaggccatcggaagttgacaacgaccaattgagaccagtcatcaaagctgatctcttacaactacacaagaagaactcaaggtcgaccattctaggtcatttggcatttgaagcaaattggaaaggagaaaagsctcaataagtgagtgcctcatgaactgagcgaaaataaaaaaaaaaaatcatcagtttgaagtgtcatctcctcttattctatgcaacaacaaaccacttcttgatcggattgtgacgtatgagaaaaagtggattttatacaacaatgaccagctcagtggttaggcagagaagaagctccaaagcacttcccaaagtcaaacttgcaccaaaaaaaaggtcatggtcacagtttggtggtctgctgctggtctgacacactacggctttctgactcacggtgaaaccattacatctgagaaatacgctcagagaatcgatgagatgcactgaaaactgcaatgcc

SEQ ID NO: 761684 - DNA, 647 bp, Homo sapiens
ccaaagcacttcccaaagtcaaacttgcaccaaaaaaaaggtcatggtcacagtttggtggtctgctgctggtctgacacactacggctttctgactcacggtgaaaccattacatctgagaaatacgctcagagaatcgatgagatgcactgaaaactgcaatgcctgcagctggcattggtcaacagaaagggcccaattcttctccacgacaatgctcgtggagcacacattccacattccacgacacattccacaaccaacacctcaaaaattgaacaaattgggctaccaagttttgccttatccaccatattcaccggacctctygccaaccagctaccacttcttcaagcatctcgacaactttttgcagggaaaacacttccataaccagcaggatgcagaaaatgcttttcaagagttcatcaaatcccgaagccgggatttttacaccacagggataaacaaacttatttatcattggcaaaaatgtgttgattctaatggttcctgttttgattaataaagatgtgtttgagcctagttacaatgatttaacattcatggtctgaaagtgcaatcacttttgcacggacctaatataaaattagaggaaggaaatcaagtctctaaaatattaagt

SEQ ID NO: 761685 - DNA, 647 bp, Homo sapiens
ccaaagcacttcccaaagtcaaacttgcaccaaaaaaaaggtcatggtcacagtttggtggtctgctgctggtctgacacactacggctttctgactcacggtgaaaccattacatctgagaaatacgctcagagaatcgatgagatgcactgaaaactgcaatgcctgcagctggcattggtcaacagaaagggcccaattcttctccacgacaatgctcgtggagcacacattccacattccacgacacattccacaaccaacacctcaaaaattgaacaaattgggctaccaagttttgccttatccaccatattcaccggacctcttgccaaccagctaccacttcttcaagcatctcgacaactttttgcagggaaaacacttccataaccagcaggatgcagaaaatgcttttcaagagttcatcaaatyccgaagccgggatttttacaccacagggataaacaaacttatttatcattggcaaaaatgtgttgattctaatggttcctgttttgattaataaagatgtgtttgagcctagttacaatgatttaacattcatggtctgaaagtgcaatcacttttgcacggacctaatataaaattagaggaaggaaatcaagtctctaaaatattaagt

SEQ ID NO: 761686 - DNA, 539 bp, Homo sapiens
atgagacatcttaaaatttttcattcactgggattctgtcttctaagcattgaagttaagcaatttccatgtttgttttgccatttaaaatgattacactaaatggaatcaacaaactgtgaattggaacatctaggactcgtatagtttagaagtacagcttcatctgttggctaatacacattgtcatgttgctgatccctgtaagactaattgactggtggtggcatttcagaagcaaaaatgtgacattttactaaaggccaaaggtaatgtgtrcacttattgtaaagttagaaagggtgactcattctctctacatctatttctacaaaaatttacagaagctgaggtgattttaattgtcttgaaatcatgttttcagagccagaagggacctctgctatcttgttatacaacttcttgattctaaatgtgaattatttaagattctacatctagacagacaaatttatttttcaaactgcaggttataaactatctaatgcttaatcaaaataagcttaatgggtagtgac

SEQ ID NO: 761687 - DNA, 579 bp, Homo sapiens
gagttgtttttagtttggggcttatatgaatatgaatatttttaaatcggctttaaaaatattaagataggaatacaacaaaatattcaaggtcacttttagttagcattacgaatctgaatattacattaccagttttttttccacaaatgatttttaaagtcatttatatgatgcttttatggcaacaagcagtttaaaactaggaaacagatgattttacaaaagytcagaggcaaattacaaaataaggactgctggagaattgaaacatttcgtggggtactagaagaatctgtcgtttttgaaagtctcttcaaagtctaatagtcatactgctttgtttttcaggagaggaaatggagaccaagagtctggtttggaaagagtaccagactacaaatgaagtgctcctgtttagctttaactaactgacattaagagaaactaacttttctaagcctgaatttgttaggctttgctcatgctcagtttcccagccttcttgggaattttcaaactatttgtaaaatggtttgttctcccctaatttttaatgtcatcataggaccagaaatt

SEQ ID NO: 761688 - DNA, 612 bp, Homo sapiens
tcctgtttagctttaactaactgacattaagagaaactaacttttctaagcctgaatttgttaggctttgctcatgctcagtttcccagccttcttgggaattttcaaactatttgtaaaatggtttgttctcccctaatttttaatgtcatcataggaccagaaattctttgcaggtgtcttagaggcygacaagtcatacgtggatgatggatagaataggaaggggagctgcaggcagaacaaggcctgttttatatactgatactctaaattcataaaaacctgttcgaaaggttttgcttttagaatctgataaaagtgatgcattggatccttgcaagtttatgtctttgggttttattttctatttttgattttggttttgtggttttctgctgttcttccacgtctgaatccctttctagtgttcggatggcacaagtcaccacctctagaagcaaaaacttcaacctcctgtgtatctgaggcacctcgccctgactggtaaagcaaagaaactggataggagaaggcctgtgttgagggcatcaatggctaactgtcagcagggacaacagccattatcccatatccagtgagtacaacagg

SEQ ID NO: 761689 - DNA, 612 bp, Homo sapiens
tcctgtttagctttaactaactgacattaagagaaactaacttttctaagcctgaatttgttaggctttgctcatgctcagtttcccagccttcttgggaattttcaaactatttgtaaaatggtttgttctcccctaatttttaatgtcatcataggaccagaaattctttgcaggtgtcttagaggctgacaagtcatacgtggatgatggatagaataggaaggggagctgcaggcagaacaaggcctgttttatataytgatactctaaattcataaaaacctgttcgaaaggttttgcttttagaatctgataaaagtgatgcattggatccttgcaagtttatgtctttgggttttattttctatttttgattttggttttgtggttttctgctgttcttccacgtctgaatccctttctagtgttcggatggcacaagtcaccacctctagaagcaaaaacttcaacctcctgtgtatctgaggcacctcgccctgactggtaaagcaaagaaactggataggagaaggcctgtgttgagggcatcaatggctaactgtcagcagggacaacagccattatcccatatccagtgagtacaacagg

SEQ ID NO: 761690 - DNA, 612 bp, Homo sapiens
tcctgtttagctttaactaactgacattaagagaaactaacttttctaagcctgaatttgttaggctttgctcatgctcagtttcccagccttcttgggaattttcaaactatttgtaaaatggtttgttctcccctaatttttaatgtcatcataggaccagaaattctttgcaggtgtcttagaggctgacaagtcatacgtggatgatggatagaataggaaggggagctgcaggcagaacaaggcctgttttatatactgatactctaaattcataaaaacctgttcgaaaggttttgcttttagaatctgataaaagtgatgcattggatccttgcaagtttatgtctttgggttttattttctatttttgattttggttttgtggttttctgctgttcttccacgtctgaatccctttctagtgttyggatggcacaagtcaccacctctagaagcaaaaacttcaacctcctgtgtatctgaggcacctcgccctgactggtaaagcaaagaaactggataggagaaggcctgtgttgagggcatcaatggctaactgtcagcagggacaacagccattatcccatatccagtgagtacaacagg

SEQ ID NO: 761691 - DNA, 692 bp, Homo sapiens
tcgctctgtcgcccaggctggagtgcagtggcgcgatctcagctcactgcaagctccgcctcccgggttcacaccattctcctgcctcagactcctgagtagctgggactacaggcacccgccaccacgcccgcctaaattttttgtatttttagtagagatggggtttcaccgtgttagccgggatggtcttgatctcctgacctcgtgatcctcccaccttggcctcccaaagtgctgggattagaggcgtgrgccaccgcacccggccgatataatttattttttgaaaagttaaagagaagttgaagaagaagacacactaaaggaagagaacaagagtgattccaagttctggtaccctacctaggggggccttgctgctctcgggcagcctggagcttgtcaagtgctcttcattgctttgggacaaatgggggtgttgtcagtgtccttgtccttgtcattctttcttaaaccatcatatcccccatgtgctgagcgacatgccaaaacttcagggggtgtttcctgctttgtgttccaggaaactcccaaattcccagctgatgctgatgctacaggttcagacaccagatgttgaggcaccctcctaccccaccccaaaaaagcaacactctcacaatgtggagagaaagaagagccaggaaagccatctttaacaccatctt

SEQ ID NO: 761692 - DNA, 424 bp, Homo sapiens
actaatttttcaaatttcttgtagagatagagtcttgttttgttgcccaggctggtctcgaactcctgccctgaagtgatcctcctgcctcagcctyccaaagtgttaggattaaaagtgtgagccaccaagccctgcccatgatcaattttaacttgcaattgcatcatttaagaaaaaagttttattcagagctagtagctacagctagcagtacattcagttgctggtaacaaaatccagacagactgaacaaagtagggatcatattctctcatgtaaggacaaactaaaataaagctgtcctgggctggtatgaaagctcaaaggttaatagagaaccagactcccatctttctttagggcatggctttgcatcttcaagcacacatatgatgtttcctagaactccagacattgtgaa

SEQ ID NO: 761693 - DNA, 609 bp, Homo sapiens
ctgggcacagtggctcacgcctgtaatcccagcactgtgggaggccgaggcaggtgaatcacaaggtcaggagatcgagaccatcctggctaacatagtgaaaccctgtctctactaaaaatacaaaaaattagctgggcgtggtggcgggcgcctgtagtcccagctactctggaggctgaggcaggacaatggcgtgaacccaggaggtggagcttgcagtgagccgagatcgagtcactgcactccagcctgggtgacagagggagactccgtctcagaaacaaacaaacaaaaaaaaccatgcaattgaatttaaaaaaagttcaaattacttgaatagacatttaacaaaagaggatatacaaatacatgacaggcacataaaaaratgtgtgacattattatcagtgaagttaacaattaataataaaataatttcagtgaaacaatgggagtttttaagtaatttcagccacagcatccaagtcacatgttgatattttgaaaaattcttgaggcttcaaaaagaagatgtttagtattttgttatataccacataagcgattatgaggtatattaatttattggttattaagaagtatgtt

SEQ ID NO: 761694 - DNA, 616 bp, Homo sapiens
gcctgcactttcctgtgcacaccaggctgtttctggccttggtggtgtctaaactgtgcttatctttgttggctgagatttcagaacaccactaatcttataatcacagaaaggtgaagatagatcttaaaagaccagcccactcagcagcccccttttatagactakgaagctgaggttcagagacacatgaattgcctgaggcttctcagccagctgggaatttccagaattccctggaatgtgtctttaggattctttctaattcctagagagtctccccctttcagatgcctttctctttctttcctttctgcttcccctctcttttccttcttgcctcctctgtacacgaacacgacaaaggatatctccctgccagtccctcccttattggacattctatgttataacctgtaatcttgaaatggggctcttcctctgttactccttactctggtttggatttcttgaccttggacttgctattctttgtgagttgattcctatttgcatacttgtttactcacaggcctgacctgcgttactaccctcatccccctcacctgcctcgatcctcataactcgggcctcagctagaagagtttactctcct

SEQ ID NO: 761695 - DNA, 592 bp, Homo sapiens
cttcagttttctcatcaataaaaggaattaaaatagcaccataggtctccatgagcctaaaggttagtaaaaggaccctggagccagctcagatttcaggatctgagctgacacaaccctgctcctggaatggtttctcaggtgcaatgtgcccaggcagccatgaatatatcctatgaggtgtttatagtgaagagtaccaattggtatcatctgtaaagaaaggcattaattcattcactcatttgtttaggtactccttgtttcagaaaggatgaatgccagtttatgaatatatgtgaaataaaaacagaataacaagcagataagcatgtggatcagaaagaggaaagcaaaagccagggcagtgatttcagagctagaagcaggtctaaaatgarcatctggtaccatacaggttgacgtaagactaggtgtgtgtgtgcgtgtgtgtgtgtgtgcatgtatatgtatgtattggacctgtgtgatatgtcactaagcctcaagtcacaaaatcacacatattaagatatacttatcatgatagatttatgataagttagtcattagatattctaccaccagaatt

SEQ ID NO: 761696 - DNA, 579 bp, Homo sapiens
gtttaagggaagcagagcataaaagttcagaaaacttgcagcctgatgatgcaatagaaaagaaaaacccattttctgaggagacattcaagccagctgtagaaatttgcttaagtaacgaggagccaaatgttaattgccaagaaaatagggaaaatgtctccagggcatgtcagaggtcttcatggcagcccctcctatcacacgcccagaggcctaggaggaaaaaatggcttgctgggctgggcccagggccttgctgctttgtgaagtcttgggacttggtgtcctgggtcctagctgtggctaaaagggaccaaggtacagtttgggtcctggcttcagagggtgcaaaccccaagcattgacagcttccacgtggtgttgagctgcaagrtgcacagaagtccagaactgaggtttgggaatcttcatttagaattcagagaatgtatggaaatgcctggatgtccagacagaagtttgctgcgggggtgaagccctcagggagaacctttgctagggcagtgtggaagggaaatacagtgttggagcccccacacagagtccctactgggg

SEQ ID NO: 761697 - DNA, 606 bp, Homo sapiens
agtcttaattcatttcagcattaactcaaaagtccacattccaatgtctcatctgagacaaggcaagttccttctgcctatgtgcctgtaaaatcaaaagccaatcagtcacttcctagatacaatgggggtacaggcattgtgtaaatacagctgttccaagtgggagaaattggccaaatcaaaagggctacaggccccatgcaagtccawaatccagcggggcagtcaaatcttaaagctccaaaatgatctcctttgactccttgtctcacatccaggtcacgctgatgcaagaggtaggttcctatggtcttgggcagctcctccctggtggctttacagtgtacagccttcctcttggctgctttcatgggctggcgttgagtgtctacggcttttccaggtgcacggtgcaagttgttggtggatctactattctggcgtctggtggacagtggtcctcttctcacagctccaccaggtggtgcctcagtagggactctgtgtgggggctccaaccccatatttctcttccacactgccctagcaaaggttctccatgagggctctgcccctgcagcaaacttttgactggggatccag

SEQ ID NO: 761698 - DNA, 554 bp, Homo sapiens
agcaaaaaaaaaaaaaaaaaaaggtttttgcttatgcttcatatcataagcaaaaaaagaaaaaaggtaaattggactacatcaaaatttgaaacttctgtacataaaaggacattatcaagaaagtgacaactgacagaatgggaaaaaatatttgcaaatcatgttatctagaatatacaaagaactcctataactcaagaacaaaatgataaaccacccaattgaaaataagaaaagtacttgaacagataatttgccaaaggaaatatccaagtggacaataagcacaagaaaagatgctcaacatcattagtcagtagggaaatgcaaataaaaccacattaaggtaccacttcmtacccattaggatagctatattaaaacaaaacaacagaatacaagtgttgacaaggatgtggagaaatatgaacccttgagcattgctgctgggaatgtaaaatggtacagtaactgtggaagacagtatccaggttcctcataaagttaaacaatatcactccttggtatatacccaaaataattgaatccat

SEQ ID NO: 761699 - DNA, 551 bp, Homo sapiens
taacaattactgagcactcattatgtacagacatcatgctaagcactttacaggtaataatttatttaatcctaacaacaactctacaaagtaggccactattactatcatcctcattttacagattgacaacagaatgttgaaaataacaagctctggtaaattagaagaaccaggattctaaccgaggcagtctggccacagagcyccagcccttaacccactaccctgcactgtccttcacaaactctcacttttacaaagttaactgcgacttaagaaatgttaagtaatctgcccaaggtcatgcaaatagagtggtagagctggatttcaactctgattataaatccatttctggagcctggactacccatgctatataatccaatccattcacaccaccacccattgggtgtttctttgctacacagcacactggccctcaataatcactacccagcaaccaattctctctgacaaatccagacaaaagaatcaaaaggcagactgggcatcaagctacatgggttgtttgactctcatataag

SEQ ID NO: 761700 - DNA, 463 bp, Homo sapiens
tctttttttaaaagaaaggggtttgtttgtttttaagagaagctactctctctttttttttttttttttttttttggatggattagcatttccaaactttctttttaagttcttataattaccccctatttcagacatatcactgtcaatttatgctggggaagtggagaaaagaaattagattttatcctgattttctcttactcacttcatctcctgagagctgaatttgctacataactagctgggtaagatggagaaacttgtacatcaaaaaaacagtaagggacagggactgtgacctcctgttctatggggaaraactgcctcagtaatgctcagttcctgctgagactgccagcctccccatcttaactgtagcgtggccttcacctgagaaacacagtcaaagtagatactgtttcctcttcctgagcctgcgtggatttcaaagcattcacta

SEQ ID NO: 761701 - DNA, 567 bp, Homo sapiens
tttatcaatatgactcatgggtctctggcagtcatgtggccttgactctccttcttcccctattggtcacttgctctcttccctgccagcataaaaaaaaaaaaaaaagaaagcttcagccaggcatggtggctcacgcctgtaatcccagcactttgggaggccaaggcgggcagatcatgaggycaggagttcaagaccagcctggcaaacatgatgaaacctcatctctattaaaaatacaaaaaaattagccgggtatagtggcagtcgtctgtaatcccagctactagggaggctgaggcagtagaattgcttgaacccaggaggcggtggttgcagtgagccaaggtcgcaccactgcactgcagcctgggtgacagagcaagactccatctcggaaaaaaaaaaaaaaaaaaaaaaaaaagcttttaactttgtcaatcccttgtacacaaatatgtctgagctcactggcatgagagtaactgccctcaagagggagcagagatgaacaaagccactctacacaggctctgtcaccatctgtgcttgccagcaaaaaca

SEQ ID NO: 761702 - DNA, 567 bp, Homo sapiens
tttatcaatatgactcatgggtctctggcagtcatgtggccttgactctccttcttcccctattggtcacttgctctcttccctgccagcataaaaaaaaaaaaaaaagaaagcttcagccaggcatggtggctcacgcctgtaatcccagcactttgggaggccaaggcgggcagatcatgaggccaggagttcaagaccagcctggcaaacatgatgaaacctcatctctattaaaaatacaaaaaaattagccgggtatagtggcagtcgtctgtaatcccagctactagggaggctgaggcagtagaattgcttgaacccaggaggcggtggttgcagtgagccaaggtcgcaccactgcactgcagcctgggtgacagagcaagactccatctcggaaaaaaaaaaaaaaaaaaaaaaaaaagcttytaactttgtcaatcccttgtacacaaatatgtctgagctcactggcatgagagtaactgccctcaagagggagcagagatgaacaaagccactctacacaggctctgtcaccatctgtgcttgccagcaaaaaca

SEQ ID NO: 761703 - DNA, 577 bp, Homo sapiens
caaagtcaggagatcaagaccatcctggctaacatggtgaaaccccgtctctactaaaaatacaaaaaattagccgagcatggtggcgggcgcctatagtcccagctactcaggaggatgaggcaggcaaatggtgtgaacccaggaggtggagcttgcagtgagccgagatcccgccactgcactccagcctgggcgacagagcaagactccttcccaaaaaaaaaaaaaaaaaaaaaagaaaragtaaaatatttagtctcatcaaatgatcgcaaattagtaaaatgctatattattttcacctattcacaatattagaaaggtaatattcagtgtttactggggtgtgataaacacatacacagtgttacacagtgttgatgacttataaattgacccaaaagcttgtggaaaagagtttagaagttaaccccttttaaaaacatgtacacctttttacaatgcaatttttcttctagaaatctattctacacagaaatatataaatgttacatataatgatgtttattatactatatttgcaaaaccaaatttttgaaataatctaagtaat

SEQ ID NO: 761704 - DNA, 577 bp, Homo sapiens
caaagtcaggagatcaagaccatcctggctaacatggtgaaaccccgtctctactaaaaatacaaaaaattagccgagcatggtggcgggcgcctatagtcccagctactcaggaggatgaggcaggcaaatggtgtgaacccaggaggtggagcttgcagtgagccgagatcccgccactgcactccagcctgggcgacagagcaagactccttcccaaaaaaaaaaaaaaaaaaaaaagaaagagtaaaatatttagtctcatcaaatgatcgcaaattagtaaaatgctatattattttcacctattcacaatattagaaaggtaatattcagtgtttactggggtgtgataaamacatacacagtgttacacagtgttgatgacttataaattgacccaaaagcttgtggaaaagagtttagaagttaaccccttttaaaaacatgtacacctttttacaatgcaatttttcttctagaaatctattctacacagaaatatataaatgttacatataatgatgtttattatactatatttgcaaaaccaaatttttgaaataatctaagtaat

SEQ ID NO: 761705 - DNA, 577 bp, Homo sapiens
caaagtcaggagatcaagaccatcctggctaacatggtgaaaccccgtctctactaaaaatacaaaaaattagccgagcatggtggcgggcgcctatagtcccagctactcaggaggatgaggcaggcaaatggtgtgaacccaggaggtggagcttgcagtgagccgagatcccgccactgcactccagcctgggcgacagagcaagactccttcccaaaaaaaaaaaaaaaaaaaaaagaaagagtaaaatatttagtctcatcaaatgatcgcaaattagtaaaatgctatattattttcacctattcacaatattagaaaggtaatattcagtgtttactggggtgtgataaacacatacacagtgttayacagtgttgatgacttataaattgacccaaaagcttgtggaaaagagtttagaagttaaccccttttaaaaacatgtacacctttttacaatgcaatttttcttctagaaatctattctacacagaaatatataaatgttacatataatgatgtttattatactatatttgcaaaaccaaatttttgaaataatctaagtaat

SEQ ID NO: 761706 - DNA, 547 bp, Homo sapiens
atgcaaacaggtcaaaatgaagggtagaaggagaggtaaataaaggagcataagacgggaaaacaaaaattgtgagagaaaggttattgggttaagtttttcaaatttttaatttgttttggttaaaatgtcttttaagaaaacaaatgtaaaatatgcattttctttggaacctttttcataccaagacaaatagaagacaatgggatgttttgcttccttttggtcgccaaatgcctttcaaatggcaaaagaaaagattatgtaaaaaaaaaaaaaaatcccraagatatcaccaggagcttaaattacctggaaaaactatgacatatataaagaggcatagagaaatgtggcttataatgtgattatgcatcatgagcacaagtgtaacccacaggacatgcatacttagactgaatcaaacctctgaaagtttggtaatagttggctctaagttttgtttctgcttgttatgtttggagcttgtaaactaaggtctgcttgtcttaaatcctaaacacagcaacctgtgagtcccaggaga

SEQ ID NO: 761707 - DNA, 547 bp, Homo sapiens
atgcaaacaggtcaaaatgaagggtagaaggagaggtaaataaaggagcataagacgggaaaacaaaaattgtgagagaaaggttattgggttaagtttttcaaatttttaatttgttttggttaaaatgtcttttaagaaaacaaatgtaaaatatgcattttctttggaacctttttcataccaagacaaatagaagacaatgggatgttttgcttccttttggtcgccaaatgcctttcaaatggcaaaagaaaagattatgtaaaaaaaaaaaaaaatcccaaagatatcaccaggagcttaaattacctggaaaaactatgacatatakaaagaggcatagagaaatgtggcttataatgtgattatgcatcatgagcacaagtgtaacccacaggacatgcatacttagactgaatcaaacctctgaaagtttggtaatagttggctctaagttttgtttctgcttgttatgtttggagcttgtaaactaaggtctgcttgtcttaaatcctaaacacagcaacctgtgagtcccaggaga

SEQ ID NO: 761708 - DNA, 629 bp, Homo sapiens
ctatgtagtaattgttctgatctgacaatttctatggactgttttaagatttttaaaagcttgactttttttcttttttaaagttaatacattcccttagcacttaacccatatttaatacaaagacttagatgtgttttcttcctttcagattttaggcaaatttgttgagacaattctgtttgtcatttcttaaacaaaaatgaaaatttaccaaaatactctgtgtgctagaatggtattatggaaaattaatatttttatttttattgcaaacattattataatctgtttaatttttgcgattaacaagtatcacggctccactaaagtacacattcatttgattcacacctttctaaaggactaactatagattgttttattttctaacaagcaacagatgcaagaatgcagtttgaaataaggtagcgtggaattgggctattttccttttaactgtgytctaactttgaattgcttttttatgttccttgtaaaccttattttgccacagattgctttctacctgtcttttttattttacaccaattttggcaatccaggtgcctttaagagtccatcaaagaaattagatcatcttggcagccaacatgcttgggactgct

SEQ ID NO: 761709 - DNA, 669 bp, Homo sapiens
agtttgaaataaggtagcgtggaattgggctattttccttttaactgtgctctaactttgaattgcttttttatgttccttgtaaaccttattttgccacagattgctttctacctgtcttttttattttacaccaattttggcaatccaggtgcctttaagagtccatcaaagaaattagatcatcttggcagccaacatgcttgggactgctttatatacatcctttgcttcacagwgcaaaatacttttaacatggatgtctagccagtaggtgtgaacatatatacaaaaaattaaacaccaatatttgaatacattgagaaaaggagacttcctgctgaatatatggtaggtacaacagcaggcagagtcacatttttgccatctgtgcattttaaaatatgaataaataaagtttcttaacaaataaaatgattactcaacagatggagtgaagttaggaaatttagacaacatcctcatagagtagaatgttctaatataagcctagtttacaataacaaaatttggtttaccctttagagttttgaaaacaaaacacaacaaaatttctcagactcatttattctgtcctcttgttgctttccaacaggacagtttcaatcacagggagacttctgcactctcttttaaaacagctattgc

SEQ ID NO: 761710 - DNA, 615 bp, Homo sapiens
tacagttctatgggtgagtagttgcatatatgtcctgtgaactaaaatcaagatgctgtcagggctgcattattttctagtgctctagggaagaatgcatttttctggccttttccaagtttcagaagatgcccacatttcttggctcatggcctccttcctccatcttcaaagccagctagcttgcatcttttcaaaggtgcttcctcatgatctctctccatattcaaagccagctagcttgcatcttttcaaagctgcttcctcacgatctctctctctctctctcttctccacaaatatgaaagattctttgtacctacatgaatagtttggccccaccaagataatccaagataatcttcacatatcaagrtccttaaccttaatcctatgtgcaaaatccttttgctacatatgataacatattcatcaattctgcagatttgagcatagatgtctctgggggccctttattcagcctaacacatctttgcttgttttgggagatttgaaatgtagtaattttttatttacttcagagggaatattcaaacataacccagactactgaaaatttcactaaggtgatatatccttgaattgatctgaacc

SEQ ID NO: 761711 - DNA, 604 bp, Homo sapiens
aaataaaacacatgagatattatctccacccaatttacatggctatcatcaaaaagacaaaaaaaattacagatgctagtgagaacgcagagaaacaagaatgatgttacactgctggtgggaatgtaaattagtacgaaatgtatggaaaacagtacgaagatccttcgaaaaactaaaagtagatctaccatataagctgacaatcctaatactgattatgtatccaaaagaaaagaattctgtgtrtcaaagaaatagctgcatacccatgtatattgcagaactattcacaatagccaagttatgtaatcaatctaattatacatcaatggataaattgataaagaaaatgtggtatttacacacaataaatgttattcagccataaaaaggaattaaatattgtcattagaaggaacataaatggaactgggggacagagtgttaagtaaaataagccaggcataaaagacaaatattgtatgttctcacttgcatgtggaaggaaaaaaaaatgatatcatggaagtaaagaagagaataatgattacttgatcctgggaaatgaggggaaattaaaagagtctgattaatgaataca

SEQ ID NO: 761712 - DNA, 641 bp, Homo sapiens
atccatcattcctccccatttaagagatctgtgcacggagactcacatcaatgcttgaggagacacaaagccaaatgccgaagttgatttgaccatgagttatgcacaggattatgatttgattaggagtttgtgcaccaggctgtcatcgcaatctctccagtatcttttgtctttcctgttgtgtagtttagatgatattttgaatagtatagtttaattaatactgtgatgatatacaacatttgatttataaaatttaaactatatctttcttgtcttcttaacaaaattattgatcactttctgtktctttttagcttccataacattatagttcccatgtaacaatttataattatctaaatttttgccatgcgttattgaggaaaaaatcttaaatgcatatctgctaaaagttatacaaattacactgatggtatcgtgtacatcaatccattatcttgtaagctttctctataaaggagaaaatgaaacaaaaatgacaagaaaataatttatagtaccttacagacaagatgttttcatgaagaaatgagttaaataagaagttttaaataagttaaaaggcctatagaaaatttctattttcatacagttgcatactaaatccttaacct

SEQ ID NO: 761713 - DNA, 641 bp, Homo sapiens
atccatcattcctccccatttaagagatctgtgcacggagactcacatcaatgcttgaggagacacaaagccaaatgccgaagttgatttgaccatgagttatgcacaggattatgatttgattaggagtttgtgcaccaggctgtcatcgcaatctctccagtatcttttgtctttcctgttgtgtagtttagatgatattttgaatagtatagtttaattaatactgtgatgatatacaacatttgatttataaaatttaaactatatctttcttgtcttcttaacaaaattattgatcactttctgtgtctttttagcttccataacattatagttcccatgtaacaatttataattatctaaatttttgccatgcgttattgaggaaaaaatcttaaatgcatatctgctaaaagttatacaaattacactgatggtatygtgtacatcaatccattatcttgtaagctttctctataaaggagaaaatgaaacaaaaatgacaagaaaataatttatagtaccttacagacaagatgttttcatgaagaaatgagttaaataagaagttttaaataagttaaaaggcctatagaaaatttctattttcatacagttgcatactaaatccttaacct

SEQ ID NO: 761714 - DNA, 614 bp, Homo sapiens
ttctcccacctcccaatctccctttttttattttgtgtataatctcatgtgctgttttcatttcattgtaattttcttcataattaagaatctatgacttatttcctttccctatcatttcctttctcgtaacatagcaaaacaatgtggcaaaatcagtgatttgttacttaagtaatgtaatcagtgctyatttaaaaaaacaaaaaaagaatattttaatcatattttttctttatgagtctctacttgtttgcacatatttgtagtagggaaaaaagttgatatagtaaacattattttccttccttttctttttctttattctagcagttgctcattgaatcaactggtataccgaaattctgtcttttgagcaaaggcataggtcccagacagtggagtgggaagaaatatgtagagacagtgtctgggggaaaagggaagaaaagaagaatatttgtgcactctaacagcagagacaactcatatgctatttctttgcatctgaatgaagtcaacaaaactcatggggaacagacactgttctctgagttctacaaaaaaacagagcctgaggcaaagaacccgtatgttaacaattatttggcaag

SEQ ID NO: 761715 - DNA, 481 bp, Homo sapiens
tttaaatcaaaaattatataatatgcttctttgtattgtcccaggactttgaatatatagtaattatatattactttgaaatattttgctaaacaagacactaatgacagtaatgtaattatttttcttagtaagaggtcttacatgtgctagctaagcatttgttgactgaacgaatgtattttatccatgtttatcttgaagtttagaatatataattccattagggccaaccatcattgaggtcattgtgatattgctattttaagaacatattagtttgcatattcagtttattttgaacaaatgcataragtatcagaaaaacacaaataaactctctaaatgcaactgttaaaaaaagaaattaccacagagcatgcaattattgcattataaccatgaaaaattaaattacagtttctgttcagtattgaatttttcactttttgatattagagataaatcacattttaaattt

SEQ ID NO: 761716 - DNA, 583 bp, Homo sapiens
aatcttttctttttgaccttttctcttaaccaccatttagatttaatttctgcatttcattttcactctcattgtcacaagttttatttggcttattgttatgagtctcaggttaaattaattatgcctatgagttctaattttcacatgcctttaattaaatgtgttttaatggtagtaccataaatttattttattttttcattaacatatagaaaataatttctatttgtggccttaagtacaatgtgaaaccaaaaataagtctgcactaaacatgagatatgtatatctttgattgtagkttattttatgaaaggcttttcaatgtttagcatcgctgtttatatccatgattgtcccaaaggttggatccaaagtttatggggcaagagtgggggtggggctggtcatgaatggctccttacattcattgtcagtaatagtagtagatgctttctgttgtataaatttgaaagtattcaaatctattctcagtttaccctatcaatatgtaaaatatcaagaacttttttatgtttctttagttttagggataaaacatactttcttttatatttat

SEQ ID NO: 761717 - DNA, 611 bp, Homo sapiens
gatatctaagtgaactgtatgcactggcaagtctaaatagagaaagtgactgttaagaggtatctttgagaatggtacagtttgactatgtgacaaaagcttaaaaggcatgaagataggaaatgttaaggtatggttaaaaagtagaatagggtatttgaactgcagcagtgttcatatacaggtgtaataaaaaatacagttgtgaaaggtaaattgtggactaattaaggagggccctgaagtgcatattagaaaggataaatttgattatagaagcaagtttaggtaaaatttgattttaaaatattttctttttggagtatatgtgggaaagttttggtattakagctctttgaagatgggtcttgggtggtccagggttagaaaatagagtaaagtgatacggtttattcgccatctaagatgccatccttagaaaaatataaaaagtgaagaccaatatttatgtagcaaatatttatggtagtgctacaaataaaatgaaaacctggaagtgatttaaatacctcacaacatgagatttattaataaattatgtatgcccagatatcgtaccattaaaaaaatgtttataaagaacattcagt

SEQ ID NO: 761718 - DNA, 578 bp, Homo sapiens; identical to SEQ ID NO: 740671

SEQ ID NO: 761719 - DNA, 600 bp, Homo sapiens
aaaactgacagaactaaaaggagaaatagactgacccacagtcgtaattggaggttttcacattctctgagataaagcaagcagatatcaattctatcagtaaaatatttgaaaaactcttattaacaaacttgatcaaattaatatttataaacagactactaacaactggagaacaaacttttcaaatatacataaattattaacaatgtaaaccatatgccttattctttaggtaattcgttttatgtttcacaggattgattcattcagaatatgytccctggccatagtgaaaattaactataactcaatatcaaaaagataattaaaattgccaacatttgggggtttttgggttatcaacgcatttctaaatagaccatgagtcacagaagaaatcacaatgggcattaggaagtattctgaagcataaataatgaaaatatatcaaaatctgtgaaatgatgctaaaacagtgtttacagggtaaggtactggctttaaatgcttatattaaaaaaataaaagctttaaagaatgatctcaagtgtctagtaaaaaaaaaaaaaggattctcaaagaaagaaggtagggaac

SEQ ID NO: 761720 - DNA, 600 bp, Homo sapiens
aaaactgacagaactaaaaggagaaatagactgacccacagtcgtaattggaggttttcacattctctgagataaagcaagcagatatcaattctatcagtaaaatatttgaaaaactcttattaacaaacttgatcaaattaatatttataaacagactactaacaactggagaacaaacttttcaaatatacataaattattaacaatgtaaaccatatgccttattctttaggtaattcgttttatgtttcacaggattgattcattcagaatatgttccctggccatagtgaaaattaactataactcaatatcaaaaagataattaaaattgccaacatttgggggtttttgggttatcaacgcatttctaaatagaccatgagtcacagaagaaatcacaatgggcattaggaartattctgaagcataaataatgaaaatatatcaaaatctgtgaaatgatgctaaaacagtgtttacagggtaaggtactggctttaaatgcttatattaaaaaaataaaagctttaaagaatgatctcaagtgtctagtaaaaaaaaaaaaaggattctcaaagaaagaaggtagggaac

SEQ ID NO: 761721 - DNA, 543 bp, Homo sapiens
accctgtacaccaaaccccatcacagggtctgctttcagaggcagactttcaacagaataacaaaaataagagcagaaatcaatggaaaaagatagatctacatgacagaaaatcaacaaaactaaaagtatgtgttctttgaaaggtcaaaaacattaataaacatctagccagactcatttagaagaaaaggagaggaaaaaagcactcaataaaaattgtttktttcacattgataccatcaaaatatagaacattttcatcctcacaagaatcactcatgttgcccttgcacagccacaaccacctccctctcctcaccccctgtccctagtgcgtggaaaccactaatcagttccccattctgtaattttatcttttgaagaatattatataaatgaaatcatagagtatgatttttgtgattttttttcttcactcaacataattccctggagattcatccaaattgttgtgtatattagcagttcatttcttttttattgctgagtagtttctcacgttatggatctacaagttca

SEQ ID NO: 761722 - DNA, 575 bp, Homo sapiens
atgatcttttaaaactaagtccatctataactggcatattttttctgtaaagcataggtgtcatgtttctaggaaaacagtttcagatacatgtgctatgttctcaagttcttcttactgaagaaagattaaacaaattatgattttttttctcaaagcaaatattttgcatcctactataactaagaatcactattggtcaatttcaggaatttcctctctggtttttttaaaagaccatttggcagattgaattttttcttcttacatttaaatagttgtttcaaatccatattttataagtattttgtctttttacagttgaatctaccattttagttaaaaatctttaagtaactggaaaaaataagagaaaaatatgctcttgctaaatttatatattttatcaaataaaaatgtatactaaattataratttttctacactgtgctgctcatgtagatcctgcttatactaccattattatgaaaacttggggttgagaaatttagaagttgagaaaaaacatagagatcttccaagccaactgataatcacagaaaattaactgttct

SEQ ID NO: 761723 - DNA, 658 bp, Homo sapiens
attgtaattgttttggccttaattatcttttaaaaaacatttaaaaagaattttaaaaaattatttccagtgttattcattacttttatatccagctttccatccggtattaatttccctcatcctgaaagacttcttttaacatttcttatactatggggctgctgattataaattctttcagcttttctatgttatgaaaaagtctgtattttattatttatttatttatttatttatttatttatttatttattttttgagatggagtctcgctctgttgccaaggctggagtgcagtgacgcgatctcggctcactgcaacctccacctcctgggttcaggtcattctcctgtctcagcctcctgagtagctgggcctacaggcacccgccaccacacccggccaattttttgtatttttaatagagatggggtttcaccgggttagctaggatggtctcgatctcctgacctcatgatccgaccrcctcagcctcccaaagtgctgagatcacaggcgtgagccaccgtgcctggcgaaaaagtctttattttatcttggttttggaaaaatatttttcctgggtataaaattccagggtgatagtttttttcttttcttccagtcttttaaaaaatatttctcaatgccttc

SEQ ID NO: 761724 - DNA, 594 bp, Homo sapiens
cttgaagaatgagacaatttagactgcaaaatatttgtgaaacttaaatataagaaatgttgaaaactgggataggaagacatctgtgtacattggctcttcctgaatggcaatagctgactcacacttttcatatgtatgaatagtcgtctacacactcactgccttcccttccctccattgcaaagtcattgtttgtttttctctttctccaaatagtaaccagttattttctcagagaaggatwttcctcatctgtaaaatgtagatggtaatttttacctctttgtatttatgaggatttaagcaattgtgtctgaagcacctgatgcaaagcaagtgctggtgattgttagtcccacttcctctgtctgcctggccaagagatagcaaatgcatcacatacgtgttctattccctattttaagaccaggttagacaataagaatcttcgtaatactttcagagcctaaaaagagccttagcatccctttcagcacaacactttagacagctaccatcaatcagatggagtttacacatgagagaacgtatttgtcatctcgtcctagattataaactcattgaagggat

SEQ ID NO: 761725 - DNA, 618 bp, Homo sapiens
aggtttttaacttctttgccatgggttcgaactttctcctttagctcagagtagtttgatcgtctgaagccttcttctctcaactcatcaaagtcattctccatccatctttgttctgttgctggtgaggagctgcattcctttggaggaggagaggtgctctgatttttagagtttccagtagctgaaactggatcccttccttacactttatacaaaaattaattcaagatggattaaagacttaaatgttagacctgaagccataaaaaccctagaagaagagttagrcaatactgttcagtacatacgtatgggcaaggacttcatgtctaaaacaccaaaagcaatggcagcaaaagcgaaaattgacaaatgggatctaattaaactaaagagcttctgcacagcaaaagaaactaccatcagagtgcacaggcgacctacagaatgggaaaaagttttggcaatctacccatctgaaaaagggctaatatccagaatctacaacgaactcaaatttacaagaaaaaaacaaacaaccccatcaacaagtgggcgaagaatatgaacaggcacttctcaaaagagacatttatgcagccaacagacacatga

SEQ ID NO: 761726 - DNA, 658 bp, Homo sapiens
ccagaaaatgaattagtgttgatctgtgataaacttttcactggtctgtgataaagtaaggagagaaattatttatttatttatacatgtctgtaaaatgttgacaaatatcattttggggcgaaggattgctatattttcacctgaaattatatccttcatattttttataccaaaatcatggtgacaacagatagtagttacttttttaaagcccttatttaaataaatcaaatgctgaccattctacatacattcccaattgaaaagagaattgtctctggaatttgaatgttgatataatgattaaaactyatcttaagtcagaaagatcttacttcttatcctgactttgccaattgttagtcaagtgacattatgtctcaattagacttcttcaacttctgtttaaaattagaatgatgatagtgtttagaacagtacttttattcaaatgtgataggaaatgtttacctgttaatacattattacgttacacagtagactccttcagtgctaggccttgtttccctgtccaacattctattctcagcacttcatcagttgctaaatatatatatgtttgatccctctttaacactgtcaacttttgctttatatattttgaagttacgttcttttgtatatacaagtttag

SEQ ID NO: 761727 - DNA, 630 bp, Homo sapiens
gtagtttttgtattcttcctagatttttcagtttgttgttcagttaatgtgattaataacacagtagaattcagatatctatttaactattttttttgtttgccccatcttttctttattcctttattcctcctttcttctctacttttagattaataaaaatttttccttaccccatttttatttctttattggcctatttgttacagattattttattaatttttcagtggctatcataaatattacactatgcatttttgatttaatacagtctatctaaaattagtaacttaatcgcatcctaaataatgcaagactactaccatacttgaactccatttatttccctcttgccctttgtgtaattattgtcacatattttacttctatcatatgtacygtgttttgaatgcatccccaaagtgtgctggaaacttggtcccagtgcatcggtgttgagaggtgggatctttggaaggtgattgggtcaagagggctctgattcatgaatggatgaatccattcatggattaatgagttattgaaggagtgggctaattattttgagcatgaatctgcataaaagccagtttggctgtctcttatgagctgcctcaccaaatgatg

SEQ ID NO: 761728 - DNA, 636 bp, Homo sapiens
tttttcggtatactttgtacacaattctatatgttacttagaattttaactcctggtaacctaattttcagttaacacctagaaagcaagacagtttgagctgtctgtcacataacagtactttctagatgagaataatattataatttttagaaacatttaacagaacatattttttatgtgtattaatagacccaaatatatttcgtgtttctatgaaatataaggagccaacatgaaattacatttatgctcagcaatttgtttcatttaaaaaaatttatttggaaatgactcaaacatttaatgagtacctaccatagctcactgtagcctcaaactcctgggtttgatcagttcttctgcctcagcctcccaagtagttgggactacaggtatgtgccaccatgccccaactaattaatttttttttaagagatggtgtcttgctatgttgcccaggctggtgtaaatggtttctttctaaagttatattttcygtttgttgtttacaataggaatataattgactttagtatacttatatctgacatacttgttgaactcattcatttaaatgatttatagagttcttttctacatttcttatagaggtcatcattaccttcaaatttt

SEQ ID NO: 761729 - DNA, 562 bp, Homo sapiens
ctttattccttgtaatttacaccgtatgtcaaaaggattattacttcataattttatgatgtctaaaatctgagggatagtccagaattacaatatgcatagcatagcatagtgtaatattacagaacaccatattttcctactcccctttttgcatcgttcaccatatactcattcacttcaaaaggatgcaataattacagctcattgtgtgactagtatactatgtttaaaatattccttctcatttatgatggattgactgcaaatttttcactctttccttgcaatgttcctttgccgtttctcccatcatggcctagagcctgcttcagtgctcctttgaatctgggctggctttgtggcttgtttctcacactaaaatgcaagaaagtgacagagtgccagtttcacacttargctacaaatgcctttgtgctcctccactctgtcttgggattcctacgtctaccatgagatcaaactcaggttcgcgttctggaggatgagatgccactcggagcagaaccattttttccagcagattcatgtaaatcaacct

SEQ ID NO: 761730 - DNA, 669 bp, Homo sapiens
acagaattagctcatggccctgctctgtcactaactagctgtgtgaaatgtggataagttacttaatcttttatgcctcaatttcatcattgtgaaaacagtaatagcattataatcaattcctctgtggctggtgaaaagatgataataggcacacatgtttagatggccatcaaatcatggttaccttcccattctgagtgcagatccaattgagataggcataatgaggcataaggaagtgaagatgttggctgcattatgagaaaggtaattggaaagcatgactttagacctacagccaagagtgtttaccagtactttaccctcaatcagacttactaacccagtcactagtgcaaccgagttactacaggcttcccctgaagcggcactgcatagcacagggcagtccagagtgcacccatctgcctggcagactggctcctaaacaagcctggatggacttcagccttaccttttaaaaactcatgtattagagatgtctttcctcctctktggcatgaacaagcaatacaaagaggaattagaaataatgatctactctgattgaattttctccagaagaaagaaagtttttcataaaatggagcccagtaccatgcataatagaagtttctgctgaatattccatcttattatcactat

SEQ ID NO: 761731 - DNA, 615 bp, Homo sapiens
actaagctaaacactgctggcgtaaaaaagatataatacatgtgcccagttattggcataataaatgtaagatgtctattaaatatccaagtggagatgtcaaggaggcaatgagatgaacaagcccagaggttacatgagaggtccaggctggagacataaatttgraagtgttgggttatagatgacatttaaagcctcgagacctgatgagctcaccaagggagagagtctagattgcaaagaaaaaacatctaggcttgggctgtttggaggactgtaatgttggtatacaagattcttccatggtctgaaggaggagacttcctgctctgtgtgaagtttcaaggcagctctaattaaatttgaatgcataaatgttatattgcctataatttactttaaaatgctttagcaaaaacatggtaaacgatgcatttgttgttcagttttgatctacaccctagggtggttagttccttttgaactacagtgatcaggaatacacactttaagggcaatcagcatttgagaggcccatcaaaagcttgcactacggaagtggtccagctatctgaattcccattaacccagcaggtgtgccctgtagctgat

SEQ ID NO: 761732 - DNA, 615 bp, Homo sapiens
actaagctaaacactgctggcgtaaaaaagatataatacatgtgcccagttattggcataataaatgtaagatgtctattaaatatccaagtggagatgtcaaggaggcaatgagatgaacaagcccagaggttacatgagaggtccaggctggagacataaatttggaagtgttgggttatagatgacatttaaagcctcgagacctgatgagctcaccaagggagagagtctagattgcaaagaaaaaacatctaggcttgggctgtttggaggactgtaatgttggtatacaagattcttccakggtctgaaggaggagacttcctgctctgtgtgaagtttcaaggcagctctaattaaatttgaatgcataaatgttatattgcctataatttactttaaaatgctttagcaaaaacatggtaaacgatgcatttgttgttcagttttgatctacaccctagggtggttagttccttttgaactacagtgatcaggaatacacactttaagggcaatcagcatttgagaggcccatcaaaagcttgcactacggaagtggtccagctatctgaattcccattaacccagcaggtgtgccctgtagctgat

SEQ ID NO: 761733 - DNA, 592 bp, Homo sapiens
gctatatattgtcatatatacattcaagttctattaattggtctactatttttgacatttcatcttcacttttgttatctttgagaggaattcaatattaggatgaattatgtttgtctctgaaaaaaataggtattgggtattttctaccaaagagaatttcattctaacacctgtctatcaggtagatattaacatttgccttatttaattgatgaagaaactcaagctaaatgaacgcaacttcctgcaagtcacccakctaggaagtggttagagataggattcaagccttgagctcattaacccttcaccttgttgcctgctaacaattagaattacattttttggcctaagtcttcttgcatctttgttccaaataaacagctatttatttttcctctaacacactcagtaaacatagcagatctttgctttgtacttaatctgtgttgtcatctgatcttgtttctgtctagccacatttccactaagctttgagttttgcaatttgtctgtttggctgaaatttccagttgttcagcaaacgttggaggaaatcatcctataaacaattctgacatcaagtata

SEQ ID NO: 761734 - DNA, 559 bp, Homo sapiens
aagtgtttaatccatcttgagttaatttttgtgtatggtgagaagattcttcttcatgtggcaatccaattttcccagcaccatttatttaatagagaaccctttccccactgtgtttatttttgttgactttggcaaagataagttggctgtagctatgtggctttatttctgggttctctattctgttacattgatctgtgcttctatttttgtaccagtatcatgttgttttggttactatagccttgtaatataatttgaagtcaggtagagtgatgcctccagatttgttctttttgcttaggattgctttggctctgtgggctcttttttggttacatataaatattargaatgtttttttctaattctgtgaaaaatgacattggtaatttgacagaggtgaattgaatctgtaaattttttaggcagttcggccattttaatgatatcgattcttctgatccgtgagcatggtacgtttcttccattttcttgtgtcatctatgaattctttcaccagtgttttgtagtagagatcttttacctccttggt

SEQ ID NO: 761735 - DNA, 574 bp, Homo sapiens
cactgaacacacagtcaggaagaaatgtgtccagtgattctcatgagccggtgaaagtcatctccaaatgatatgggttggctctgttgccctactcaaatctcatcttgaattgtaatgcccatgtgtggagagagggaggtgtttggatcatgggggtagtttcccccatgttgttctcatgatagtgagtgagtgctgatgagatctratggctttataagtatttgatagttcatctttcatatgcactctcacctgccaccatgtaagaaatgcttgcttccccttctgccatgattgtgcgtttcctgaggcctccctagccatgcagaactgtgagtcaattaaacctataaattacccagtcttgggcagtcctttatagcaatatgaaaatggactagtacagttaattagtacaaagagtggggtactgctagaaagatacagaaaatatggaagcaactttggaactgggtaatgggcagaggttgatagagtttggagggctcagaagacaggaagatgagggaaaaattcgatcttcctaggattatttaatggttttgac

SEQ ID NO: 761736 - DNA, 634 bp, Homo sapiens
ttgatagttcatctttcatatgcactctcacctgccaccatgtaagaaatgcttgcttccccttctgccatgattgtgcgtttcctgaggcctccctagccatgcagaactgtgagtcaattaaacctataaattacccagtcttgggcagtcctttatagcaatatgaaaatggactagtacagttaattagtacaaagagtggggtactgctagaaagatacagaaaatatggaagcaactttggaactgggtaatgggcagaggttgatagagtttggagggctcagaagacaggaagatgagggaaaaattcgatcttcctaggattatttaatggttttgaccaacatgctgatagtgatatggacaatraagtccaggctgaggtggtctgagatggagatgaggaacttcttgggaaatggagcaaaggtcacgcttactatgctttagcaaagagactagtggaattttgcccctgccctagggatctgtggaactttgaatttgagagagaggatctgaaataggaacttatgtttaaaagggaagcagagcataaacgtttggaaaatttgcagcctggtgatgcaatagaaaagaaaaacccattttctgagaataatttcaa

SEQ ID NO: 761737 - DNA, 634 bp, Homo sapiens
ttgatagttcatctttcatatgcactctcacctgccaccatgtaagaaatgcttgcttccccttctgccatgattgtgcgtttcctgaggcctccctagccatgcagaactgtgagtcaattaaacctataaattacccagtcttgggcagtcctttatagcaatatgaaaatggactagtacagttaattagtacaaagagtggggtactgctagaaagatacagaaaatatggaagcaactttggaactgggtaatgggcagaggttgatagagtttggagggctcagaagacaggaagatgagggaaaaattcgatcttcctaggattatttaatggttttgaccaacatgctgatagtgatatggacaataaagtccaggctgaggtggtctgagatggagatgaggaacttcttgggaartggagcaaaggtcacgcttactatgctttagcaaagagactagtggaattttgcccctgccctagggatctgtggaactttgaatttgagagagaggatctgaaataggaacttatgtttaaaagggaagcagagcataaacgtttggaaaatttgcagcctggtgatgcaatagaaaagaaaaacccattttctgagaataatttcaa

SEQ ID NO: 761738 - DNA, 612 bp, Homo sapiens
aatggagaagattataccatttgctacaacatggatagacataaaaaacataatgctaagtgaaataagccagacacacaaaaaaggaaaatattgcatgatctcatttatatgtgaaatccaaaaaaaaggtcaaatatacttcttcaataagcgggccacatatcagtgcaaccttgtcagataagagggcttattcagttttgtttgaaaataaaaaccaaaaaccatttttaatttcttaatggatatagwgatccatgaaaatattagcttattcgttttgagcttactaacttacatctgtgctatgaagatattacattaacttaatagcacccactatggcatataaaacccttcatgatctgatgacacccatttctccagcctaaattcttatgacctccctctttcctgcctctccttgaaagcacacatgtggactttcccagaagcaaccattttgttttatccacttttcatgttctttcacactcctgcatacgtcatttgttcacttccatcctgtcttcccacagtgtcctgaaattcttcccagtacctcctgtaggaaatttttcttatctatctccaaccaactttgggatg

SEQ ID NO: 761739 - DNA, 780 bp, Homo sapiens
tataggatcccagaatagataagtttggaagtcatgaggatatatacatacatagtaagaaatgccatgatagtacacatagaggagaacgacatccaaggactgggtctaggatagacactccaccagaaggaaagagaaaaagcacagtatcaagtttgactttgcaacagtgcaattattttataataacaccattgttttagagtacaattatactggctcaattaaacatctcaaaaagattctgttgctgtagtttgttttcataccccatcatttgttgaaattatggcaagaaacctattccaacatccagggcctcaggatgtgactgtatttgagataagggctttaaagaggtaactaagataaattgaactcatgagattgggcctcaaaccagtaggaatggcacccttatcagaagagattaggacaccaacacagagaagaaagaccacatgaagagatgagaaaaaaacagccatctgcaagccaaggagagagctcttagaagaaataaccatgctgacaccttgatctgggacttcgagcctccaggagtgagaaaaatacatttctgttgtacaagccacmcaataagtagtagtggcctgagattttctagacttcttaaggggcttacttccagcttcaaatttctattattattactactatttgtaatattaagacaaatgtagacaatgaaattaagccaactgcttaagcgattatgtgttagatataattgttccttaatattaacaatttaca

SEQ ID NO: 761740 - DNA, 440 bp, Homo sapiens
gagaaggtatacttaggagagtaatatcaatatgtatatgaagaataagaagggataagattagatatttaaacagttaaaagaatatttaatatagaaaattattatagacaacataggatagaattttggcaggaartatggtacagattgtagttagtctgtattaagaatagattaatctgttaatcggttaatatgtattaatcaaataagaagaataaaagaccatggagtatgcttaaagaaaactggatagtacactcttttgtcattttcctctttctcccgctaaagacctgcatgccagtgtaatggctggagcatcagcagttcttagaccaactgagagaacttgaaaataaagtcgtgaatggaggaatatagcagaaatgtagaagcctggatttctaaagactctggcgctgtctgtttagagc

SEQ ID NO: 761741 - DNA, 627 bp, Homo sapiens
cttaaaaatattaaaatccatatatatgacaagtgactatcctatggttgcattaatcttctaaataataatgtgcatttatataaaacttaaaattttacaaaacattctttgactaactcagacaactgtgtaagattgggaaggtaaatattattgtcaccattttcctagcaagcactctggattcagagaggctaattgatatgaataatattatcmggctaggagccagcagatcagtgacctgaataaagatattagggcacttaatccattgctgttcccaagagtaacatttattatgttgtttcatttcttatgtacacatataatcagaggcaacacgtatggcttgtgcaggttgtgtatcacatggataagctatgaatggtcccctcagactgggctgggcaataagcaacctgagcaaaataagcagtagctgttcttaaaaatcatactttgcctcaaataaactctgaaacatggagatgtaagagttaaaactagtctgttatcccactgaggatagttatcaccctgccaaattatataaaagaaaacattaaattttccaaatcattattataattgagaagatggttaaatataaaatctgcaggt

SEQ ID NO: 761742 - DNA, 666 bp, Homo sapiens
catctccccttttcccgtccacactctcttcagagccactggtaactgtctttctattttctacttctatgagttcaatgtttttatattccacatacaagtgagatgatacagtatttgtctctctgtgcctggtgaatttaacttaacataatatcctctaggttcagccatgttgttgcaaatggcagaatttcctgtgtttttaaagctgaataatattttattgcatatatacatcacattttaaaaatattcatctaatgatgaacaatattgagctattgagaataatgctgcagtaaatatgggggtgtggatatcttttcagcatattaatttcaagtactttgggwatactccagtagtgggattgctggatcatatgttaatattattattattattgtgggaagctttgtactgttttccagaatggctgtgctaatttacaataccaccatccctgtataagtgttcccttttctctacagtataaagcttcccttttctccacattctcaccaacgtttattttcatgttttttataatagccaatcttacagatgtgaggtgatgtctcatcgtatttttaatttgcatttctctgataattgcagttgagcatttttccatatatctgttggccatttacatgacttcta

SEQ ID NO: 761743 - DNA, 625 bp, Homo sapiens
aaacaatgttaaggaaaaaagtccttctgaattctttgcaaacataataagtctgtgaaaaaatttcatgtttcttatcacaaaaaactaacaatatatcactgatatgaaatgttcttcccataatctacaaagtattattttattttaatgatactatattaataacttaaagataaaagttatcataattaatttataattgtggaactaaggataggaataagtaaatactgaagtacaaaaagaaaaaatgggctccaagattttatcttgttttttgtttttctctaatgtttcacccaaactctctgacccttagtttcagaagatgtaggagagrgttgatacacatattttaaaactttttcctcagggaggtatctggaagatcattgaattgcttctcttcagtgctgtgagcttttctgagattgggacattctgaatataatataatctgatgggagatgtcaacattctaagaaatactagtctttaataaattgcaaactaatgaaatttaaaacattaagaaattctgtagcttcacctttattcaacacttactggatgactctattattcataacaaattgaaaaaccacttatggatattaaaatt

SEQ ID NO: 761744 - DNA, 625 bp, Homo sapiens
aaacaatgttaaggaaaaaagtccttctgaattctttgcaaacataataagtctgtgaaaaaatttcatgtttcttatcacaaaaaactaacaatatatcactgatatgaaatgttcttcccataatctacaaagtattattttattttaatgatactatattaataacttaaagataaaagttatcataattaatttataattgtggaactaaggataggaataagtaaatactgaagtacaaaaagaaaaaatgggctccaagattttatcttgttttttgtttttctctaatgtttcacccaaactctctgacccttagtttcagaagatgtaggagagggttgatacayatattttaaaactttttcctcagggaggtatctggaagatcattgaattgcttctcttcagtgctgtgagcttttctgagattgggacattctgaatataatataatctgatgggagatgtcaacattctaagaaatactagtctttaataaattgcaaactaatgaaatttaaaacattaagaaattctgtagcttcacctttattcaacacttactggatgactctattattcataacaaattgaaaaaccacttatggatattaaaatt

SEQ ID NO: 761745 - DNA, 633 bp, Homo sapiens
atatggagcaataatgaccaaaatgtgaaagcagttccatttgtccctatctttttgtaaaacctcactcagaaggtgattaataaaacactatcaccatgaaaatattattattataagacttaaatgttttatcctactagaatatgcacttataaataacttgcatgaatttaaagagaacagacttcataagttaaaaatgacactaaactttgggaaagtaataattccaaagaagtcagaaataaaattaaaaactaaaagcaataaataaaaggatgaaatttcacgtaaatcaagacaaacacatttacttcaattatatactacataatagtattaatagaaatatgattggcagtgaatcccataccagctaagacatatggataataaaacatgtagattattggctttagtttgaggatttatattttaagagatacattataaaactaaaatrcctacacaaaataatgactagagaattgaaaaatcagaacatcatgcctcttgaagaattattgaaggcattgattttttcaatgctgggtagaaaatgctttgtcaaatcatgaagcagtagctttcttcagctatttaaagggaaatcatgtgcatagcttagtt

SEQ ID NO: 761746 - DNA, 633 bp, Homo sapiens
atatggagcaataatgaccaaaatgtgaaagcagttccatttgtccctatctttttgtaaaacctcactcagaaggtgattaataaaacactatcaccatgaaaatattattattataagacttaaatgttttatcctactagaatatgcacttataaataacttgcatgaatttaaagagaacagacttcataagttaaaaatgacactaaactttgggaaagtaataattccaaagaagtcagaaataaaattaaaaactaaaagcaataaataaaaggatgaaatttcacgtaaatcaagacaaacacatttacttcaattatatactacataatagtattaatagaaatatgattggcagtgaatcccataccagctaagacatatggataataaaacatgtagattattggctttagtttgaggatttatattttaagagatacattataaaactaaaatgcctacwcaaaataatgactagagaattgaaaaatcagaacatcatgcctcttgaagaattattgaaggcattgattttttcaatgctgggtagaaaatgctttgtcaaatcatgaagcagtagctttcttcagctatttaaagggaaatcatgtgcatagcttagtt

SEQ ID NO: 761747 - DNA, 614 bp, Homo sapiens
aatatgatcaagttatcaaatatagaaagataaatatttttagttcaacatctccttctgaaagaaggatatattaatgatgataaagctccccactttcaccagatcagaaacaaaaggataaatgaattttattgctaaagtagatgaaggaagacagttactcacagattactggtggatatttaaagtgttataggctttctggtgagaaatayggcaatagtcgcttacaaactatatatattgtcaatctagcactgttactactgggaatctttcccagggaaaggaaactaacagtacctaaggacacatgggcaatgacgtttattgtagagttattttaatgaccaaagatagagaaaaatgtggttttttggtagataactttctaaataatacattcactgaacagaataatatgcatccatctaaaataaggaactataggtctaacagatggcttggagatattttcctggggtatggctgggtgagcaaataaagaagcaaaaaaggtacaaaacatggtcccagttttataaaataattatttaaggcaccctaaatatgattttctgtattgcgtgtctgtgtgagattacataaca

SEQ ID NO: 761748 - DNA, 531 bp, Homo sapiens
acagagcaagactacatctaaaagaaaaaaaaaattaggaaaatactatccagaaatcttggcaaaattgtttatgattattatttttgagacaaggtctcactctgttgcccaggctggagtgcagtggcacaatcatggctcactgcaccttggcttccccaagctcaaacaatcctcccacctcagcctcctgggttgctgggactacaggcacaggccaccaccctgggctaatctttgtatcttttttggtggagacagtgtttcaccatgttgccyaggctgttctcaaacttctgtgctcaagtgatcctcctgccttggccttccaaaatgttgggattacaggtgtgagccactgtgccctgcccctatttttaatttttaatagaacaaaacagaattttggggtcgacacaatctttatatgtatgtacagtcattttagaagagataaaattcacattttggtcacagaatacttagcaaaacaatatttaaaagttctttattgagttgttttaccca

SEQ ID NO: 761749 - DNA, 531 bp, Homo sapiens
acagagcaagactacatctaaaagaaaaaaaaaattaggaaaatactatccagaaatcttggcaaaattgtttatgattattatttttgagacaaggtctcactctgttgcccaggctggagtgcagtggcacaatcatggctcactgcaccttggcttccccaagctcaaacaatcctcccacctcagcctcctgggttgctgggactacaggcacaggccaccaccctgggctaatctttgtatcttttttggtggagacagtgtttcaccatgttgcccaggctgttctcaaacttctgtgctcaagtgatcctcctgccttggccttccaaaatgttggrattacaggtgtgagccactgtgccctgcccctatttttaatttttaatagaacaaaacagaattttggggtcgacacaatctttatatgtatgtacagtcattttagaagagataaaattcacattttggtcacagaatacttagcaaaacaatatttaaaagttctttattgagttgttttaccca

SEQ ID NO: 761750 - DNA, 499 bp, Homo sapiens
cacacagatgtaagggcatggtctctcttccttgaagctacggaattacaattctccttcacaaagacagtcaaaggatgtgatctgatgtgttagattttctctctcctgttcaatatggagttttgcatcttagtttctttgggccgctataagaaaatacactaaactaggtgactaacaaataacaggattttacttcttacagttctaaaggctaggaagtctaagatcaaggagacaccatattctatgtctaatgaggctcactctctgcttcatagatagcatcttcttgctgcaacttcgtatggtacagggggtgaacaagctccctctttyataggggtactaatcccattcatgaggacgccatccttatgacctattcacctcccaaaggccccacctcttaataccaccataatggggattatgcttcaacacaagtatttgtttcttgtttttgttttcaacataaatatttggagggtaacca

SEQ ID NO: 761751 - DNA, 617 bp, Homo sapiens
accaaggcatcctggagcactgtagcaaactcacatggacatcacaggatatttaaattctgtgtaggcaatgcaatgatgctctacatgtatctataatgaggattacttaagaaaaaattaaaatacttttccttcagtttatatgaattacatctttactggctactaagttgctaggatataaatgctcattatattgtttggacttcactatgtagtagagggaactgttaggcaattctttgtacctagggataacatgaacatattgagattctaaggattctgttaactgaggacgttttggaacytctggcctataataaggaagggatatgggtggccagaaataaagctggagaggtaaaccgcagacaggtttgaggagtctaagttttgtcctgaaggtgacagggaacctctgaaggaacaggaagtaacacgttcaaagtctacagtcgagaatcaattaggacaagaaatgggggaagaaggggagggatctatggcacagacaggtggaggcagggagagccacatgaactctttaacagctttagcaataatatagctgtatgaattttcaattgctgctataacttccaccaacttgg

SEQ ID NO: 761752 - DNA, 608 bp, Homo sapiens
gcattagcttgtttatttacacaaccctttgtgctaagtattattacccccatttacaaaaggggtcctggcattgagagaggttgaatcactcatgcaaagtctagtaagtggtggagctgtcattaaaaccagatggtagacattcttttctcactccagctcactcakcagctctttataggagggtagtaggtagacaggatcatcctggtgttgagtttaagagtctgcttttaaaggtctgaaaacttgactttcgttctattcaatgttgactagattcagagaaactgatttgttcttactatattcacaaaacactaacgtataaaatttccaatgtattatttttaaactgttaaatagaccaaaacattgtgttggccttttctcccttgaaaatagttaaacaggttgaaaaatcatcaagtttgttcagtaaactagattatttaatggatactgcctttaagctacagagagctggaggcatacatctccactgtagggagataaccatcatgaaatcatgattgtccatgttaggtgttaagacattctctctccgaacggtgtgaggtcacagattcctgtgatttcattta

SEQ ID NO: 761753 - DNA, 593 bp, Homo sapiens
cagtgttattcttaaattcccaattgttgttgcaacgagataatattatctgcaaatacattgaactgggctcaagtaacctgcactgtgtcccaatatgcagaaaacaaaggaatcgactgcatcagtgctgccaacccctgaagaggagctggatttcccttgtctcctgtctaaggtgtgatcctgagcagggccagctgagcaggcctgtagccagtgcagtcacacaaggccctgtgttcagatggggctcacccttagcgtaatgtcctgctatcacagwcttgaaattcttaataatttttttttgaactcatgttttgtctactgttaatatggatgagtttgccttaaaaagaataagaggaaatactttggaaattttgaaaagagatgaaattatcttcttaaaatttggggtggaatgaggcattgggaactgaataaagccatatagtagaatggcctattggtgttgaggcttacttgggatttgtgatcataaatttgtcatcatgtgtgtgcatttttctctagccacattcatccacacaggaataagtggggagcagttgaagagttaaatctga

SEQ ID NO: 761754 - DNA, 593 bp, Homo sapiens
cagtgttattcttaaattcccaattgttgttgcaacgagataatattatctgcaaatacattgaactgggctcaagtaacctgcactgtgtcccaatatgcagaaaacaaaggaatcgactgcatcagtgctgccaacccctgaagaggagctggatttcccttgtctcctgtctaaggtgtgatcctgagcagggccagctgagcaggcctgtagccagtgcagtcacacaaggccctgtgttcagatggggctcacccttagcgtaatgtcctgctatcacagacttgaaattcttaataatttttttttgaactcatgttttgtctactgttaatatggatgagtttgccttaaaaagaataagaggaaatactttggaaattttgaaaagagatgaaattatcttcttaaaatttggggtggaatgaggcattgggaactgaataaagccatakagtagaatggcctattggtgttgaggcttacttgggatttgtgatcataaatttgtcatcatgtgtgtgcatttttctctagccacattcatccacacaggaataagtggggagcagttgaagagttaaatctga

SEQ ID NO: 761755 - DNA, 591 bp, Homo sapiens
tcagatttaactcttcaactgctccccacttattcctgtgtggatgaatgtggctagagaaaaatgcacaaacatgatgacaaatttatgatcacaaatcccaagtaagcctcaacaccactaggccattctactctatggctttattcagttcccaatgcctcattccaccccaaattttaagaagataatttcatctcttttcaaaatttccaaagtatttcctcttattctttttaaggcaaactcatccatattaacagtagacaaaacatgagttcaaaaaaaaattattaagaatttcaagactgtgatagcaggacattacgctaagggtgagccccatctgaacacasggccttgtgtgactgcactggctacaggcctgctcagctggccctgctcaggatcacaccttatacaggagacaagggaaatccagctcctcttcaggggttggcagcactgatgcacacgattcctttgttttctgcatattgggacacagtgcacgttacttgagcccacatcaatgtatttgcagataatattatctcgttgcaacaacacttgggaatttaagaataacac

SEQ ID NO: 761756 - DNA, 629 bp, Homo sapiens
gctactcgtggtcccctgagattctatgtgaattttatgatgggttttcccatttctgcaaaaaatcattgagatttggatagggattgcactgaatttgtagatcactttgggtagcactgaaattttaacaatattaagtcttccaatccataaagwtaagatgtgtttctgttctaatatttttcggtaatgttttatagtgttcattgtacaagcctttcatgtccttggttaacttgtttcctaagcattttattctttttggtgctatagtaaattgacttgtttttgtcatttccttttcagattattcattattagagtgtgaaaatgaaagacattttgtatgttgacttcatatctttctacactgctaaaatgactttttagttctaagtttatttttatgaactctttacgattttctacctataaggtaatgtatctgcagacagagataattttacttctttctttacaactcagattcctttttttttttttttttggcctaattgttctggctagaacttctagtactatattgaatagaagtgtgaaagtgggcacccttgtcttgttcctgattttagaggaatagttttcagtcttttgccattgcatat

SEQ ID NO: 761757 - DNA, 629 bp, Homo sapiens
gctactcgtggtcccctgagattctatgtgaattttatgatgggttttcccatttctgcaaaaaatcattgagatttggatagggattgcactgaatttgtagatcactttgggtagcactgaaattttaacaatattaagtcttccaatccataaagttaagatgtgtttctgttctaatatttttcggtaatgttttatagtgttcattgtacaagcctttcatgtccttggttaacttgtttcctaagcattttattctttttggtgctatagtaaattgacttgtttttgtcatttccttttcagattattcattattagagtgtgaaaatgaaagacattttgtatgttgacttcatatctttctacactgctaaawtgactttttagttctaagtttatttttatgaactctttacgattttctacctataaggtaatgtatctgcagacagagataattttacttctttctttacaactcagattcctttttttttttttttttggcctaattgttctggctagaacttctagtactatattgaatagaagtgtgaaagtgggcacccttgtcttgttcctgattttagaggaatagttttcagtcttttgccattgcatat

SEQ ID NO: 761758 - DNA, 599 bp, Homo sapiens
ggaatacagtccactttccaagtctgtgacgccttcctacttttgcatcagagccttctgggtttcaggagaggctccttttagaatccagactctgaccatgtcacagagaagttgactggtgaatactcatcttgttttatgcaaatgatcttacttctgacctaacatgttagtctgaaaacttgcccactctaatgaactcagaaaggatgaggaacaggaaagctgcccttgattcatgactctagctccagctgtacttatgataatggatccgggctgggcgcccttgggaaaatgtgtatttgggggaggatgatgyctggacagtatattgagatttcctgtgctgccatgagcaatttgtgacttaatgactgtatttataggtacattacaggtcctttatcatttcagaaatcaatgaagtaattttcttatgaagttggagtgatttgtggctgtatcagctgcctctatttattttatcataaagagaaaaagaattcatccattagggagaactgaaaatggaataatttgtcggaaggaaatctggcttcaagaagattgaatgaaaagtcgtataaagaaag

SEQ ID NO: 761759 - DNA, 604 bp, Homo sapiens
gtgtgagctacactgcttagggttgggagaagcatggcataagcacttcctcagccaccctgcatggtgtctccttaggtcacatgttaacccagttcaccagctctaagcccaggacagcatcagggcttgcctaagaattccagtccttgtaacctagactgtcttttaaattcacttaggactccagagcactttagcccacagtggcacggcctgctgagaaattcaagttctgaccactgggatgggtgcttccctgctggctatgtctggtccaaatgctctctgtgtgggtaggtgccagctgaggtcagaacagttttgctttctgctgcaacagggcagcactgagttcaatgcaaagtcccccagtcactacgctgtccctccccgacgtgtacagattctccctctgcaccacatgggtgttattggggaatgcggaggggcagcatcagygtttcaagactgtttttcctgttttcaatgcttctttcagtgatatgaagttaaaaccaggtaacgtgattgctcacctgatttttggttcttatgaaggtgcttttctgtgtgcagataattgttaaaacttggtttcctg

SEQ ID NO: 761760 - DNA, 540 bp, Homo sapiens
gtttgatttttctgtatgtggatatccaatttttctggcaccatttattaaagagactatccctttcccaatgtatgctcttggtgcctttgtcaaaaattagttactggctggacatggtggctcacacctgtaatcccagcacttcgggaggccaaggcaggcagatcacttgagcccaggagctcaagaccagcctgagcaatatggcaaaaccccatctctacaaaaaacacaaaaaattagtgatagtgtacatctgtagtcccagctactccaagggcactgaggtgagagaatcacctgagcccaggaggtcaaggctgcagcgagccatgatcatgccactkcactccaacctaggcgacagagtaagaccctgtctcgaaaaaaaaagttattgtagaagtgtggatttatttctaggttatctatgccattccattggtctatgtgtttgtttttatgccagtaccatgatgtttaggttactatagctttgttgtgtgtgtgtgtgtgtgtgtgtgtgtgtgtgtgtgt

SEQ ID NO: 761761 - DNA, 515 bp, Homo sapiens
cctgacaggaagcacagagcaaccttgaacccttcaccgaagaaagcataatgaaggaactgttcacagaggggtaggcagggttaagggaaccaagaggggatgttggaacactcaggaagtggtaggtggagcaatagcaggaagtgttactataaccgtgtatgaaagtcagagcttagagctgtggatataagactgcccaacaggaataggaaccagaaacgtagaactcagctacggctggaaaggaagggaggatcaaaatacccctrtgtctcacttcttccaccctgcccccaatctcttcccattagctaaacccaaaggagttaagagcgagaaagccagagtgacctttttttctgtggacttcagtactgggaagtacagagcagagcagaaaaaggcagcgaatggatggggggtaggaacgaggggtggggaaggggagtagcaaaggaagagtaactagctagatgtgaatagtaatttaattctcccttctggcttta

SEQ ID NO: 761762 - DNA, 569 bp, Homo sapiens
gagagaaagtagatgaaaaggaggataaggtctcgtctggagcccttccgcattccaaagttcagcattttggaattggaactttttcctcctttttccttttcattcattttagaataaacctctaaaacattttacgaattccccacaaatatcacagccatggaattagagctctctacctaaatcctgacaggcttctccactcactttcatttctgtcactgttagtggaacgtggaaaaataagttacataaacttccgttggcttatgtcattttagtccaggtctccattgtcaggttaaaggttgaagcaattatctggayaattcaggtagaacttaccaggcctctgggacccctttctccttctgctacttttgcctgagtaaccagggaatcacttcaatcctttttctgctcatgtaactctggtctgactacgtctttacccactggaccttgtcactgaaacaaatatatcatattggaaacaaataccagtgagggaaggcatgctcatttcaaatgtgggtgtatttaatttccatatggactatgctgtg

SEQ ID NO: 761763 - DNA, 570 bp, Homo sapiens
aactttgtctcagtttgaaattccatgataatgagtatattataatttagagatcaaatagaaaaaaaagtaaagaagagtaagcaagattataaaaatagcagaaaatgcaataccaaagagaatatggaaagatgattttaactaagagtcaaacctccttgaacatggaccttgaattcaaacaagattctcatgttaatagttaaaaacaaaagcaaaaatcttgacagcwtgctaatttgacattgctacattcttttgttttgttttatgaagcaaaatgtttcttattgttgatgaaacatagtctgtgcttcacatattaggcacactcccaattagtatgaagaacaaagcaatgtgtaatcacatgaaagatcttcaatggtgaatgaagaaaattctagttctttaaagtaaaagagcatctgacttaattattggatcaacctaagcgattaacataaattagaatttttaaataatgttgcatactcttcaagacatgacaggtgagtattctatcacagcactttttaaattaaaatctaaaatcctcatgcagtg

SEQ ID NO: 761764 - DNA, 605 bp, Homo sapiens
ttcccatttacattctgttcttttttttttcttttttttttttttttttagatggagtcttgctctgtccccaggctggagtgcagtggcgttatctctgctcactgcaacctccagctccctggttcaagcgattctcctgcctccgcctcctgagtagctgggattacaggctcccgccgccacgcccagmtaatttgtgtgtgtatatatatatatattttttttttagtagagacggggtttcacatgttggccagggtggtctcgatatcctgacctcatgatctgcccgcctcggcctcccaaagtgctggaattacagacgtgagccactgcgcccggactagattctgtcttacttaacattacattcaagaggttgtcagcggagttgctactaagaagccttattggagagcatttttaggctgtataaaatagtcccactttgaaagtgctgagagctgtttctgctgaggtgtaagccatagtaaaatacttgtgaacaattttcagacatcattacactaaaaaatacaatttttaatagcaccttgaagtttatacttgccttacactttcaattttaagtacaaatgaaa

SEQ ID NO: 761765 - DNA, 667 bp, Homo sapiens
acttctttgccttttctgtttttttttttaaggccagtcacattccttggctcctggcccccttccatcttcaaagcctgcaatgtttaccgggtttcatgctgctgtctctgttgggtctccctgatgtccccttataatracctttgtagttatatcaagcacacttggatgatccaggctaatctccctattttaaggtctgctaattagcaatgttaattccatctgcaactttaatttcccttggccaggtaacctgacgtattcacaggttacagagattaggacatggacatctttggtggttaggaagggtgggggcatcgctccgcctaccacactgttctttctctttttatagaaggcaagatttagaatgcagtactgtatctacttaggcagaaagtgttacccgaatattttagaaaggctttaaaaaatagatctgtaaacaaaaatgactcggttgacaatgaaacaagaaaatatgattttaattaaacaacctgggtttgcactactgtgcagtttacaaagtgttttcacacacatctgatcctcgtagataacctttgcagtaactaggaaagatctgacagttaactaaccccctcccgccctccttttcttgctttctttttctttttcttttttttcctccttt

SEQ ID NO: 761766 - DNA, 639 bp, Homo sapiens
tgattgtaaatcttctttgttactgtcttctggttttcttttaaagctgtgattctttcccagggtttctcaccaaagaaaatgataagcatctcaatgattcccaatattttctctttgtagtcctttggcccatcattaggatgccaaacttctaacacctttggaaaatgacaatatggtggtatcctcatagcacaagacactaattctggtcactgcttccatttaataaagacaaggaaatgtctttctctctcttaaatggcagagctaaccttataatctgtcatakctttgctaaagcaagaaaattctgaaaaaatcttctgacacatttttcaagacttctggaaaaatagtatataaagaaccaagagaggctgacataaaatgaagacagcttactgtgctgtctttttccttaattggatatgctgttttataagaagctctattttattttcatgtactgcaaggaagagcagcatagcttgattaaactacaaagatcttcactggtgctctaacacagttattctatgttagagctcatgatgtggacatataagtccacagaggttgaggggcatgataatgtgttctgatccacgctacagagggagtcttggatcctga

SEQ ID NO: 761767 - DNA, 373 bp, Homo sapiens
catttaaccaatttcaataagattgaaacacttttcacacattttcatttactttttttttttttttttgagacagagtttcactcttgtcacccaggctggagtgcaatggcgcggcctcggctcactgcaacctctgcctcccrggttcaagtgattctcctacctcagcctcctgagttgctgggattacaggcatgtgccaccacacccagctaattttgtatttttagtagagacggggtttcaccacattggcaagactggtcttgaactcctgacctcaggtgatccacccgcctcagcctcccaaattgctaggattacaggcctgagcctccatgcccggcctcatttacttttacagcatgct

SEQ ID NO: 761768 - DNA, 613 bp, Homo sapiens
tatatgtatgattattaggttggtaaaaataaaaaaatttaaattgccattttacaacaaaacaagcatgttcattataaagataaaaacaacttagaagtggcttttagtttcttttggacatggtcaaagttattcaatacacactcaccaaaatgtcaaacattaaaaggccaataactccaaatgttgacaaggatrtacagcaaccaaaactctcacacactgatagtgggggtgcaaaatgatacattatataggaaaaagatctgacagtttttttttatgaaattgaagatgactcagcaattgtcatgtatttactaaacaaaaataaaaatacatgttctgctctgatgtgaacactatacaaacatcactatgtaccccataaatacgtagaattattatgtgtcaattaaaaatgtaaaaaaaataaaaaagcttaaaaaccattccccaagaaacttgtatgtgaatattcatggtggatttattcacaatagtgccaaacaagaaatagtcccaggctggggtggctcacacctgtaatcccagcactttgggaggcccaggtggacggatcacttgaggtcaggagttcaagatcagc

SEQ ID NO: 761769 - DNA, 489 bp, Homo sapiens
tatcaaaattctaatgagatttttcacagaaatagaaaaagcaatcctaaaattcgtatgaaaccacctcaaatactccaatctcgagcaaaaagaacaaagcttgaagcatcatactacctgatttaaaaatacactataaagctatagtaatcaaaacagcatggtactgtcatgaaaacaaacatataatccaagggaacataacagagagcccagaaattaatccacatctttagggtcaaatgatctacaacgaaggtaccaaaaatgcaaaataggraaaggacagcatctttaacaaatggtgcagggaaaactggatatctacatgaggaagaatgaaattagacccttatctcgtacaatacacaaaattcaactcaagatagattaaagccttaaatgtaaaacctgaaattataaaactactagatgaaaaaacatggggaaaaagcttcttgatattggtaggggaaataatttttg

SEQ ID NO: 761770 - DNA, 530 bp, Homo sapiens
tcttgataggcaacatattccatactatatttttgcagttctactaattaggcaaccaatgtttcaaaatgtaatgtgcataaatatatcttggtacttagaatagcaaataaaaaggagagaatctctcttgaccaaatttcaatttctaagttaatcttttataaatgggaagtaggacacacactaatccatattgaggacttctaattttctaggtactttacgtatattttgtcatttaatcttaacacccacaccatgagatagataaaccaatagttccacaagaaaactgaaactcrgagaaatgaaacaccagttattcaactacttattggtaaattcagtcaatcccaagattttctggctctctaaattcagaccccttcaatttgccattttttagtggtttaattgcttatatctcttacatcattttttaatattcttatttcaaatagtatgatttctactttggtcattctcttcatcatgtctgccgattctcatgttggtttacttcccat

SEQ ID NO: 761771 - DNA, 594 bp, Homo sapiens
ctatttacactatctacagtaatatatgaattttagtatactctaggaagcagatagtagtgttactttacatttttattaattttatgggtgtttcattattcttttatttgtgttttcttaatttaaactctggttgttaaatataatttgctatattcgatattagttgtatctcttcttatggaaacagttatgttatgtcatatgtctattaaatttattaatgatatttttaacaatttgaaatcaaaaatataagataataaggttttctctatttyctataaacatatttaccttagtacagttttttataactttagtcatgttatttacattaaaacaatgttttatttgcatatagatgtatgtattgttcattttctttgactaattatttcttatttcaaatatgtaaatttctattaaagattagttttacaaacacaggtatatttattaatttatttaagaaatggggttttctctattatatttcctataaacatatttactttagtacaggtctttaataacttcagtaatgtcatttacattaaaacaatgttttatttgcatatagatgtatgt

SEQ ID NO: 761772 - DNA, 639 bp, Homo sapiens
gatatatgcatacaatgtgtaatgatcaaattaaggtatttagaatatccatcacctcaagcatttatcaattattcatattgggaacatttcaagtcttctaactgttttaaaatatgctataaattattattaactataattattcactgataataactatattattaacttattcctttaatctaactgtatatttgtattcattaacaaatgtctcttcatccccycttttactcttccctgactctggtaactgtcattttactttctaactccatgagatcaaatctttaagttccaccagatgaatgagaatgtgcaatatttgtctttctgtgtctggcttatttcacttagtgaactccagttccattcgtgttgctgcaaataacaagattttattttatttgtgactgaataatactccacttgcatatataccacattttctttatccattcacccactgatgacacttagattggtaccataacttggctcttatgaatagtgctacaataagcatttaatatatcaatttcctttcctttggataaatacccagtagtgaaattcctggagtgtatggtagttctattttaaggtttttgagaaatctccatattggttttcata

SEQ ID NO: 761773 - DNA, 599 bp, Homo sapiens
ttggctaaagaaaatatgatacatatacatcatggaatgctacgcagccataaaaaagagtgaaatcatgtcctttgcagcaacatggattgtactggaggccataatccttagtgaattagtgtaggaacagaaaaccacatacagcacattctcatttataagtgggagctaaatattggatgctcatagacagacagatgtcaataatagacactggaggaagggagagtggcaaggttgaaatactacctgttaggtactatgctcactacctaggtaatgggatcacttatatcccaaagctcagcatcatgcaatatatgcwtgtaacaaacctgcacatgtacctgctgaatttaaaataagagttgaaattatttaaaaaaaaaaaccactttttacagtttttagaaaaaatggaaaatgtcaatatttccttaataccatcacatatccatgttcatagttctgtgattattttataaatgtatctcttttgtttgaattatatacaaattaaatccatatgttgcaaaataatatgacttctaatgtactgaatcaaagatataaacagtaaaagagaaggaatcaaa

SEQ ID NO: 761774 - DNA, 636 bp, Homo sapiens
ttctatagcataattcttggccatagttgtcactatcactgtttttccatccctgtaaactgttgtaacttattccgcatatattgagctgccacctcctatatgagttttgttttatagcatcatcattagccctaaagtcttacttaaactctagcctagtgtaatggaactgcatttagattatggtcagggtccaataacagggcttaaggcaaatttgcagagtcaacatcatctttgaaactttattagttttyctacagaaaattcatgttttcatatgtaaaatgctatatattaatatgtaggtatatatatataattatagtaatatgcatgttatcaagagcacatatcccagataaaattttgtacgtcttttcaaatttaatatatttgaaatggaacttaatattttctccaaatactctgactccctatatccctacaaccgtattttctcatttttcacaatcattttctaatctttaatccatctcgtatatttacttagatatctttaatctgcatttctactgccaccagtctagtctagctgttatcacctaacacctgaattattgaatctttcatcagggatgaagataaagcacgatcatcaaaacagatctt

SEQ ID NO: 761775 - DNA, 636 bp, Homo sapiens
ttctatagcataattcttggccatagttgtcactatcactgtttttccatccctgtaaactgttgtaacttattccgcatatattgagctgccacctcctatatgagttttgttttatagcatcatcattagccctaaagtcttacttaaactctagcctagtgtaatggaactgcatttagattatggtcagggtccaataacagggcttaaggcaaatttgcagagtcaacatcatctttgaaactttattagttttcctacagaaaattcatgttttcatatgtaaaatgctatatattaatatgtaggtatatatatataattatagtaatatgcatkttatcaagagcacatatcccagataaaattttgtacgtcttttcaaatttaatatatttgaaatggaacttaatattttctccaaatactctgactccctatatccctacaaccgtattttctcatttttcacaatcattttctaatctttaatccatctcgtatatttacttagatatctttaatctgcatttctactgccaccagtctagtctagctgttatcacctaacacctgaattattgaatctttcatcagggatgaagataaagcacgatcatcaaaacagatctt

SEQ ID NO: 761776 - DNA, 522 bp, Homo sapiens
tacttttaattttaaaccataatccaaatgtgattcacttattgcgttcaactattattcgcttttattgtgtagtttctaggtcttggcattgttgacatgctggccaatcgttctttgctgtggagagaggtgaagggtctcttttgcackataggactgttagcatatcacttgtctgtatctgctaggtaacagcagctttcccccacccccaatttgtgaccatcacaattgtctccaaatgttacggaatgtccccaaaagacaaaatcaccttggattgagaaccactgctctattttaatctggaagggtacttccatcttcacctgaagtaattttagttagccatgcctgcatacaagtctattattttacacccgaattatatcaacatacacaaccatccctctatgaacagtttgggaattgctaatctcaataagaaacaattagcctctgagcagtcataaaaaccacctgagaaacttgccaaattccagttcctgggcttttttc

SEQ ID NO: 761777 - DNA, 575 bp, Homo sapiens
aacaaacctacaaatgtactcctgaacttgaaatagaaattgaaagaaaaaggaaattaagacatcctccttgatttaaaaaaaaaaaaaatatatatatataaaatctctctgcacatctaaagaggtaacaaaaaagaagataatgtttaagtatctcctagtgtgcactaaaaaaaaataaagtggaaatatgagaaaaaaataaaagatatagagagtcgatccaggagatctaacactggacagttaagatattcttacagagaagaaagaaaacttaagagaaaaaaaaaacaaacatcacaatcaaattttctagagccaatggagaacactagtctttaaataagttgaaagggkcaatcttgtgtagggcaagattaaaggaaaaagtacccaactctaaacattctaaagaaccacagaagatcctataaacttttacagagagaaaaataaatcccatccacaaatgaaagattattcaactttccatcagccaacttaatgctagtggcataatatcttcaaagttaggaaggaaaataattttgagcctagaatttgataca

SEQ ID NO: 761778 - DNA, 634 bp, Homo sapiens
cttttgaaggaaaaagggaaaatacctttcgtttttattgttggttttgagtatttactatatatttccttccattggaataattatgttttttattgttaatctgggacatttattagaagtttccatctattggaatgcataaaattgttttaagtgagctaatgaaacatagcaatgacaaatatcaactcacacaataagactcctacagaggttgaaacactggaagtaagcattcacctttagacctagaatttcaaattgttacaaataaggggcattgcttaacataaaggaattacttaaaggaaagaatgagcatatgtcttttcataggaggtggtctgtaaaacacacagtttataaattgaaaatctatatactcagtcacatttcacagtactgtgtgcggaattggtgggttcttggtctcactgacttcaagaaagaagtcgcggactctcgcggtcagctcttaaggtggmgctctggagtttgttctttctgatgttcggatgtttgcggagtttttttcttctggtgggttcgtggtctcgctggctcaggagtgaagctgcagacctttgcgatgagtgttaaagctcataaaagcagcgtggacccaaagagt

SEQ ID NO: 761779 - DNA, 632 bp, Homo sapiens
actctgcttaatactcgggtgataaaataatctgtacatcaaatacccttgacacacgtttaattatgtaacacacctacacatgtgctcctgagctcgagatataaattgagagagaaaggagattatgacatcctccttgatttaaaaaaaaaaaaaatatatatatataaaatctctctgcacatctaaagaggtgacaaaaaagaagataatgtgtaagtatctcctattgtgcactaaaaaaaaataaagtggaaatatgagaaaaaaataaaagatatagagagtcgatccaggagatctaacactggacagttaagatattcttacasagaagaaagaaaacttaagagaaaaaaaaaacaaacatcacaatcaaattttctatagccaatggagaacactattctttaaataagttgaaaggggcaatcttgtgtagggcaagattaaaggaaaaagtacccaactctaaacattctaaagaaccacacaagatcctataaacttttacagagagaaaaataaatcccatccacaaatgaaagattattcaactttccatcagccaacttaatgctagtggcataatatcttcaaagttaggaaggaaaataattttgagccta

SEQ ID NO: 761780 - DNA, 632 bp, Homo sapiens
actctgcttaatactcgggtgataaaataatctgtacatcaaatacccttgacacacgtttaattatgtaacacacctacacatgtgctcctgagctcgagatataaattgagagagaaaggagattatgacatcctccttgatttaaaaaaaaaaaaaatatatatatataaaatctctctgcacatctaaagaggtgacaaaaaagaagataatgtgtaagtatctcctattgtgcactaaaaaaaaataaagtggaaatatgagaaaaaaataaaagatatagagagtcgatccaggagatctaacactggacagttaagatattcttacacagaagaaagaaaacttaagagaaaaaaaaaacaaacatcacaatcaaattttctatagccaatggagaacactaktctttaaataagttgaaaggggcaatcttgtgtagggcaagattaaaggaaaaagtacccaactctaaacattctaaagaaccacacaagatcctataaacttttacagagagaaaaataaatcccatccacaaatgaaagattattcaactttccatcagccaacttaatgctagtggcataatatcttcaaagttaggaaggaaaataattttgagccta

SEQ ID NO: 761781 - DNA, 605 bp, Homo sapiens
ttttctgtgtggcatttggtttgaagagcagagctagctgcaggtcagacatagattgaacatggggaagggggcaatagccacatagcaagttggggtgaggtcacacaagcattcctgaggcttggaagacccagctgagggtatcactgtgaagaccttggtggtctatgattctgttagcatgtgaaggtagagatttggattgggataggggatgatttcctttagaaggaaggcccgtttgtcctttgacgattctcatttggcaaaaactcagttttgcagaaasttagctatctgccttccccatgcagcccctgaggaactgagccctgggccaaatccatgcccaccctcgatgctgctggcagtctccctacgtttcttgggtcatgccactctcccaccctccagacaaccatctcacaccacctctgttctcctcaaacctccaggctccccattgccctctccttctcagcagatggccttgcttcctgcttcccagcagccagggactgtcagtttctacttaaacacacacaccacttcctaccttcgcctgttcatagaggcccgtccttctcctctccagagctcat

SEQ ID NO: 761782 - DNA, 658 bp, Homo sapiens
cactccctcactcccgctataaatgccttgctgtccctgctgtgtgcagagtggagctcaacctctctgccttcttcagcagtcttgacccctatcgcaatagtcttgaataaagttttccttgccatttttagcaagtatctggtgaataatttttctaatacagagctaagccttcatagctatacctcctaagtagatcttccaatatcagaaagacatccaattctggagcctctgaacaatcrgaaaattgtcaccgtcaacgtgataacaagactcatccatttattcatttctgctatgagtatttatggagtgtctgctctacaaaacaaacaggaagaggacatggctggggcaggcatgaacagtggggtgtgtcccacttcagcatgccatgagtagagtataaagggggtgaaggactaagagagcgcaaaggaaggggtgactcaggacacttcacagaaggggagacggtggagctggggctccagtcaacagtatcagtgattagagagtaaggtttccgagagaaattctgcgagggaggaggggactgaggagacaagtggcgcggaacgcgtgctacagtgtgacagcggtgaggggacacaggcactcagagtgcctgctttcaggatcccagaggcag

SEQ ID NO: 761783 - DNA, 625 bp, Homo sapiens
acatgtttcagagagcacagggttgggggtaaggtcacagatcaacaggatcccaaggcagaagaatttttcttagtacagagcaaaatgaaaagtctcccatgtctacctctttctacacagacacggcaaccatccgatttctcaatcttttccccaccyttcccccctttctattccacaaaaccaccattgtcatcatggcccattctcaatgagctgttgggtacacctcgcagacggggtggtggccgggcagaggcgcccctcacctcccggacggggcggctggccgggcggggggctgacccccccacctccctccctgacggggcggctggccgggcggggggctgacccccccacctccctcccggacggggcggctggccaggcagaggggctcctcactcttcccagtaggggcggccgggcagaggcgcccctcacctcctggacggggcggctggccgggcggggggctgacccccccacctccctcccggacggggcggctggccgggcggggggctgacccccccacctccctcccggacggggcggctggccgggcagaggggctcctcacttcccagtaggggcggccgggcagaggcgcccctca

SEQ ID NO: 761784 - DNA, 619 bp, Homo sapiens
atgtttcagagagcacagggttgggggtaaggtcacagatcaacaggatcccaaggcagaagaatttttcttagtacagagcaaaatgaaaagtctcccatgtctacctctttctacacagacacggcaaccatccgatttctcaatcttttccccacccttcccccctttctattccacaaaaccaccattgtcatcatggcccattctcaatgagctgttgggtacacctcgcagacggggtggtggccgggcagaggcgcccctcacctcccggacggggcggctggccgggcggggggctgacccccccacctccctccckgacggggcggctggccgggcggggggctgacccccccacctccctcccggacggggcggctggccaggcagaggggctcctcactcttcccagtaggggcggccgggcagaggcgcccctcacctcctggacggggcggctggccgggcggggggctgacccccccacctccctcccggacggggcggctggccgggcggggggctgacccccccacctccctcccggacggggcggctggccgggcagaggggctcctcacttcccagtaggggcggccgggcagaggcgccc

SEQ ID NO: 761785 - DNA, 625 bp, Homo sapiens
acatgtttcagagagcacagggttgggggtaaggtcacagatcaacaggatcccaaggcagaagaatttttcttagtacagagcaaaatgaaaagtctcccatgtctacctctttctacacagacacggcaaccatccgatttctcaatcttttccccacccttcccccctttctattccacaaaaccaccattgtcatcatggcccattctcaatgagctgttgggtacacctcgcagacggggtggtggccgggcagaggcgcccctcacctcccggacggggcggctggccgggcggggggctgacccccccacctccctccctgacggrgcggctggccgggcggggggctgacccccccacctccctcccggacggggcggctggccaggcagaggggctcctcactcttcccagtaggggcggccgggcagaggcgcccctcacctcctggacggggcggctggccgggcggggggctgacccccccacctccctcccggacggggcggctggccgggcggggggctgacccccccacctccctcccggacggggcggctggccgggcagaggggctcctcacttcccagtaggggcggccgggcagaggcgcccctca

SEQ ID NO: 761786 - DNA, 586 bp, Homo sapiens
tatttcaagtgtttcaaattgaaatttttatctgattaaggaagtattagaaaaacattaatacggccaggcatggtggctcatgcctgtaatcacagcactttgggaggccgaggccagtggatcacttgaggtcagcagttcaagatcagcctggctaacacagcaaaaccccatatgtactaaaaaaaaaaaaaaaatacaaaaattagccaggcgtggtggcatgcgcctgtaatcccagctactcgggaggctgaggcaggagaatcacttgaacctgggagtcggaggttgcaaagagctgagatcacgccaatgcactccagcctcagggacagagtgagactctgtctcaaaaaagaaaaaaaaaaaaagaaagaaaaacattawtactggtgaaggagggaaaagcttattttagttacatataaacaaccacttaccaagggattaaatgtctcaccttaagagatatagctaagcagagcaattgtctttgttagtgtatgcatttgctaatttgcaggataggtttgtgataggtgatgtatgctcactttaaacccttacataaataattagg

SEQ ID NO: 761787 - DNA, 617 bp, Homo sapiens
ataaatgcactccttttaagtgtaaaagtcaagtgccccatgtaatgtgaagacttctgagcaattacttttaaccgctgtcttagtccatttgggctgctacagcaaaacactattgactaggtaggtgacttataaacaacagaaatatatttctcacaattctgtcagctggggaatccaagatcagggtgccagcatggtcagtttctggtgagaatccactttctgcttcatagatgactgtctcttcactttagtctctcatggcagagtagggcaagagaactccctggagcctcttttatatgggcactaatcccattcattagagtggagccctcataacctaaccactttccacatgtsccacctccatataacatcacattgggcattaggtttcaatgcataaattttggaggaatacacatattcagtctgtagcaaccactgttcatctatggttggtacctttaggtttatatcagcagaaagggcatggaagggaactggaatgtactaaacacctaattcttaccttatggcttcatatctattttatcttcctaagaaaaatcttgtgaaagcagcattattatttccattttgaacat

SEQ ID NO: 761788 - DNA, 617 bp, Homo sapiens
ataaatgcactccttttaagtgtaaaagtcaagtgccccatgtaatgtgaagacttctgagcaattacttttaaccgctgtcttagtccatttgggctgctacagcaaaacactattgactaggtaggtgacttataaacaacagaaatatatttctcacaattctgtcagctggggaatccaagatcagggtgccagcatggtcagtttctggtgagaatccactttctgcttcatagatgactgtctcttcactttagtctctcatggcagagtagggcaagagaactccctggagcctcttttatatgggcactaatcccattcattagagtggagccctcataacctaaccactttccacatgtgccacctccatataacatcacattgggcattaggtttcaatgcataaattttggaggaatacamatattcagtctgtagcaaccactgttcatctatggttggtacctttaggtttatatcagcagaaagggcatggaagggaactggaatgtactaaacacctaattcttaccttatggcttcatatctattttatcttcctaagaaaaatcttgtgaaagcagcattattatttccattttgaacat

SEQ ID NO: 761789 - DNA, 540 bp, Homo sapiens
gggtcagggagttccctttccgagtcaaagaaaggggtgacggacgcacctggaaaatcgggtcactcccacccgaatattgcgcttttcagaccggcttaagaaacggcgcaccacgagactatatcccacacctggctcagagggtcctacgcccacggaatctcgctgcaatcaaactgyaaggcggcagcgaggctgggggaggggcgcccgccattgcccaggcttgcttaggtaaacaaagcagccgggaagctcgaactgggtggagcccaccacagctcaaggaggcctgcctgcctctgtaggctccacctctgggggcagggcacagacaaacaaaaagacagcagtaacctctgcagacttaagtgtccctgtctgacagctttgaagagagcagtggttctcccagcacgcagctggagatctgagaacgggcagactgcctcaagtgggtccctgacccctgacccccgagcagcctaactgggaggcaccccccagcaggggcacactgacacctcacacggcagg

SEQ ID NO: 761790 - DNA, 573 bp, Homo sapiens
cttctccaggtgcccaagtcagaaacctgagcatttggcatttttcctgacacctgtttttctctcttcctacatataatctctagtctttgccaattctacctcccatatatcttttattttttattttgttttattttattctcctgcctcagcctcccgagtagctgggattacaggtgcccggctaatttttgtgtttttagtagagacrgggttttgccgtgttggccaggctggtctccaactcctgacatcaggtgatctgcccgcctcggcctcccatagcgctgggactacagacgtgagtcactgagcccgcttttaaacgagtccacagctctctatccttgttattactgccttatctcaggtctcccctaagttttgcctagatcatctcaaaacctctcaattacactctgcctataattttatagccccaaatagctgagtgaacttccacaaagctatcatagcagtcttcttaacattgtatatccagttatgtcagtttactgtttaaaatgctttgatggttgtttaagaaaggctgaaattcaaattcactat

SEQ ID NO: 761791 - DNA, 620 bp, Homo sapiens
ataaaattactttaaaattgagaggctttccttcaaagggttcactgtctagtgggaaggccaaagatggtgcagagtgatgacctggcaagcatctgacagagaagatgatgtggagacacagctggggtattaggaaaagcatcacagttatgacacttggcgctgacaggtaaaaaaacctttttcaggaaaacaagtgtgaagaaggacatttaaagcagatggaaaagttaatgtaaaagcctggtggtgtaaaacagcccagcatgttcaagaaacatgcaacagagcacagatagaatgtattttctaagagaaaataacgaacgctaggraagagtcaaaggctatgactgacgggctgcagggcacccacataggcatgctgcatggatctcctatggtcagtgccagcctccagctgcagcaccttctgcacccactgcagcgccttctggatccactgcagcagctgggcagaggccacagctgtgggcagtctctagccaacaagtaagcacagcaagggtctggggcctcgacgtttctgcccaatacaggccaggcctccttttaacagccctcattcctccagagctccgcagtgggttgttcag

SEQ ID NO: 761792 - DNA, 637 bp, Homo sapiens
aaactactctcattgtaagtagaaagactaaaagatgaaccaatcaaaaataataacttttcaaaacataaacagttcaataaaaataaaaacaaaaagttaaaaagtgggggagcaaagtaaaggtgtagtttttattagttttctttttgcttgtttatgcgagcagggttaagttgtyaatggcataaaataatgggttatatggcagtacctgctagcctcatggtaacctcaaataataaatacaacaaatacataaaaagagcaagaaatcacactgccagagaaaatcacctttactaaaaggaagacaggaaggaagaaaaggaagagagggccacaaaacaatcagaaaacaaatagtaaaatggcatgagtaagtccctgcttagcaataacactgaatgtaaatggactaacttctccaatcaaaagacatagagtggctgattgtaaaaaaaaaaaaaaaaaaaaaggacccaatgatttgttgcctacaagaaacacatttcacctataaagatacacacagactgaaaataaaagtatggaaaaagatattccattgtcaatggaaaccaaaaagagcagagtagctatacttatttcagacaaactagattttaagacagaa

SEQ ID NO: 761793 - DNA, 637 bp, Homo sapiens
aaactactctcattgtaagtagaaagactaaaagatgaaccaatcaaaaataataacttttcaaaacataaacagttcaataaaaataaaaacaaaaagttaaaaagtgggggagcaaagtaaaggtgtagtttttattagttttctttttgcttgtttatgcgagcagggttaagttgttaatggcataaaataatgggttatatggcagtacctgctagcctcatggtaacctcaaataataaatacaacaaatacataaaaagagcaagaaatcacactgccagagaaaatcacctttactaaaaggaagacaggaaggaagaaaaggaagagagggccacaaaacaatcagaaaacaaatagtaaaatggcatgagtaagtccctgcttagcaataacactgaatgtaaatggactaamttctccaatcaaaagacatagagtggctgattgtaaaaaaaaaaaaaaaaaaaaaggacccaatgatttgttgcctacaagaaacacatttcacctataaagatacacacagactgaaaataaaagtatggaaaaagatattccattgtcaatggaaaccaaaaagagcagagtagctatacttatttcagacaaactagattttaagacagaa

SEQ ID NO: 761794 - DNA, 596 bp, Homo sapiens
tgagtgtttcccatctgaaagacaaaaccacccgcggttttggtttgttttgcttgtccccctgcccaagaacccacaatggtccctggaccctgctgatcggaatagttgcactcaccgacgcagcagcagaaacactagttttcctcccagaccacatggaggaccraggaaggtcggatttagtggcccttaccaacacattctcgaaaaactgttaagggtcctaagcattctcctgttagtattgggactttatccctgtcctataaagatgttatgccccaaaaatgaagtggagggccataccctgagggagggaagggatgtccaaggctggaagagtgacaccttttatcttcacttacatgaataggaaggatacaatttctgaggctcctcatagcataccttcaggaatagcttttgttaggcctgcttgtctgaggagggatcctaaaattccagaaaagatagtcccccccaccaagattgtgccattgcactccagcctgggtgacagagcaagactccatcttgaaaaaaaaaaaagaaattaaaataaaaaatataaataggccgggcgccgtggctca

SEQ ID NO: 761795 - DNA, 614 bp, Homo sapiens
atgtaactaaaggataaagaacactctggtacttcgataagtgttccgatagtatgtattctatccttttacttttggcttatctgcgtctttatatctaagggatttattacaaaaaacagagtcaggtcttgctttttcatccaatctgaccatctctggagtgttataacattttgatacaatgtaattatcaatgtggttgggatttaaaccactatattgaatatttgttttctttttattctatcttattattttttcctcttttactaccttattttgaattaattaagtatactttagtatttcattttgtttccaakattggcttaatcactatacttttgtttttgttttgtttctgtttagctgtggctctcaagtttacaatatacaactttaatcacagtcttccttcaaacgacattatacaacttcatgaatagcataagcattatatatcattgcaatttcttttccctcttcgcatcccttgtcctagtattgttttatcattttcttctaatgtgataaaccccataatatgttgtaaacatctttgcttgaaacagtcaattaagttttaaagtgattacaaaaatgaggaaaaa

SEQ ID NO: 761796 - DNA, 632 bp, Homo sapiens
gttgtcccttttctgttggtagaaagctgttttgattacaggaggggtggaggtggtgggggtgaggtgatgtcagtggtgatggtggtggtgttgtgtgtgtgcctgtgtgtgtgtgtgtgtgtgtgtgtgtgtgtgtgcgtaaaaaggagctaggctagtagaggaatgggaggcagcatacataagctgtatttgtgaatctgcttataaacctaacagatttttcagctgaaatttggccaatgttaattgtacacactgaattcatgctgggaaaatctctttggaaaaaaaaaaaaaaaaagacagagagcacagccggcctgttatgtaagatgtttattttcatccaatccaacccaccataggcagtacaraaaataggccagtgcttctgaccggtgacatcacctcatcatcaggagaaagcgggaatggctgatcaccatattgttagtaaagaggataatttcctttcacaattgtttttcttttggaaacctttatttctggagatagtgatctcatctctgtgggatgtttatttcttcagattctgtaataacagtgaagctacctggatttcagttcttgtacaatgcacataaacacttattttggtgcttttt

SEQ ID NO: 761797 - DNA, 530 bp, Homo sapiens
aaaaatggactcaaatggatcagagatctcaatgtaaaacccaaaagaataaaacttccagaagtataggagaaaattattgtgacattggcttaagcaaaggttcttaaatataacaccaaaagcactatccagaaaagaaaaaaatagccttcatcaaaattaacaactttttcttttcaaaaactgttaaaagactgaacaaaataagtcaagccaaagacatggaaaaaaaaattgctagttatatatctaagacaaggcttatccagaatagataaatcactctcaaaacttaataagaaaccaaataatccaattaaaaacagtcaagtatttaacacacacttyactaaaacagatatactgatgacaaacacatgaaaagatgcttagcatcattactccctaggagaatgcaaattaaaaccaccttgaaatactaatatatacctattaaatgtctaaaattaaaaagtcctgtcatttcaactgtgtatgtggaacatgtgaaactgtcatgtattgct

SEQ ID NO: 761798 - DNA, 651 bp, Homo sapiens
aatatattgattaaactttaaactagaaatagtaaatagtgaagatgctatttactgtgttaatagtaaatgaaaccccatctctactaaaaatacaaaaattagccaggtgtggtggcgggtgcctgtaatcccagctgctggggaggctgaggcaggagaatagcttgaacccaggaggcagaggttgcagtgagctgagaccgtgccactgcactccagcccgggtgacaaaagtgaaaatcaccccccctcccaaaaaaaaagcaagaaaaatgagaacatgaggaatacgatcgtcacatgggctacattgtttcctctccaaatattgaaatcctgactcccagtatctcagaattacacctaatccccaaataaggctaaaggaataaactgaattcacatggggtcatactggaataggctgagctcctaatctaatatgactgttgcacatrtaacatcatattatactacataaatacatgcaattattatttgtcaattaaaaataaaagaaaaaatgtaaaaatatgacaaatatccctttgaaagggaaaatttggacacacaaggaggacgtcatatgaacatgaatgcagagatcaggatgatgcctgtaagtcccagaatgccaaagatggccag

SEQ ID NO: 761799 - DNA, 653 bp, Homo sapiens
atatgaattaatctaaattatcaactgattgttagttcactgtggagattcgaagatattttatggaaaatgttatagaataattgaaatcttgagtggggaggtgtgattcttcctattatatcataattttaattcrtaggcctttctattttagttttagcaattttccccctataattagggacagttctcaatcatcattggttcgttcacatatatccgtcattcatgtttcattggcttaaactgaattacatggctaccttaattgttagcaatgctgggaaatatggtctcttgtgtccatctttaggccttaaacatatgtacatttctgcttaaagagataaaacagagtagatataggagactgttgacaatagccttccctttgtatatcgtttttgcatatacagaatgtattcaccatcctcagtggagacacacatacgccttatattttctgcatccagtttaaagttcagaatctgttactaatgtgcagtcctcttcttgtgacaccctcatctataaaccaagagacacgttatctcttccaccgatcctcatcacttaatgtaaaattatgtattcataattttataattaattaatagaaaattatgtattaatagacataaaaatagaaa

SEQ ID NO: 761800 - DNA, 653 bp, Homo sapiens
atatgaattaatctaaattatcaactgattgttagttcactgtggagattcgaagatattttatggaaaatgttatagaataattgaaatcttgagtggggaggtgtgattcttcctattatatcataattttaattcgtaggcctttctattttagttttagcaattttccccctataattagggacagttctcaatcatcattggttcgttcacatatatccgtcattcatgtttcattggcytaaactgaattacatggctaccttaattgttagcaatgctgggaaatatggtctcttgtgtccatctttaggccttaaacatatgtacatttctgcttaaagagataaaacagagtagatataggagactgttgacaatagccttccctttgtatatcgtttttgcatatacagaatgtattcaccatcctcagtggagacacacatacgccttatattttctgcatccagtttaaagttcagaatctgttactaatgtgcagtcctcttcttgtgacaccctcatctataaaccaagagacacgttatctcttccaccgatcctcatcacttaatgtaaaattatgtattcataattttataattaattaatagaaaattatgtattaatagacataaaaatagaaa

SEQ ID NO: 761801 - DNA, 535 bp, Homo sapiens
atatcttcgtaaaatctgaaagggaatttgtagctaagttgatccaatctcttcattttataaataaaaaaagaaggcttcagatcctggctaacacgatgaaactccgtctctactaaaaatacaaaacaaaattagccagcctggtggcgagcgcctgtagtccgagctactccggaggctgaggcaggagaatggcgtgaacccaggaggcggagtttgcagtgagccaagattgcgccactgcactccagcctgggcgacagagcgagacyctgtctcaaaaaaaaaaaaaaaaaaaaaaaaggcttcaggaggtgaagtcacttactcacagtaacccagacagtgtcgggatgtctcattcccaatgttcaatctcatccttctaaaatataagttgaaatgccgaagacaaagacagcatggaatatatgtattacattcaatttctttgcagcctctctatagagggaatgtggcattctctcaagaaatttattttggagtcacaagactcctggctctgtgatct

SEQ ID NO: 761802 - DNA, 476 bp, Homo sapiens
ttctcttggtatctgaaacacacactctgctggatctcccccccacctactttgctggtaactccttctcagattcctctgcaggatccccctcctttcagcaaactctacttgtggatgtgccatgccagagattaatcaccaggactttcatctatctgccttggtggtttcattcagtctaacatgctgatgactcccgaatgtgtatttctagcctccaacaatggcctcactctcattcacaytgtatatcattcttcaagttcttgccttcatatatgctcacactgtcccctcctcatgttaatagaaagtcgtaataattttcctaacaggactgcttcctggctgctctttctctgtgatgtctgtcagcccccactctgccttcaatgccttactatggactgaattgtatccctcagaattcgcttatgttgaagccctaacccccaatgcaactgtgtatggag

SEQ ID NO: 761803 - DNA, 517 bp, Homo sapiens
ttcagtgatacacagctctaagagaaggacaaatcagaaaggcaattttgcattccaatatccattcaattgcaaaatacatgacagtctccaaaaagccttgcaatacactgtcattgttcattgctggcgtgtaatcattattgaaatgaacatgagttcctgaagggacgagattgtgtactgttcattttgcgtgcctagcccccatyggcaatgagcaatgtatttgtgcaataaatggtcttatattccctctcctcaatcttgagtagatatttttattgtgtttgttttacaggtaaagaagtaaaatacttggccagaatcaccaatttcagttagtgactgagccagactcctgataattgataccgcgctgtttaatagcagtaaaacattcaaatctcacctctctcacttcctttacatctttgttcaaatgttaatttctcaatcaggcgaaccctgaagatttcatttaaaataacacttccttctccaaccattcacccta

SEQ ID NO: 761804 - DNA, 627 bp, Homo sapiens
gctggaagaggtaacatgactggattaattaaacctcaggtacgtggtatgtgctcactgacttggcacatgtgcttttttccatccctaatagaaaacaggataataaatctttcacattcacatgggatagagggtaatattctcctatatttttgcctttatgttacgtgaattcttctgcccttgttcacaatacagtagtcccaccttatctgtggttttgctttccacagtttcggttatccatggtcaaccatggtatgaacgtattacgtggaaaattcaggaaataaacaatccaagctgagagctgtgactgcctacagggtttccagatggctyactctttggatcgggggactgggtctgggatgggtactttcctcatcagcaagatgcaggaagagtacccagacaggatcaagaacacgtttagtgtggtgccctcgcccaaagttttaaactgcatgccattctgagtagcagaatgaaatctcaagctgtcctgctctagcccaccctggacgtgaatcctccctttgtccagcatctctccactgtgtacactacccacccattagtcacttagcagccatctctgttatcagatcgactgtcacagta

SEQ ID NO: 761805 - DNA, 627 bp, Homo sapiens
gctggaagaggtaacatgactggattaattaaacctcaggtacgtggtatgtgctcactgacttggcacatgtgcttttttccatccctaatagaaaacaggataataaatctttcacattcacatgggatagagggtaatattctcctatatttttgcctttatgttacgtgaattcttctgcccttgttcacaatacagtagtcccaccttatctgtggttttgctttccacagtttcggttatccatggtcaaccatggtatgaacgtattacgtggaaaattcaggaaataaacaatccaagctgagagctgtgactgcctacagggtttccagatggctcactctttggatcgggggactgggtctgggatgggtactttcctcatcagcaagatrcaggaagagtacccagacaggatcaagaacacgtttagtgtggtgccctcgcccaaagttttaaactgcatgccattctgagtagcagaatgaaatctcaagctgtcctgctctagcccaccctggacgtgaatcctccctttgtccagcatctctccactgtgtacactacccacccattagtcacttagcagccatctctgttatcagatcgactgtcacagta

SEQ ID NO: 761806 - DNA, 624 bp, Homo sapiens
cattatttgtcctaatgctctccctccccttgccccccaccccccaaaaggccccggacacctctattttctaataattaatctacccccctttttcataagcaagcttgatttggttcctgttatctgcaactaaaagatcttatctgatacaatacatttcaaagaggcaaacttctgccttcacctgatgaactttccaataaataatacagttgttccaaaatggaaaacgcttctcttatcattttgaggtttagacagcccttcatcactgtgtagaagaaattctgtctattataaatagttgaactagataaactgaaggtcccttgctagtttgagatcctctgacaartatcaggaaagccatgatatggaaaatagaatagtttcactcttttgggaaataaaaaataatgagtctccaagtgctcgataacattccaagaaaggatgtgtgagagtgtattacattgcagggggaaaactgacagattctagatttagcgtttgttggaaaactggaaccaaagtttacaatgatttctcttttattaaattaatacacacaaaaagcctagaagctcagtatttgggatgcataaaatataaaaataaaat

SEQ ID NO: 761807 - DNA, 624 bp, Homo sapiens
taatcattttctttgtattgttattgagatgaaatccgactgggcacagtggctaacacctgtgttaggtgggcagatcacttgaggccaggagttccagaacaacctaagcaacatggtgaaaccccgtctctacaaaaaattagttggtgtggtggcgcacacctgtagtcccagctcctcaggaggttgaggtgagagaattacctgggccggagaggtcgaggctgcagtgagccaagattgtgccactgcactccagcccgggtgacagactgagacgctgtctcagaaaaataataataattttaaaataaaatataattcattcagctaagctataaaattagcctaaaatgctgaatggtaatttaagttcaattggtgtattatttagtgtttattaaacaccagcttcttccagaacctttacaggttacaaartgtggtctgtgttctccaggacttctgagtttttcagcaagagttatgtttggtattctgggacactgcagtcttttgtcagtgaagcgctttcccctaaagtaaactgaaatgttaaaaatgtgagtggtattttgaattgtgagcatttgaaaggatatagatcgactatatttgtca

SEQ ID NO: 761808 - DNA, 609 bp, Homo sapiens
catacagcaacttttgactcaaatcttctgatgcattaatcctatgatttctcaaacttcagcagtcatcattaactccaagtcaggtgaatgagtcttccactagttagttccactggcaaactctatatatagaaatttcagtttgtggaaagtcaatgaatatgaatttaagaaacaaatttaataaaggtgttaacatgtaattataaaagggaaaagaaatcttctaaccaactataaacctggtctcaagctcacttgggacaaagacatactaacctcgtcatactgattacttctgaggagggagggaaaacaaaagagatacacgctttagtttgatcgtaatgtattgtgtgcgttatgtgcatgtgttggggacctgagagaggccactgaatgggtgtctggcacattgtttacatagatgggctaatgggtgattgtggttttgggaatgcagagaargacaaccttttattttgcttccaaatccaatcgagtcctacagggcagacccacatatagtgaccaaaatcagcttcatttctttttttaaaaattttattattattatacttctttaagtaagttttagggtacatg

SEQ ID NO: 761809 - DNA, 680 bp, Homo sapiens
aacaattttaaaggaaattctttgccataacacatgtcctaaattttggtttggaaaacacagtcaccatagagatagaaacatgtgtccaagattacagcaacatgctcttagttttctaatttgaaacacaacaaagtttttagtacacttatttcttattataaagatggttatgaatgtctggtgaattcatgccctttaatagagaatgaaagtcaaatttaaaaaatcatacctgactcccactcccagtatattcatacatgcaaaacacacacacacaagagagagagagaatttgctcatcaagaaagagcagttagatgggttacaaattacccaatataatttgtaccaaatgacatttagctttgcagaatgctcagttcccacatactgtgaccattagaaaaccactcagtagttttaagaagtagatgctttcagctctgaaccctgtgtaacaaaagccaaaagtaaaaagaaaatgtrtctagggccaaataacagtaagtctaatgaccacaaagaccattaggaaatgagcaaacaaaattaattctcagtgggagtttcaggctctccaagcacatattctaagtttcattaacctcctaccacaaccagggccagagtcactattaatactggatcctccttgtatcttttggtagtca

SEQ ID NO: 761810 - DNA, 593 bp, Homo sapiens
ttaatttaataatactaaatagagcattataatattttctgatattaatccattaagataactatttactagctgtctatttggctaactgataataatccttttgagctagtataggcaataatatgcatggtacctaatctcctgttcttctcttgtcaagcctgatccaaatttttgatgtatcttggcagaactragccagtcttccaaagaactaaaataataataatgaaaagaacatatttagcaataatatttttgagataacatttttcttctttggctgtacttgctaaaacaacttacccaattttctggaactgtccttctaagtagttccaaacatatcttattttctgcactttgatgcatctcacctgcaaaagaaaagtactaagaaaacctctagtttgaggatcagagaataaacagcaacccagtggctaaagaagcatttgtttgaaaagcaaagataaaactctaacatacttatttaagattttatccttttctaatttaccctttgcttttctaccatacaaatggtattctttattagaagtcatcattcaatcaacatgtatcatgga

SEQ ID NO: 761811 - DNA, 563 bp, Homo sapiens
cttattcattttgaatttcaaaaatattttaccaataacaaaatttaacaattcaccttcttaaacagactgactcataatgggggaggtacatgattcagtctcttttaaaaacgtacttccatttggaacagtttaattgcagttttatttttcatataatcacatgctgcagatttagtcaagttgcgcaatgaaaatgaaagattctacttttttattcaggtcatttaaaaatagcatatctttcatgtcacaggtcctagcaaggtcacataagagtcagccaagttcttctcttgaacaaggaggaagactggagagaaatgtcttccccaaggctgcagagcaaatcakgagcagaaagcagaaggtattaccaacctgaaagctggtcactcatacatgtacatttctggtcgcatgagaataccttcaactttttttgttccctcaatttttcccatttgggtcctgctaactcatgctaataatgagagcagagagggcaaacctgagaagccagagaaaagtcataggatatacatgcagaaagtgaacta

SEQ ID NO: 761812 - DNA, 636 bp, Homo sapiens
tctgcccaggagacattcttgcaaagatggtcccattgatcaatatctgtaaggaacccaaaatggagatttttttatcaagtcatctggttgtacatgaaataattactaacactcagaatgttgactgcatcatgacacttacgatgaagaaaaaaaaaagtttccaatgagccttcctttggattttaagacaaacattgaggttttggtcatcagataagtgatcagtgaaaaacaaaaatcagtaaagataattacttaacaaaaaatattttatgaaaatgatgacctacaggaatttacctcagctgtcacggggaatgtggtcctgaaaaatcttgagcttaatggaaccttgaactgcaaaacagcaaaaggttgatctatatatctaaactatcgatctatctctctctctctctctatatatatatatctaaaacttamctcccccgactaaagctttaagtttgaccctcttgagtacagaggtcatctatcaaaaaactaatggtgttcctttattcttggtctgctttcctgtgtaattgcagggtttccactatactctgagaccccttaccatggcaatatagtgacagccacccaaaatcatctgtataattcaagaaa

SEQ ID NO: 761813 - DNA, 603 bp, Homo sapiens
cctcttggtgaccccagctcactgaggttggggggatccacaggccatctgcaagtgcttcctgcagataagctcccatcacttccttggaagccatgagggaggtagcactctgctggggatggagctcttgggaraatgggaggggataatataattcccattgcacaggtgaggaaatcgaggcccccagaggtgaggtaacctgcccaaggccacgtggctgggaagtggcagcaccagcattcacacccaggtctgcaggactctaatagccgtatgcttgagaaagaatgagtgctccaccatacatccaaccctgaccccttcagcacacaccagtccagcctccagctgccagcatgtgccacccttctgaggctttcttgggcacaggagccctctctgcccaggcacttggcaggctggaggtgccaaggaattaatggcctctcggagcatccctccaccaatgcctgatggggcacacacacaccccggctccctctcgctctctgtgtgatgactgagaggtctgttcctctgtcccaagaggattaagctccaattgttcacagtggcaaccagcttgatctcacaccc

SEQ ID NO: 761814 - DNA, 603 bp, Homo sapiens
cctcttggtgaccccagctcactgaggttggggggatccacaggccatctgcaagtgcttcctgcagataagctcccatcacttccttggaagccatgagggaggtagcactctgctggggatggagctcttgggagaatgggaggggataatataattcccattgcacaggtgaggaaatcgaggcccccagaggtgaggtaacctgcccaaggccacgtggctgggaagtggcagcaccagcattcacacccaggtctgcaggactctaatagccgtatgcttgaraaagaatgagtgctccaccatacatccaaccctgaccccttcagcacacaccagtccagcctccagctgccagcatgtgccacccttctgaggctttcttgggcacaggagccctctctgcccaggcacttggcaggctggaggtgccaaggaattaatggcctctcggagcatccctccaccaatgcctgatggggcacacacacaccccggctccctctcgctctctgtgtgatgactgagaggtctgttcctctgtcccaagaggattaagctccaattgttcacagtggcaaccagcttgatctcacaccc

SEQ ID NO: 761815 - DNA, 617 bp, Homo sapiens
tcttggttccagcctcagcattcaggatacaagtagattcccacctcagggcctttgcacttgctgtcactgctgcctggaccactttctccagaaaccaacatggctcacccttttacttccttctaatttctgtacaaatgtcacctcctcagagaggcctcccctgactatcctgtctaaaatagtacacactctctaggcctctagcccctgactgcattttcttcataagtggtatgaaaacattctctgtgtctgttgcttttttgcttcctgtctcgctctcccccaggaggctatamgctgcctgaggacagggacttttggccttgttcatcgttgtattctcagtgcctagaacgtgcctgacgcagtatgtgcttgataaatacttgttgaatgactgattggtgagtgctgcgaggctggatgtgctgccttgtgtctctaccctcgagcctcctcgtctatgtaaagacgagacagtggctgttctcctatctgaccaaggatgtcaggataggctgtgttatgctgcggaaacaaacaaccccagaacctcagtgctgtgctgacttccctgcctcttccctctccttgtgataagagaggta

SEQ ID NO: 761816 - DNA, 511 bp, Homo sapiens
gcttcctcagcagccagatggcagactcagtaccaacactgagtgctgatttgtaatgcgatagcttgtctttgcttagttcaggtttctattattgtagcaatgctctttaccactattttttttaagcatctatgcttactgttaaagagtgagtgagctgctttttactgagtgcttgtcatatgggaagcatcctgctgagtacttcacatacatcatcccaatcagtcctcaccaccagtctgcattatagtattataataccaatttcacagacaaggaaacacaatttgccccagtctccctgctaaatgtcctgtcaccagtgaacccacaccagtctgattccagaytttttgttctttccattaaaccaccagcctctatgcatatttaaaagaaaaatggtacctgcatacacattatgaaacaagagacagaatgccctcattgcagttcttttgttctatgtaaatttggacattgtcatcctcgtatgcatcaacaa

SEQ ID NO: 761817 - DNA, 633 bp, Homo sapiens
tactacacaggagccttgctgatgtggtggtatggtgtcagggtatgggaggtgttctatagtcctatgatgaggtctaggtctttagtaagcctgtgcctctgggctgagatcttgacaggtgcttctaagcttttttctccccagagaaacaggaaggctggaggaaatctggagttggtgttggcgttyttccttccccccaagttaactgggctccaataaaactccaattggtcagactctggtaaaacagtttctcttgagggctgaatgctccggtatactgttaaatggctacctttcccttcccccgatacaagcacaatgggttgttccctgatcttcacagtgagaacctagcagggttcctagacatagaacataaaacataaaacaaaagtgtgccccctctctccaagacaggaccccctggagtgtaacttgcaagcttgtccacaccgagcctctggcaatgtgtgaattaattgaagttttcttaggctgcttctgagttctgctggatacgtccccttcaggtcttttgctctgggaagctgtgattctctgtttatttgcctgtcatttgctccaatttggggggcagctgtttgttctgtgacaattctctga

SEQ ID NO: 761818 - DNA, 639 bp, Homo sapiens
gagacttaattactcccactttcaatagggattagaacaactagaaagaagatcagtaggaaatattggacttgaacaacactgtaaagcaattaaacctaacagacgtgcagaatattcccacctaacaacataatacccattcttgtcaagtgcacatggaacattttccaggatagattatttgttaaaccatcaaacaagtcttaataagtkaaaatattcaggtcttacagagtatattttccagttacaatagaataagagaaggatatccatttttaccacttctgttgaatattgtactggagtttctacccaggacaattaggcaagaaaaggaattaaaaagcttccatgttggaaaggaagaagtgaaattttctctattcacagatgacatgatttcaaatgtagaaaatcctaaggaattcactaaaaagaactgatagaagtaatgagcttagcaaggttgcagggtacaaggtcagtatagaaaaatcagctgtatttctgtacaatgcaatgaacaatctgaaaatgaaattaaaccaattttatttacagtggcaccaaaaggaataaaatacttagaaataaatttaataaaacaagtgtaatacactctgaaaactacaa

SEQ ID NO: 761819 - DNA, 575 bp, Homo sapiens
tgaaagattgaacccagaatggaaaaggaactaaaaaattaatgacaaaaacagctccgttagaaacaggcaaaacatctgcgtagacatccaatttcataatttgtgagaaatgtatttagtaccgtacacctctcagtaacagctgcttcactctgccccrtccttctaatgtgcaatgtttttattactttttaataattatgattatctctttaaccccaaatttatggtaatagactatttggtttccaaacatacaatatttgcactatcccttttgtgacttaatttctaattttttttttgccctgtggttggaaaatatatttctgtatgttgatcatttgactgtcagaaagctgcattgtggcttaatgttttaatccttttgtagccttctttcagtccacatacaattggcttgcattttcccttcctgttattgtcaactattctgtgtctctcgcgggtaacatcgtttaactccatccatactcttgtgtcttttaattggtaagtttaatttattcgttcttctgataacctgttgtatcaggattcaaaagtcctgc

SEQ ID NO: 761820 - DNA, 640 bp, Homo sapiens
accccgtctctactaaaaatacaaaattagctgggtgtggtggtgggtgcctgtaatcccagctacttgggaggctgaggcaggagaattgcttgaactcgggaggcagaggttgtagtgagctgaaattgcatcactgcactccagcctgggtgacagagggasactcagaaaaaaaattttttttcactgcatgtaaattttaccttaataaaaaattaaaatttggctgggtgcagtggctcacacctgtaatcccagcactttgggagactgaggcgggtggttcacctgaggtcaggagttcgaaaccagcctgcccaacatggtgaaactctgtcttcactaaaaatacaaaaaaattagccaggcctggtggtgggcgcctgtaattccagctactggggaggctgaggcaggaaaattgcttgaacccaggaggcagagattgcagtgagccgagattgcgtcactgcactttagccctggtgacaagagcgatactccttctcaaaaaaaaaatattaaaattaatcttttagaaaataaaagtgtgttagagaggttggctaatcaaaatttttgtagccttcaagaagaataaacttgaagaatatccattgatttgtagaatttttac

SEQ ID NO: 761821 - DNA, 492 bp, Homo sapiens
gagctggtctttttctttcaggaaaggtgtatttaatttccacattgaacatgtgacagtcatgaggtcttttgcatgatctggtctgaatgaggtacaggacagtaaaggaggcagttaatctataacaaaagtcagtgattataaggggaagagatgtggtctctggtttctcctagtcatttacaacgcamgagcactgagagagttattctacactctaagaagcagaagttgtaactacattctatgtgattcacatcacagtcacatttctctcaaggcctaaagagttttgagggttccaacagcttttaaattgtatgtgttttcacagtataaacatagaatgtatgtgcttcacttaagtagacattggttagaatatactagactaggaattaaggaaaacaatgcttgtgatctgtcaatagtgatgttacaaatccatgctgtaaagttcatactcttaaaccctcacattcctccctc

SEQ ID NO: 761822 - DNA, 541 bp, Homo sapiens
caatggaaattgaaatatgttgtcctagctgacagagcttcaaagagaacctccaactaaagtcttaaaggtgtaatacacgtcttatttgctctactggtgtttcaccctattctctgcaattaaaaacaacatacaatatgatctttaaaaaatgaaaactctgaaattaccaatgttgaaaaaagatgtttatcgcctgatgaatgttaatattgtaacatacatgttgacagaagagcaagtgaaggaattcaaggtagatattaacttatakaaaaacattaacctaaaaatatcaaatgacttcagtgcagcagaaactcttctatgtacacatgctatatgaccttggcttgaatatgtttaagaattccttttttaatacccgatggtatttgggtattaaaatgcaatgttagtaaaacctcttccttgctcacatatatagtctgtaattctctctgggcctatggtttccccacctggacagtaggataatcttgaggctttctacctgccaaatttcgcatattatttt

SEQ ID NO: 761823 - DNA, 541 bp, Homo sapiens
caatggaaattgaaatatgttgtcctagctgacagagcttcaaagagaacctccaactaaagtcttaaaggtgtaatacacgtcttatttgctctactggtgtttcaccctattctctgcaattaaaaacaacatacaatatgatctttaaaaaatgaaaactctgaaattaccaatgttgaaaaaagatgtttatcgcctgatgaatgttaatattgtaacatacatgttgacagaagagcaagtgaaggaattcaaggtagatattaacttatataaaaacattaacctaaaaatatcaaatgacttcagtgcagcagaaactcttctatgtacasatgctatatgaccttggcttgaatatgtttaagaattccttttttaatacccgatggtatttgggtattaaaatgcaatgttagtaaaacctcttccttgctcacatatatagtctgtaattctctctgggcctatggtttccccacctggacagtaggataatcttgaggctttctacctgccaaatttcgcatattatttt

SEQ ID NO: 761824 - DNA, 613 bp, Homo sapiens
actgactcacccagagcaacttccagtcctctaagctccattcataaaaagtgtcctatggaggtgtaccattttaaaatcttttatactgtatttttactgtaccttttctatgtttagatatgttaagaaacacaaatatggccgggcacggtggctcaagcctgtaatcccagcactttgagaggccgaggcgggtggatcatgaggtcagtagattgagaccatcctggctaacacggtgaaaacccatctctactaataatacaaaaaaattagccaggcgtggtggcgggcgcctgtagtcccagctacttgggtggctgaggcaggagaatggcgtgaacctgggaggtggagsttgcagtgagctgagatcacaccactgcactccagcctgggcaacagagcaagactccgtctcaaaaaaaaaaaaaaaaagaaacacaaatacttaccattgtgttataattgcttacagtattcaatacagtaacatgctgtacaggtttagtagcctaggagtaatagtctataccacatagcctagctgtgcagtaggctgtcccatctatgtttgtaaaagtgcactccatgatgttcacacaatgtc

SEQ ID NO: 761825 - DNA, 469 bp, Homo sapiens
cacgtccccaccagactcaggagcccagctagcttcacccagtggatcctgcaccggggctgcaggtggagctgcctgccagtcccacgccatgcgcctgcactcctcagcccttgggtggtcgatgggactgggcactgtggagcagggggtggccctcgtcggggaggctcgggctgcacaggagcccactggaggtgtggggagtctcaggcatggcaggctgcaggtcccgagcccttccctgccctgcgggaaggcagctaaggcctggcgagaaattgagcacagcagctgctggcccaggtactaagcccctcactgcccaggccggtgggaccrgcgggccgctccgagagtggggaccgctgagcccacgcccacccgaactcgcgctggcccgcaagcaccgtgcgcagccctggttcccgcccacgcctctccctccacatctccctgcaagctgaga

SEQ ID NO: 761826 - DNA, 518 bp, Homo sapiens
ccacgtccccaccagactcaggagcccagctagcttcacccagtggatcctgcaccggggctgcaggtggagctgcctgccagtcccacgccatgcgcctgcactcctcagcccttgggtggtcgatgggactgggcactgtggagcagggggtggccctcgtcggggaggctcgggctgcacaggagcccactggaggtgtggggagtctcaggcatggcaggctgcaggtcccgagcccttccctgccctgcgggaaggcagctaaggcctggcgagaaattgagcacagcagctgctggcccaggtactaagcccctcactgcccaggccggtgggaccggcgggccgctccgagwgtggggaccgctgagcccacgcccacccgaactcgcgctggcccgcaagcaccgtgcgcagccctggttcccgcccacgcctctccctccacatctccctgcaagctgagagagccagctctggccttggcccgcccaggaaggggctcccacaatgca

SEQ ID NO: 761827 - DNA, 631 bp, Homo sapiens
caacatatttgactaaacattattctgagtgtatctgtgagggtgttttagatgaggttaacatttgaatcagtagactgagtaaagcagattgccctgcttaatgtaggtgggccttatccaatcagttgaaggcctgaacagacccaaaaggctgacctccctgtaggagagaacttctgcctgactgcctgagatgaaacactggtctttttctgcctttgggttcaatctaaaacatcagctcttcttggatctcaaacctgctgccttttggactaaaacttacacacttggctttcctgggtgtcattccttcaaactcactactggaactataccactggctctccaaggtctccagcttgccaacagcagatcttggaacttctcatccaccctaattgtgtgagccacttccttatagtaaatgctcttatgctctggagaacccacataccgyaaatctttttaactctaatttcattaccgcctcttaagattttcttttagacattctaatgtgtgtgtgttggcatcacatgacagtgtcactttgcatttgcctaaagattaatgatgtgaaatatttattcatgtgctcattgggcattgatatacctattttttg

SEQ ID NO: 761828 - DNA, 631 bp, Homo sapiens
caacatatttgactaaacattattctgagtgtatctgtgagggtgttttagatgaggttaacatttgaatcagtagactgagtaaagcagattgccctgcttaatgtaggtgggccttatccaatcagttgaaggcctgaacagacccaaaaggctgacctccctgtaggagagaacttctgcctgactgcctgagatgaaacactggtctttttctgcctttgggttcaatctaaaacatcagctcttcttggatctcaaacctgctgccttttggactaaaacttacacacttggctttcctgggtgtcattccttcaaactcactactggaactataccactggctctccaaggtctccagcttgccaacagcagatcttggaacttctcatccaccctaattgtgtgagccacttccttatagtaaatgctcttatgctctggagaacccacataccgcaaatctttttaactytaatttcattaccgcctcttaagattttcttttagacattctaatgtgtgtgtgttggcatcacatgacagtgtcactttgcatttgcctaaagattaatgatgtgaaatatttattcatgtgctcattgggcattgatatacctattttttg

SEQ ID NO: 761829 - DNA, 633 bp, Homo sapiens
tattatttaatttgcatttatttgctcagtattctatttttgagttttcaccatgttaatgcgtagatccctgattcattccttttaagtgccgtgtattaagctgttgatggagtataccacagttcattatccattcttttttttctgatgagctgttaggcctgtgtccaatgtttcacattacaaacaccatattttaatatcccaccatctgtctgcttatgcacgtgtgctccgtttctctaggagagtatgcacgtgggaagtttaaatgttgtgcgtatctacagcttcactgggacattgctctatttccctccagggtatttttaataratttatcttttcatcaaagtgtgcaagttttctatttttccacaacctcgtcaatgatattataaaatatttttaagttttattaatccgatggatatgtttttcactattgcattctttttcatttccctacttaaaaatgaaattatcttttcatacatttattgagcatttggcttcatcactgaattatttatatccttttaaaatttctttttttgcctattttcttattaattagtaggaattctttatatattattgtatctaattcatttgttagttacatgaatt

SEQ ID NO: 761830 - DNA, 627 bp, Homo sapiens
gccttgctgccgccttgcagtttgatctcagactgctgtgctagcagtgagtaaggctccatgggcatgggaccctccgagccaggcgcggaatataatctcctggtgtgtcatttgctaagacctttggaaaagtgcagtattagggtgggagtgtcctgattttccgggtactgttggtcatggcttcccttggctagaaaagggaattccccaaccccttgcgcttyctgggtgaggcgatgccctgctctgctttggctcacggtcagtgggctgcacccactgtccgacaagccacaatgagatgaacctggtacctcagttggaaatgcagaaatcacccctcttctgcgctgctcaccctgggagctgtagactggagctgttcctattcgaccatcttggaacctcctcatcagcttcaatttttaaattaaaatacttatattctcaaatctataattagaaacactttggtactgtgcaaaaggataccaatttcaaagagccatggaggtgtcatgcatgcatgcctttttttggctaaggttacagaaatattttcacccaggactgtcaagagaacataagaacttgtgtgctgattgtaagcattcttcttag

SEQ ID NO: 761831 - DNA, 587 bp, Homo sapiens
aatagtattttaaaattctactataatgctctaaatggatccaacaatttagccatgtaaaaaggggttggtgtttttattgtaaaactgatgagttgagcttgggtaagcctgctgtggaggatgtgtgccagccattgatgccatctatctgaattcttgtttttgggagttctccatgtattagaattactgtaagtattttatgaatgctgccattgttatgcttctgagatgggatagttcctttgaccccttcacaggactcatgaaggggtggctcatctactcagcccgcagctctgaaccccttataggagggggagcatggaggtgagcaggtgcgggaaccagggcaaatgaacgctggaactgactggtcactcctgtctggcattagcaggctctctgygggccctgtggcagcgtccatgtgtgttacaatggtcttttagctctgctgtctgagagggggtgtctgtgactcctggaaccccagagggcatgtgttacaatcagtgctgttttagcatttgccaaccacagacagctaagtgttaagcagctcagcgaagggtcggagtgac

SEQ ID NO: 761832 - DNA, 399 bp, Homo sapiens
actccagctgaaatgtgggcgtggttggagagtagctgggacagacaggagagtccctgagggttggagataaagacgtgctagagactgaggagtaactgagtgaaattggtgagtttggtggtgattcctgggtgcctggaactgactcccgctgaagtgtgggcgtggttggagagtagctgggacacacaggagagtccctgagggttggagataragacatgctagagactgaggagtaactgagtgaaattggtgagtttggtggtgattccggggtgcctggaactgactccagctgcaatgtgggcgtggttggagagtagctgggacagacgggagagtccctgagggatggtgaagacatgagagagactggggagtaacgcagtgaaa

SEQ ID NO: 761833 - DNA, 601 bp, Homo sapiens
aaaataaaaaataatgttgaaccttctttaggttatattcagtgtatgtcatcaatccattctaaaattgtatagaatttctaaaattcttgtattttttttttttctgagaaggagtcttgctctgacacccaggctggagtacagtggtgcaatcttggctcactgcaacctccacctcccgggttcatgccattctcctgcctcrgcctcctgagtagctgggactacaggcacccaccaccatgccaggctaatttttgtatttttagcaaagacggatttcactgtgttagccaggatggtctcgatctcctgacctcgtgatccttccacctcggcctcccaaagtgctgggattacaggcatgagccaccacatccaccctaattatggttattaagttattgtagaccacagaaataaccaaatttccttgtcaattgtctttatttataactatttaaagtcatttccacagttaattgcttaatggtgatgcagtttctaaaaacttcacaagaatgcaaaattctagaatatggtgtctcttagaagattcatgaaagaatgaaaaggatcctgaaaaacactcgtgaac

SEQ ID NO: 761834 - DNA, 661 bp, Homo sapiens
tgtttaaatcaggtaagtttacctgtaatgtgctttcatttatttcactgcaaattatattttggagattttatatatatatatatatatatatatatagtgtttcctctgcctctcttgtagcaatctgctttgtagagttgtagaaaaaaatggcatctgttttttcttttaaatatttaaatttccattattattatgagaaaatcaatctttcagagtaatgattctcattatggagtcatttgatgattaagaccagttggcataggaaaaagttgtgatttagaaattatgtgatacttttgaattggtgttaagctacattgttcattgatcactttttcaaattatgaatggattctattactttttatatgaccagattacattaatactaacataattatgatttcaaatttttataaatcagacttaattctgaattcagttattagttttgatattgctgaaatattttaagcttcagcttctttttyaacatattcagaaatgctctttgaatcactgactcaaaatgaaaggcaacaaacatataataattatgttattgttttaaaagtgtattattttcctttgttttagttacaagcacaatataaaaaacaactagagcagttaaacaaggataatacggctt

SEQ ID NO: 761835 - DNA, 626 bp, Homo sapiens
ccaccccatatccactacccactgtttccaagcaaaagcctgagacagagacagatccgcctggaaaacctctactagggcagtgcaaaaggaaaatatgggcttggagcccccacgccaccatcctacagcccaagagtcatggacctaccaacagctcacacccccagtatggaaaagcttcaggcactcaacagcagcccagcccatgagrgcagctgcaggtgctaaaccctgcaaagccacaggtgcactgccttagtagaggttttccatgagcctctgcctctgtggcaggctactcccctcctgctacacaccaccctacagccagcctacgtctccccaccttacccacctgtttttacttccaactccacccctctcccatccatgaataagtcacttcccaccaggccccacctgcaacattcaggattacaattacatgtgagtttaggtagggacacgcagctaaatcatactattctgaccctgatcccccaaatatcatatccttctcacagagtaaaatacaatcatgccttttcaaaagttgccaaaagtcttaagtcatttcagcattaactcgaatgtaaaaagttccacgtctcacctgagaaaag

SEQ ID NO: 761836 - DNA, 597 bp, Homo sapiens
agctgagtagtatctgaaaaattcattagtaaaattatggcactaggggtgagtcatgcagtcgaaggatgaatactaaatccagtacaaacacccatggtctttctttacatgaattccagtgaaaaatttctaagtgcctaaaatagcaagtggtctgaaatgatggcagcagtttattaaagactgaaaaaagaggccaggcacggtggctcacacctgtaatcccagcactttaggagtccaaggccagtggatyacaaggtcaggagttcaagaccagcctgtccaacatgctgaaaccccgtaactacagaaaatacaaagcttagctgggcatggtgacacatccctgtagtcccagctacttcagaggctgaggcaaaagaaatgcttgaaccctgaactgggaggcagaagttgctgtgaattgagattgtgccactgcactcgagcctggtgacagaggaagatgctgtctcaaaaaaaaaaaaaaaaagaaaaagaaatggcatcttcaagaaccacaagagagttccgcgctgaagaagctctgattctgcatttgctgaactactgatttgagttagccaatat

SEQ ID NO: 761837 - DNA, 597 bp, Homo sapiens
agctgagtagtatctgaaaaattcattagtaaaattatggcactaggggtgagtcatgcagtcgaaggatgaatactaaatccagtacaaacacccatggtctttctttacatgaattccagtgaaaaatttctaagtgcctaaaatagcaagtggtctgaaatgatggcagcagtttattaaagactgaaaaaagaggccaggcacggtggctcacacctgtaatcccagcactttaggagtccaaggccagtggatcacaaggtcaggagttcaagaccagcctgtccaacatgctgaaaccccgtaactacagaaaatacaaagcttagctgggcwtggtgacacatccctgtagtcccagctacttcagaggctgaggcaaaagaaatgcttgaaccctgaactgggaggcagaagttgctgtgaattgagattgtgccactgcactcgagcctggtgacagaggaagatgctgtctcaaaaaaaaaaaaaaaaagaaaaagaaatggcatcttcaagaaccacaagagagttccgcgctgaagaagctctgattctgcatttgctgaactactgatttgagttagccaatat

SEQ ID NO: 761838 - DNA, 489 bp, Homo sapiens
gcactattcacaataccaaagacatagaatcaacctaggtgcccatcctcagtggattggaaaaagaaaatatggcacatatgcaaaatggaattgtacacagcaagaaaaaagaatgaaatcatgtactttggtgcaacatatatgtggctggaggccattattttaagtgaatcaggaacagaaaatcaaatactatgtattctcacctataagtgggagctaaacatcaggtactcatggacataaagatggcaacaatagacactggggtccattagtgtggaagggagrgagaaaaaggttggaaaactaactgttgagtactattcttagtacctggtggatgggatcattcataccccaaacctcagcatcacacactatattcagataacaaacttgcacatgtaccaactgaatctaaaataaaagttgaaaaaatatatacaaatgaaatagtagttatctctggcctggcacagttgc

SEQ ID NO: 761839 - DNA, 594 bp, Homo sapiens
agacggctttttaaagggggtccccaatcatgtttctcttcactcgatgggacctgccaacaagggtctccatccacctcctacaagtgtgtttagatcagcaacatgttcatacatccatgaaacagaggtcccagaggaaagggaaggccgacaccttgactgtttcacagccttcactgttaatacctccaggtactgcaatattcaaggcractatggactggagtagaaccccagcatattacacaaggcatacaacaaaagtggacagactgttgcatgggtgcccattcccataactcttcaccaggcagatcctccaggccttggcctctagtcatcccttgccgggttatcgagccattagcagctctgcaactccttgaacagagctcctggggaactgaaagcctctctgccaccacctctgcagtgaaacttcccttgctaccctcatactaatgaaggagcaaagacactaagtgccttatccacacctccaacaagctgcagtcaacccaagaagaggaggccagtccatctcccatgggatccaactacttctccacctgctcatcaccaaacagcaca

SEQ ID NO: 761840 - DNA, 574 bp, Homo sapiens
aacactaaaagtttaagaaaatgtgcagacaagttcactgagtaattctacgtttaggaatttatctggaggcagtaattcttgctcttggcgtcttgagatgattatactaaatgtgttttcttcctgcagtgtaactacagaacctaagagaaatcccatgattattccctactcctgttgatgcatttgggggcaaataataaagtcagaaccagagaaacagtattgtggtattgtagcaagagattaaactggagccaaacagaccagtatttcaactccaacttggtcacttacagttttgtgactgagtagttcattcatttctttgaacctcagtttcttcatcagcaaaagtgggattaatacayatacccttcagggttgtagtcacaggcagtaagtacatgagccagacaataattgctctgacacacacccctctctgaaaataaagcaaatgaaataagtttaccattggtaggttaaattaggaaatgaaaaaatgaacaacaaaacaacacaaaaaacctagaaaggatcagagcagagatacagtctagctgacaga

SEQ ID NO: 761841 - DNA, 569 bp, Homo sapiens
tgttccctataatctgctaataattttgctttttcatttagtttgcctgttaagcaagaatgtacaaatcaggctatcttgaatgcccagaaattctagtgttagatatccactttaacttccaggacacaaattacaaactggcaattcctgggctggctttggcctgccgacacctaaaactcggaaaatctcccctacaaatccagatttcaaaattctctttcaaaattaaatgatctggctacattgggctyatacacttgagggctgtaatttgactagaggtgaatattggctgccttcttcagataagggttgtattctgatttgccagtctcctccaggtccacttcatgtatttccttatttagttgccccataaacattggaaatttttatctttgaagaaggagctcagtaagctttctcttccttcactatgtctcctgaagagtagtaaacactgaagcactgaggtgaattggaaaagatcaagaacataattgggtcactttcttaaagagtggaatattaggctgggcatagtggctcgctcattcttgtaa

SEQ ID NO: 761842 - DNA, 650 bp, Homo sapiens
tctcctgtatgaggtgtctgtcgacccctgctgggaagtgtctcccagacaggaggtacagggttcacgaacacacttgaggaggctgtctgttccttagcagaggtcgagcactatgctgggagatctgctgctcttttcagagccagcaggcaggaacgtttaagtctgctgaagctgcgcccacagctgccccttccccgaggtgctctgtcacagggagatgggagttttatctataagcccgtgactgtggctgctgcctttcttccagtgatgccctgcccagagaggaggaatctagagaggctgtctggctacatcagctttgcagagctgtggtaggctttgcccagttcctacttcccggcagctttgtttatactgtgaggggaaaactgcctactcaagcctcagtattggcagatgcccctccgcccaccaagctggagcatctcaggtcaacttcagactgctgtgctggcaggaagaatttcaagcmaatggatcctctcttgctgggctctgtgggggtaggatcctctgagctagaccatttagctccttggcttcagtcctttttccaggggagtgaatggttctgtcttgctggcattccaggtgccactgggatattaaaaaaaaaaaaa

SEQ ID NO: 761843 - DNA, 524 bp, Homo sapiens
acaatacacaggaatataacttacaagggacatgaaggacctcttcaaggagaacaacaaaccactgctcaaggaaataagggaggacacaaacaaatggaaaaacattccctcctcatggataggaataattaatcttgtgaaaatgacaatactgcccaaattaattcatatattcaatactattcccatcaaaatactattggcattcttcacagaattagaagaaactacttaaaaatttatatggaaataaaaagagcatgaatagccaagacaattgtaagcaaaaagaacaaagctggaggcatcaccctacctcacttcaaactatactacaaggatacagtaaccaaaacagcatggtacttgcaccaaaacagacacakagaccaatggaccagaatagggacctcagaaaataaggccacacatctacaaccatctgatctttgcaaaacctcacaaaaacaagcaatggggaaagattttctatttaataaatggtgctgggaaaactgtct

SEQ ID NO: 761844 - DNA, 553 bp, Homo sapiens
aatattggccaatacaaaaatgcttgaataaatggtgatatgttattggcagacgttattattagcagccataagtcagtctctatatgccactttctctggcattctactatggaaaataaacaaacactttcaaagtttctcttttgccttttagtccatgtaaattatatcttggttagtaatatttgaagagagatctcctgtgaggtttatgagaaagttatttctcttcctataaagacgtgtgtgtgtgtgcgtgtgtgtgtgtgtgtgtgtgtgtgtgtgtgtgtgtgttgaggggctgtacataggagaccagcctagttcttgcttaatagtgagggcataatayggtgaattgaagcaactacctttcagttatgaggctacgggtctaagaatgaatgtgaggattgctgatggaaagaagtgagcctggcttacaataacattatttagtgactgactctctgtccaaatctttattatttgagaaaacaacccctaaatttaaatggaaggttgtcgggaatttctattaagtaaactg

SEQ ID NO: 761845 - DNA, 640 bp, Homo sapiens
agcacattgtcaataaataatattgtctttttatatttgaaagtatgaataactattggaaggcaatgttttatcagtatattaacacataaatataaactgaattgttagaaattgttatatgttataacattattgttattcatcaaaatgaaatcaaagagcatattaaaaatatgtgttgattytagatgctacacacatatggaactaatttttgtaatatataatcaacataaaaatgttatgctataatcttgaagtgattttggtttattttttatttaaagttgattatatattaaataacttatgaaaaacatcatgacagtgtgatggattacacctgtaatcccagccactcagtaggctgaaatgggaggatcttgaggccaggagttcaagaccagcttggacaatgtaataagacctcatctttaaaaaagtgaaaaaaaaaaaatacctgggtgtggctgagtatgcctataattccaactgaggcagaatgattacatgagccctggaatttgaagctgcagtgagctatgacctgaagtgagctatgatcataccactgagttacatcctgggcaacaaagtgagaccctgacttaaaaaaaaaaaaaaagagtaataagct

SEQ ID NO: 761846 - DNA, 629 bp, Homo sapiens
aacatatattaattattataaggagattaatatttaatctattagctatgccatcctcaaaaagaaaaaaaagccctcagaaaatctaactggaattacattaaacttaaataatagtcttctaatgagagtgagtcacagatactctcatctaagagcatgatgactccatttcatttgtgttaatgcgctggtaggtctttcacttatatattgtaggttgtgtctcataaaggtggttattatttgtttcttaaacttataactatcttttgtctattgtgaaatttaattgactactactgatctattaatggtaatttaaacacagttttatggctaacaaaacttaatattatgacctccaaaactaatgttaacatttctcagataaatcaagggactctgtatgagttcaacctaaaggtttggcattctggagatctttaaaattttataagtaactgagaagaaagagcacamtgatctatttctctcaccaaagtccaaaagccatattacccaccattatctctacacagagagagcttttgcggcaggacgcccaataaatatggcagtttgggagctacttttcaaaagcactgtcattctagttactagcatgg

SEQ ID NO: 761847 - DNA, 561 bp, Homo sapiens
gtattctgtcataattttagttgttatgtgaaatcttttataaagttatatttatttggataggttacccatgtgagtattccaaagatcatgtgaaatatataaatgtctgatgatcctgatgtgatgctgtcagttatgattcagattatcttacaatgcttcatgtaataaaaaaaataagtaatttttcttgtcaattgtgaactmtcagatttttaaccatggctcttcaaagatttttttttaatccacagttttgatttatctctaaatgcatttgtaataatatttatggaaaggactctaacaagtattcttgagcatagatttcttatagctttggacttgtgcacctaatacaatttttcagaactctgagaaaaacaaactgatgtgatcataaaattgcaaatcaagatcaatcagaacaaaaactaattatatgaaggtaaataactgaagataatatttttatgacttttatttgaaacagaaacattcttggttctttacttaaatattgttttttccagatttagaaaaaaatttcttttaggc

SEQ ID NO: 761848 - DNA, 561 bp, Homo sapiens
gtattctgtcataattttagttgttatgtgaaatcttttataaagttatatttatttggataggttacccatgtgagtattccaaagatcatgtgaaatatataaatgtctgatgatcctgatgtgatgctgtcagttatgattcagattatcttacaatgcttcatgtaataaaaaaaataagtaatttttcttgtcaattgtgaactctcagatttttaaccatggctcttcaaagatttttttttawtccacagttttgatttatctctaaatgcatttgtaataatatttatggaaaggactctaacaagtattcttgagcatagatttcttatagctttggacttgtgcacctaatacaatttttcagaactctgagaaaaacaaactgatgtgatcataaaattgcaaatcaagatcaatcagaacaaaaactaattatatgaaggtaaataactgaagataatatttttatgacttttatttgaaacagaaacattcttggttctttacttaaatattgttttttccagatttagaaaaaaatttcttttaggc

SEQ ID NO: 761849 - DNA, 657 bp, Homo sapiens
ttccaatttctccatatctttgccaacacttacgttttcctgcttacagccatcctcttgggtgtgaagtggtatctcattgtggttttgatttgcattttcctaaagactgatgatgttgagcatcttttcatatgcttctcgaccatttggtatcttctttggagaaatatctattcaagccctttataagttgggttgtttgtccttttttcttttgttgagttgtaagagtttttgatgtattctggatactagacccttrtcagatatagattttccagatattttctcccattttctccgttgtttttctactcttgaaagtattctttgatacttaaagttttaaattttgatgaagttcagtttacttatttggtttgtttctttgcttgtgttttggtgtaacatctaagaattcattgctaaatcgaaagtcatgaagattgacccccatacttttttctaagacttttgtggttttagttcttactgatttgctagtgtttaaaaggatttttgcatctattttatgcgagatatctgtctgtaattttctttatttttagtgtctttggttttcatatcagagtaatgctggccacataaaatgaggtagtaaatgttccctcctattcctttttctggaagagt

SEQ ID NO: 761850 - DNA, 594 bp, Homo sapiens
aggaaattggaaaagagtgagtacaaattcccccaaatcctattgtgttagaggctcccagctcacataagggctttaacaaatagctaaaatctgagttgttttctgattgtctgcctgtatagcagctaccgtttcttcccctggtctgacaaatgtcagttaacatcctcacatcctttggaatttacttcactcattctttgttactttctgagggtctaaagatagttaagattttgtacattatctagcctttgttgttatgatgggaatagctttcttttttgcagctttttaatatcmcgagaacaagtatagagcctcctcctatgttttgactttatttttatttttataaattttagctacacaatttccttttcacagagtcacttatagttttcttcccctatgcctctgatttcatgttttgattagaaagggctttcttactactaaatgaaagaatgaaaagaggatctctcatgttttctcatagtgcatttacagtttattattttacattaaaattcttgattcacctggagtgtattttgatatatagcattttatataaattcaaatttattt

SEQ ID NO: 761851 - DNA, 607 bp, Homo sapiens
tcagagagatacctgtactcccacattcattgcagcactattcacaataaccaagatatgaaatcaacctaagtgtacataaatgaatgaaggaataaagaaaatgtggcatatatacacaatgcaatactattcagccttacaaaagaagaaaatcatgtcatttggaataacacagatgaacctggaggacattatgttaagtgaagtaagtcaggcrcaaaaagacaaatattgtatgacctcagttacttgtggaatctaaaaatgttgaactcatagaaacagggagtaaaatggagcttgccagaggctgagagataagatatttgtcaaatgacataaaatttcagggagaataagttcaagtgatctactgcacatcatggtggctacagttaataacgatatattacagacttaaaaattgctaggctgggcacggtagctgacgcctgcaatctcagcactttgggaggttgaggcaggggaatttgagaccaggagtttgagagcagcctgaacaacatagtgaaacctcatcctaccaaaaaaaaaataaaaaattagctgggcatgatggcatgtgcctataattccatctact

SEQ ID NO: 761852 - DNA, 607 bp, Homo sapiens
tcagagagatacctgtactcccacattcattgcagcactattcacaataaccaagatatgaaatcaacctaagtgtacataaatgaatgaaggaataaagaaaatgtggcatatatacacaatgcaatactattcagccttacaaaagaagaaaatcatgtcatttggaataacacagatgaacctggaggacattatgttaagtgaagtaagtcaggcgcaaaaagacaaatattgtatgacctcagttacttgtggaatctaaaaatgttgaactcatagaaacagggagtaaaatggagcttgccagaggytgagagataagatatttgtcaaatgacataaaatttcagggagaataagttcaagtgatctactgcacatcatggtggctacagttaataacgatatattacagacttaaaaattgctaggctgggcacggtagctgacgcctgcaatctcagcactttgggaggttgaggcaggggaatttgagaccaggagtttgagagcagcctgaacaacatagtgaaacctcatcctaccaaaaaaaaaataaaaaattagctgggcatgatggcatgtgcctataattccatctact

SEQ ID NO: 761853 - DNA, 586 bp, Homo sapiens
gagtaatatttgtactttattaacacatttaaaaagatcttgtatatgtaccacattttccttatacggtctatcattgttgggcatactatgcagccataaaaaggaataagataatgtcctttgtagggacgtgaatgaagctggaagccattatcctcagcaaactaacacaggaacagaaaaccaaacactgcatgtcctcactttataagtgggagctgaacartgagaacacatggacacagggaggggaacaacatacactggggccttttggagggtggggtttggggagtgatagcattaggaaaattagctaatgtatactgggcttaatacctaggtgatgggttgataggtgtagtgaaccaccagggcacatgtttacctatgtaacaaacctgtatgtcctgcacatgtaccccagaactaaaaataaaaattaaaaaaatcttgtagcaggcctcaaaactaccataatttgaagtagtgatgagcattcaatgacacttcaacatatctgcaataactgagatgtgagatgaagaatgtattcgatttcttttgatgacaagtttgtggg

SEQ ID NO: 761854 - DNA, 586 bp, Homo sapiens
gagtaatatttgtactttattaacacatttaaaaagatcttgtatatgtaccacattttccttatacggtctatcattgttgggcatactatgcagccataaaaaggaataagataatgtcctttgtagggacgtgaatgaagctggaagccattatcctcagcaaactaacacaggaacagaaaaccaaacactgcatgtcctcactttataagtgggagctgaacaatgagaacacatggacacagggaggrgaacaacatacactggggccttttggagggtggggtttggggagtgatagcattaggaaaattagctaatgtatactgggcttaatacctaggtgatgggttgataggtgtagtgaaccaccagggcacatgtttacctatgtaacaaacctgtatgtcctgcacatgtaccccagaactaaaaataaaaattaaaaaaatcttgtagcaggcctcaaaactaccataatttgaagtagtgatgagcattcaatgacacttcaacatatctgcaataactgagatgtgagatgaagaatgtattcgatttcttttgatgacaagtttgtggg

SEQ ID NO: 761855 - DNA, 690 bp, Homo sapiens
gatccagaaaatgcccgtgattccacaagtctcttatgaaagactgtccctcaagtgctgctatggattgagctttgtcctccccaaattcataggttgaagttctgacccccagtgcctcagaatgtcaccatccttggaactatatttgaagatgatcacatcaagatgaagttggccttaatccagtatgactggtgtctttttaagaagggaaaatttgggcacagacacacacacacacagagggaagacaatgtaaagacacagggagaagacagccacccacaagctaaggcaaggtctggaacagatccttccctcatggccctcaagaggaaccaacccagccaacaacttgattttggacttctggtctccagtactgtaagacaatacattaaagccacccagtctgtagtactttgttatgacagctctggcagactaacacaggtgcaaatattgagtgtgacagttccacgagacaataagattgggggcagtgggcccaaggcaaycatcaaaaggcaaagaggtcaaggcagaagacaggaacccttggtatgggctcccctgagcatcaggagttctgtgacccctctcatcagctttcccacaaacaaggcacagtgttagattcaggcacaccttgtctcaaatctggaatgctccactttccagctgtgg

SEQ ID NO: 761856 - DNA, 600 bp, Homo sapiens
gtcccctagcacataaaggaaaaaaaaagaatgatagagaaaaaagaaaaaaaaaagaatgatgtggctttagaattaaggcattgtgggctacagggataacaccaccacaaaatttcccctaacaataacaacaaaaatccttccagggagggtgaagtcctcgggggtctttccacctggctcagtgcttcccttgcctccccttatagacaaagctgcacttagccccccagttgcctgctccctgtttcttggaacatccttctgcttgagctcctgtccttgtctagacctggcttctgtgctcccctcttgtatcatacatatctcctggcatctggccgggtcctcatccaaacatccrcagagccccagaatgcatatgcatgtcccaactccactccggttcccacccagcctccagttctcgatctaccagccacccctctcaaaccagcacctgcccagatttgtacctgcaccctgcctcaaatcaccagtctgtgctccacagcacccccttctggcacaagacttgtttgtaatttgtccacttttggccaacagtttccatccatgtatatagcaagcaccatt

SEQ ID NO: 761857 - DNA, 580 bp, Homo sapiens
attttttaaaaaatgggcaacatatctgatagatatgtctcaaaaggagagctacaaatggcaaacaggtatatgagaaggtgctcaacctcactgaccatcagagaaatggaaatcataactacaataagatatcatctcaaatgatatatctcaaaaagatatcatttcaaatgatatatctcaaaaagatatatcatttgagatatcatctcaaataaaatggcttttatttaaaagacacgcaataacaaaggccggtgaggatgtgcagaaaagggaaycctcatacactgtggaaatgtaaattagtacaactactatggagaactgtttggaggttctttaaaactaaaaagacagctaccatgtgatccagcaattccactgttagatatatactcaaaaaaaaagaaaataaacatcatgaagaaatatctgcactaccatatttattgcatcattgtttacaatagccaagatttggaagcaacctaagtgtccgtcaacagaaggaaacataaagaaaatatggtacattgacacaacaaagtactattcagccattaaaataaagaga

SEQ ID NO: 761858 - DNA, 580 bp, Homo sapiens
attttttaaaaaatgggcaacatatctgatagatatgtctcaaaaggagagctacaaatggcaaacaggtatatgagaaggtgctcaacctcactgaccatcagagaaatggaaatcataactacaataagatatcatctcaaatgatatatctcaaaaagatatcatttcaaatgatatatctcaaaaagatatatcatttgagatatcatctcaaataaaatggcttttatttaaaagacacgcaataacaaaggccggtgaggatgtgcagaaaagggaaccctcatacactgtggaaatgtaaattagtacaactactatggagaactgtttggaggttctttaaaactaaaaagacagctaccatgtgatccagcaattccactgttagatatatactcaaaaaaaaagaaaataaacatcatgaagaratatctgcactaccatatttattgcatcattgtttacaatagccaagatttggaagcaacctaagtgtccgtcaacagaaggaaacataaagaaaatatggtacattgacacaacaaagtactattcagccattaaaataaagaga

SEQ ID NO: 761859 - DNA, 641 bp, Homo sapiens
gtacaccttgagctgtcatcattggaaagtctggttaaagagatttgagctctgtgcattattgaggcatgaaaaataatattctaacacattagaatatataatttcactgaaatcttcctaaagatctttatataattgttaccaaatccaacgtttaaaaaacacatatgtatctgtgatttattctattcaaaaatgtcttaaaagcccaaatttcaccactatacaatttatccacgtaactcaaagccacttgtactcccaaagcgattgaaatttaaaaagaaagaaagaacatgtctttatacagtcaaaatagatctcccactgtcatattctacttatctttagttgtgttacttttgggtggaagaacctcaaattccatatatttctgtaattagaggtagtctcctattatctttgggyagtgtgagaagagtttttgccattttctaaagcacagtttcctttggcccagttgaaactccagggagttgtgaccctgaaggaaagataatctctgaagagacaattgagtatttctagttgaggacagcatggtgtaagaatgggaaagtatgagagttcacagtcaattgatgatatcagagtggaaggagggacagtagaagagt

SEQ ID NO: 761860 - DNA, 640 bp, Homo sapiens
ctgattttgtatatttcaatatgttctcccagtttgtagattattttttcacttttcttgtaatgtgttttgatgaacataaattatttatttattttttgagatacaatctcactctgtcatccagggtgaagtacagtggcataatcatggcttcctgcagcctcaacctccctggctcaagaaatcctcccacctgagcctcctgagtagctgaggctacaggcatgtgccaccatgtctggctarttttttttcttattttttgtagagacaaagtctcactatgttacccagggtggtcttaaactccttggctcaaacaatcctcccaccttggcctcccaaagtgttgggattacaggcatgagccaccacacttggcctaaattactaacttcaatagttacatttatcgatatttctttaccatttagcccacttgtgtcatattaaagcaatttaaaacacataatcataaaaatcgtctatatattatttttttaaattacagtaagaatgtttaacatgaaatttaccctactattaaactttttagctatataatacagtagtaataattataagcataatgttgtacagcagttctctagaacttaatcatcttgtgtaactgaaa

SEQ ID NO: 761861 - DNA, 601 bp, Homo sapiens
gatatttcttggtggccttaatttgcatttctctattggctagtgatattgattgtgttttttttgcactcattttccatcagtgtatcattttcagaaaaatatctcttcatatatttgtcattttccaattgaatatatgcrtatatttactgttgagctttgaggatgagttacgtattctaaatatgaatcctttgttgaatgtatggtttgcaatagtttctctcaatctattgtttgtcttttcattcttttgacagtctttcatacagcaaaggtatttaattgtgattaagtccaatttacagattttaaaaaatatctagtgcttttagaatcatgtctaagaacttttcatgaagttccaggtcctgaaggttttcttctaggttaactcctaaaagttttagactttttatgttttacacttaaatctacgacccctgttgactcagtttttctaaaaggtatgagatttagattgaggtttactttttttgcccaaagatgtccaattattattccagaaccatttgtgaaaaagttcatcctttttccattgaattgtctttgcatttttataaaacatcagctagcc

SEQ ID NO: 761862 - DNA, 691 bp, Homo sapiens
aaactctgcagaagcttcctgaggaacttctttgtgatgtgttcattcatctcacagagtggaccctttcttttgattgagtagtttggaaacagtctttttgtagaatctgcaaagggatatttgagggtgctttgaggcctatggtgaaaaagaaatatcttcatatgaaatctagacagaaggtttctgagaaacttaattgtgattcgtgcattcaycacacagagtggaacctttcctttgattaagcattttggaaacactctttttgtcaaatctggaaagggatattttggagccctttcagccccccagtgagaaaggaaatatcttcacaaaaaagctagacagaagctctctgagaaacttctttgtgatgaggttattcatatcacagagttgaaactttcttttgattgaagaggtttggaaactgtctttttctagaatcgccaaagggatatttctcagcagtttgagacctatggtgaaaaaggaaatatcttcatataaaaacgagacagaagctttctgagaaacttctttgcattgtgtgcattcaactcacactgttgaacctttcttttgattgagcagtttggaaacagtatttttgtagaatccacaaagggatatttgggatccctttaggtctatggtgaataccagaatatcttcacataaaaac

SEQ ID NO: 761863 - DNA, 430 bp, Homo sapiens
gacacagtctttttatagaatatgcaaacggatatttcggagccctatgaggctgtagtgaaaaaggaaataccttcacataaaaattagacagaagttttctcataaaattctttgtgatgtgtgtattcatctcacasagctgaacctttcttttgattgagcaatttggaaacagtctttttgtagtatctgcaagtggatatttggagcactttgaggcctatagtgcaaaaggaaatatcttcacataaaaactagacagaagcattctgagaaacttctgtgatttgtgcattcatctcacagagttgaacctttcttttgattgaacagtttggaaacagtctttttgcagaatctgcaaagggatatttgggatccctttgagacctctgatgaaaaacggaataccttcacataacaactg

SEQ ID NO: 761864 - DNA, 430 bp, Homo sapiens
gacacagtctttttatagaatatgcaaacggatatttcggagccctatgaggctgtagtgaaaaaggaaataccttcacataaaaattagacagaagttttctcataaaattctttgtgatgtgtgtattcatctcacagagctgaacctttcttttgattgagcaatttggaaacagtctttttgtagtatctgcaagtggatatttggagcactttgaggcctatagtgsaaaaggaaatatcttcacataaaaactagacagaagcattctgagaaacttctgtgatttgtgcattcatctcacagagttgaacctttcttttgattgaacagtttggaaacagtctttttgcagaatctgcaaagggatatttgggatccctttgagacctctgatgaaaaacggaataccttcacataacaactg

SEQ ID NO: 761865 - DNA, 644 bp, Homo sapiens
gaacctattttttgattgggcaattttataactctctttttgtagattctgcaagtgggtatttggagccctttgctgcctatgttggaaaaggaaatatctacacataaaaaatacacagaagcattctgagaaacttctatgtgatatgtgcattcatctcacagagttgacactttcttttgattgagcagtttcgaaactctctttttgtaaaatctgcaagtggatatttggagacctttgcrgcctatggtggaaaaggaaatgtcttcccataaaaactacatagaagcattctgagaaactccttagtgaggtttgcattcaactcacagtgttgaacctatcttttgtttgagcagatttgaatctctctttttgtagaatatgcaagtggatatttggagtccttagtggcctattttggaaaaggaaatgtcttcacataaaaactatgcagaagcattctgagaaggttctttgtgacgtgtgtgagttgaacctttcttttgactgagcagttttcaaacactccttttgtaaaatgtgcatgtggatatttggagcactttttgtcctatagtgcaaagttaaatatcttaacataaaaactagacagaagcattctgagaaacttcgtt

SEQ ID NO: 761866 - DNA, 644 bp, Homo sapiens
gaacctattttttgattgggcaattttataactctctttttgtagattctgcaagtgggtatttggagccctttgctgcctatgttggaaaaggaaatatctacacataaaaaatacacagaagcattctgagaaacttctatgtgatatgtgcattcatctcacagagttgacactttcttttgattgagcagtttcgaaactctctttttgtaaaatctgcaagtggatatttggagacctttgcagcctatggtggaaaaggaaatgtcttcccataaaaactacatagaagcattctgagaaactccttagtgaggtttgcattcaactcacagtgttgaacctatcttttgtttgagcagatttgaatctctctttttgtagaatatgcaagtggatatttggagyccttagtggcctattttggaaaaggaaatgtcttcacataaaaactatgcagaagcattctgagaaggttctttgtgacgtgtgtgagttgaacctttcttttgactgagcagttttcaaacactccttttgtaaaatgtgcatgtggatatttggagcactttttgtcctatagtgcaaagttaaatatcttaacataaaaactagacagaagcattctgagaaacttcgtt

SEQ ID NO: 761867 - DNA, 646 bp, Homo sapiens
atccagttttgaagcactctttttgtagtatctgcaggtggatatttggagcactatgtggcctattatggaaaaggaactatcttcacataaaaactacacacaagcattctcagaaacttctttgtctttccttccttccctcctttcttccctccttccctccttcctttctttctttctttctttctttctttctttctttctttctttctttctttctttctttctttttctttctttccttccttccttctttctttctttctttccttcggtctccctctgttgccaaggctgaattgtaatgccttgatctccgctctcttcaacctccctgcctctggctcccgtgattctcctgcctctgccttctgagtgcctgggattgcaggcgtgcacygccacacctgactgctttttgtatttttggtggagacgcggtttcaccatgttggctgggctggtctccagctcctgacctcgagtgatctgcccgcctcgtcctcccgagttgctgggactgctgacggattcttgctcactcaatgctcaatgttgcccaggctggagtgcagtggcctgatctccgctcacaacaacctccacctcccagccgcctgccttggcctcccaaagtgctaag

SEQ ID NO: 761868 - DNA, 646 bp, Homo sapiens
atccagttttgaagcactctttttgtagtatctgcaggtggatatttggagcactatgtggcctattatggaaaaggaactatcttcacataaaaactacacacaagcattctcagaaacttctttgtctttccttccttccctcctttcttccctccttccctccttcctttctttctttctttctttctttctttctttctttctttctttctttctttctttctttctttttctttctttccttccttccttctttctttctttctttccttcggtctccctctgttgccaaggctgaattgtaatgccttgatctccgctctcttcaacctccctgcctctggctcccgtgattctcctgcctctgccttctgagtgcctgggattgcaggcgtgcactrccacacctgactgctttttgtatttttggtggagacgcggtttcaccatgttggctgggctggtctccagctcctgacctcgagtgatctgcccgcctcgtcctcccgagttgctgggactgctgacggattcttgctcactcaatgctcaatgttgcccaggctggagtgcagtggcctgatctccgctcacaacaacctccacctcccagccgcctgccttggcctcccaaagtgctaag

SEQ ID NO: 761869 - DNA, 624 bp, Homo sapiens
atggacatatcacagagaagtttctcagtatgcttctgtgtagttttgtgcaaagacattttcttttccactgtaggcctcagagtgctccaaatatccacttccagattctacaaaaagagtgattccaaactgttcaatgaaaagaaagtttcaactctgtgagataaatgcacacatcacaaagaagtttctcagaatatttctgtgtaktttttatgagaagatatatccttttacactataggccacaaagggctaaaaatatttacttgcagattttacagtaagagagtttcaaaactgctctataaaaagataaatgcaactctgtgatttgaatgcacacatcacaaaacagtttctcaggatgcttatgtgtaattcttatgtgaagatatttccttttccaccataggcctcaaagcactccacatatacacttgcagattctacaaaaatagtgtttcaaaactgctcaatctaaagaaaatttcaactctgtgtgttgaacgcactcatcgcaaagatgtttctcagaatgcttctgtgtaattttaatatgaagatatttccttttccacaattggtctcaaagcacttcaaatatcctcttgcagattc

SEQ ID NO: 761870 - DNA, 624 bp, Homo sapiens
atggacatatcacagagaagtttctcagtatgcttctgtgtagttttgtgcaaagacattttcttttccactgtaggcctcagagtgctccaaatatccacttccagattctacaaaaagagtgattccaaactgttcaatgaaaagaaagtttcaactctgtgagataaatgcacacatcacaaagaagtttctcagaatatttctgtgtagtttttatgagaagatatatccttttacactataggccacaaagggctaaaaatatttacttgcagattttacagtaagagagtttcaaaactgctctataaaaagataaatgcaactctgtgatttgaatgcacacatcacaaaacagtttctcaggatgcttatgtgtaattcttatgtgaagatatttccttttccaccataggcctcaaagcrctccacatatacacttgcagattctacaaaaatagtgtttcaaaactgctcaatctaaagaaaatttcaactctgtgtgttgaacgcactcatcgcaaagatgtttctcagaatgcttctgtgtaattttaatatgaagatatttccttttccacaattggtctcaaagcacttcaaatatcctcttgcagattc

SEQ ID NO: 761871 - DNA, 631 bp, Homo sapiens
gggatcccaaatatccttttgcaggttccacaaaatactgtttccaaactgctcaatcaaaagaaaggttcaacactcagagttgaatgcacacatcacaaagaagtttctcagaaacttctgtctagtttttatgttaagatatttcgtttttcaccataggcctcaaagggctcctaaatatccctttgcagattctacaataagactatttcctaactgctccatcaaaagatagtttcaactctgtgagatgaatgcagtcatcacaaagatgtttcttagaaagattatgtctcgttttaawgtgaagatatttctttcttcatcataggcctccagcctctcagaaacatccctttacagaatctacaaaaagactgtttccaagtactcaaagaaaagaaaggttcaactctgtgagtaaaatgcgcacatcaaaaagaattttctgagaatgtttctgtcgagtatttatttgaagatatttcctttttctccattggactcaaagggctcccagataaccctttgcagattcctcaaaaatgttgtttccaaactgctcaaacaaaagaaaagttcaactctgtgagatgaatgcacacatcataaagaagtttctcagaaa

SEQ ID NO: 761872 - DNA, 607 bp, Homo sapiens
ctgtgtggtgtttatgtgaagatatttcctttttcaccacaggcctcaaagtgctcaaatgtccacttgcagattctataaaaagagtgtttcaaaacggctctattaaaagaaaggttcaactctgtgagttggatgcacacttcacaaagaagtctctgtgtatgcttctgtctagtttttatgtgaagatatcccgtttccaatgaaggcctcaaagtgttccaaatatccacatgtaaatactacaaaaagagtgtttgaaaactgcwgtaggaaaattaatgttcacctctgtgagttgaaagcaaacgtcacaaggaagtttctgagaatgtttctgtgtagtttttaagtgaagatatttcctttttcaccatagacctcaaagctctccaaatgtccacttgcagattctacaaaaagagtgtttcaaaactgctctatcaaaagaaaggttcaactctgtgggatgaatgcacgcatcacaagaaatttctgagaatacttctgtgtagtttttatgtgaagatattccctttttcactataggcctcaaagccctctaaatgtccacttgtagattccacaaaaagagtgtttcaaa

SEQ ID NO: 761873 - DNA, 607 bp, Homo sapiens
ctgtgtggtgtttatgtgaagatatttcctttttcaccacaggcctcaaagtgctcaaatgtccacttgcagattctataaaaagagtgtttcaaaacggctctattaaaagaaaggttcaactctgtgagttggatgcacacttcacaaagaagtctctgtgtatgcttctgtctagtttttatgtgaagatatcccgtttccaatgaaggcctcaaagtgttccaaatatccacatgtaaatactacaaaaagagtgtttgaaaactgcagtaggaaaattaatgttcacctctgtgagttgaaagcaaacgtcacaaggaagtttctgagaatgyttctgtgtagtttttaagtgaagatatttcctttttcaccatagacctcaaagctctccaaatgtccacttgcagattctacaaaaagagtgtttcaaaactgctctatcaaaagaaaggttcaactctgtgggatgaatgcacgcatcacaagaaatttctgagaatacttctgtgtagtttttatgtgaagatattccctttttcactataggcctcaaagccctctaaatgtccacttgtagattccacaaaaagagtgtttcaaa

SEQ ID NO: 761874 - DNA, 559 bp, Homo sapiens
ttgcaacatcggccatgaagggctccaaataaacacttgcaaattctacaaaaagagagtttcaaaactgctctatcaaaacataggttgaagtctgcgacttcaatgcacacatcacagggaggtttctcagaatgcatctgtgcagtttttatgtgaagatatttccttttccaccataggcctgaaagcaytccaaatatccacttgaagattctgtgaatagagtgtgtcaaaactgctcaatcaaaagaaaggttcaattctgtgagatgagtgcacacaaaacaacaagtttctcagaatgcttctgtgcagttattatgtgaagatcattccttttctacaacaggcctaaaagagctccaaatatccgcctgcagattctacaaaaagagtgtttccaaactcctcaatcaaaagagaggttcaactctgtgatatgaatgcacacatcacaaagaagtttctcagaatgcttctgtgtagtttttatgtgaagatacttccttttccacattatgccacaaagggctccaaatatgcatgtgcagattct

SEQ ID NO: 761875 - DNA, 559 bp, Homo sapiens
ttgcaacatcggccatgaagggctccaaataaacacttgcaaattctacaaaaagagagtttcaaaactgctctatcaaaacataggttgaagtctgcgacttcaatgcacacatcacagggaggtttctcagaatgcatctgtgcagtttttatgtgaagatatttccttttccaccataggcctgaaagcactccaaatatccacttgaagattctgtgaatagagtgtgtcaaaactgctcaatcaaaagaaaggttcaattctgtgagatgagtgyacacaaaacaacaagtttctcagaatgcttctgtgcagttattatgtgaagatcattccttttctacaacaggcctaaaagagctccaaatatccgcctgcagattctacaaaaagagtgtttccaaactcctcaatcaaaagagaggttcaactctgtgatatgaatgcacacatcacaaagaagtttctcagaatgcttctgtgtagtttttatgtgaagatacttccttttccacattatgccacaaagggctccaaatatgcatgtgcagattct

SEQ ID NO: 761876 - DNA, 634 bp, Homo sapiens
tgcttttgtctagtttttatgtgaagatatgcccgtttccaatgaagacctcaaagtgctccaaatcatccacttgcagatccttcaaaatgagggtttcaaaattgctctatcaaaaggaaggttcaactctgtgagttgaacacacatatcacaaagaagtttctcagaatgcttctgactactttttatgtgaagacacttccttttccaccatagrcctcaaagagctcaaaatatccacttgtagattctacaaaaagactgtttcaaaactgctctatgaaaaggaatgttcaatgctgtgagttgaatgcacacatcacaaagaagtttctgagaatgcctctttgcattttttatgtgaagatattcccgtttccaacgaaggcctcaaagtgttccaaatatactcttgaggattctacaaaaagaatgtttcaaaactgctctatgaaaaagtatgtttaactctgtgatttgaatgaaaacatcataaagaagtttctgggaatgtttctgtctcgtttttatgtgaagatatttccttttccaccataggcctcgaagcactccaaatgtccacttgataattctacaaaaagaatgtttcaaaactgctctatcaaaagaa

SEQ ID NO: 761877 - DNA, 634 bp, Homo sapiens
tgcttttgtctagtttttatgtgaagatatgcccgtttccaatgaagacctcaaagtgctccaaatcatccacttgcagatccttcaaaatgagggtttcaaaattgctctatcaaaaggaaggttcaactctgtgagttgaacacacatatcacaaagaagtttctcagaatgcttctgactactttttatgtgaagacacttccttttccaccatagacctcaaagagctcaaaatatccacttgtagattctacaaaaagactgtttcaaaactgctctatgaaaaggaatgttcaaygctgtgagttgaatgcacacatcacaaagaagtttctgagaatgcctctttgcattttttatgtgaagatattcccgtttccaacgaaggcctcaaagtgttccaaatatactcttgaggattctacaaaaagaatgtttcaaaactgctctatgaaaaagtatgtttaactctgtgatttgaatgaaaacatcataaagaagtttctgggaatgtttctgtctcgtttttatgtgaagatatttccttttccaccataggcctcgaagcactccaaatgtccacttgataattctacaaaaagaatgtttcaaaactgctctatcaaaagaa

SEQ ID NO: 761878 - DNA, 634 bp, Homo sapiens
tgcttttgtctagtttttatgtgaagatatgcccgtttccaatgaagacctcaaagtgctccaaatcatccacttgcagatccttcaaaatgagggtttcaaaattgctctatcaaaaggaaggttcaactctgtgagttgaacacacatatcacaaagaagtttctcagaatgcttctgactactttttatgtgaagacacttccttttccaccatagacctcaaagagctcaaaatatccacttgtagattctacaaaaagactgtttcaaaactgctctatgaaaaggaatgttcaatgytgtgagttgaatgcacacatcacaaagaagtttctgagaatgcctctttgcattttttatgtgaagatattcccgtttccaacgaaggcctcaaagtgttccaaatatactcttgaggattctacaaaaagaatgtttcaaaactgctctatgaaaaagtatgtttaactctgtgatttgaatgaaaacatcataaagaagtttctgggaatgtttctgtctcgtttttatgtgaagatatttccttttccaccataggcctcgaagcactccaaatgtccacttgataattctacaaaaagaatgtttcaaaactgctctatcaaaagaa

SEQ ID NO: 761879 - DNA, 555 bp, Homo sapiens
aagaataaatctctggctgggtgcagtggctcatgcctgtaatcccagcactttgggaggctggggcaggtggatcacttgaggtcaggagttcgagaccagcctggtcaacatggcaaaaccgcgtctctattaaaattacaaaaattagccgggcgtggttgcgggcacctgtaatcccagctactcgggaggctgaggcrggatacttgcttgaacccaggaggcggaggttgcatggagtaagctgagatcttgccactgtactccagcctgggcaacagagcaagactccatctcaaaaataaataaacaaataagtcttcattatttcccagctctgtcagggaagcaaccaatcaagaaataaatgattcacactaaatggtggcaactgtgatgaaaatgatgcaataggggatttgtagagagggctattggaatgggggaataacttaatttcatggcaaggaaacatctctttgaagaaatgaggtttgagccaaaggagaagagcaaagggcatcctgcaatgtgtacggaatggatgtcgta

SEQ ID NO: 761880 - DNA, 568 bp, Homo sapiens
tcattgtcataccaggaaacgagcttgacaaagtggccatcgagggcagtgccagccccagcattgaaggtggaagagtaggtgtgggtgtcgctgttgaagtcagaggagaccacctggtgctcgtgtagcccaggatgcccttgagggggcgttggatgcctgctttactaccttcttgatgtcattgtatttggcaggtttttccagatggcatgtcrggtccatgaccaacacattggcagtgaggacacagaatcccatgccagtaagcttcctgttcagctcagggatgaccttgcccacagctttggcagtgccagtagaggcagggatgatgttctggagagctccacggccgttatgccagtttcccggaggggccatccacaatcttctgggtggcagtgatagcatggactgtggtcatgggtccttccacgataccaaagttgtggatgacgttggccaggggcgctaagcagttggtgatgcaggaggcattgctgacgatcttgaggctgttgtcatacttctcgtggttcacatccatcacgaacatgggggc

SEQ ID NO: 761881 - DNA, 556 bp, Homo sapiens
atgtatactgttctgtgtatgccttttcttttattcaatacatcttggagatcttttcatatcagttaataaaggcagtaatgggctagagtcaacagagatgaatcttttctcaagttcaagttcagtgacctcatgttggttgcttgaagttccccatggtggaagtatctaaaccacaagcaaatgctgcagtcagagtgaaccccaccccagcctccccagmtagagaactggatgttaaacatttgccagcacaccactagataaagtgctctcttttatttcattttagtgtattctatttcatttcatgtttgtagcaagaatacttaccaagagatttaccctcttcacattttttaatggctgtgtagtaatctattgtatagatgaacaatagtgtatttaatcaatcccctgttgatggacatttacgttgtttctgatcctctgccaatgcaaacaatgctgaaagaagcaattttgtacctacatctcttcacatgtgtacatgattaagaaacattcctagaagtggcctgactgggtcaaa

SEQ ID NO: 761882 - DNA, 625 bp, Homo sapiens
cacgcaccacttagtcgggttttctgtttaagatcttctcaaggctgcagtcaaggtgttgacagggctgtgttctcatctggaggtttgacagggaagagttcacttcccaaactagcttgggctgttggcagaattcatttccttgtggttggaagaggcaagccctcagcatcttgttggctgtgggctagagggtgctctcagctcccagaggcagcttctccttgccatataggctttccaacatggctgttcacctcyttaagccaacaaagagagtctctagagtgagtcagttaacaagacagaaactttcacaatgtaaggtaatcataggagttacatttcatcacctttgtcatattttcttggttagaaaccagaggtcccacccacacttaaagggagagaattacacaaaggtgtgagagttaaggatcatgggaagccattttaaaatttgtctgcatatgacaatgcagcaggtacaattggctccccggcagccagcccaccccctagctccaggggaaagcctgattggtccaaaggtaaccatgctcttttccatgattggtttgggaatgagcatgtgacccatctccagcctatgatgtgagaa

SEQ ID NO: 761883 - DNA, 613 bp, Homo sapiens
tgtatatgtctgttatatccatttgatctataaagttgttcaagtcagtttctttattgattttatatctggttgttctagctgttattgcaagttatgtagggaagtctcctactattattgtattgctgtcaatttcttccttcagatatatcaatatttccattacatattttagcgctctggtgttgggtgcacatctatttataattgttatttcttcctggttsattgacccttttattattatatagtgtccccttttgtctcttgtgacagtttttgacttgaagtctattttttctcacgtaaatatggtcacccttgctttctttttggctaccatttgcatggatatattttttcatcccttcactttcaggctgtgggtgaccttaagtctaaactgagtctcttatacacagcatattgctagatctcacgtgtgtgtgtgagtgtgtctgtgtgtgttacatccactcagcaactctgtatctttccaatggggagtttaatccatttacatttaatgttattaataaagacttaccgttgccaatttgcgaattgttttttgtctttttaaaattgttttattcctcttttctgcctt

SEQ ID NO: 761884 - DNA, 636 bp, Homo sapiens
tagccaagacaatcctaagcaaaaagaacaaagctggaggcatcacactacctgacttcaaactatactacaaagctacagtaagcaaaacagcatggtactggtgccaaaacagacttgtagaccaatggaacggaagagagccctcagaaataacaccacacatctacaaccatcagatctttgacaaacatgacaaaaacaaacaataggaaaggatctcctattcagtaaatggtgctggtaaaactggctagtcatatgcagagaactaaaactggaccccttccttacaccttacacatgaattatctcaagatggattaaagacttaaatgtaaaacccaaaaccataaaaatcctagaagaaaaactagacaatagcattcaggacataggcatgggcaaagacttcatgacaataacaccaaaagccaattgcaacaaaagccaaaattgataaatgggatctaattaaactaaagagcttctgcacrgcaaaagaaactatcatcatagtgaacaggcgacctacagaatgggagaaaatgtttgcaatctatccatctgacaaagggctaatatccagaatttacaaggaacttacacaaatttacaagaaaaaaagcaaacaac

SEQ ID NO: 761885 - DNA, 655 bp, Homo sapiens
ggcaggaacacaaagacctatgagaatgattaagaaacaagcaagtcaaaggaggagatgaggcagaataaagcaaacaagaggcaacatcagggatgccagaagctgaaaaagtttgtacctgaatctaattttatatgtttctcactggggcataagtctaaggtgactaacatagaaactacagacagaaataagtaaaaacgcaagcaggagtgtagaacagaggtcttgccaaataagctcattgctttttattctaccttcartgaagatggagaaaacatttgctaattgtcacaaaattctttaagtggaggccaatgggcttaatgcttctcattctgtcattcagggctgtaaatattcttgctccattgtccctttttcgtctcctatcagagtgaaaaagaattattatctctagggagttagaaagttttgcaaaatgtgaagagctctaatttgatgtggtgttgcaatcgttgttcagtctcccaggctagcgggcatggtgttctgatccttcccttcagcctgagaatgcagatgaagaaggtgttcagggaaacgctctattgttctgtcctctcccacaggggaaaaggggaaaggtggtttcagggctaccgcgaagcaccattgctttctcctg

SEQ ID NO: 761886 - DNA, 530 bp, Homo sapiens
ctctgtgatttttcctctccataacccttaaccccagtctaaccatgagaagaacatcagacaaatcccaatagaagggcaccttatgctatacctgaccagcgctgctcaaaaactgaaacacctcaacttttagaaaaaatagaagaaaaatcttcatgaggttgtagtaggcawtttttttaggtggaacacaaatagcgcaaactataaagtgaaaccctcctaaactgaactttaagaaaatagaaattttatgctcttcagaagctgttaagaaaataaaaagataagccaaagatttggagaaagtattcgtaatacaaatatctaacaaatgacctgtatccagaatatacaatgatctcttataattaaataattacaagcaaatttcccatttttaaaatattggcaaaataatcaaacacacaattcacaaatcattgctcataagagaaacgcaaattaagtccaaaatgagataccaatacacaaaattgtttgctaggatggctcaaatagtaaga

SEQ ID NO: 761887 - DNA, 490 bp, Homo sapiens
ccttaggcaaccactttgtactcacactatctcccaacctttaaccgctagaaaccatggatctgttccctatcaccatagttttgtcttttaaggaatgtcatattaatggaatcatacagcatgtaactatttgagacttgcttctttccctcaaaaaaatgccaaattgttgcatgtcaataatccctttcctttcatggytaaatagtttttccattgtatagttgtaccacagtttgtttatctagtcactcattaaattagattgtccccattttcagtcattatgagcagagtagatagaaatattaatgtacacaggttttgtgtgaacataaaatatcagttaagtaaatagaaatggaatggatgagtcatatgttttttatatgtatacatgtatgtatacatatatatatctatatgtttaaacttataagaagttgctagattgttttccagagtgtatgtactattttatatttcc

SEQ ID NO: 761888 - DNA, 580 bp, Homo sapiens
acaagttaattgccatattttgaaaatttttttattttttatttttaagttctgggatacatgtgctgaacatgcaggtttgttaaataggtatacacgtgccatggtgttttgcttcacctatcaacctgtcatctaggttttaagccctgcatgcattatcaattccattggtttcataaatcaatattttcctagacaaaatattgaaaattaacaaagctatcttcattttcacatgcatccactgattatcacctagggaataatgtagtgtagctcaactgtttatgacaaagccacccagaaacaacacagggcttagaatataataagcactcaaaaacatttttgagtgaatggatcttcagtgttgacayatgaataataacggttcccatttttttagtaactaccatacatcataaccaatactcacaaaatctctgtgaaatacacactaatgtttccattatacagatgagaaagcagaggctcacataggccttttttaaagtcaatgttattcatttagtgaatggcaagttaaaaatttgaacagcggtccctctgactcaca

SEQ ID NO: 761889 - DNA, 529 bp, Homo sapiens
tggctcatctcagccaggagaggtcttgggctgggagccctgcccacccacccccagcctcaccccagtctggctcccacaccttcctggggtccacccagcaatcctgggaacctggaagcacagaccccctatccccacccgtgcctggcattgaccccaaccccacccgtgcccaacactgaccttcccaccccaagcagggctccagtgtcctggttcctgctccttccacacccacagaggccagaggaatgttctcaggctcccatayccatatcctgcccccggccttcactcttgttggaaaagtccttctacttttatttcctctcaaaggtcactgtctcagaaactgcctggaatgtcttcagcaagaaaccaggatcatgcattcacccattcaacaagcagcagagaccatccactcatccacagcagacacaatcattcagccatttaacaaacagtccaggtatgggccatccccagggaatttgctcctctgcccataagaactttccaaagt

SEQ ID NO: 761890 - DNA, 620 bp, Homo sapiens
agataaagcatcagaaaacattatactatcaaacaaaatgctcaggaaaagaaaaagttaaaaccagggtttaacttgaagactgtaaatgtcaaagagtgcctcgcacaataataagcctgcaactcaagttaatgaggagccgatggcttttactttctccatcrgattgttgtctgcttctcagagatacacaaaggcatgaagttttattcagcaaggactctaaatgccaattactcattttatttcaaaataaaactaaaagggttaaaaaagttaggactagttgtagaaaaacatatgaaggattagaagattcatttgaaattctttttcttttcttcagaaagatctctttctggatagtaattttaagagactggtctgtgcggaaagaaacaaattacagacatgtatttatagtttacaaaaacaaggcaggtacatgttgaatcttgtttgtttaattttattttttcttgtagagaaggggtctcatatgttgcccaggctggtcacgaatacatgctgaatattttgaaaaaatttttttcctgagatagggtcttactgtgtcacccaggctaaagtgcagtggtgcgatcacggctcactgc

SEQ ID NO: 761891 - DNA, 620 bp, Homo sapiens
agataaagcatcagaaaacattatactatcaaacaaaatgctcaggaaaagaaaaagttaaaaccagggtttaacttgaagactgtaaatgtcaaagagtgcctcgcacaataataagcctgcaactcaagttaatgaggagccgatggcttttactttctccatcagattgttgtctgcttctcagagatacacaaaggcatgaagttttattcagcaaggactctaaatgccaattactcattttatttcaaaataaaactaaaagggttaaaaaagttaggactagttgtagaaaaacatatgaaggattagaagattcatttgaaattctttttcttttcttcagaaagatctctttctggatagtaattttaagagactggtctgtgcggaaagaaacaaattayagacatgtatttatagtttacaaaaacaaggcaggtacatgttgaatcttgtttgtttaattttattttttcttgtagagaaggggtctcatatgttgcccaggctggtcacgaatacatgctgaatattttgaaaaaatttttttcctgagatagggtcttactgtgtcacccaggctaaagtgcagtggtgcgatcacggctcactgc

SEQ ID NO: 761892 - DNA, 481 bp, Homo sapiens
aaggaaaccttggccaaatatctactatatctactccacccaccaagttaattactatttgagagaggatttaaaaatttttttaaaaaggagtagtcttgcactaggcgactaccctattccagctatcttatttgagtgtaatttttttcataatacacactctcctaataaagttaatatttgtttgatggctagtcactagattgccctgtgcattcaaagaaatgtttaagaatgatgaagagccattaaaaaaayctctcaaagtagatattaggaaaaaatgtttgcctgtatgccccacaattacatttctctctctttttctctctttttccttttgaagaattatataaaacaacacatgctaaaaatgtactatcagacatgaagctaactaatccaatattaattttaagaatgtaaataaacacgagtcccaaatttcaaagtcaagtttccacaggtaaattaacct

SEQ ID NO: 761893 - DNA, 600 bp, Homo sapiens
  misc_feature 1, 2, 3, 4, 5, 6, 7, 8, 9, 10, 11, 12, 13, 14, 15, 16, 17,18, 19, 20, 21, 22, 23, 24, 25, 26: n = A,T,C or G
nnnnnnnnnnnnnnnnnnnnnnnnnnggtccggttgagaagtgtatcaagacaaggtttcacatttccccttacggcataactgccccactctcctccttataccagtaccatcaactccaccccacccccggctgcttccaacagccatagaatgttcccctgcctccctattgccaattgcttttagaattctgggtgggggacctggggtgaccagagtccctcagactacaaacccctcaagcacaggggccaagccttatccttctctgtatttatttttctttctttttttttttttttttgagacagaatttcgctcttgttgcccrggctggcgtgcaatggtgtgctctcagctcactgcaacctccacctcccgggttcaagcgattctcctgccttggcctcccgattagctgggattacaagcaccctccaccatgctcagctaatttgttgtatttttagtaaagatggggtttcaccatgttggccaggctggtcttgaactcctgacctcaggtgatccacctgccttggcctcccaaagtgctgggattacaggcatgagccatgcacccggcctcttctctgt

SEQ ID NO: 761894 - DNA, 523 bp, Homo sapiens
tttaaaggatttcatgatttgtctttttttgggacggagactcactctgtcgccaggctggagtgtagtggcgcgatctcagttcactgcagtctctgcctcccgggttcaagtgattctcctgtcacagcctcccgagtagctgagattacaggtgcacaccaccatacccagctaattttttttttgtatttttagtagagacttctacgaaataattattattcaccatgttggccaggacggtctcgatctcctgayctcgtgatccacccactttggcctcccagagtgcaggcatgagccactgtgcacggccaggatttcatgttttaagatggcttatgtgatttttctttaaaactttatgtgcagacttttccaaaaatatttcgctagtgtttattgtagtttgttttttagaagagtaactcctgcagcgggttaagagaaagtgaggtctagtggaaaatgaactcagccaaggaatctcgggcccataagctcttctccagcttcacta

SEQ ID NO: 761895 - DNA, 614 bp, Homo sapiens
atcatgaatcagcttgtccctgagtttttcagcacttaacaccttcatcatttcagccattgtgtctattgaaagtgcgtggaaccacaaaataccgcggttcattcctctgtctctctctctgtctgtctgtctctccctttctctctgtctccctgtctctagtgtttgtggtggaaggattgttcttgatctatgaatgtatttattcctggtgacttctgaataaagcactgcacacacttcaatgtagatgttttcctggatctcccgttgtgtggggtaatttaggaagaggcattgtgggggtggaggaggggtaatgtgtctagtttcaggcagcctgggttcaaatcccagcctcttcactgccctttgctagctgagtgaccttggacaagtctcttaacctccagaaacctcactttccatatccatcaaataaaaatctgcttgctggaatggaaagttgctataaggatgacatgaaacagcttgcatgagcgcggcatagcgacaggcacayggcagggctcaatgcgtatgggtttccttcagttcatgtactcggctgctttgttgggtggttctcagacttttggaatttgtagact

SEQ ID NO: 761896 - DNA, 623 bp, Homo sapiens
cactagtttagactatcatacatttaactggtaaccataatttttaaaagtgtagagagtactggtcaagatgactgagtctagaataaaaaaggaaaactaggctctaccactaacttagtcaaattcttgtctctcagtttcaccatccataacattaattgagccctctgtacactattagactagaatgaacaagaataaaatactctgtaggacatggtctgagccactcaaaaggaaaagcatatttatgaatgctaccaatgagaaaaactaaacttggctggtaaaaaacgytgactactctatagtttaaataaactgctacattctaccaggtccaattcttagaattttacggcaaggctttagcacttcgtggatctaaagaagcataaagcaccttagatgcaaggagtgtattctaggattagaaaggcttttttaaaaacttttataacgaaaactttttattacctgtgtaacaaaattttttaatttaaaaattacaacagtgaattatcactaataatctcagcaacaagttaaaactctcaaagctggaatcaagagttctatttaatgtagattataaggcctttagtatgtctttctaaata

SEQ ID NO: 761897 - DNA, 623 bp, Homo sapiens
cactagtttagactatcatacatttaactggtaaccataatttttaaaagtgtagagagtactggtcaagatgactgagtctagaataaaaaaggaaaactaggctctaccactaacttagtcaaattcttgtctctcagtttcaccatccataacattaattgagccctctgtacactattagactagaatgaacaagaataaaatactctgtaggacatggtctgagccactcaaaaggaaaagcatatttatgaatgctaccaatgagaaaaactaaacttggctggtaaaaaacgttgactactctatagtttaaataaactgctacattctaccaggtccaattcttagaattttacrgcaaggctttagcacttcgtggatctaaagaagcataaagcaccttagatgcaaggagtgtattctaggattagaaaggcttttttaaaaacttttataacgaaaactttttattacctgtgtaacaaaattttttaatttaaaaattacaacagtgaattatcactaataatctcagcaacaagttaaaactctcaaagctggaatcaagagttctatttaatgtagattataaggcctttagtatgtctttctaaata

SEQ ID NO: 761898 - DNA, 575 bp, Homo sapiens
catgagatcgagaccagcctggccaacacagtgaaaacccgtctccactaaaaatacaaaaattagctgggcgtggtggcgcacacctgtaatcccagctactcaggaggctgaggcaggagaatcacttgaacccaggaggcagaggttgcagtgaggcaagatcgtgccattgcacttcagcctggacaacatagtgagactctgtcccaaaaaggaaaaaaaaagaatggaggcaagatgatgcgtggccatgtatgtggatcttaaattcaccatgacagtgacagcaggagagaaagtcagtgagccaggtggccaaattatcaataaacacgtgagcaggcaggtaagaccacacaatagacaatttgacgacaggtgctcccatttttcatgtttatatgattatttggytaatgttgatttcacctactacacacatcacccactctacacatcagtaaggaaggggcatggctgtttgtgctcaccacgtgatccctagcatctagcttagcacataatagatacttatttaaaacttcttgaacaaatgcctgaatactgttctc

SEQ ID NO: 761899 - DNA, 618 bp, Homo sapiens
accatcatactaccctatctctatgacttcaatgttttaaaaaaattttagcttgcacatatgagtgagaaccgcaaaattagtcttttggtgcctggcttattttacttaacataacctcctctaggtacatccacgttgttgcaaatgacaagagttcattctttttaatggctgaattatattccattgtgtatatgtattaatactatatatgggccacatttcctcattcacatctgggctgattccatatcttggctattgtgaagagtgctgcattaaatatgggaatgcacagatctcttttatatactgatttcmttttctttggacatatacccagtattgggattgatggattgtatggttactctatttgacagcttttaaggtgggagaatacaggagaaaaccttggctatttcaaaaactctactatttttatacagggttttatgtctggcaaatattgaactctgtgcctacacatagacagtatataaggcccaaagtatttttcctgtctacttacaaacatattttcttttgattgagagggtgtataggacaatcagtactattctgcatctgactttgttggctgtgtagtaggag

SEQ ID NO: 761900 - DNA, 587 bp, Homo sapiens
ttaaggcaattttccaagctgtacaaagagagagataatcagaaaaacaaagccaaagttcattataaaaatgaagcaaagtagcagagaaacatggatttttattaggagtatctccagttggcaacggtttgtaaatctaatctagaacaaaaataagaatagtatttttggactctgcatattcttgataatgaaaattataaaccttttttaagttagacacagaattggcaattctaaggcaagactaacatattttggcaggtctaagaagaaagaagctaagaaaataattcctgctccttagttctgcttgtgcgtgtgtttttttgaaacaaaattaagtgaaattattagaaaattagaacatcttgcctaaattataagtatgcayttttctagtaattcctttgatgtttagatcgacatgttatgctaatatgtaaaataacttctaaataaatgtcacctctaccattttccagggcctatgaagaaagaaatgtaatattaacaataattttctgtttttaataaatggttagctaaacgtataccaatctgaaaaaaaatgcttattatat

SEQ ID NO: 761901 - DNA, 463 bp, Homo sapiens
cctaatatgctgtaacctataaattagtgaccaaaggtttgagaatttattaatatatcaatcccaagttattaaattttgactcagaagaaataaccacggttgtgttggtggccccttctcttcaactctaaaaaaaaaaaaaaagtaaaatttttagcatatggccttagtaactccaactctatctggaaaaccatgatggcattttttgttgtgtggtgtcagtgtcagaaaagacaacttatcaaacatttcttacaaagtcttgacattttttaaaattatgctggtaaatccatgcatgtcctttggcatwacagggctcttcctcaaggggacctgatctctacctgtggaaatgacctatggatttgtgaactagaaactgagggaagaaccatacttttcccttttttccatgtttcccggctttaatgaaaggtacaattggtatgcaaaa

SEQ ID NO: 761902 - DNA, 638 bp, Homo sapiens
tgtatttacatgtgtgtgcatgatatatgcatatatatttcacccaagcatctagaacataactattgaaggatgttacttttacaaggatgatttggaaaacatctaacatttaattttctaggatgttgggtattatatgcaacccagaatcacagtgtttctctctgagaaaaatgatgcttttattctgctggcctcactgacatacatttgtacaaatccaatatatcaatagacaattgtcaatagacaatatccaatatatcaatgtccaatatgtcaatagacagttatccagtrtagacaattgtccaatagacaatagactatattggatatattggatattgtctgttggacaattgtctatcaatatactggatattgtctaatagcattttcaaagaaaagtatcatataatttaaaccaacagaggacaatagacaatagataacatccaatgtctcaatagacaattgtcaattggcaatatccaatatatgaatatccaatatgtcaatagacagtcataggtgataccaacttctcacctaaaattatcctcatatatattgcatcttatttcatatgaaaattaaaatgtattcatgtcctcatatatgtgaaacgatta

SEQ ID NO: 761903 - DNA, 638 bp, Homo sapiens
tgtatttacatgtgtgtgcatgatatatgcatatatatttcacccaagcatctagaacataactattgaaggatgttacttttacaaggatgatttggaaaacatctaacatttaattttctaggatgttgggtattatatgcaacccagaatcacagtgtttctctctgagaaaaatgatgcttttattctgctggcctcactgacatacatttgtacaaatccaatatatcaatagacaattgtcaatagacaatatccaatatatcaatgtccaatatgtcaatagacagttatccagtgtagacaattgtccaatagacaatagacwatattggatatattggatattgtctgttggacaattgtctatcaatatactggatattgtctaatagcattttcaaagaaaagtatcatataatttaaaccaacagaggacaatagacaatagataacatccaatgtctcaatagacaattgtcaattggcaatatccaatatatgaatatccaatatgtcaatagacagtcataggtgataccaacttctcacctaaaattatcctcatatatattgcatcttatttcatatgaaaattaaaatgtattcatgtcctcatatatgtgaaacgatta

SEQ ID NO: 761904 - DNA, 638 bp, Homo sapiens
tgtatttacatgtgtgtgcatgatatatgcatatatatttcacccaagcatctagaacataactattgaaggatgttacttttacaaggatgatttggaaaacatctaacatttaattttctaggatgttgggtattatatgcaacccagaatcacagtgtttctctctgagaaaaatgatgcttttattctgctggcctcactgacatacatttgtacaaatccaatatatcaatagacaattgtcaatagacaatatccaatatatcaatgtccaatatgtcaatagacagttatccagtgtagacaattgtccaatagacaatagactatattggatatattggatattgtctgttggacaattgtctatcaatatactggatattgtctaatagcatttycaaagaaaagtatcatataatttaaaccaacagaggacaatagacaatagataacatccaatgtctcaatagacaattgtcaattggcaatatccaatatatgaatatccaatatgtcaatagacagtcataggtgataccaacttctcacctaaaattatcctcatatatattgcatcttatttcatatgaaaattaaaatgtattcatgtcctcatatatgtgaaacgatta

SEQ ID NO: 761905 - DNA, 589 bp, Homo sapiens
atttcatatgattgacctggataaattattaagtgtaagtccttgtctgtgttaatcaagattatattttaaatttattcgcgcaaaaagcaatttaccaaaatttctttaactgaaaacataaactacattttacaaaataattttaattttatttaacatatgtttggtagcatgatagtaaaatgggtgttttctrttttagcacatgatagaaaattcattttttaaacaattgtgtactgattaggtaagaagtcacttataatagctaattactaaaataagcactgttaagacagatttgttctttgcttatgactcaacttcatctgaaaattagaggttataaatgattgagtatctaaaagaaggcatataagttgcagttttaatggttttaacatgtctcataaaacacttttcagatttcatgtaaacattgctgacatatttacatgactagtaaagagagtaatatatcatattgaattaatcaagctaatgtagacagccaacataatcaattttaaatctgttttagattcagtaattttccaatagcttaaataataattttcttaagtta

SEQ ID NO: 761906 - DNA, 589 bp, Homo sapiens
atttcatatgattgacctggataaattattaagtgtaagtccttgtctgtgttaatcaagattatattttaaatttattcgcgcaaaaagcaatttaccaaaatttctttaactgaaaacataaactacattttacaaaataattttaattttatttaacatatgtttggtagcatgatagtaaaatgggtgttttctattttagcacatgatagaaaattcattttttaaacaattgtgtactgattargtaagaagtcacttataatagctaattactaaaataagcactgttaagacagatttgttctttgcttatgactcaacttcatctgaaaattagaggttataaatgattgagtatctaaaagaaggcatataagttgcagttttaatggttttaacatgtctcataaaacacttttcagatttcatgtaaacattgctgacatatttacatgactagtaaagagagtaatatatcatattgaattaatcaagctaatgtagacagccaacataatcaattttaaatctgttttagattcagtaattttccaatagcttaaataataattttcttaagtta

SEQ ID NO: 761907 - DNA, 615 bp, Homo sapiens
gtcagtatgtctgacttatgtctaacatccctctacaacttaacgaatgatcagtaattaaaattattcttcacattttaacatcatctttaacttttgcttaaggcttttattctgtagtaaaattgttgagatattgtttatatactttattaaaatattagaagtaaatatttctggtagaatatagaacctgaacaaagttctactaatatctcwcacacacacacacacacacacacacacacacacacacacactttaataggtatgtttcatgcattaggaaaactttcaacaacacaggattttctacataaagaatatagacctaaatataaaggacttctttttccaggattagtgggtatagagtttcattttggacttaaaatggacttaaatatctcttgatgcattttttctctgttcttcttaacgtagtgagctagtcaggtttattcttctatactctacctctttattattctgtattctataaaatattctgaaagacttggcattttaaccattcaatgtgaagcttaaattgggtagatacaaatgttatatcttcacagttcatataacttctgttgtactatttttaaaaat

SEQ ID NO: 761908 - DNA, 633 bp, Homo sapiens
aatctgtaactggtagttatcaattagttctaaacaccactgcattcagacgatcaaaagtttctactttttaaagacacttataggagaaaatatttcaaagcatatatctgataaacaattgtatccagaatayacaaataactcatactcaataataaacagaataggaaatatgaaaatatttgaaaagacacaaagaatagtgaatggtacataaacacataaaatgatgctcaacatatttacttattagataaatgcatattaaaaccataattgtataccaatatatgcttttaggatggctaaaaagtaaaaggctctctataccaagtagtggtaagaatgtgaaggaagcaaaatttccatgcactgctagtttcaatgtaaaatagtacaaaaactttggaaaaccattacttaaaatgttaaagaaaaatttctgaaatgataaatatactctgaccatataatccaggcattctactcctagatatttacctcctctcctcccaaaattagaatgtatatccacacagacttgcacacagatgtttacagcagctttattaaaatgtccaaaagtcaaaatgtccctccagaagtgaatatataaacaatcgtggtaca

SEQ ID NO: 761909 - DNA, 633 bp, Homo sapiens
aatctgtaactggtagttatcaattagttctaaacaccactgcattcagacgatcaaaagtttctactttttaaagacacttataggagaaaatatttcaaagcatatatctgataaacaattgtatccagaatacacaaataactcatactcaataataaacagaataggaaatatgaaaatatttgaaaagacacaaagaatagtgaatggtacataaacacataaaatgatgctcaacatatttacttattagataaatgcatattaaaaccataattgtataccaatatatgcttttaggatggctaaaargtaaaaggctctctataccaagtagtggtaagaatgtgaaggaagcaaaatttccatgcactgctagtttcaatgtaaaatagtacaaaaactttggaaaaccattacttaaaatgttaaagaaaaatttctgaaatgataaatatactctgaccatataatccaggcattctactcctagatatttacctcctctcctcccaaaattagaatgtatatccacacagacttgcacacagatgtttacagcagctttattaaaatgtccaaaagtcaaaatgtccctccagaagtgaatatataaacaatcgtggtaca

SEQ ID NO: 761910 - DNA, 682 bp, Homo sapiens
tatattttaggaataattaattcctttttattttttccttgcatcttaaatttgttaaaagagctctcataacagttatgtattaattaaaagtttaaaaactgccaaacaaatacattcatttctttatgtgcattgttgctttatcatctgcatttgatrattctagtttttcacatctctttggttctaattctttcatttttgttctccagtttcttgtgttccctattatcgttgaatatatgttcaatattgcatgtgaaaaattgcaagattgatttgtgatgtattatgtagacagcttcctccaaaggagatatcatttggttctgtcaagcaccagagcacattactagtcagtaactacttaaaccaagtttaggttttgaaattccctgatccaagaaagttaaacctgggatcaaattccccatgtaataactgcctcactttctgttctccttaaccttgacggcacaacctttagggaatcccagcttggaatagagatgctcaaatctaaatctgctaaaatatatcttatgctggttctgaattctaagttacgttgctctcacctcacaaaatggagaaaactaggagtccaattttatgttatcagcaaatgctctcagggcaaaagtggcttcaatgttttcctctcagtctggatccttgt

SEQ ID NO: 761911 - DNA, 603 bp, Homo sapiens
atgtaatgataattctgtctagagtcatgcttcttaaactttgagacaggatcccactctgtcacccaggatggagtacagtggcatgatcatggctcactgcagccttagcctcccaagttcaattgatcctcctgtcttagcctcctgagtacctgggaccatgggtgtgcaccaccatgcttggccaaatttttttttatttgtagagatagaggtcttaccatgtttcccaggctggtcttgaattcttgggcttatgcaatcctcccatagaggtcttaccatgtttcccaggctggtcttgaattcttgggcttatgcagtcctcccacattggcctctcattgcrctgagattacaggtgtgaaccactgcactcagtctttcttatactttaatgtgtacatgaatcacttgtgtatcttgttaaactacagattctaattcattaggtctggggtaagcctgagagtctacattttctaactagcttcaggtgacactgatgttggtgattttgactaacaagcaatggttcttcaactttagtcttcattagaatcacctggaggcttcttgaactagatttctggtctccac

SEQ ID NO: 761912 - DNA, 453 bp, Homo sapiens
actctaccttctcatgatatcttaaaacatctattcctctccatcttacttccctcaccagaatttaaaagtaattaactacgttttatcttgcctatgagaatattttgctaactgaccttctgcggtatgaaaatattttcctaaaagtcacatgatctgcccacccccggcccctccacccaggatcctccaaacaaacaccctacatagtatattcaccctaccatggtcctgttcctgatatttttctcagccttgattctctactctccaccaagctcactgaatcatrttagtttcctgaacacaaaatgatatttcacacttttttgtcatggccaacctgcctgaaggagcacaaaatgtagtttataggtcctaaacagcctgttatcctctggaataaaaaaaacattaatcagatgcaatgtcagactcacttgaaagatt

SEQ ID NO: 761913 - DNA, 453 bp, Homo sapiens
actctaccttctcatgatatcttaaaacatctattcctctccatcttacttccctcaccagaatttaaaagtaattaactacgttttatcttgcctatgagaatattttgctaactgaccttctgcggtatgaaaatattttcctaaaagtcacatgatctgcccacccccggcccctccacccaggatcctccaaacaaacaccctacatagtatattcaccctaccatggtcctgttcctgatatttttctcagccttgattctctactctccaccaagctcactgaatcatattagtttcctgaacacaaaatgmtatttcacacttttttgtcatggccaacctgcctgaaggagcacaaaatgtagtttataggtcctaaacagcctgttatcctctggaataaaaaaaacattaatcagatgcaatgtcagactcacttgaaagatt

SEQ ID NO: 761914 - DNA, 695 bp, Homo sapiens
taaattgacattcctagtgcactttcatagtcatattaccctgtaggatttggaaaatatatatatattttagaattcgggatgttttaggtgtgcctgtaaatttggttgttaatatctgtaaggcagccttctgtttttcctactaaatcataagcgtgaacatcttagtgggtggcattatacatcctttatgtttgtagtccccaaaatggctttcacacagtaggcacttaaatttgtggacttttataggctgtgtagacatcatcaaattcctgtattctgggattaggtgctgggggcaggagatgaggtaaataatttgaagaatgccgaagataaattatgtgttgtaattttgtcttgagcatggttggccatgttttgtagaaaaactatttctcakgtaacctcaatcaggttgcctttggcaggaatatatcagaatttaggcgggatttaaggttgcaaacctcagagttctcaattgagctctttttctgggttaaaactaattcagtatttctaaacttaagaaagtttcttaaattaagctgactgcctttccattctgtctctgcctgtttcctcaatgataagaggaagtagtggtgaatgagggctgggatgggaacatttacattactggaataaagtcatgtgaggatcctactctgatgtgatgcttagct

SEQ ID NO: 761915 - DNA, 555 bp, Homo sapiens
ctttagagtaaatgtaagatggagtgaatagttgtctcatctgttgttacctttcttcatctgagacacagcattacaacttcattggcagggaattaagagaaacttgcccgacaaaagctctgtgcaaattcctgtcccttctgtgccaaccaaacagaacaatgtttgtagaaacmtttcctcttgaatttttagtgtggttccaaaagcagaggcagagaggatgaactacccaggaaggacaatggagggaagatgtgaggcacagcatttcttattaaaaggaagtgagcatggtaaatgggccctatgtatgagccagaattgcagttctatcaaaatttccactgatgggtccaaggatcccaaaatcttaggtcagcttcttatgctaaaaatcgacaaaacccttagtactcaaactctctaggcagccagacttgtaactggaattttaaacatactttttgcaagttgccaaaaccttcatttttctttttaaaaaatctattaagctaaatcttttcagaagatcactatttcttttcagcg

SEQ ID NO: 761916 - DNA, 578 bp, Homo sapiens
acgtgtaggagaatgaaactggatccccatctctcaccatatacaaaaatcaactcaagatggattaaggactcaaatctaagacctgaaactataaaaattctagaagagaacattgggaaaacccttctagacattggcttaggcaaggatttcatggccaagaacccaaaagcaaakgcaataaaaacaaagataaatagctgggacttaattaaactaaagagcttttacgcagcaaaagaaacagcagagtaaacagatgactgacagagtgagaaaaaaatcttcacaatctatacatgtgacaaaggactaaggactaatatccagaatctacaacaaactcaaacaaatcagcaaggaagaaaaaaatcccatcaaaaagtgggctaaggacatgaatagacaattctcagaagaagatatacaaatggccaacaaacatatgaaaaaacactgagcatcactaatgatcaaggaaatgcaaatcaaaaccacagtgcaataccatcttactctgcaagaatggctataatcaaaaaatcaaagcacagtagatgctggcatggatgcag

SEQ ID NO: 761917 - DNA, 610 bp, Homo sapiens
aaacttagtttctaagtctcccactgggctcagcttcaggattgagcaaatgtcttcaagaagtaactagctgtgtgttaaggccattgaaatcaccagttgggtcacctccttactgcatacctgctccagtctctgctgttttctccttccctcgcaacagcggccctttgctggagccaagaaaggcttctcagcctcatagccacacctagaactaggcaaataccccctaggaaaagctgcaaaagatccctycctcacccctctgggattttcccgtctggaattttagcccatctagtcctcattgcttttgcagctctctgatgccttgaaacagatgtgttttttgaatttgatctagctttttttcagttgtgttcccgtgggagtgttaagctgccataaaccactctattctaagtggaaagccccatctgcccttttgaaatggcagccaatgcaggacccaggttgctggtgggaaggactcttctgcatgatgccagccatagtgttgaatccatcttgcccccagaatagtatccattttgtgtccaatgaaactaaaaggatagaattgggactcaagaagattgccaaacag

SEQ ID NO: 761918 - DNA, 610 bp, Homo sapiens
aaacttagtttctaagtctcccactgggctcagcttcaggattgagcaaatgtcttcaagaagtaactagctgtgtgttaaggccattgaaatcaccagttgggtcacctccttactgcatacctgctccagtctctgctgttttctccttccctcgcaacagcggccctttgctggagccaagaaaggcttctcagcctcatagccacacctagaactaggcaaataccccctaggaaaagctgcaaaagatccctccctcacccctctgggattttcccgtctggaattttagcccatctagtcctcattgcttttgcagctctctgatgccttgaaacagatgtgttttttgaatttgatctagctttttttcagttgtgttcccgtgggagtgttaagctgccataaaccactctattctaagtggraagccccatctgcccttttgaaatggcagccaatgcaggacccaggttgctggtgggaaggactcttctgcatgatgccagccatagtgttgaatccatcttgcccccagaatagtatccattttgtgtccaatgaaactaaaaggatagaattgggactcaagaagattgccaaacag

SEQ ID NO: 761919 - DNA, 654 bp, Homo sapiens
aggttatcacaataagacctttatttcctcgttataaaatatttttaaattgccctttaaactgccacttagcttatggagtttatgacagttttttgttttatcttcaaactgaagcactgaactgacaatagtcatgggcttgttgaatttagatttttctcaactactattgtcgatgtcaagtaacctctacaagtgtgccaagatgcttagttctgttgcctgcaggttaactgtatgggtcccagagtcttcaagactcagggaaatctgtgattgtaagaaacaaccacccccacaaaaaactttcccacctggaggacttctaactgaagagtgaaaagtatatctcttagggactaggggagaagggaccaaagcaactaagagtggaratacattttaagactatcttattgtataaatcaacatgaggttttacacacataactggagttgaatatatgactacccacctgtacctctgaatccatctatttgttgcctatctgcagagctaccacccttgttcaaatactttcttggagaatagcaatagtctcctagctgttctcccgacaccaaccctactctcctatactccagtgttcacacggcagccaaagtaatctttgaaaacacagaactaat

SEQ ID NO: 761920 - DNA, 622 bp, Homo sapiens
tctaatctgggcctgtcagtaagaactcaagggaaagagatggataaggaaatatttgaacattaattgaacttcaaattgcaagttcttcatgctcacatatgacttctaaatatatcagaaaagccatatatcagcctagtggtgaatctgtctagccttcttccaaagcattaattttctcagcagctaagaaaggctgtcaccaatattttaatacttcttccagtctagaaaaaaaaccattttaagaaacagaaagggtgtatatgtcaggatgaaggagagatggggacacagtaaaacgtagtggtgggatctatgatcaaggcacctaatttcactcaagaaaaaaaaaattgtttttctgacagagtaagtcttaaaatatctctttgagttccttttgccaatggaaaacagtgtttgactccatatcttcattcttttactaagagcaactgctttgaasttgttctcagttttgtctaaaagtgaaagttatttcataaaattaagagattatgaaattgttccaaagagctgaagtggttttggagttttagagttggattatactactaggtgctaatatagagcagttatatctaaggatagagga

SEQ ID NO: 761921 - DNA, 587 bp, Homo sapiens
tgaagaaatgtatagaacacaagccagggttgaaagatgaaagctgttttctttaacgactttgcaaatctgttgccacataattgtgtttccatggaaatgagagaaaacattccatcattaaatgattgtcatttgttartgaaacagattgatctcaaagattggccaaaagaaacactcagtgttaaacattcagcaccttatactactctaagaagtctagataaagggaatggaaagagaataaatttcagtttgggattcactttgaaatgaagggttataaagccctctaattggtccttgagtatccattccaatttgctccaatccagtttaatttctacaaagattagccaaaaacactaaaaaggacagggagagatttctggcttccagaagtgaactcttgagccacagccaaagctatcacgtcagatgaaaataatatgatttaccacaagagttcctgtcttctttcactctattatttcaaccagtgttagaaataggaggccaagtttattcaggatgctaatgactgtcgtccagattctgagacactggatgcaaactgatggtct

SEQ ID NO: 761922 - DNA, 587 bp, Homo sapiens
tgaagaaatgtatagaacacaagccagggttgaaagatgaaagctgttttctttaacgactttgcaaatctgttgccacataattgtgtttccatggaaatgagagaaaacattccatcattaaatgattgtcatttgttaatgaaacagattgatctcaaagattggccaaaagaaacactcagtgttaaacattcagcaccttatactactctaagaagtctagataaagggaatggaaagagaataaatttcagtttgggattcactttgaaatgaagggttataaagccctctaattggtccttgagtatccattccaatttgctccaatccagtttaatttctacaaagattagccaaaaacactaaaaaggacagggagagatttctggcttccagaagtgaactcttgagccacagccaaagctatcacstcagatgaaaataatatgatttaccacaagagttcctgtcttctttcactctattatttcaaccagtgttagaaataggaggccaagtttattcaggatgctaatgactgtcgtccagattctgagacactggatgcaaactgatggtct

SEQ ID NO: 761923 - DNA, 597 bp, Homo sapiens
cataaaaataacacaattgaaaaattgtgctttgtcaaaatattaaaatgttgctctcaaaaaacattgttaagagcatggaaagacaaaccacagacttggagaagacatttgaaaattgtatatctagtaaagtacttacatcaaatayaggtaaagaactctcaaaattcaataagacaaataacctaattttaaaaactagcaaaagattttaaagaagataaacagatggcaaattgagcactaaaagatgcttagtatcattagtcatttgggaaatgcaatttaaaaccacaataagtgactataaacctattagaatggctaaaattaagaagactgactgtaggtgctgaggaggatatgaaagaactggcatcctcatactcttctgatatgaatgtaaaatggtacaaccactttgaaaaatggtttggcaatttctttaaagttaaacatacactaccatgtgattcagccattccactcctgggtatgggcccaagaacaatgaaagcatacgtccttacaaaacatgatcacgagcattcacagtagctttatttgcaattggcgaatgctagaaacaacaca

SEQ ID NO: 761924 - DNA, 603 bp, Homo sapiens
cagtttataaaatcaaagagagaattctaaaacaagaaacattgttaatgaggcagaagagcctggaggaaacacccagcagaatgcctcctcatcccttgaggacccacttcctggtcctcatcagctcctgatgtttcttctcacctaaaataaaatacagtgtacagtaatcttttaatcaaaacacagcattgcaggtggggactgcaagcctggcgttgtttgttgttgcatttgttgaacagctgatgcaggcattctggtggtgccactgtgctgcttagttaccctgaacatattaatttttcactgyatgaatgtatgtcatattttttgctgttaagttcttatgtgtgaatcagtgtataaaaatgactgcttataagtagcatataaattcagagtcaggaatgatgatgccaaatgaccaaagattgtccccgtaggtggctgagagagtaacacctttgctttctgatggttcaatgtacacaaactttgtttcatgcacataattattaaacaatactgtataaaattaccttcaagctatgtgtataaggtatatatgaaacataaatgaatttcatgttcagatgt

SEQ ID NO: 761925 - DNA, 603 bp, Homo sapiens
cagtttataaaatcaaagagagaattctaaaacaagaaacattgttaatgaggcagaagagcctggaggaaacacccagcagaatgcctcctcatcccttgaggacccacttcctggtcctcatcagctcctgatgtttcttctcacctaaaataaaatacagtgtacagtaatcttttaatcaaaacacagcattgcaggtggggactgcaagcctggcgttgtttgttgttgcatttgttgaacagctgatgcaggcattctggtggtgccactgtgctgcttagttaccctgaacatattaatttttcactgtatgaatgtatgtcatattttttgctgttaagttcttatgtgtgaatcagtgtataaaaatgactgcttatmagtagcatataaattcagagtcaggaatgatgatgccaaatgaccaaagattgtccccgtaggtggctgagagagtaacacctttgctttctgatggttcaatgtacacaaactttgtttcatgcacataattattaaacaatactgtataaaattaccttcaagctatgtgtataaggtatatatgaaacataaatgaatttcatgttcagatgt

SEQ ID NO: 761926 - DNA, 603 bp, Homo sapiens
cagtttataaaatcaaagagagaattctaaaacaagaaacattgttaatgaggcagaagagcctggaggaaacacccagcagaatgcctcctcatcccttgaggacccacttcctggtcctcatcagctcctgatgtttcttctcacctaaaataaaatacagtgtacagtaatcttttaatcaaaacacagcattgcaggtggggactgcaagcctggcgttgtttgttgttgcatttgttgaacagctgatgcaggcattctggtggtgccactgtgctgcttagttaccctgaacatattaatttttcactgtatgaatgtatgtcatattttttgctgttaagttcttatgtgtgaatcagtgtataaaaatgactgcttataagtagcatataaattcagagtcaggaatgatgatgccaaatgaccaaagattgtccccgtaggtggctgagagagtracacctttgctttctgatggttcaatgtacacaaactttgtttcatgcacataattattaaacaatactgtataaaattaccttcaagctatgtgtataaggtatatatgaaacataaatgaatttcatgttcagatgt

SEQ ID NO: 761927 - DNA, 603 bp, Homo sapiens
taccttcaagctatgtgtataaggtatatatgaaacataaatgaatttcatgttcagatgtggttcccatccccaagatatctcattatatatatgcaaatattcagaaaatctgaacaaaatcccaaattcgaaacacttttcatcccaaacattttggataagggatgctcaacctgtaatggaggcttaggagagcatttgatctacctgcaaagytgtctctgttaatataatttattttcattcacagtctgcaaatatttattagtgcctactagtgccaatccctgttctgatagtaaactgttatgagcatttatatgtcacctggcactgtgcctcactgatttaatagtctcattgatttaacctaatgaccttgtgagatagaaactgctaacatccctatcttagagaagagaaaactaaagcatataaaagttaagtaattggctcaacatgctcagctagttagatacgaagccagaaattaacccggatctgctgattgctgaaccctaaactcttaatcattgtaccagagtgtctcaaagtgagggcctgaatttgtgacctgctgcattagaatcacttaggttg

SEQ ID NO: 761928 - DNA, 603 bp, Homo sapiens
taccttcaagctatgtgtataaggtatatatgaaacataaatgaatttcatgttcagatgtggttcccatccccaagatatctcattatatatatgcaaatattcagaaaatctgaacaaaatcccaaattcgaaacacttttcatcccaaacattttggataagggatgctcaacctgtaatggaggcttaggagagcatttgatctacctgcaaagttgtctctgttaatataatttattttcattcacagtctgcaaatatttattagtgcctactagtgccaatccctgttctgatagtaaactgttatgagcatttatatgtcacctggcactgtgcctcactgatttaatagtctcattgatttaacctaatgaccttgtgagatagaaactgctaacrtccctatcttagagaagagaaaactaaagcatataaaagttaagtaattggctcaacatgctcagctagttagatacgaagccagaaattaacccggatctgctgattgctgaaccctaaactcttaatcattgtaccagagtgtctcaaagtgagggcctgaatttgtgacctgctgcattagaatcacttaggttg

SEQ ID NO: 761929 - DNA, 587 bp, Homo sapiens
taccataagaaactagaaaaagaagaacaaaataagcccaaagttagcagaaggaaggaattttaatgattagagcagaaacaaatagaaaatagaaaaacaattttaaaaatcaacaaaaataagaattggtttattgaaatatcaacaaaattgacaaaacctcagctagactaagacaaaaagagagagtattgaaataaaattataaattgagacattacaactgatgccacagaaattaagattataaaagagtattacaaaaattatacgtctacaaattgaataaygtcaaagaaatggatcaattcccagacacatacaacctactaagactaaatcatgaagaaatagaaagtgttaacaggcatatatctagtaagaaaattgaatcaataagcaaaaacctctcaacagaaataaagtctaggactagatggcttaactggtgaattctaccaaatatgtagagaggaattaatgtcaatctttttccacttgctaaaatattgaagaggagacaatacttccaacatcattttatgaggccagccttattctgagattaaagctagattaaaaac

SEQ ID NO: 761930 - DNA, 587 bp, Homo sapiens
taccataagaaactagaaaaagaagaacaaaataagcccaaagttagcagaaggaaggaattttaatgattagagcagaaacaaatagaaaatagaaaaacaattttaaaaatcaacaaaaataagaattggtttattgaaatatcaacaaaattgacaaaacctcagctagactaagacaaaaagagagagtattgaaataaaattataaattgagacattacaactgatgccacagaaattaagattataaaagagtattacaaaaattatacgtctacaaattgaataacgtcaaagaaatggatcaattcccagacacatacaacctactaagactaaatcatgaagaaatagaaagtgttaacaggcatatatctagtaagaaaattgaatcaataagcaaaaacctctcaacagaaataaartctaggactagatggcttaactggtgaattctaccaaatatgtagagaggaattaatgtcaatctttttccacttgctaaaatattgaagaggagacaatacttccaacatcattttatgaggccagccttattctgagattaaagctagattaaaaac

SEQ ID NO: 761931 - DNA, 616 bp, Homo sapiens
ctatggctaaactaatatcttgaaattcctttattatagacctaaaaatgtaaatatggtttaaagactgcaatttgtttaggttagccctgtgattgactctgatttatatgctgagttcaatttcagctttctattataaatgacctaataacaaatattctcacaattctcttccgacagaggagatgtggggattcctcaccatcagcaaagaagtgatcaattctgcagaaacaccagctgggctaactcaattcaattcaattcaattctcacactctacctcgatgtagcaactgagctacatctaactctattcaattctcacactctaccttgatgtagcaactgagccacaggttgaaggttcagtttcacgagattgcctcccaytggccaccggtgatcattttaaccttcagccccaactcatccctagagccttggtctatctggcaaccaaatgtcatcatctatgggggccaacagctgtcagccaacttattagcatattagaagactttggagattctaaggattcaattcaattctctaactcaattcagttctcacactctacctcgtagcaaatgagccacaggttgaaggctca

SEQ ID NO: 761932 - DNA, 621 bp, Homo sapiens
tttaaggggtacatggttaggtttattacatgggtacatcgtgtgtcacggggttttggtgttcagattatttcatcacccaagtaataagcatagatatgataagtagtttttcgttgttgttgttttctcttcttttgtttttcttttrtcttcaacctcctcccacctcccatcctccaccctcaagtgggccccggtgtctgttgttcccctctttgtgtccataggtactcaatgtttaactccaacttatgaatgaaaacaggcagcctaaagatgtatagggcttctatggcctgaggagatgatgcggataatgggctggctcctgttatttttatgtagtccaacctataatagggttagagtgagggtaataagatatggaaggaatgttttcacatgggtcactctataagggcatagcctatactagacaggtgagtagggacaaagtccctgtagcacttccaaaaaacagcaagcctgatatatgaagaagaacctcaatttgaatgatggacacatagagacgtcaatggccatatttcagcagcattttttctctaattcctttgctcacttcctctattgtttcttaaacctagaatcaagaat

SEQ ID NO: 761933 - DNA, 626 bp, Homo sapiens
ggttcttaactaccaaacaatacggttgttaacaagcagttcttttgcattcagtaagttttcttccattgatacagcttttctcaataatttttatacaaatttctttattgtttggaggacttgttttactattttagacaagtactatagaaatataaaaagtaatgtggcaagatgttcaacacaagtacaaagtcacagagaatattttaactgacaatgacactgtgatgtgcttcatataagaatggtatttcttttgttgatactctgcaagttttcaagatatctgcatatgatttagaagttctgtcaaatgtatttgttatgcaacctgagactttcacatataccggttttgctaaaatattgctrttgagtttttgaaatttttttagataaatattggtcaaaatatttacattgagaaatatgtaagttctactaagtttggatagaaaaagcagaaaaatgctctattaagaaaatattaatggagaagatgttccataaggtgtaactgtttacttctcctgtttctcctgtttccccaggcggggggaacacaaagtcccaagcaatcttagtatctaactaaaatccgtgaatctaggtaatgtgat

SEQ ID NO: 761934 - DNA, 589 bp, Homo sapiens
aagttcccaaggtcacctttctaaaacttaaatgatctaatgttcaaatacatttaacagacagttgctattttttaaattttgtttatgaatttaaaaaagaatatgttgaactataaaatacaaatcataatccttttcctgagcttaatatttaatgttttccattattgttaaaatcttaccattaaaaataagcggatgttctacattgactaccataatcaggaaagtaaataggcatataagcagctaaataatcacctacttgaaattcataacaaaattgtattcatgactttctcttcactgttaacttgtgtcgtaggaatcattgatcatacaaagaaggtttctgtttgtttgtttttttttttcaatttaagctactaggtttccattttctattacatgaagaagtaaaaagaccatyttctaacttcaaataccaaaaaacaaaaacagcctttttttagtaaaataaaccatttctgaatgtggaataaagtatattcacctcaaactctgggttacaaaaatattacaggaataccagaaacattctatagcattattgcttacagaaaac

SEQ ID NO: 761935 - DNA, 589 bp, Homo sapiens
aagttcccaaggtcacctttctaaaacttaaatgatctaatgttcaaatacatttaacagacagttgctattttttaaattttgtttatgaatttaaaaaagaatatgttgaactataaaatacaaatcataatccttttcctgagcttaatatttaatgttttccattattgttaaaatcttaccattaaaaataagcggatgttctacattgactaccataatcaggaaagtaaataggcatataagcagctaaataatcacctacttgaaattcataacaaaattgtattcatgactttctcttcactgttaacttgtgtcgtaggaatcattgatcatacaaagaaggtttctgtttgtttgtttttttttttcaatttaagctactaggtttccattttctattacatgaagaagtaaaaagaccatcttytaacttcaaataccaaaaaacaaaaacagcctttttttagtaaaataaaccatttctgaatgtggaataaagtatattcacctcaaactctgggttacaaaaatattacaggaataccagaaacattctatagcattattgcttacagaaaac

SEQ ID NO: 761936 - DNA, 592 bp, Homo sapiens
gaacgtgcaggtttgttacataggtacacacgtgccatggtggtttgctgcacccatcaacctgtcatctacattaggtatttctcctaatgctatatctcctctagcccccccaccccctgacaggccctggtgtgtgattttcccctccctgtgtccatgtattctctttgttcaactcccacttacgagtgagaacatgtggtgtttgattttctgttcctgtgttagtatgctgagaatgatggcttccagcttcatccatgtccctgcaaaggacatgagctcatcctttctttttatggctgcatagtattccatggtgtttatgtgccaccttttctttatccagtctatcattgatgggcatttgggttggttccaagcctttgctattgtgaatagtgctgcagtaaacatacgtgtgcatgtgtctttatartagaataatgtgtaatcatttgggtatatacccagtaatgggattgctgggtcaaatggtatttctggttctgtatccttaaggaatcgccatactgttttccacaatggttgaactaatttatacacccaccaatagtgtaaaagcatt

SEQ ID NO: 761937 - DNA, 598 bp, Homo sapiens
attctcataaaaccttgtgccatttttaagaaaataatctattttactgtgtaggaattcatcgtttcccacagtttagtggccatttcttgaggggtcactgctattatgaaacaaatataaattgaaactcaggcctttagccccttcgtcttaagaccgagctttaagagataaatgaagaaagaaagtatacttcctggtgcaattatgtgagggatttaagaacatctcatagcacaaataagactgccttttctgtccttcagttctcataccttaaattcttatggattttcgatatttgaagttaagacattatgacttgtatgtccctagttaaaactgaactataaccacagacctattccattatgtaattttagattgtaaagatttctctmaatgtctctatgaagatttccctcaaagaaagctgatgtctaagatcataccactgaaggaggaaactgggtacatttaactgcagaaaaggttagcctggattattaagagctcttttcctgatgggcagatcacagagacagaattgctatgtcccatcttgtcacagaccttttgttatctactgggatga

SEQ ID NO: 761938 - DNA, 618 bp, Homo sapiens
caagagtaatttttatatggtagtctaaattttcagcatctcaccatctgtttgggggtccatatctccaaaaacactcataatgtgcatttgtatagatttcagatttagttatgaaatgtgtagttattatctgtgaaataatataaacctaaagataatggaaaatgaaataagtgaaatttaaagacacgtcgtattgtatatcccatgtgcctggcactttgtgaataattaaattttgtactaatcatggacaccatgttgcctgtagtaactaaattgcttytttttcagttgtttaagaaaagtatgcaaaagtttccaactttattaatttaggctcttttatttcataatctaaataaatatttttacctaataaccataaaccatccatatgaaaaacataaaaaaattaggtttgaagttatcaaagtaggaaatcatattacaaatgaaaacatatattatgtgaagaccgaggtagtgtgtttttaatcactttatcataattcatcataattgaaaaaagtcaatactcagttaaacgaattgcctggatccttacattctgttgtacacatggcttacattcaagacaaagttatctgctaa

SEQ ID NO: 761939 - DNA, 518 bp, Homo sapiens
tttatgcatacaatcatatataaatatatacacacatacacacacatatttattcaacataatttttcatagcttgcctttttcactcaaaaaagtgtggctatctttttatgtccataaatataaatctatatcagtgcttacaatacaatmaaaaattttaatcatattatttataccaaatgtatttaatcaaataattttgctaaatatgtatgttatatactttcaatttgataactataaacttatggatatatatctttgcatccagtctttcaatgttttatgaaaatacatttctaaaatttgaattgctgaatcaaaggtaatgtcattaaatttattagacatatattcaaaaggagtatttctaaaaggctgtacaaatttatatgcacgtggacattgtatataattctcaacaccctcacactcaaaaaccttgtgtattataatttattttcttctttcaagacataatagaataaatatcaatttaattttaatttataaat

SEQ ID NO: 761940 - DNA, 627 bp, Homo sapiens
gtagtttttgtattcttcctagatttttcagtttgttgttcagttaatgtgattaataacacagtagaattcagatatctatttaactattttttttgtttgccccatcttttctttattcctttattcctcctttcttctctacttttagattaataaaaatttttccttaccccatttttatttctttattggcctatttgttacagattattttattaatttttcagtggctatcataaatattacactatgcatttttgatttaatacagtctatctaaaattagtaacttaatcgcatcctaaataatgcaagactactaccatacttgaactccatttatttccctcttgccctttgtgtaattattgtcacatattttacttctatcatatgtacygtgttttgaatgcatccccaaagtgtgctggaaacttggtcccagtgcatcggtgttgagaggtgggatctttggaaggtgattgggtcaagagggctctgattcatgaatggatgaatccattcatggattaatgagttattgaaggagtgggctaattattttgagcatgaatctgcataaaagccagtttggctgtctcttatgagctgcctcaccaaatg

SEQ ID NO: 761941 - DNA, 613 bp, Homo sapiens
gtgtctgttggctgcataaatgtctcttttgagaagtgcctgttcatattcttcgcccacttgttgatggggttgtttgtttttttcttgtaaatttgagttcgttgtagattctggatattagccctttttcagatgggtagattgccaaaactttttcccattctgtaggtcgcctgtgcactctgatggtagtttcttttgctgtgcagaagctctttagtttaattagatcccatttgtcaattttcgcttttgctgccattgcttttggtgttttagacatgaagtccttgcccatacgtatgtactgaacagtattgyctaactcttcttctagggtttttatggcttcaggtctaacatttaagtctttaatccatcttgaattaatttttgtataaagtgtaaggaagggatccagtttcagctactggaaactctaaaaatcagagcacctctcctcctccaaaggaatgcagctcctcaccagcaacagaacaaagatggatggagaatgactttgatgagttgagagaagaaggcttcagacgatcaaactactctgagctaaaggagaaagttcgaacccatggcaaagaagttaaaaacc

SEQ ID NO: 761942 - DNA, 634 bp, Homo sapiens
ccagaaaatgaattagtgttgatctgtgataaacttttcactggtctgtgataaagtaaggagagaaattatttatttatttatacatgtctgtaaaatgttgacaaatatcattttggggcgaaggattgctatattttcacctgaaattatatccttcatattttttataccaaaatcatggtgacaacagatagtagttacttttttaaagcccttatttaaataaatcaaatgctgaccattctacatacattcccaattgaaaagagaattgtctctggaatttgaatgttgatataatgattaaaactyatcttaagtcagaaagatcttacttcttatcctgactgtgccaattgttagtcaagtgacattatgtctcaattagacttcttcaacttctgtttaaaattagaatgatgatagtgtttagaaccagtacttttattcaaatgtgataggaaatgttcacctgtcaatacattattacattacacagtagactccttcagtgataggccttgtttctcctgtcccaacattactattctgagctacttcatctagttgctagaatatatatatgtttgctccctctttaacactgtcaacttctgctttatatatttta

SEQ ID NO: 761943 - DNA, 634 bp, Homo sapiens
ccagaaaatgaattagtgttgatctgtgataaacttttcactggtctgtgataaagtaaggagagaaattatttatttatttatacatgtctgtaaaatgttgacaaatatcattttggggcgaaggattgctatattttcacctgaaattatatccttcatattttttataccaaaatcatggtgacaacagatagtagttacttttttaaagcccttatttaaataaatcaaatgctgaccattctacatacattcccaattgaaaagagaattgtctctggaatttgaatgttgatataatgattaaaactcatcttaagtcagaaagatcttacttcttatcctgactktgccaattgttagtcaagtgacattatgtctcaattagacttcttcaacttctgtttaaaattagaatgatgatagtgtttagaaccagtacttttattcaaatgtgataggaaatgttcacctgtcaatacattattacattacacagtagactccttcagtgataggccttgtttctcctgtcccaacattactattctgagctacttcatctagttgctagaatatatatatgtttgctccctctttaacactgtcaacttctgctttatatatttta

SEQ ID NO: 761944 - DNA, 604 bp, Homo sapiens
aaagagaaagaaaaaatcttggaaacagccagagaaataacacattacctatagggaatcaccaattaaaataatagcagatttttttcatctgaaactgtgtagtccagaaagaagtggcacaatatttttcaagtagtgaaagaaaaaatttgtcaacttcaaaaactatatccagtgaaactaccttttaggaataaaagagaaacagggaccttcttaggcaaaggaaaacaaccattaaagattgactacaggaatttcttcagggagaaagaaaatgataaaagaaaaagtcttcagacaatcagaaaaaaaaaatgggaagagcagaagtctgtatatatgtacaataaactgtccctttcctcatgaatttcataagtcatagttkatgttttaactaaaaattatgctgaggtgggtggatcacttgagcccaggagttcaagaccagcctagacaacatggtgagaccctgtctctacaaaaaataaaacattagccaggttcgatggcacacatctgtagtctgaagtgtgctgaagggaaggaggctgaagtgggaggatcacttgagcctaagaggttaaggctacagtga

SEQ ID NO: 761945 - DNA, 605 bp, Homo sapiens
tgaagaagaggagagtctccctcaccaagtcgcaccgccttacaaccagcctgctcccttaaggtcatcccatgtcttctcgacgacacctcctgtaggctcaccacccattgcccctcaactgaagccacagcaggaggaagtagcccctctactaccactaagagaggcacaagtccctccaggtgacaagcgctcagcccccttcttagtttatgtcccttctttctaattctgacttgtataattagaaaacccataatcctcccttctctgaaaagccccaggctttgacctcactgatggagtccatactccrgacacatcggcccacctaggatgattgtcaacctcacatcagccaatagccagaggaggaagctagagacctcctggaggagggtttcccctctacccggcctaattaagacccaaattcctcaagtggagggaaagctttagacaatttccactggtatcccctagcgggtattaaaggagctgctcagaaacccataaacttatctaaggtgactgaagtcgtccagaggcccgatgagtcaccaggagcgtttttagagcgcctccaggaggcttatcggatt

SEQ ID NO: 761946 - DNA, 617 bp, Homo sapiens
ttacatctgctgtttacagaaaacaaaacttggcctgttttagaatctattttcttaaattttaagtttgattacatcacatttagcataagtgactccattttggtttgctctgtgcctagtgcacaagcttagttcagaatgaaggcctccagtaattttattttagatatcccctcctcccattttggttaagttctcatgtaggtaagagtgtgaccaaaattcagggccgtagtgccactctcagttttcattattttgagttttttttttttttwataccatgtcattcataggttatggtgtcctcatggtcgtatgtgcctttgaggttttttcattccagttaaacatagaccatctgatattgtacagatgactgcattcaaacatttataacttttgagagaatagagtgtggcagagaaactaccatttttactataaagaggataacaccaagagtttgaagtatgtttttagccagggtccccatgaacaaaccaactaaaattaaatagatcaaataattagttagataaatgttctattcatttaaacaaagcagcctctttattaatcccctgcaatttaatctatgtagtacctaatgt

SEQ ID NO: 761947 - DNA, 548 bp, Homo sapiens
aattggatcctcaaataaatatcatggtttgaggagtttataaatgctctcctgagccagtatttcaaaccttctatgacgaactgaatgtgccagtaccagaaattccaggaaaaacaagaaatttgtttttgcaattagccaagcatgtagcccagtctctcaatgtcacttcatgttatgtatgtggaggaactataacaggagatcaatggccatgggaagcccgagaattagtacccacagacccagttcctgataaaytcctggctcaaaagaatcaccctggtaacttctgggtcctaaaagcctcaatcattagacaatactgtatagcaagagttgggaaggacttcacccatcctgtgggaagactcagctgccttgggcaaaaactgtataatagtactacaaaaacagccacctaatatagttcaaaccatattaagaaaaatccatttagtaaattcccaaagttgcaaactgtgtagacccacccggagtcccaccaggactggacccactggattatactggatatgtgggca

SEQ ID NO: 761948 - DNA, 601 bp, Homo sapiens
gaattcagcagtgaatccatctggtcctggactttttcttcttggcaatttttttattaccatttcaatctaagtgcttgttattggtctgttcagagttcttatttcttcctggtttaatctaggaggttgtatatttccaggaatttatccatctcctctaggttttctagtttgtgagcacaaatgtgttcatagtagccttgartgatcttttgtatttctgtggtattcgttgttaatatttcctgtttcatttctaattgaacttatttggatcttctctcttcttttcttggttaatctcactaatgggctatcaattttgtttatcttttcaaagaaccagctttttgtttcatttatcttttgtattttgttgttgttgtttcatttttattaagttctactctggtctttgttatatctttcctcctcctgggtttgggtttggtttgttcttatttctctagttcttgaggtgtgaccttagattgtcaatttgtgctctttcagactttttgatgtaggcacttaatgctgtgaactttcctcttagcactgcttttgctgtatcttagaggttttgttaggttgtgtc

SEQ ID NO: 761949 - DNA, 606 bp, Homo sapiens
tacttgactccatcacaagatggagtttcctctttataatattcttcttacttgagattttaagtttaacaatgttatgtcgctggcactaatgctctgtcttatatttaaaattttcagtttcaaatttggtcttaatgcttattttgctacctttttcctttcttctttgctcactgtcttgcctatgtttccttctccactttggctcccaacttaactagaggattttattcctaccacaggtctgtatcttttaaggtttgtttcttgttaaaaaaaaaatttttttttccaacatcacaaaaagcatataagaataattcaaaaaatacttatgtattgatcattcttgttaaattattaagttttaattatatgtacataattatgtatacaattacatgtgtgtkgtatagtttcttgatagtttttaaattcttaataaatttttaaattatatatatacataattatgtgtataattatatattatgtgtatcttgtgtaaagttttcttgacaattgttaaagttccttcctcttctctagtgcaaaggcctttttaagattttgtttcagggaatgaaggttgtgggaatactt

SEQ ID NO: 761950 - DNA, 589 bp, Homo sapiens
aaaacgaggtctcactatgttgcctagctggtcacggaactcctgacctcgcgggatcctcccacctcagcctcccaaagtgctatgattacaagtatgagccaccacactcagccaatctccctatttcaaagtcagttaattagcaaccttagttctgcttataatctaaattcccccttgccatgtagcatagcaaagtcatagcatctgaggataaaaatgtgtacgtctccaggagccattattytgcttaccacagactccaagctctgtgaggacagaaattatatctcacttttttttaagatggagtcttgctctgtcgcccaggctgaagtgcagtggagcgatctcagctcactacaacctccacctcccaggttcaagcaattctcctgcctcagcctcccaagaagatgggattacaggtgtgcaccaccatgcctggctaacttttgtatttttagtagaggcagggtttcaccattttggccagactagtctcgacctcctgacctcaagtgatccacctgccttggcctcccaaagtgccggcattatcggcgtgagccactgcgcctggcct

SEQ ID NO: 761951 - DNA, 556 bp, Homo sapiens
aatgagtgagtgtttttggggatgggagatggggaatttctgtctgttttctctataagatagcaacagactgcatgtcaatgatgtatgggttctggggctatctgaactggattacttttaacagaattgtcgtttaattactgtcgtttttaaaaaatgtgttgaagygagtgaggtgaatcatttctaaatttctgaatgatttctccaatctttacaaacttattaatagaatattagaaattttgaaatcaatttaggggaaaaagattacgtatttaatttatatgaaacttttggcggccgggcgcggtggctcatgcctgtaatcccagcactttgggaggccgaggcgggtggatcacgaggtcaggagatcgagcccatcctggctaacacggtgaaaccctgtcttttctaaaaataccaaaaattacccgggcgtgatggtgggctcctgtagtcccagctactcgggaggctgaggcaggaaaatggcgtgaacacgggaggcggaagttgcagtgagccgagatcacgccactgcactcca

SEQ ID NO: 761952 - DNA, 629 bp, Homo sapiens
tgaggtgaatcatttctaaatttctgaatgatttctccaatctttacaaacttattaatagaatattagaaattttgaaatcaatttaggggaaaaagattacgtatttaatttatatgaaacttttggcggccgggcgcggtggctcatgcctgtaatcccagcactttgggaggccgaggcgggtggatcacgaggtcaggagatcgagcccatcctggctaacacggtgaaaccctgtcttttctaaaaataccaaaaattacccgggcgtgatggtgggctcctgtagtcccagctactcgggaggctgaggcaggaaaatggcgtgaacacgggaggcggaagttgcmgtgagccgagatcacgccactgcactccatcctaggcgacagagcaagactccatttcaaaaaaaaaaaaaaaaaaaacttttagagggataaggaaattaagacctagagaggtttaagttgctcaaagacaaaagtcacatcgctatgatagaggaaggaatggggaaaatcagagagcatttagattagaaaagtgactttattattatggtcatgagtgagtgatggctgaattctaagaagaacttcttaacatcaaggctgtggatcaat

SEQ ID NO: 761953 - DNA, 629 bp, Homo sapiens
tgaggtgaatcatttctaaatttctgaatgatttctccaatctttacaaacttattaatagaatattagaaattttgaaatcaatttaggggaaaaagattacgtatttaatttatatgaaacttttggcggccgggcgcggtggctcatgcctgtaatcccagcactttgggaggccgaggcgggtggatcacgaggtcaggagatcgagcccatcctggctaacacggtgaaaccctgtcttttctaaaaataccaaaaattacccgggcgtgatggtgggctcctgtagtcccagctactcgggaggctgaggcaggaaaatggcgtgaacacgggaggcggaagttgcagtgagccgagatcrcgccactgcactccatcctaggcgacagagcaagactccatttcaaaaaaaaaaaaaaaaaaaacttttagagggataaggaaattaagacctagagaggtttaagttgctcaaagacaaaagtcacatcgctatgatagaggaaggaatggggaaaatcagagagcatttagattagaaaagtgactttattattatggtcatgagtgagtgatggctgaattctaagaagaacttcttaacatcaaggctgtggatcaat

SEQ ID NO: 761954 - DNA, 568 bp, Homo sapiens
cccttagacctatgatgtattctcaatgcacataaggttgtctactatatcctcaggcatgtcacagcagtaaacacagcggtcacttggtgtttatagtgctactgttgttcccccatagctttttagaatgctgaggggagaagagggaactggaaggagagggaaacatttctaggtctactggccatatcaccgcatggaaaggcatgcttgcatgcacacacacagaacttgattcctaataaatgcttcttcatgtgtgtgtttgagactgtttcctacacaaccagggtccccaaaaggcttaatatatttacagtctattttcatgcaatgccrtgacacctagattaaattctaaaatatttagactaaaaaatgggaaaatcataacacataacccatttttgtgttccacttttacatttcagaataacaaatggaaataaatatatgaaagaaaaaatgttttttatcctttgtttcttattttaaaatgtttctacctttgatagagatttcaggtttctttcatatttctacattccctaaaaacaatattttc

SEQ ID NO: 761955 - DNA, 611 bp, Homo sapiens
ggaggtaagaaaggatttggtaatgaagaagggcaaggtaggcctgggatccttggtgaagctccccgggctgcttgcaggcagtactaggctgatgaatgcttgctgctaggaaagggaaggcagggttccagcactttagaagagacagggagaggattaagtggtgcccagaactaccttctcttacaattcaattttctytaagacactctccattcttttttttttttttttttttcagatggagactcgctctgtcgcccaggctggagtgcagtggcgcgatctcggctcactgcaagctccgcctcccaggttcaggccattctcctgcctcggcctcccgtgtagctgggactacaggcgcccgccaccacgcccggctaatgttttctatttttagtagagacggggtttcactgtgttagccaggatggtctccatctcctgatctcgtgatccacccgcctcggcctcccaaagtgctgggattacaggtgtgagccaccgcgcccggccaacactctccattcttacacagacattattcattttcaattataatggtccttctcttttcagcacaaagcaattagcagggtcacgga

SEQ ID NO: 761956 - DNA, 575 bp, Homo sapiens
aaggaaccaaaaggacatagatggttttgaagtaacaaacattcttgcttcagggagttaccaactggacgtaaagccaggctgaattgtcttaaggaatgtatgttaattgtgatttgaacccttgctttgtcaatgatgtgtcttttcttttttaaatgcaggcacttatttaaataatttatagatgaccttaattagtcattggtcttctagtggagatgcttgttaaatttgtaaaacagatagatctacagagaactgttttaggtagatcaaaggagatccacaaaattttggtcggagaatgaactgaaagtacagtgggcgttccacaacagggaacactcattgagctgcatagaatttctcggtgttgggtgttctgatttgaagcctcattacttcctctgtatcattaggtagcaaatttacttcayccaaattaaattaatcagttatctaattaatacttatacaatatttttaacagttgagggaaattgagggaggggagaggatgacagatgtcgctatgccgtaattggtaatgcaccaattaaggcaatcagata

SEQ ID NO: 761957 - DNA, 646 bp, Homo sapiens
tgcacatttagagaaacagaagaacatgaggttgagaggctggactttgttgacagatgccttcatgtgaatccacccatgttccttactagtgcgtgaccttagccaggggcctaatatctttgtgtatctctgttttcttatcgtaaaatggggaatatgatggtacctatcttttcaggttgttgggaagattttagtagtgttttcaggtaacaagttcagaataggacctggcgtgtcttatagcacccartcgatattggctaccaccatgtaggaagggcttaatctcccacatagagcatatgggagcgtgctatgggctgcaggatacacatatatgcaaattcgcctgcaccatcaaggaacaggggttgggaagtgggggacagacctggactcaaatatttgataaaactacactgtggttagcgagatcatagaggaaagcacaggaaactgcaaatccccctgacacccagcattgctaaatgagaactaggtgcacaatccatgaggaatgatgatttgatttgagtggtgctggttgaaatctattcagttagtaatcacatacacagtacctcaaaagagtcctttagtagctttataatgcagaaaccacagacgggttcaatttggc

SEQ ID NO: 761958 - DNA, 602 bp, Homo sapiens
  misc_feature 518: n = A,T,C or G
agtttagaaaccaggagaaacaaactagaaaccacaggatccaacccatggtataaaaatcttagtggaagaaccactctggcaaatctctgcttacttttggcttcaagggctcatctttttttctctcactcagagaatataaaaatctgcagaatacaacatgctaaccttaacctccaaggtagaaacctagtggcaacccttgcaatttttcagtggaaacttgctgttttaaatggaaagctagagaagataaaaccactcaaatcttcctcaatgaccctgatatcgtatatttcttttcttttcttttttttttttttgagacagagtcttgctctgtcacccaggctggagtgcagyggcgcgatcttggctcactgcaacctctgcctcctgggttcaagcaattctcctgccttagcctccagagtagctgggattataggcgcgtgccaccatgctcggctaatttttgtatttttagtagagacggggttccacaccatgttggnccaggttggtctcgaactcctgacctcgtgatccacccaccttggcctcccaaagtgctgggattacagggcgtgagccaccgc

SEQ ID NO: 761959 - DNA, 605 bp, Homo sapiens
aaggaattagaccactgaactgcacggtcacccacatggacagttacatgtgactaatgaaaatacagccttctttttgtcctacatgtatatgagaaacagaaactcgaacaggaggctcctgaaagtagatgtcagagatgacactggctgctgtggaggaagtggaggatgctggatacacctaaaaaaagtcatctccattccttgtgtttaggatttataatgttaagaatcatgttgctatttcagcctacttttaggttatgaaatcaaatggatttttttctcatttgctagataacaccaagttcttctaagtcaaattttcacaagcaagtcygctttcaaaaatgccccttaagagaagaaataacaaataagtatctatatgtactagaagcaaaaaactagaaaatcatattttaaagttacttttaaaataacattaaaacttatatatgtatgaataagtttaacaaaaggtgtgtaagaccactatattgctaattacaaaatatttctcagggaaactaaagaagacaaatgaagatgtatcacacaatcttgtatttaaaaattcaatattattatcactactatca

SEQ ID NO: 761960 - DNA, 579 bp, Homo sapiens
ttccacgtgcctccccacatctgtttccatccttctccaagctgccgtgtccccgccaaggcaatcttcatggactgtagaccaaattcatgtgctcccttgctgtcttggcttccagctaggttagggcaatgaggggagggcaggaaattggaaggcaagatgacagtgaggtcaggacattttcctctcactttctctgctggattggctcccactgcaggttggttttttcctctactgcaggccacagctccagtcatgtgtttctcttatcagcttttcctcccagttccggccttctccatgatttcctccctcaccccttcaccaaggggtggaagtgcttctggctgttaccagcctacaggaccacctgaccttttgtcrctttgcctaaactctgtccacaccttggaaaatggccccgtattaaatcttctttaattgtccagtttaagtgtcctttctgtttctgaagggatgtcaactgatacacatttctctcacacttcctatgagccaggaactcttctcagccctgagaaatagtactgaagacgacaggatccctcaggt

SEQ ID NO: 761961 - DNA, 622 bp, Homo sapiens
caaaaggaaattgtttactcaggaaagttgtactatacacgaaaacaagttaatccccataaatatataattcagcatcattttgcttagaacctcatactttaaaaacatcagtttctcaaaatgggttaaatttgactttgttttcactaaaacttttattttttgaaatatcagacataaaagaaagtggctggaaattttcaaatgtgttttttggctgataatgaagagggggacagagctttcctcatttatttacttttttaccattagaacaagggaaaagaataattgcatttcccattatgttcaacagaaagggaagaaggaggaatggatctgtaattagaaatataagcatttaagaaaaggtatcttgaaaaaataatttcaataagttggaccatagttcargaactcagtttcaggattcataactaagagttcaaagattacataatatgttttagtttgaatgatttaaaagggagtttggttattttctataataaataacacaactcaactcgttttttaatggccttctcttttgttaacagctcaagacttgggtcaggcctggattcaaatcctgattctgttccttaacatctggaag

SEQ ID NO: 761962 - DNA, 529 bp, Homo sapiens
aacagattatgaaacattcattgatgtggtttcagattccacattgcaattaacctttaagagattaccattagtggagatttgatatagtatcaaagaataatattcacaattatatgaaaaggctatgaaaatactctccctttcccagtacatgtctgtgtgaggccaggtattcttcatatacttcaaccaaactaacatattatacgacattagatgtagaagcagatatgagaatccaattctcttctattaaggtagacattaaagaaatttgcaataatgtaaaataattatatgcttatcactaaattcrtttgggagaatatttttattaaaacatacggttaacataaaataggtttattattatttttaaatgaatcaataaatgtcttaaattttaaagttctacctctgtatgacagttataactcacataaataaaagctctttggtgcccttgataattttttttttccccaagacagagtcttgctttgtcccccagagctggagtgcaatg

SEQ ID NO: 761963 - DNA, 624 bp, Homo sapiens
ctccaagcttctctgtggccctttgttcaccgctcttcctctcccaggcttccctggaagaagagaaacttctctaattgacaggtttggcagaatgaacccagaacacatcggaaggaatcagcctgccttcaggaacctgtattctctttccactgtactgaaagcttagtcagttgggagataaatttaattcagagagtgctgattatcttagcgagtctatatggccatttctcgaatcagctttattggtaaagttgacattttgatstgcatatctctgactgtgcatttatctttgaaatggatgagacaagaaagtgtggtgttatttattgagactttatacccctaatgaatgtgtttaagaaatgtttgtggaggaagaaattaatgaatgtataacagaatgtctgaccaacatcctttataatggtacagctttcacagggaagatggtttagagcttttccataagaattgaatctaatggttaggaactgaatctaatggtcagaaacttgcacgcttgagcctcacaaatgtatatgtggaatgctggtctttaaacaaaaaaacccttagcagtatgaataattagagcagcctctaatcttcaat

SEQ ID NO: 761964 - DNA, 624 bp, Homo sapiens
ctccaagcttctctgtggccctttgttcaccgctcttcctctcccaggcttccctggaagaagagaaacttctctaattgacaggtttggcagaatgaacccagaacacatcggaaggaatcagcctgccttcaggaacctgtattctctttccactgtactgaaagcttagtcagttgggagataaatttaattcagagagtgctgattatcttagcgagtctatatggccatttctcgaatcagctttattggtaaagttgacattttgatgtgcatatctctgactgtgcatttatctttgaaatggatgagacaagaaagtgtggtgttatttattgagactttatamccctaatgaatgtgtttaagaaatgtttgtggaggaagaaattaatgaatgtataacagaatgtctgaccaacatcctttataatggtacagctttcacagggaagatggtttagagcttttccataagaattgaatctaatggttaggaactgaatctaatggtcagaaacttgcacgcttgagcctcacaaatgtatatgtggaatgctggtctttaaacaaaaaaacccttagcagtatgaataattagagcagcctctaatcttcaat

SEQ ID NO: 761965 - DNA, 521 bp, Homo sapiens
gatcctgaaagttcatgctctgtgctagtgtatggggaacattttgatacttgggttagtgatttctgggactgaatattaaggacttgattttctgtccgttccacctgctttcaggaccactggagatagtcccttggcttytactgaagctggaagatttgtgtccatgtacaagatcaacaaccattatttccttggacttttaactcactccagcattgaacagctgctgttttccaagttaagggtttttttttttttttttttttttttagccaattatagctcacaaaagtttgtgcttgctctgtccaggtgggtctgccagaggccccctgacccaaatgttctgtccccacatcatgtggcagcacaacccaattagaggtgaccagggcagctgtccacataattgtatgcagttaacatctaacccttggctttcttggcaaagcaaaggcattggccttttggcttctgctggtccggtcagcaattacccagttattaaaactaaa

SEQ ID NO: 761966 - DNA, 614 bp, Homo sapiens
ggggtatatcaaatcactctcctataaacttgaaaatagataggctctgtgtgagttgaatttttttctttttcttttggcttcaaaccacattccaagggcccacctatcacagttttacacacatggacatctggcagggaaataaattaaggcctaccttagagagcaaggaaatgcatccacctataaatgttattttagaagagactgtctgatcctattcacttatcaactgyattagaaggctaatgaattgactgctgagaaaatgagagagagctcaggctgtggacagggatgggcagaatttcacaccttttatccaaatggcagggttatttaagattgtgataaaatggtgttgcatttggaggaaagggaatacaacataaaataacaatccacagacacaatccatagaaaagtgttacattctctcagccactggccaaaaatcaagatttatgcacgctgcagtcctgcctagtggaagaaaaaagaggcataaaaagaagccctctttcccataataaataggaaaatattaaatctgtaatccagatctacttctccagtgttctcatttctcaattctctagcaaagtaagatg

SEQ ID NO: 761967 - DNA, 615 bp, Homo sapiens
ctttgtacagagttaggatcaagtacatataccattttaaactacttttttgttgacaactaacctattaatatattctcatttttccacaaagccttcaaaatggtcattattgttattatgaaacaaaacttacgttatttcccttttaatgtgtttttatgcatttagcatattttcagttttgaacaagtccctaggataaattccaaggtgtaatattacttagtcaaaggtaataaacaatgttgggctttgggtacatcttgcaacgttggcttccaaagcaattgttttgatttacaatgccactaccatgattactctcatgtcaccccaactgaagagggttctagaacttacagcatcataagtcacattcagagacattatgctgctgtttttttgaagccactatccataaycctattgtgtcacctgtaactggtcttcaaacttctctatgcctaaacttaccctctgggcacaaaggaaggacactcagaggagacagctagaatggtggaaagacgtagtataggttagtcaggaatatcctgtttagattcctggctttctaaattactagccatgtggtcttaggaaggacacttg

SEQ ID NO: 761968 - DNA, 569 bp, Homo sapiens
aacattatggaatcacagggaggaaggacacacattttaaggttacaggtggctgtgccacctgccagtcaattctcaacagacggagtaggagcttcattttttttattccacagcacagcagtggatgtcgggaagatwcctgaacttcactgaagctgttttccacagggtctggtaagccaaggagtttccacactggggtgagtggatttgacagcagaggtggaaggaatctacaggaaagagctgcctaattaatcacaagctatcagagcctttcagcagtgagagtctctgaggtcttaacaacacccctcagtaaagttaaaaaccatcttggtatgacttcattttcttagagacacatgattgatctggctattggtgaatggagacactgcggcttctttctgtagatggtgtcattagatgagaagattaagtgcctttgagcaaaggctatgtgaagactgtgagtgattcactgggaatggaagaaagataaagaaaactctgaaatatgtacttttaaaggcaaaaccttagactttacctcatttattagc

SEQ ID NO: 761969 - DNA, 525 bp, Homo sapiens
gatcctgaaagttcatgctctgtgctagtgtatggggaacattctgatacttgggttagtgatttctgggactgaatattaaggacttgatcttctgtccgttccacctgctttcaggaccactggagatagtcccttggcttctactgaagctggaagatctgtgtccatgtacaagatcaacaaccattatctccttggacttctaactcactccagcattgaacagctgctgttttccaagttaagggkttttttttttttttttttttttttagccaattatagctcacaaaagtttgtgcttgctctgtccaggggggtctgccaaaggccccctgacccaaatgttctgtccccacatcatgtggcagccaacccaattagaggtgaccagggcagctgtccacataattgtgtgcagttaacatctaacccttggctttcttggcaaagcaaaggcattggccttttggcttctgctggtccggtcagcaattacccagttattaaaactaaataatt

SEQ ID NO: 761970 - DNA, 525 bp, Homo sapiens
gatcctgaaagttcatgctctgtgctagtgtatggggaacattctgatacttgggttagtgatttctgggactgaatattaaggacttgatcttctgtccgttccacctgctttcaggaccactggagatagtcccttggcttctactgaagctggaagatctgtgtccatgtacaagatcaacaaccattatctccttggacttctaactcactccagcattgaacagctgctgttttccaagttaaggggttttttttttttttttttttttttagccaattatagctcacaaaagtttgtgcttgctctgtccaggkgggtctgccaaaggccccctgacccaaatgttctgtccccacatcatgtggcagccaacccaattagaggtgaccagggcagctgtccacataattgtgtgcagttaacatctaacccttggctttcttggcaaagcaaaggcattggccttttggcttctgctggtccggtcagcaattacccagttattaaaactaaataatt

SEQ ID NO: 761971 - DNA, 622 bp, Homo sapiens
aaagtgtataagaaaagtaaaatgtacctttagtaaaaagattataaaggggcataaaaatgtggatttttacctacattaaaaggttaaaaaaatattgttttaaaagttttaaaacgttaattgtaaagaaaattctgtgtgtaaacatattagctaaagttaaaaagktatcatccaatttttctgtgaactagacattaaagtaaaaatgcaacaggtttttcttaaagcatcaacctgctctttaacaaaaattataaaaagttaaaaagagtctataaaatcttaccttatggtcaaacataaaaaattagataaatatgtctacaaggttttattaaaattaagtttaacattaataaccccctaatataaaagtaaaatttaacttacgtggtataaaaatcatacaagaagcattattaaatataaaatagtgtttaactttctttggtctaaaaactaataaaaaatagatgctaaaagaaacattcattttactagaggatcatagaagttaaagacttaaaacaaactttggcaattaagacggcataccaagatgcaaatgcctggttgaaatagatcaaatattccatctgcacgttataaaaagcaa

SEQ ID NO: 761972 - DNA, 644 bp, Homo sapiens
gtctaatgagatattatgcaggatcccatgaaggtaaaacaaacactttaagccctctgatagtggtgctagtttagatcttgccctattttatatacaatacatgtcaattctagtcatccagtggttgggtggttttccagttgttttcmttagaagcctctgaccaatcatccaagccatttaccatcattcatgagtttgtatgtattcttctcttgggccacttctctttccacacaaagtagatgatcaaatgcattgcctgaaactgcccactgggaccattttcccttgctgctatcatttagggccaccctgagaagagctgcagagcagcagttttgcaattcctgcttgcacttacctactgaattgacaaaaccaaacttgaggtttttctttttttctctttaagctgactataagagactccttggacaaacatagggataaattcagggagaggtgctggtgcaatattagtgaataatatgggggtctgggctacctgcttgttcccttaggccctacttgtgcacaattctcaacgtaccacttccatcttgtagattgctgctgggcctgctcaaactcatgactttcaggatctaatagaactactcgaaatgggctatttcaag

SEQ ID NO: 761973 - DNA, 625 bp, Homo sapiens
agatattatgcaggatcccatgaaggtaaaacaaacactttaagccctctgatagtggtgctagtttagatcttgccctattttatatacaatacatgtcaattctagtcatccagtggttgggtggttttccagttgttttccttagaagcctctgaccaatcatccaagccatttaccatcattcatgagtttgtatgtattcttctcttgggccacttctctttccacacaaagtagatgatcaaatgcattgcctgaaactgcccactgggaccattttcccttgctgctatcatttagggccaccctgagaagagctgcagagcagcagttttgcaattcctgcttgcacttacctactgaattgacaaaaccaaacttgaggkttttctttttttctctttaagctgactataagagactccttggacaaacatagggataaattcagggagaggtgctggtgcaatattagtgaataatatgggggtctgggctacctgcttgttcccttaggccctacttgtgcacaattctcaacgtaccacttccatcttgtagattgctgctgggcctgctcaaactcatgactttcaggatctaatagaactactcgaaatgg

SEQ ID NO: 761974 - DNA, 649 bp, Homo sapiens
tttctaaagttcattctaagatgaaacactgttgggatagaaaactcttaactgtaaccaaacaagcattagtaacttttgttcagcacaaccttactaaaaccgggtttcccaagaaagtagactagctccctagagttctttccagcaattaaattctagaattctagttataccagaagttcttagagtctatttgtctatcatattataaatgagctaattaacactgtttatagcagaaaatttctgtgatccaagcaagttcaaagtattcacaaatggatgctctccaaaagtgggcagcatatgaaaacaaaaatttttaaaaagcattctatatttacaactatgtacatttaaaaaaatgtaatcagatttacacattgatataattatttaaaaaacyttaatatggaaataattcacttcacaaaccaaatgtatcccctacagttcttaatagttcttatttcctaaaagaataatttcaggttgtttttttaaatttccaagtgaaaatgatcatgggaaatgggtttactaattcatttgcatcttagcctatagtattactcaagataaaagcttaccaggtccctggtcataacctgaaacattttaagaatgagttcatttcttctatatg

SEQ ID NO: 761975 - DNA, 589 bp, Homo sapiens
agtcagctgtcagtgggggagagtggttgacacccagatgttatgggctgaatggtgtccccacccccaaattcatatctgaaagtcctaatcctaatactttgtttttaacttttagtttttttagacagagtcttgctctgttgcccaggctggagtgtggtggcatgatctckgctcactgcagccttcgcctcccaggttcaagcgattctcctgcctcagcctgtcaagtagctgggattacaggtgtgcactaccacacccggctaatttttatatttttagtagagacggggtttcactacgttgccaggctggtcttgaacccctgacctcaagtgatcctcctgccttggccccccaaagtactgggactacaggtatgagccaccacacctagccctaatcctaatactttagaatgtaactgtctttggagataaggccttcaaagaggggattaagctaagcttaggtcattagggtgaaaaagaggagatcgggacacagacatgtacagagggaagataatgtgaagatgtagagaacagccatccatctataagccaaggagagaggcctcagg

SEQ ID NO: 761976 - DNA, 322 bp, Homo sapiens
cattggatatggggtatgatagacaggcgggtaaaggataactctaagatttttggcccaagcaactagagggattgagtttcctcagccaaaagaagagcagatttacctgggtgcaatggttcatgcttgtggargctgaggcaggaggattgtttgaggccaggagtttgagaccagcctcatcaacatagggagaccctgtctctacaaaaaacaaaaacaaaaaaaaaccaagcacagtggctcaaacctgtagtcccacctacttgggaggttcaagctgcttcttgcttgagcccaggagtttgaggctacagtg

SEQ ID NO: 761977 - DNA, 634 bp, Homo sapiens
ggatctaggactgtgcaggacgtgcctcattaacagtatgtttacaggcagtatgcttggtaaaagtcatcgccattctccattctcaattaaccaggggcaaaatgcactgtggaaagccgcagggacctctgcccaagaaagcctgggtattgtccaaggtttccccccactgagacagcctgagatatggcctcccgggaagggaaagacctgaccatcccccagcccgacacccgcaaagggtctgtgctgagggggattagtaaaagaggaaggcctcttgtggttgagatgaggaaggcctctgtctcctgcatgcccctgggaacagcatgtcttggtgtaaaacccgatcctatgttcgttccattctgagataggagaaaaccaccctgtggctggagccaagatacgctggcggcaatgctgctgttactctttgctacactgagatgtttgggtggagagaagcataaatctggcctacstacacatctgggcatagtaccttcccttgaacttatttgtaacacagattcctttgctcacagattttcctgctgaccttctccccactatcaccctgttctcctgctgcattccccttgccgagatagtgaaaacagtaatc

SEQ ID NO: 761978 - DNA, 596 bp, Homo sapiens
cttacttttttaaagtcaactaactagaactctttcacatagtttggtagtgaaatatcacttccacatgacccatataacatacagatataacaggcatacagaataaaaaaggcaagtccaaaagatttttcatttgcttgttttccaaaaaaaattatgtcccttactttagattactaattaaaaaaagaaaagttacaggggccaacaaaaggtgaagaagagaccaggtacagtggctcacacctgtaatcctagcactttgggaggccgacgccggcggatcacttgagctcaggagttctagaccagcctggccaacatagtaaaaccccrtctctactaaaaacacacacacacacacacacacaaaaatagtggggcatggtggcacatgcatgtaatcccaactacttgggaggctgagacacaagaattgcttgaacccaggaggcagaggtttcagtgaaccaagatcatgccactgactgggcaacagagtgagagtccatctcaaaaaaaaggtaaagaagagagttacctcccaggccttttcaaaagagagaaagagctaaacttctgatataataatc

SEQ ID NO: 761979 - DNA, 610 bp, Homo sapiens
  misc_feature 1, 2, 3, 4, 5, 6, 7: n = A,T,C or G
nnnnnnntatatcagaagtttagctctttctctcttttgaaaggcctgggaggtaactctcttctttaccttttttttgagatggactctcactctgttgcccagtcagtggcatgatcttggttcactgaaacctctgcctcctgggttcaagcaattcttgtgtctcagcctcccaagtagttgggattacatgcatgtgccaccatgccccactatttttgtgtgtgtgtgtgtgtgtgtgtttttagtagagayggggttttactatgttggccaggctggtctagaactcctgagctcaagtgatccgccggcgtcggcctcccaaagtgctaggattacaggtgtgagccactgtacctggtctcttcttcaccttttgttggcccctgtaacttttctttttttaattagtaatctaaagtaagggacataattttttttggaaaacaagcaaatgaaaaatcttttggacttgccttttttattctgtatgcctgttatatctgtatgttatatgggtcatgtggaagtgatatttcactaccaaactatgtgaaagagttctagttagttgactttaaaaaagtaagcacttatcagactg

SEQ ID NO: 761980 - DNA, 509 bp, Homo sapiens
atttctggctttcaaactttacttaaaggctcagagaaaggaaaatccaaggtggttggtggagggcaggggaatcgacaaatagcgaaagggcatacagataccaaaccagaaaggactcattccctaagccaggatgaatctgggccatgccrggctaaacgaagctatgcaatggggttacaggccacgcccccaaggacgtaaaacaagatggaggcctgcagcgaagtttgctgtggagcatacagaaagacatgcaaaacacacagattggctacagcttacgacttacctcacaaatcctttcgcacaaaactttacagaaaatataaacggtaatcctcatcattcccaaaagagcaaaacgtcttccaaaaggaaaagaaaaacctcctttaaaagtatactgctgatgggttggagaggagataaggatgcctgggggaagaacctcttattcctatgcaaatggttcctccaccagagagaggagcttaattgctgtg

SEQ ID NO: 761981 - DNA, 560 bp, Homo sapiens
attctttaccaaaaagtctctgggctgaattttcaatttacaatactttcaatttatgatgagtttacctggacataaccccatcataagctgcggaacatctgtatacaaaaaaatggatttgtaaaatataatgggtttctcaaatagtcgttattatatatatatatatatatatatatattcatattcattttgaatatgaagaaatatgtgcagggaggttaagtgacttgccttaggtcacaaagytaatgaatgagagaaccagagctcaaatcgattgtctaatctgccttccacttcaccacagctgccaccatgaaatagtaacaagaaaaaatatgcatgatcatgtgtcgggtcaagttgatggacaggtgtctcataccaggaagcttttctatcaggaatagaccttcacaacagtcacggataatgtatttactgttatggtttaagaacagattaagctaaaaagtttgaatgtgttttaaaacattttaactcatttctttgctggaatagatgataaattttaagtcatgtttttcaaaaaa

SEQ ID NO: 761982 - DNA, 612 bp, Homo sapiens
tggcaggcaccagagcacaaggtgtccaggtctgaaaacttctggcagttctgctccttcctctccctatggccaagagctcagtagcagtagcctgcagattcttcctgttctttctctcaaatctgtaccttctcatccacccttgccaccatcattccagggtgggcctccctcatctcctggccctcattttctcccagcttcaccccattctcacatcacagctgctctctcctccacagctggccgtggtccctccctctatgatttcactgtgtctaccaacacagtgatcaaaggagaaggaggctgggaagagctgagggctataggatgatctctgcttaaagacacaagcrgctccagagactggtaaattttgagagagaatcagaagccagaaaaaaaaagcttaggtttcattgcagagtggtcaattttttagcctggaattcaaaagcatcaataatctagccctcatccctcacccaatccctctttctagccactcttgctgttcctccagtgtgtcctgtgcatactccccttggcatcttccctcgtgttactcctcccccaggactactcttctctcagcccctgtcccat

SEQ ID NO: 761983 - DNA, 530 bp, Homo sapiens
aaatccaaaccttggaacacgctacaaaacaactaactcgtactctgagaaacatatcagtggactggattccaaacagtggctcatgcctgtaattttaacactttgggaggccaaggtaggcaaatcacttgaggccagcagtttgaggccagcctaggcaacatagggagaccccatctatacaaaaaattaaataaaatttatctgagcttggtggcatgtgcctgtagtcccatttacttgggaggctgaagcaggaggctcccttgagcccagaaatttgaggctgcagtgatctatgatcacgtcattacactccaccctgggcagcagagcaaggccctgtctctaaaaaaggaaattaaaaaaaaaaaamaaaacatgtcaaggtaatgaaagacaaagaaagaggaactgcttcaaattaaaggggattaaagaaacgtgacagctaaatgtgacatatgattctgaattggatcctgaaccacagaaaggatattagtgggcaactggcaaaatctgaa

SEQ ID NO: 761984 - DNA, 530 bp, Homo sapiens
aaatccaaaccttggaacacgctacaaaacaactaactcgtactctgagaaacatatcagtggactggattccaaacagtggctcatgcctgtaattttaacactttgggaggccaaggtaggcaaatcacttgaggccagcagtttgaggccagcctaggcaacatagggagaccccatctatacaaaaaattaaataaaatttatctgagcttggtggcatgtgcctgtagtcccatttacttgggaggctgaagcaggaggctcccttgagcccagaaatttgaggctgcagtgatctatgatcacgtcattacactccaccctgggcagcagagcaaggccctgtctctaaaaaaggaaattaaaaaaaaaaaaaaaamcatgtcaaggtaatgaaagacaaagaaagaggaactgcttcaaattaaaggggattaaagaaacgtgacagctaaatgtgacatatgattctgaattggatcctgaaccacagaaaggatattagtgggcaactggcaaaatctgaa

SEQ ID NO: 761985 - DNA, 552 bp, Homo sapiens
ttctgaattggatcctgaaccacagaaaggatattagtgggcaactggcaaaatctgaataaagtttatagtttataaaaaaaaaacagacaaaaaacatgtagttagaccatattttctttcttttttttttttttttgagatggagtctcgctctgtcacccagggtggagtgcagtggygccatctcggctcactgcaacctccgcttcccgggttcaagtgattctcctgcctcagcctcacaagtagctgggactacaggcgagcaccaccatgccctgttaatttttgtatttttaaaaatttttagtagagatggggtttcaccatattggccaggctggggttagaccatattttctaaccagctttctttgcagtttggtggggctttgtgtctgaattctggccaatggaaccacgtggaggcctggcccagaacatctccctgtggattctctcatctggcaactggatgcctacacgaagggtgattttggagtcatgtgttggagatcacaaagcttttgtcagccaggttcctgaatg

SEQ ID NO: 761986 - DNA, 653 bp, Homo sapiens
cttcctgtccctctccccacttctcctggatcttctcatctgtatctttttccacgtttgtaaatataaattcaatagaaataaacagttttatatatggcaaatcatgatgagctatgaaagaaaggtgagtagggggattaaattttaaaatagatacaaaaggataaatgcactatttcttgagagcaatggctttcaatctttattttgaagtgacctatattttgattcaatccagttcccccaacttgctcacaattgtgtaagtgaaaaaaaactgtgtctaaacaagtgcactattacttacccagagtatatggttctgttaactaagtgttctgtttctttttaaagcctggttaatggccgggcgctgtggctcaygcctataatcccagcactttgggaggccaaggcaggcggatccctgagttcgggagttcaagaccagcctgaccaacacggagaaaccccgtctctactaaaaatacagaattagtcaggcgtggtggtgggcgcctgtaatcccagctactcaggaggctgaggcaggagaatcgcttgaacccgggaggcggaggttgcggtgagctgagatcacgccattgcactacagcctgggcaataagagtgaaactctgtcaaaaaaa

SEQ ID NO: 761987 - DNA, 545 bp, Homo sapiens
gtcatacattctccttgtacaggttaactcaagagtttggcatgttaaaaggccacgttgccaaggttaaaatccaaccatctgactgaagtcagagtctaaaaaaattttaagcttgctcctccgtcaactggtttcaaggacattcartttcgtttcatgccaggctgtgaagcttttcttttcaatgctagaacctaaccatggaaagtggaattgaaaacaattacacagcgaattggcttatgcgtggacttcgatctgggatccacgaacatacctaatgcttggcaaaatggagaggggtgctatgtgttattattatgtgttattattaatcacataactgaactctgtggctccaggccttccatggctcgtctcccaatcaattcttttcagaactaagaatcacgacaggggccgggcgcggtggctgagcctgcaatcccaccactttgggaagtcgaggcaggaagatcgcttgagcccaggaaattgagtccccctgggcaacacagcccgacctcgtctgcaatcgatca

SEQ ID NO: 761988 - DNA, 619 bp, Homo sapiens
gcatgacaccaaaagccctattcataaaaaaaaatatatagatgaatttgacttcaaaataagaactcgtgccctatgaaagacactctcaggagatgaaaagaaaagccacagtctatgagacaatatttgcaaacagcatatctgacaaaggacctatatccaggatatataaagagttcttaaaacgcagtaacattttttaaattatttaatgggcaaaagatttgcacacacttttccccgaagacatatggatgcctatgagcatgtgaaaagatgctcaatatcactagtcatcatagaaatcaaaattaacmccataatgagatatcactacatacctattataatggctgtaactttttttttttttttttttttgagatggagtttttctcttgtcacccaggctggagtgcaatggcacgatctcggctcactgaaacctttgcctcccaggctcaagtgattctcctgcctcagcctcctgagtagctgggattagtaaaggcacctgccaccagcccagctaatttctgggtttttttagtagagatgaggtttcagcatgttggccaggctggtcttgaactcctgaccttaggtgatcccccta

SEQ ID NO: 761989 - DNA, 619 bp, Homo sapiens
gcatgacaccaaaagccctattcataaaaaaaaatatatagatgaatttgacttcaaaataagaactcgtgccctatgaaagacactctcaggagatgaaaagaaaagccacagtctatgagacaatatttgcaaacagcatatctgacaaaggacctatatccaggatatataaagagttcttaaaacgcagtaacattttttaaattatttaatgggcaaaagatttgcacacacttttccccgaagacatatggatgcctatgagcatgtgaaaagatgctcaatatcactagtcatcatagaaatcaaaattaaccccataatgagatatcactacatacctattataatggctgtaactttttttttttttttttttttgagayggagtttttctcttgtcacccaggctggagtgcaatggcacgatctcggctcactgaaacctttgcctcccaggctcaagtgattctcctgcctcagcctcctgagtagctgggattagtaaaggcacctgccaccagcccagctaatttctgggtttttttagtagagatgaggtttcagcatgttggccaggctggtcttgaactcctgaccttaggtgatcccccta

SEQ ID NO: 761990 - DNA, 635 bp, Homo sapiens
tcctactccttaccatctgaagaactgaaaaaattattccaggttcagcaatgttggaaccaagttttgtaaacggacctaagccttttacaatctgggggaccttctttaggaaatggaacacagatgaccatgtatacatgttgctggcgcccctcctatggctttggaaggcacccaggcaggtgaggagccctgaatctcgagcttcctttagctttacagtgattcagtctctggttaggaccattacgatttctttctttatttcccccttacttatgccctatatgaaatgaaacagatgtgagtgtttgaatcaaaaagacttccctgatgtagtggtctcattttagatgctcagagcatataataagtggcagcagaccttacttgttccatctggtttttgcatagactgctcgagttgtttttcctttctcatttgttttcctcccttgcattttggkctgtctgctccccaaacttttagctatgaaacatctctagaattcgacatctgtcagaggaggcagcggaagttctttctctgggatccatgagtcctgactcccctgatactgtgtgctgagagaggggtttgttttcataattatgacaattcccatgtattg

SEQ ID NO: 761991 - DNA, 497 bp, Homo sapiens
cggtcactatttgcatatcaggcagaatcctttcccatctttgcacctcctgttctgagcatggcatgtgtgcagaagctttccagaaaagtctgttgatttgaaccatgatggccaaaataactctggacagggtggcaccgttttgagctgcgtgtaagcacacatgtgtgcaggtgcacatacccacaccgatacacgggcatgcacaccacggcctgaggtcctctgccgctggaagaaaaggcaggttggcatctgtcatcgttgcatttytttgacaaaacatcaaccttcttctcacaacttttctttgccaagtgacttttcaaggaccttcccaaactgacatctctgaaatctttctttttctgtactctaaggggtgggcgaactttctgcaaaggctagggtggtaaatattttaaactatatggtctctgtccaacttctcaactcctgcatcgtatcacaaaagcagccacagacagcctgta

SEQ ID NO: 761992 - DNA, 559 bp, Homo sapiens
ctcctaggctcaagcaatgtaccttgaaccattttgaagtgtgggtctcagtggcattaggtacattcacatttttgtgcaactgttgccaccatccatctccagagcgttttcatcaactcagactgaaactctctacccattaaacagtaactccaatggggattatagccaaataatatatttttatttttattatatttttgagatggagttttgctctcgttgcccasgctggagtgcagtggcacaatctctgctcaccgcaacctccacctcctgggttcaagcaattctcctgcctcatcctcccgagtagctgggattacaggcgcccgccaccacacccagctaattttgtatttttagtagagacagggtttctccatgttggtcaggccggtctccaactcccgacctcaggtgatccacccgcctcggcctcccaaagtgctgggattacaggcgtgagccaccgcgcctggccttaaagccaaataatttaagtacataatgctaatagcattttaccattaattatgtattatgtgaatctata

SEQ ID NO: 761993 - DNA, 623 bp, Homo sapiens
atgccctggggtgggggctctgggtctggccagactgagtgtctcctgttgcggacatctccctgcagtacatattgtacagttcgcagtctagccagctcgtcagagacggttgactgctctgaaagctgacctcatttttcctgcttacccatactcccacttccctccccacagagcagatggcctctggatcagtgccagagccattccccgggcagagaagcatctagaccttgtcactaccaagggtgcggctccacacccgcgggacccgagcctctagaaatgagggagaagacgactctgcctttctgcaatttagacgtcgcaaggatgaaaacgatgcggacaggctttccagcagtgagcctggggaaatctgcgtcacatgggcgayagaaggtccctcgaatccctcaatccccgtggcccgcaccactgtgtaataatctccaaaggttgcagtaggaagattcttgattctcgtttgctatatccttcacatttctaaagtacctccagaaagaccaggaacctgtaagcatcacagataaataggaatcgatccagagagattttaaaaagagtaatttaggaagtactaagatgacatcaaaaat

SEQ ID NO: 761994 - DNA, 540 bp, Homo sapiens
aaatatttttccatttgttgtgtcctcttcaatttctttcattaacattttataattttcattatagagacgtttcacttctttggttaattcctaagtatttaatcttatgtgtggctattgtaaatgggattactttttaattttttttcacattgttaactgttgacatacagaaatgttactgatkttcatatattgattttgtatccttcaactttactagatttgtttatcaattctcatagttttcttgtggagtctttaggtttttccaagtataaaatcatatcatctgcaaacaaggataatttgacttcttcttttccaattaggatgccctttatttctttctcttgtatgattgctccagctgggacttccagtacgattttaaataacagttgttagaatggacatccttgtcacgttctggatcttagaggaaagtctttcaattttcccccatttagtgtgatactagttttggttctgtcatatatagattttatcatgttgaggtgtgttccttctatctcc

SEQ ID NO: 761995 - DNA, 540 bp, Homo sapiens
aaatatttttccatttgttgtgtcctcttcaatttctttcattaacattttataattttcattatagagacgtttcacttctttggttaattcctaagtatttaatcttatgtgtggctattgtaaatgggattactttttaattttttttcacattgttaactgttgacatacagaaatgttactgatgttcatatattgattttgtatccttcaactttactagatttgtttatcaattctcatagttttcttgtggagtctttaggtttttccaagtataaaatcatatcatctgcaaacaaggataatttgacttcttcttttccaattaggatgccctttatttctttctcktgtatgattgctccagctgggacttccagtacgattttaaataacagttgttagaatggacatccttgtcacgttctggatcttagaggaaagtctttcaattttcccccatttagtgtgatactagttttggttctgtcatatatagattttatcatgttgaggtgtgttccttctatctcc

SEQ ID NO: 761996 - DNA, 617 bp, Homo sapiens
agtttcttttgctgtgcagacgctctttagtttaatttgatcttatttgtcaattttggcttttgttgaaattgcttttggcatttttgtcatgaagtctttgccatgcttatgtcctgaatggtattgcctacgttttcttctagggttttttggtttttacatttaattcttttatccatcctgacttaatttttgtataaggtgtaaggaagggktctagtttcagtttttttgtgtatggctaaccagttttcctcgcaccatttactgaataagagatcctttccctgttccttgtttgtgtcaggtttgtcaaagatcagatggttgtagatgtgtggcgttatttctgaggtctctgttctgctgcattggtctatatgtctgttttggtaccagtaccatgctgttttggttactgtagtcttgtagtatagtttgaagtcaggtagcgtgatgcttccagctttgttctttttgcttaggattgtcctggctatatggggtcttctttgattccatatgagatttaaaatagattttttgtacttctgtgaaaaatgtcaattgtagtttgatgggaatagcatcaaatctaaaaattactttgagta

SEQ ID NO: 761997 - DNA, 629 bp, Homo sapiens
tgttcttccttctctccatgggtcacaccagccttctggtcaattttgatgagagaacctggataccttgtttggcgtctggaatatctgtccaatgctgaaagtaggctgttgaaatcttcagctattgtattggggcccatctttctagttagctttaataatatttactttatatagctgtgtgctccagtttgggtgcatacatattaaaattatgtcctctagctgaattgatacctttatcattatatagtgrcattctttctcttttcttagagtttctgtcttgatgtctattttacctgatatacgcttagcaattcctgctcttttttgatttttattcacatggaacatctttttttatccctttattttcagtctttgtgtatctttataggtgaagtgtgttttttctgggcaacagataaatggttcttattttttcatttattcagccagtctatgtcttttgattggatagtttagtctatttacatttaatgttattattgataagtaaggacttactcctgccattttattattgttttctggttttctcttccttgtttggttcttttttgtcttcttctagtgaaggtgattttctctggtgatatgat

SEQ ID NO: 761998 - DNA, 577 bp, Homo sapiens
aaacactttggagatttttcaacaaacaaaaaaatagaaccatcatatgatcatcagtcccaattctgggtatttatccaaaggaaagaaagtcagtatgtcgaagagatatttacactgtcatgttcattgaaacattcttgacaatagccaaggtatggaatcaactgaagtatctgtaatcaatgaaaggggaaagaaaatgtagtatatatacacaatggaatactatttagccataaaaagtgatgaatcacgtctgttgcagcaacarggatggaactggaggtcattattttaagttaaataaggtatagaaagacaaattttgcatggtctcattcatatgtgggaatgaaaaaaaaagttgatttcctggaagtagagaatagaatgataattacaggaggctgggaagggtgtgggggtgtgtgtgtgtgtaggtgtggagcgggaatgaagagaggttggttaatggctacaaacataaaattagaaggaataagttctaatgttcaatagcagagtagggtgactatagttaacaacagtgtgttgttaagaaaaaggttgggga

SEQ ID NO: 761999 - DNA, 626 bp, Homo sapiens
ccaagtagttggaaccacaggtacataccaccatgcccaatgaattttttaagaaattattatttgtagggatgtggtctcactatgttgcccaggatgatcttgaactcctgggctcaagtgatcctcctacctccccctcccaaagtgctgggattataggcatgagccaccatractagctttatctcctttctaatgaagatttttaataagcttaagaatcaagaaatacttgagctcttctgattgaagtaaagactttccagtgattctacatttattactcaagttgtggtcatctgcttttttgtctacattctggaggacaggcaccaaacacagagcatgccctcacaacaacacagagtaatctctgtggagacttctcagaactggacctaacaacttaggactgtttttgctcaatcgtacatttgttttttatattttatttattctgttccactctttaacaatacaaattattagtagattgaatctttctttttctctctcttttacttctatctctttttcatagtttttctctttgttattttgctttgcctttggaaaagcatttcacttttgacttccatatcaatagtttagatttctgcagt

SEQ ID NO: 762000 - DNA, 616 bp, Homo sapiens
caagaagattgtttccagtctactagaaaacacttccaataagcctgaattacaaccccaatatcattttagttttttagattaacatgtgaaataaagagtttttcttagtcacagttacttttactgccaaaaacccaatgaatatctttccctctggaaccaaatacactgtttaattttaatctcttagctgactgacacaggaacaaaactggttttgcattttcccttttcatttacttttctgcaattgatcactggccttaaaaagttgagaagatatatttcagttgccattttctgtactggttttcattcattagttttccttctcctccttcctttactctgcaatctccttctcttctatcacatcagttatatctcttgccacaagctcacataatttctgtcgtgtgtcttwgtaatatctaatttgttacgatgtattatgcatgcaaatgtaattgcagaggaggagttaagcagaatgacagcttaaagaggcatattttttttgactctgtcactcccagaaaacagcataaagagatctgggacaactagatgtcgtgatgaaaacattagaacgccaggatatcaaattaaacaa

SEQ ID NO: 762001 - DNA, 610 bp, Homo sapiens
tgtgaattatagttcaatgaagctgttacaattttattaaaagaatacctactgtatgtttccatttatacgaaattctagaagaggcgatattataatgacaataattaagtagatcagacatcatcatggaccatgtattagtctaattctcatggtgctattaaagacgtatccgagactcggtaatttataaagaaaagaggtttaactgagtcacagtcccatatggctggggaggccttacaatcacggtggaaggccaaggagaagcaaattcaggtcttacatgatggcaggcaagagagtcttcgcaggggaactcccatttataaaatcatcagatctcgtgagacttatttactrccacgagaacagtatgggggaaactgcccccatatccaaaccacatcagaccaggactggggagagggatggactgcagaaaggcccaagaagaattttcaagtttatggaattattctacgtcatgattctgtggtggtcatgttacagtatacattgtcaaaacatcatttgttcatttaaaattaaggacttttaatatattgaaattatatctcaaggctgattttcaagataaaaattt

SEQ ID NO: 762002 - DNA, 599 bp, Homo sapiens
aatatctttttttggtgtttactggccaatggcatatcctctttgaataaatgtttactcatatcttttgcatatttttaaattgggttatttgttgagtggtaagagccctttacacattctgtataaaatcccttaccacagacatgatttgcaaatattttttcccattctgtggattgtgttttcactttcctgctggtgtcatttgaaacatgaaagttttaaattttgaccacgtycaatttacctttttgttcttttgttgcttttatgtttgctttgttgtcatatttaggaaatcattgcctaattcaaggtcacaaagattcactcctatgctgtcttctaagagttttatattttagttcttaaatttagggccacaatccattctgagttaattttctgtatggtattgttgatgtttgcctggaaatttccattcatccttttactttcaaactatttatataataatttcagtgagtttcttatagatggaatatagatgggtcatctggcaatttttgtcttaattgctctacttagaccatttatatttaatgtaattattgacatattagaacataagtcta

SEQ ID NO: 762003 - DNA, 684 bp, Homo sapiens
  misc_feature 1, 2, 3, 4, 5, 6, 7, 8, 9, 10, 11, 12, 13, 14, 15, 16, 17,18, 19: n = A,T,C or G
nnnnnnnnnnnnnnnnnnntccaaatatccatcaactagattacagatgaacagtagtggaatatccacacccatacaataaagtattattcagcaattaaaatgaactactgatgcttgcaatgccatggatgaatctcaaagcattatattaaatagagttacaaatgagtacctacttccaggataggccatgtgccatgtcatatggtatagtttggatatttgtccctgcccaaatctcatgctgaaatrtaatcctcaatcgtggaggtgggacctggtggaaagtgattggatcatgagggcagatccctcatagatgggttgggccatccccttagtgatatatgagctctcgttctgagtttacatgagatctggtcatttaaaagtgtgtggcacctctccactccacacacactctctctcacttttgttcctgccatatgagatgcctgctcccccatcaccttccaccatgattgtaagattcctgaagcctccccagaagcagctgctagttctatgcttcctgtacagcctgcagaactagaagccaattaaacctattttcttattaattacccagtctcaggtatttgtttacaggaatacgagaatggcctaatacaccatacaacaaacctaaataaatgttttaaaataaaagtatcacaaaaa

SEQ ID NO: 762004 - DNA, 684 bp, Homo sapiens
  misc_feature 1, 2, 3, 4, 5, 6, 7, 8, 9, 10, 11, 12, 13, 14, 15, 16, 17,18, 19: n = A,T,C or G
nnnnnnnnnnnnnnnnnnntccaaatatccatcaactagattacagatgaacagtagtggaatatccacacccatacaataaagtattattcagcaattaaaatgaactactgatgcttgcaatgccatggatgaatctcaaagcattatattaaatagagttacaaatgagtacctacttccaggataggccatgtgccatgtcatatggtatagtttggatatttgtccctgcccaaatctcatgctgaaatataatcctcaatcgtggaggtgggacctggtggaaagtgattggatcatgrgggcagatccctcatagatgggttgggccatccccttagtgatatatgagctctcgttctgagtttacatgagatctggtcatttaaaagtgtgtggcacctctccactccacacacactctctctcacttttgttcctgccatatgagatgcctgctcccccatcaccttccaccatgattgtaagattcctgaagcctccccagaagcagctgctagttctatgcttcctgtacagcctgcagaactagaagccaattaaacctattttcttattaattacccagtctcaggtatttgtttacaggaatacgagaatggcctaatacaccatacaacaaacctaaataaatgttttaaaataaaagtatcacaaaaa

SEQ ID NO: 762005 - DNA, 562 bp, Homo sapiens
aagagaagacacttgggaattagatccctagaaaatggcccttgccttatgccttgtgcaagtcccggaggtgccattcacattgtagtccatatgacctgccagttgcttatggtgatctttctgcttctaaatcctgcttcccaaagtatgagatacacagggcaagcaatacattcaagaacccagcttgctaaatgtctttgcctccaacatcctttcaaatgatcataagtggcataaccttagtgaatttgggtccccatagatacaaaacaaagaccagtggcttttgactcagaagaccaagtttcaatcctgactcgccacatgctagttttgtgctcttggtcatgttacttaaattttttgcagttacaatgttctccccagtmaaacaacaatgacagattcatagagttgctaaagaggattaattaggatagcacaggtaaagttcctggcacacagaaagcacttaatcaatgtgagcctctctgaagtgaaagtaacgcatcctaatactcaggagatttagaccagagagctatactgtccaata

SEQ ID NO: 762006 - DNA, 633 bp, Homo sapiens
ccattgctgtcatacagaaagttttactggacaatagaagaaatgatagaattaaacaagaatccaaagtccagaagccaacatctttgccattaactacgaaactcaagaggagcaactttatctcactttgtcacaatttcctcactggtaaaatggatactgcctttgcagtaatgtggtggggatcaagtacactgcagtyacttttttttttccttgctttagtctttccaagactaaacaatgcatgacatacttactagcaaggatcactttgaggatgagttagttgataggtgcagccctttggtagtttaatattcatagccatgatttggtattattccaatgcacctgtgagcagttaggaacagcatatgttcaaaagtgcaaggagctactgcagacagtccttgtggtgatggaaagacaaaaagtaacaaaactgaattggttttcattggcaagtggccttttgtagactttttgtagctctcacagggtttaaaatggaaagatcaaagatcttatttcctacttttccatttctgtttcactttaatatctaaatcttcctttctcaggtttgaaaacaatactccgttgctgtcattttgggggcaatgttgt

SEQ ID NO: 762007 - DNA, 610 bp, Homo sapiens
gtcagctgtaacgttaacaggaggattggagccctgattaagatgaatacgttcctggacagcatcaacccaccaagtcctgaactgtaaatactgggatttagataagactgattttgctaaaatttcccaatcatagggcaccaaacgtttatcttctgctaagccttttaatgtggaacggacaaaaggagagttggtgccatattgtttcactgattccttaaaatctttgaggaatttaaaagaaaaactttcccaagtagcagggcgtagctgaacctgacctgkatgtatggggtcaggctgaactaccgcctgaacagcgggaatgccaggtattggctgtgccccaggagcaggcaattgcggaggctgattatttccctgagcagcctgagtttcgggctgaggggcttgattatcagcctcttgatcctgttgagctgcggggtcagccgcctgctgggcaggatcaacaacaggctgtgggtgattttgtactgttggggtggcaggtactggaggttgtaaaattacaggaaattgccaggcttcgggatccccatattcccttgcctgaactatagccctcataagcggagtgtcg

SEQ ID NO: 762008 - DNA, 632 bp, Homo sapiens
atcacttgttccctaaatagggacttttacgaatggccacacgagggttcagctgtcttttacttgtaatcagtgaaattgacctatccgtgaagaggtgggtataaacaaataagaaaagaagaccctatggagctttaactcattaatgcaaataaaacttcaaaaagcctacaggccttagcatactgtctgtgcattaaaattttggttggggtgacctcggagtataattcaacctccaaacagcctagactaagaccgcactagtgtaagcgagctgacacacattgattcrataatttgatcaacagaagaagttaccctaggggtaacagcacaatccttttctagagtccatatagacaatagggtttacaacctcaatgttggatcaggccatcctaatgacgtagctactattaagggttcattggttcaatgattaaagtcctacgtgatctgagttcagaccagagtaatccaggtcagtttctatctatttaacatttctcctagtacagaaggacaagagaaatagggcccacttcataaagtgccctcgccccatagatgatattatctcaatctaacaaatcatcacacaccctacccaagaacagcgtttgtta

SEQ ID NO: 762009 - DNA, 632 bp, Homo sapiens
atcacttgttccctaaatagggacttttacgaatggccacacgagggttcagctgtcttttacttgtaatcagtgaaattgacctatccgtgaagaggtgggtataaacaaataagaaaagaagaccctatggagctttaactcattaatgcaaataaaacttcaaaaagcctacaggccttagcatactgtctgtgcattaaaattttggttggggtgacctcggagtataattcaacctccaaacagcctagactaagaccgcactagtgtaagcgagctgacacacattgattcaataatttgatcaacagaagaagttaccctaggggtaacagcacaatccttttctagagtccatatagacaatagggtttacaacctcaatgttggatcaggccatcctaatgrcgtagctactattaagggttcattggttcaatgattaaagtcctacgtgatctgagttcagaccagagtaatccaggtcagtttctatctatttaacatttctcctagtacagaaggacaagagaaatagggcccacttcataaagtgccctcgccccatagatgatattatctcaatctaacaaatcatcacacaccctacccaagaacagcgtttgtta

SEQ ID NO: 762010 - DNA, 632 bp, Homo sapiens
atcacttgttccctaaatagggacttttacgaatggccacacgagggttcagctgtcttttacttgtaatcagtgaaattgacctatccgtgaagaggtgggtataaacaaataagaaaagaagaccctatggagctttaactcattaatgcaaataaaacttcaaaaagcctacaggccttagcatactgtctgtgcattaaaattttggttggggtgacctcggagtataattcaacctccaaacagcctagactaagaccgcactagtgtaagcgagctgacacacattgattcaataatttgatcaacagaagaagttaccctaggggtaacagcacaatccttttctagagtccatatagacaatagggtttacaacctcaatgttggatcaggccatcctaatgacgtagctactattaagggttcattkgttcaatgattaaagtcctacgtgatctgagttcagaccagagtaatccaggtcagtttctatctatttaacatttctcctagtacagaaggacaagagaaatagggcccacttcataaagtgccctcgccccatagatgatattatctcaatctaacaaatcatcacacaccctacccaagaacagcgtttgtta

SEQ ID NO: 762011 - DNA, 620 bp, Homo sapiens
tattggctatctcttggtggagacatctgtcctcacactgtgttcatttgttttttacatatccaaaaaataaagactcagccctacaatgctttagacaaaatatgttcctgaagattctgaagaggagatggatgatggtttcccctagctattggaagataggcacacatagtgcaaaagtattcaaggaggatataaaactaaaaaagagcaaaattatgttcttcttcctctgaactggtcattagggaggattctgttttaagctctagaagagggtttggcgatccacagcccacagatcaaatccagccacrctcattcacttcagtatgtctgcggctgctctcgcactacaatagcaaaattgaatagttgtgacagagatgtgacagagaccatatggttcacaaaacccaaaatacttcctatattcaatattaaatattactggtcctttacagaaaagatttgctgatctctgacctagagaaatttgttctagtgccagggactccaaaatttggaattcctatttgtatttttcttgttgtgtggttggttggtttctgctgctagggaggaaacttcattcttggtggaagggaggaatgagg

SEQ ID NO: 762012 - DNA, 620 bp, Homo sapiens
tattggctatctcttggtggagacatctgtcctcacactgtgttcatttgttttttacatatccaaaaaataaagactcagccctacaatgctttagacaaaatatgttcctgaagattctgaagaggagatggatgatggtttcccctagctattggaagataggcacacatagtgcaaaagtattcaaggaggatataaaactaaaaaagagcaaaattatgttcttcttcctctgaactggtcattagggaggattctgttttaagctctagaagagggtttggcgatccacagcccacagatcaaatccagccacactcattcacttcagtatgtctgcggctgctctcgcactacaatarcaaaattgaatagttgtgacagagatgtgacagagaccatatggttcacaaaacccaaaatacttcctatattcaatattaaatattactggtcctttacagaaaagatttgctgatctctgacctagagaaatttgttctagtgccagggactccaaaatttggaattcctatttgtatttttcttgttgtgtggttggttggtttctgctgctagggaggaaacttcattcttggtggaagggaggaatgagg

SEQ ID NO: 762013 - DNA, 622 bp, Homo sapiens
tgaaatggtgaaacgaaatgaggaaatgaaatgaaatgatgaaatgaaatgaagtgaaatgatgaaatgatgaaatgaaatgagaagatcaaatggtgaaatgaagaaatgatatgaaatgatgaaatgaaatgaagtgatgaaatgaagttgaatgattaaatgatgaaataatgaaatgaaatgatgaaatgatgaattgatgaaatgatcaaatgaaatgagatgaaaagatgagatgaaatgaaatgatgaaatgaaatgacgagatgaaaagatgaaatgagatgaaatgagatgaaatgaaatcgtgagatgatgaaatgatgagatgaagtgaaatgatgaaatgatgaaatgtgatgaaatggaatgatgaaatgaaatgatgaaatgaaattgtgaaatgaaatgaggaaatgaaatggaatgatgaaatgaaatgaaaagatcaaayggtgaagtgaagaaatgatatgaaatgatgaaatgaaatgaaatgaggaaatgaagttaaatgattaaatgatgaaataatgaaatgaaatgaaatgatgaaatgatgaattgatgaaatgatcaaatgaaatgacgagatgaaaagatgaaatgaaatgatgaa

SEQ ID NO: 762014 - DNA, 624 bp, Homo sapiens
atgaggaaatgaaatggaatgatgaaatgaaatgaaaagatcaaatggtgaagtgaagaaatgatatgaaatgatgaaatgaaatgaaatgaggaaatgaagttaaatgattaaatgatgaaataatgaaatgaaatgaaatgatgaaatgatgaattgatgaaatgatcaaatgaaatgacgagatgaaaagatgaaatgaaatgatgaaatgtaatgacgagatgaaaagatgaaatgagatgaaatgatgagatgaaatgaaatcatgagatgatgaaatgatragatgaagtgaaatgatgaaatgatgagatgaaatgaaatgatgaaatgaaatgaaatgttgagatgaaatgatgaaatgaaatgaaagaatgaagtgaaatgatgaaatgagatgaaatgaaatcatgagatgaaatgatgaaatgatgagatgaagtgaaatgatgaaatgatgaaatgtaatgaaatgatgaaatggaatgatgaaatgaaatgaggaaatgaaatggtgaaatgaaatgaggaaatgaaatgatgaaatgaaatgaagtgaaatgatgaaatgatgaaatgaaatgagaagatcaaatggtgaaatgaagaaatgatatgaaa

SEQ ID NO: 762015 - DNA, 624 bp, Homo sapiens
atgaggaaatgaaatggaatgatgaaatgaaatgaaaagatcaaatggtgaagtgaagaaatgatatgaaatgatgaaatgaaatgaaatgaggaaatgaagttaaatgattaaatgatgaaataatgaaatgaaatgaaatgatgaaatgatgaattgatgaaatgatcaaatgaaatgacgagatgaaaagatgaaatgaaatgatgaaatgtaatgacgagatgaaaagatgaaatgagatgaaatgatgagatgaaatgaaatcatgagatgatgaaatgataagatgaagtgaaatgatgaaatgatgagatgaaatgaaatgatgaaatgaaatgaaatgttgagatgaaatgatgaaatgaaatgaaagaatgaartgaaatgatgaaatgagatgaaatgaaatcatgagatgaaatgatgaaatgatgagatgaagtgaaatgatgaaatgatgaaatgtaatgaaatgatgaaatggaatgatgaaatgaaatgaggaaatgaaatggtgaaatgaaatgaggaaatgaaatgatgaaatgaaatgaagtgaaatgatgaaatgatgaaatgaaatgagaagatcaaatggtgaaatgaagaaatgatatgaaa

SEQ ID NO: 762016 - DNA, 527 bp, Homo sapiens
caggggtttgaactgtgcacgtccacttagcaaaaccaacaattctacatccttatccacatcctgcccatgagaaagatgaggatgaagacctgtttgatcatctacttccatttaataactagtaaatctattttccttatgattttcttttttcttttctctggcatgtttgttaagaatacagtatataagacatataacatattaaatatgtgttaattgactgtgttatttgtcaggcttacagtaggctattagtagttaagttttgggggagtcaaagttatagtgtattttctaccgtgcagggggtccagcaccccaacctccgtgttgcttaagggtcaacygtacgtgttatttcctttcctgtaagagaaaaatgatgagaaggtcttttctccaataagtgtcttcaaaatgtagcagatttgaaatgtgttggcgccaccattttgcgtctcactttgaaaacttattatttaaaatcgtactaaagcctaccttacttttccaaccttaga

SEQ ID NO: 762017 - DNA, 632 bp, Homo sapiens
agatctccttaaatactatcatttttcactacttgtatcttaactgttaagttcaacattttctgtaatattaatatattgtgaaaatttcctttctttcttatttgtcccaggttcaatgttttgcagtctctacctcaccctgtgaagcataaacattgtacatgctgtacaaataatacatcgttcatgtacttagagattgcacaatttttatttggttgacaatagctaatgttttcttcttcattttctatttcctgatttttctttatttagtatatactacactgccataaaaataagaacgttttacaaactaaagcaaaaggaaccctaggaataaaatgcacaaataaaatatataaacatacgtttagrtgtaccacgtacacttgtaatttatttagacttttaattttagtacaattttaattaaagtctgtgtattatctgtcatcgtcttagtattttttatataacaaattgtgtaaatcaaaaagtatcaatgtcattgtaaactatcttggcagaggttgatctccaaggaataatttctctcctaaattatgccaatccaaatttcactctaccgtcattcttttcatcagtttcagaggaataataaattt

SEQ ID NO: 762018 - DNA, 609 bp, Homo sapiens
tttttcaggggaaagtatcagatcacccacctggtgattgtaacaaaaacaatcactcctgttggtatttaagtcttaattaattcagaaaaatttgcacacaccctaaggtcagatagtattttgtaccctacatataaaaactcctttttttttttttttttttgagayggagtctcactctgttgcccaggttggagtgcactggcatgatctctgctcactgcaaactctgcctcccataacattaatgatcactgatcacagatcaccgtaacgaatataataataaggaaatattttaaaaattgtgaagattaccaaagtgtgaaaccaagacacaaagtgagcacaggctgtttgttaaatggcaccaatagacttgcttcaccagggttgtcacaaacatctcatttgtaaataaagaaaaaatgttcctatctgtgaagcacaataaagagaagtgcaataaaatatgtttgtattaatttggttaactttattccaacttaatgtaaattagttttaaaacagtttataaaattcttaaatgaacctggcaaatttagagcaataataaaattatttaaattagaaaagtctttttta

SEQ ID NO: 762019 - DNA, 609 bp, Homo sapiens
tttttcaggggaaagtatcagatcacccacctggtgattgtaacaaaaacaatcactcctgttggtatttaagtcttaattaattcagaaaaatttgcacacaccctaaggtcagatagtattttgtaccctacatataaaaactcctttttttttttttttttttgagatggagtctcactctgttgcccaggttggagtgcactggcrtgatctctgctcactgcaaactctgcctcccataacattaatgatcactgatcacagatcaccgtaacgaatataataataaggaaatattttaaaaattgtgaagattaccaaagtgtgaaaccaagacacaaagtgagcacaggctgtttgttaaatggcaccaatagacttgcttcaccagggttgtcacaaacatctcatttgtaaataaagaaaaaatgttcctatctgtgaagcacaataaagagaagtgcaataaaatatgtttgtattaatttggttaactttattccaacttaatgtaaattagttttaaaacagtttataaaattcttaaatgaacctggcaaatttagagcaataataaaattatttaaattagaaaagtctttttta

SEQ ID NO: 762020 - DNA, 609 bp, Homo sapiens
tttttcaggggaaagtatcagatcacccacctggtgattgtaacaaaaacaatcactcctgttggtatttaagtcttaattaattcagaaaaatttgcacacaccctaaggtcagatagtattttgtaccctacatataaaaactcctttttttttttttttttttgagatggagtctcactctgttgcccaggttggagtgcactggcatgatctctgctcactgcaaactcygcctcccataacattaatgatcactgatcacagatcaccgtaacgaatataataataaggaaatattttaaaaattgtgaagattaccaaagtgtgaaaccaagacacaaagtgagcacaggctgtttgttaaatggcaccaatagacttgcttcaccagggttgtcacaaacatctcatttgtaaataaagaaaaaatgttcctatctgtgaagcacaataaagagaagtgcaataaaatatgtttgtattaatttggttaactttattccaacttaatgtaaattagttttaaaacagtttataaaattcttaaatgaacctggcaaatttagagcaataataaaattatttaaattagaaaagtctttttta

SEQ ID NO: 762021 - DNA, 674 bp, Homo sapiens
aaaaagagacatttttaaagtatgaagtcgtgtgcacaggttcatcgtctaggtgtgtactcatgaaaacaaatctcttgtgttgcagatagcgctcgttaaggttgatttctgcatatcagtgagagttcagtgatcttacattcaacataaatatgacaactttacaaacatcccccctttcatccactgagtgagtttatcaggaaaacccaacaaaatccttccaggcctccctgggggaaggtacacagtcccctgctctggaggaggatatggaggcagacatggaggctcacgctggttaagggagttttccaaagtcaccagcagcaaggaaccttctgaaactgctgacaagtccgtgcttttcccacgtccacttacattatttaggcaagacccacttgggaatctattttttcaaggcatgatcgggactaggttcaggatggtagagcagggctgtttttgaaaggcggtctctttctctttgcaccaagctttcygtaagtgtgtgggtgaccctcccaacttcctcctctctcccacaaccacggccctcgctgcttctctcagcttctctccccgacacctggacactcctcttggctacctgggggctggcattgtgggaggcagccgacgccagtgggtgctgctgggatccctgc

SEQ ID NO: 762022 - DNA, 538 bp, Homo sapiens
gtaatgacatacactttttaatgcactaatattaaataatgctgaaattaagttatgcttatctaatgtaagatacattgcagtttcagatactaaaatttgaacaagtagacaaacgtttctcttgaaatcagtgaaatctctatctaaatcccttaraatagggttagcacatagtattccaggaaagcaaagcactaattattattgttgtcttgtacccagattatgttactatttaagtttctactttatgtaaagcactttttcatatggatattctttatcctaacaatagtccatttgttacaccagaagtaacaccagatacttctgaataataatggcagttaaatctgtggttttgtggaattttgcttatatacgtcactgttgattcaaacaatatagcagctctaagaacatctgtgcctccagcctctgcattttaaccatgagagcgtcatttctctccatgatgcttaaattaaaaatctaaatatttggtaaattttacgcttttctagaatatgttttg

SEQ ID NO: 762023 - DNA, 563 bp, Homo sapiens
gtaatactatcacatttccccaaatggctactttaagtgcatcctacaaattgtgatatattctgtttttgttttcatcttcgttctctttgaaatactttctaagttcatctgtgacttcctccttgactcaggaatttttagaagtgtgttgtttcatttcagaacatttggaaattatttatttctagtttcatttagttgtgcttagagatcatactgtgtatgatttctattctttttaatgtactgagacatgtttatatagcccagattatcatcaattttagtgaatgttttaaatgtgcagttgctaacaatgtcktttatattgctgtttagtggactgttttagaaaagtcaatcaggtaaatctgattaagagtattgtttttcttctatccttttgctggtttcttatctcattctattagttactggaaaaaatgggttagaatctacaatctccaacaataacgggatatatccatttcttttttctgttgtatatttcttctttgtatattttaaagctctattgttgggcaatatttggtattgtt

SEQ ID NO: 762024 - DNA, 550 bp, Homo sapiens
gattgaagaagagccaaaaactgacagacagttagtaatcattgcagatgtttgctgaacaattgcaaggtagcaagcactattctacttttcacctgtataattctgacttatcctcaagatttatcttgaaattttccagaaagccttcctataccatcctttctcacyctaacctctacctcacctctcacactaggttaggtagccctcttttttagttttactgcacactgggtttccagtgtttttaaatctactactctttattctattagatctttttatttttaatctccatggctaggctgtgaattccatgagggcaaagactatgactattgtcttgtgtcatagtcaaatgacctctcctttgcccagggtgtgttacattctcaatgtgtatttcatgaaagaatggatgaataaatggtgtctcccactagactgtgagttcctcagaggcagaaattacacttttcccatgttttcgtgaccctggttcaatatatatgattgatgaaaaagagcgtttcagcaattacagttt

SEQ ID NO: 762025 - DNA, 539 bp, Homo sapiens
cttcctctgtccctgtagtcacactgtccatcaaaggtggcagacaggccaggcacagtggctcacacctgtaatcccagcactttgggagcccaaggcaggcggatcacctgaggtcaggagttcgagaccagcctggccaacatggtgaaaccatgtctctactaaaaatacaaaaattagccaggcatggtggtgcacgtctgtaatcccagctactcgggaggctgaggtatgagaattgcttgaacccaagagctggaagttgcagtaagctgagatagygccactgcactccagcctgcggaatagagtgagactctgtctccaaaaaaaaaaaaaaaaaaaattgggggacagacagactttcactccatcaactcaaccaggaatcttgtggagaaaccccctaagaagaaaaaaaaaagcaaaggaacatgtctctcagtgggtgtattacccacgaggaacgaaaatgaatgtacgggagtctggttggaacagacagaaggggagatcctgagaagattcttccagca

SEQ ID NO: 762026 - DNA, 539 bp, Homo sapiens
cttcctctgtccctgtagtcacactgtccatcaaaggtggcagacaggccaggcacagtggctcacacctgtaatcccagcactttgggagcccaaggcaggcggatcacctgaggtcaggagttcgagaccagcctggccaacatggtgaaaccatgtctctactaaaaatacaaaaattagccaggcatggtggtgcacgtctgtaatcccagctactcgggaggctgaggtatgagaattgcttgaacccaagagctggaagttgcagtaagctgagatagtgccactgcactccagcctgcggratagagtgagactctgtctccaaaaaaaaaaaaaaaaaaaattgggggacagacagactttcactccatcaactcaaccaggaatcttgtggagaaaccccctaagaagaaaaaaaaaagcaaaggaacatgtctctcagtgggtgtattacccacgaggaacgaaaatgaatgtacgggagtctggttggaacagacagaaggggagatcctgagaagattcttccagca

SEQ ID NO: 762027 - DNA, 539 bp, Homo sapiens
cttcctctgtccctgtagtcacactgtccatcaaaggtggcagacaggccaggcacagtggctcacacctgtaatcccagcactttgggagcccaaggcaggcggatcacctgaggtcaggagttcgagaccagcctggccaacatggtgaaaccatgtctctactaaaaatacaaaaattagccaggcatggtggtgcacgtctgtaatcccagctactcgggaggctgaggtatgagaattgcttgaacccaagagctggaagttgcagtaagctgagatagtgccactgcactccagcctgcggaatagagtgagactctgtctccaaaaaaaaaaaaaaaaaaaattgggggacagacagacyttcactccatcaactcaaccaggaatcttgtggagaaaccccctaagaagaaaaaaaaaagcaaaggaacatgtctctcagtgggtgtattacccacgaggaacgaaaatgaatgtacgggagtctggttggaacagacagaaggggagatcctgagaagattcttccagca

SEQ ID NO: 762028 - DNA, 615 bp, Homo sapiens
agaagcaatatggacttatctgatctacaagatgaaaagtattcaaaattggctttaaaaaatagtcaatttggttctggaaataaattgtgagaatttgtgtatctatttctattatcttaaaaagtaggcacatatctaagtgttactaatattgaacatgtagactgattctggactccccactcaggctgcatgtcagagatttgcatagcaagtgaagtcactggtttcctgagaaatgtgggccctgcagagggcagaggagttcccacagccccactcacaggrtctcttgcagctattgttaaatggcacagtcatcttaaccacggcaagtgaattcaaggattaaattgtctacttttgactaaactaacttcacaaaaggttaagtgggttaaaaaatttcctacaaagaaataccaaatttagataatatgataattcaagaacaataaaatatcagagctacatttcttcaattagttgtatatactcttgtcaaccacatagcaaagttgaaaacaatggcaaggagtcagccaaaaattctacattatcatcaggaaagcattttgaaacataggttatatccattgtcatcaatgtcaa

SEQ ID NO: 762029 - DNA, 615 bp, Homo sapiens
agaagcaatatggacttatctgatctacaagatgaaaagtattcaaaattggctttaaaaaatagtcaatttggttctggaaataaattgtgagaatttgtgtatctatttctattatcttaaaaagtaggcacatatctaagtgttactaatattgaacatgtagactgattctggactccccactcaggctgcatgtcagagatttgcatagcaagtgaagtcactggtttcctgagaaatgtgggccctgcagagggcagaggagttcccacagccccactcacaggatctcttgcagctattgttaaatggcacagtcatcttaaccayggcaagtgaattcaaggattaaattgtctacttttgactaaactaacttcacaaaaggttaagtgggttaaaaaatttcctacaaagaaataccaaatttagataatatgataattcaagaacaataaaatatcagagctacatttcttcaattagttgtatatactcttgtcaaccacatagcaaagttgaaaacaatggcaaggagtcagccaaaaattctacattatcatcaggaaagcattttgaaacataggttatatccattgtcatcaatgtcaa

SEQ ID NO: 762030 - DNA, 524 bp, Homo sapiens
tcaaaaaaagaaaccaaaacaacaacaacaaaaaaaaaaacaaaaaaaaaaaggacaatgtacgttttgtaaactttaagtctgggagatggctaacattatgggggaagacttggccaagacagcccagaaaccacaaggtgaataayagcacccagaacagaaggtccaccatgaagataaggacttaatctatcaagaaggattaaatgtaaccgtcaagagtaggcttgatggaggagggtgaatctgaatggagccttgagctacagtggggtttacagcacaggcaaatcctggtgactgcatgctagatgaaaggaattggacaaatgaaataactgaggcaagagaggttgggcatgttcaaattcgtatctgtattgcatagatagcttaagaatgaagtagagccagaaaaaacatactaggctcagattacggaacatgtttaatgctaggctaagaactgtgttctattatatatgcaaagaggatccatgatcgctttttgagcagaaaaa

SEQ ID NO: 762031 - DNA, 580 bp, Homo sapiens
tgcacagtatctgacagatatcagtgatggcttatcttcacttgtctttcaacccctctttattctctacccctctttatgcaccccaaaactgccaatatctctataaatagcatgactctggctttcctgggcttgaacttccatgtggatttggctgacggagatcaatgtaaggtgatgggatgctcagaagacagagagttgggggtaattttctcccactccttttctgcagtgggaactgcagtgatggcaacagtattctctccaygaaaacactccctgcctcctgctatggtttcaacatttgtgtccctccaaaattcatgttgaaacttcatcctcagtgtgacaggattaagatgtgaggccttgaggaggtgatcatatacccttataacagcactctaggggactagctagatcctgtttgcttttatattccttctgcaatgtgaggacacagcaagagtcgccatcttggaagcagaaagcaaccctctccagcccccagatctgctggcaccttgatcttggacccacaactgtgagaaatatgtttttctcaatagactac

SEQ ID NO: 762032 - DNA, 631 bp, Homo sapiens
tgcacagtatctgacagatatcagtgatggcttatcttcacttgtctttcaacccctctttattctctacccctctttatgcaccccaaaactgccaatatctctataaatagcatgactctggctttcctgggcttgaacttccatgtggatttggctgacggagatcaatgtaaggtgatgggatgctcagaagacagagagttgggggtaattttctcccactccttttctgcagtgggaactgcagtgatggcaacagtattctctccatgaaaacactccctgcctcctgctrtggtttcaacatttgtgtccctccaaaattcatgttgaaacttcatcctcagtgtgacaggattaagatgtgaggccttgaggaggtgatcatatacccttataacagcactctaggggactagctagatcctgtttgcttttatattccttctgcaatgtgaggacacagcaagagtcgccatcttggaagcagaaagcaaccctctccagcccccagatctgctggcaccttgatcttggacccacaactgtgagaaatatgtttttctcaatagactacatagcctccatgtccatgttctgttaatgcagaacaaacagattaagacat

SEQ ID NO: 762033 - DNA, 580 bp, Homo sapiens
tgcacagtatctgacagatatcagtgatggcttatcttcacttgtctttcaacccctctttattctctacccctctttatgcaccccaaaactgccaatatctctataaatagcatgactctggctttcctgggcttgaacttccatgtggatttggctgacggagatcaatgtaaggtgatgggatgctcagaagacagagagttgggggtaattttctcccactccttttctgcagtgggaactgcagtgatggcaacagtattctctccatgaaaacactccctgcctcctgctatggtttcaayatttgtgtccctccaaaattcatgttgaaacttcatcctcagtgtgacaggattaagatgtgaggccttgaggaggtgatcatatacccttataacagcactctaggggactagctagatcctgtttgcttttatattccttctgcaatgtgaggacacagcaagagtcgccatcttggaagcagaaagcaaccctctccagcccccagatctgctggcaccttgatcttggacccacaactgtgagaaatatgtttttctcaatagactac

SEQ ID NO: 762034 - DNA, 580 bp, Homo sapiens
tgcacagtatctgacagatatcagtgatggcttatcttcacttgtctttcaacccctctttattctctacccctctttatgcaccccaaaactgccaatatctctataaatagcatgactctggctttcctgggcttgaacttccatgtggatttggctgacggagatcaatgtaaggtgatgggatgctcagaagacagagagttgggggtaattttctcccactccttttctgcagtgggaactgcagtgatggcaacagtattctctccatgaaaacactccctgcctcctgctatggtttcaacatttgtgtccctccaaaattcatgttgaaacttcatcctcagtgtgacaggattaagatgtgaggccttgaggaggtgatyatatacccttataacagcactctaggggactagctagatcctgtttgcttttatattccttctgcaatgtgaggacacagcaagagtcgccatcttggaagcagaaagcaaccctctccagcccccagatctgctggcaccttgatcttggacccacaactgtgagaaatatgtttttctcaatagactac

SEQ ID NO: 762035 - DNA, 563 bp, Homo sapiens
aaagcaggcagaagaagatggaagaacagacttgctgagtcttctggctttcatctttctcctgtgctggaagcatcctggtctcgaacatcagactccaagttcttcagcttttagactcttggacttacaccagtgatttttcaggggctctcgggcctttggccacagactgaagactgcattgtttacttcccaactttcgaggtttygggactcagactgatgcaccactggcttccttgctcctcaacgtgcagatggcctatcatgggaatttatcttgtaatcatgtgagttgattctctttaataaacccccttttatatgtacatctattctatcagttctgtccctctagagaaccctgactaatacacatgcatacacacatgtggtcatgcagacatgtatacatgcatgcacacatatgtgaccacatgaacatgcatacacatatgtgatctttgccattgtggatggctaggatgatttttctcaggaaaggtatctgtgttattagaaaaatagccctggttctcatcctaaagtcataaaaatca

SEQ ID NO: 762036 - DNA, 563 bp, Homo sapiens
aaagcaggcagaagaagatggaagaacagacttgctgagtcttctggctttcatctttctcctgtgctggaagcatcctggtctcgaacatcagactccaagttcttcagcttttagactcttggacttacaccagtgatttttcaggggctctcgggcctttggccacagactgaagactgcattgtttacttcccaactttcgaggtttcgggactcrgactgatgcaccactggcttccttgctcctcaacgtgcagatggcctatcatgggaatttatcttgtaatcatgtgagttgattctctttaataaacccccttttatatgtacatctattctatcagttctgtccctctagagaaccctgactaatacacatgcatacacacatgtggtcatgcagacatgtatacatgcatgcacacatatgtgaccacatgaacatgcatacacatatgtgatctttgccattgtggatggctaggatgatttttctcaggaaaggtatctgtgttattagaaaaatagccctggttctcatcctaaagtcataaaaatca

SEQ ID NO: 762037 - DNA, 563 bp, Homo sapiens
aaagcaggcagaagaagatggaagaacagacttgctgagtcttctggctttcatctttctcctgtgctggaagcatcctggtctcgaacatcagactccaagttcttcagcttttagactcttggacttacaccagtgatttttcaggggctctcgggcctttggccacagactgaagactgcattgtttacttcccaactttcgaggtttcgggactcagactgatgcaccactggcttccttgctcctcaacgtgcaratggcctatcatgggaatttatcttgtaatcatgtgagttgattctctttaataaacccccttttatatgtacatctattctatcagttctgtccctctagagaaccctgactaatacacatgcatacacacatgtggtcatgcagacatgtatacatgcatgcacacatatgtgaccacatgaacatgcatacacatatgtgatctttgccattgtggatggctaggatgatttttctcaggaaaggtatctgtgttattagaaaaatagccctggttctcatcctaaagtcataaaaatca

SEQ ID NO: 762038 - DNA, 563 bp, Homo sapiens
aaagcaggcagaagaagatggaagaacagacttgctgagtcttctggctttcatctttctcctgtgctggaagcatcctggtctcgaacatcagactccaagttcttcagcttttagactcttggacttacaccagtgatttttcaggggctctcgggcctttggccacagactgaagactgcattgtttacttcccaactttcgaggtttcgggactcagactgatgcaccactggcttccttgctcctcaacgtgcagatggcctatcatgggaatttatcttgtaatcatgtgagttgattctctttaataaacccccttttatatgtacatctattctatcagttctgtccctctagagaaccctgactaatacacatgcatacacayatgtggtcatgcagacatgtatacatgcatgcacacatatgtgaccacatgaacatgcatacacatatgtgatctttgccattgtggatggctaggatgatttttctcaggaaaggtatctgtgttattagaaaaatagccctggttctcatcctaaagtcataaaaatca

SEQ ID NO: 762039 - DNA, 591 bp, Homo sapiens
tcccttgttcattctatatcttaccagaacttatatttgcatatgtgtagaaactcaaggtttacaaagcatatccacggtctttattgtatttgatgctccacaaaatgttgcaagggactcagacaaagtcttgtttgtactatgttacaggtragaatgctgacatgtagaggggcaagtacttacctgatcacgttgtcttagtatgatgaagcctcacttaaacccatgatctcatgtcttcccttaaactgatgcactgaaatacagtcaggtaaaataaagagttaggggcacattttaaaatacatttaaggtgcatcaaagatttaaaccaatcacttgtaacatctctatttgtcaaactcattggtgatcattagcatttagagagacccaggaaaatcgcaagattctaaataattttcaaaccatagtagaggatactttgtttactgttatttatgtattaaatatcttttaatatactatagctttataagaacagataatccatttttggaatttgtgttttaattggccaaagagttaaatccattttttctagatcctctggataattaggaa

SEQ ID NO: 762040 - DNA, 638 bp, Homo sapiens
tgagcccgggaattcaagagcaatctgggcaacatagtgggatcctgtctctacaaaaaatacaaaaattagccaggcatggtagtgcgtaactgtagtcccagctactcgggggcactgatgtgggaggattgcttgagcccaggaggtggaagctgcggtgagcagtgatcacaacactgcactccagcttgggccacagagtaagaccctgtctcgaaaaaaaaaaagacctagtatttgatagcacaacaggataattatagtcaataatttcattgtacattcaaaaataactaaaagagtataattgagcctggcacagtgactcacgcctataatcccagcactttgggaggctgaggcaggcggatcacctgagatcgggagttcgagaccagyctggccaacatggtgaaaccctgtctctactaaaaatacaaaaattagccaggttttgtggcaggtgcctgtaataccagctacttgggaggctgaggcaggagaatcacttgaacccaggaggtagaggctgcagtgtgtcatgccactgcactccagcctgggcaatggagtgagactctgtcttaaaaaaaaaaaacaattggattgtttgcaacacaaaggataaatgcttg

SEQ ID NO: 762041 - DNA, 638 bp, Homo sapiens
tgagcccgggaattcaagagcaatctgggcaacatagtgggatcctgtctctacaaaaaatacaaaaattagccaggcatggtagtgcgtaactgtagtcccagctactcgggggcactgatgtgggaggattgcttgagcccaggaggtggaagctgcggtgagcagtgatcacaacactgcactccagcttgggccacagagtaagaccctgtctcgaaaaaaaaaaagacctagtatttgatagcacaacaggataattatagtcaataatttcattgtacattcaaaaataactaaaagagtataattgagcctggcacagtgactcacgcctataatcccagcactttgggaggctgaggcaggcggatcacctgagatcgggagttcgagaccagtctggccaacatggtgaaaccctgtctctactaaaaatacaaaaattagccaggttttgtggcrggtgcctgtaataccagctacttgggaggctgaggcaggagaatcacttgaacccaggaggtagaggctgcagtgtgtcatgccactgcactccagcctgggcaatggagtgagactctgtcttaaaaaaaaaaaacaattggattgtttgcaacacaaaggataaatgcttg

SEQ ID NO: 762042 - DNA, 594 bp, Homo sapiens
tgagccaccgcttccatttttagagttctattctgaggactaacgccgttcaacaagttggtgtgaatttgtttgcatttttcaaaaccccaaagccggcctgggcgccatccccatttgccccgggcctctcaggaccccgaccacaggcaggaccccgaccacaggcagcgccccgactccaggcagcgccccgactccaggcagggctacctccaactcccagcctccccaggccgggcccccgcccggctcccgacaggctcctctccccgtggcggggcccctcgcccaggcagcacaccctctcamcccgaccgggcccccaccactctaggagggccggcgttgggggagggcgccgggacgtgcccgagggtgacactcgggcttgggacagggcgtgctgccgcgggtcacgtgctgcggaggcttggggaggggcggcgaggcggggtttatagcccgggcgcccgcgggccccacgctttgaccgggtcgtggcagccggagtcgtcttcgggacgcgcctgctcttcgcctttcgctgcagtccgtcggtgagtgcgcgcccagtgggtgccccagcgaacc

SEQ ID NO: 762043 - DNA, 594 bp, Homo sapiens
tgagccaccgcttccatttttagagttctattctgaggactaacgccgttcaacaagttggtgtgaatttgtttgcatttttcaaaaccccaaagccggcctgggcgccatccccatttgccccgggcctctcaggaccccgaccacaggcaggaccccgaccacaggcagcgccccgactccaggcagcgccccgactccaggcagggctacctccaactcccagcctccccaggccgggcccccgcccggctcccgacaggctcctctccccgtggcggggcccctcgcccaggcagcacaccctctcaacccgaccgggcccccaccmctctaggagggccggcgttgggggagggcgccgggacgtgcccgagggtgacactcgggcttgggacagggcgtgctgccgcgggtcacgtgctgcggaggcttggggaggggcggcgaggcggggtttatagcccgggcgcccgcgggccccacgctttgaccgggtcgtggcagccggagtcgtcttcgggacgcgcctgctcttcgcctttcgctgcagtccgtcggtgagtgcgcgcccagtgggtgccccagcgaacc

SEQ ID NO: 762044 - DNA, 595 bp, Homo sapiens
atacaaaaactagccgggtgtggtggcaggtgcctgtaatcccagctactcgggaggctgaggcaggagaatcgcttgaacccaggaggtagaggttgcagtgagccaagatcagcaccactgcactccagcctgggcaacaagagtgaaactcagtcttaaaaaacamacacacaaaaaaaaacaaaaaaaaaaaccccactgacctgtacattttcaaatggttaaaatggtaaattttatgttacatgtattttaccacaatttttttataagaccagattttaaagagaatcaaacagaacctgcagaaataaaagacataataattgaaattagttcaatggatgaatcaaatagcagattagctcagctaaagatgactgtgaatacacaaaatgtagcatggtgatacaaaaattgaatatatcaaacagaagttatgcaacatgaggacagaatagaatgtccaacatatctaaataccattcaagagggaaagaaaagaaaaatgagaacgaggcaatatttgaagatataattgctgagacttttccaaaaactgctgtagtttgtgagagcacaaaaaattgat

SEQ ID NO: 762045 - DNA, 595 bp, Homo sapiens
atacaaaaactagccgggtgtggtggcaggtgcctgtaatcccagctactcgggaggctgaggcaggagaatcgcttgaacccaggaggtagaggttgcagtgagccaagatcagcaccactgcactccagcctgggcaacaagagtgaaactcagtcttaaaaaacacacamacaaaaaaaaacaaaaaaaaaaaccccactgacctgtacattttcaaatggttaaaatggtaaattttatgttacatgtattttaccacaatttttttataagaccagattttaaagagaatcaaacagaacctgcagaaataaaagacataataattgaaattagttcaatggatgaatcaaatagcagattagctcagctaaagatgactgtgaatacacaaaatgtagcatggtgatacaaaaattgaatatatcaaacagaagttatgcaacatgaggacagaatagaatgtccaacatatctaaataccattcaagagggaaagaaaagaaaaatgagaacgaggcaatatttgaagatataattgctgagacttttccaaaaactgctgtagtttgtgagagcacaaaaaattgat

SEQ ID NO: 762046 - DNA, 623 bp, Homo sapiens
caatcaataactgcaaagaaaactcagattagttcaaagcacctccgtggaataaaatctgcactgtaacatgccaggtacaatatctctgagtgtacaatgaggaaaatactctctccttatgtatttgtccattctcacgcyactgtgaagaaataccagagactgcataatttataaaggaaagaggtttaactgactcccagttctacatgtctggggaggcctcaggaaacttgaaatcatggtggaaggcacctcttcacagggcagcaggagagagaacagccaagtgaaggggaaagccccttataaaactatcagacatggtgagaacttaccatcaggagaacagcatgggagaaactgcctccatgattcaatcatctccacctggttctacccttgacacgtggggattattacaattcaaggtgagatttgggtggggacacagagccaaaccacatcatcctacttgctgaatatatcaatcatttaaatactactgagtgcctggcaccattaaaggtacagggactacaagggtgaacaagaccaagttcctgttctcacaggtcttaccacctaaagcagcaatgtccattagaaatataatgcaa

SEQ ID NO: 762047 - DNA, 521 bp, Homo sapiens
aaagagaagtgaaaataaaaaaatctttgctgaaaattgaacgtactatgaattcacagtctagcccttgggaagaaaacaactgctaacagggaattgggaataattgccctgaaacttaaaaactcaaagacatagaaattaggagcaaaaggcagatcccaaggctttggacaatgaaaagcttgctggcactagagcagcccattattcccagctgacatttagaggggtcagtgtgctaaacagaagggggagatgaggaggataaygacagctcaaaataggcaagtgccaggtggagaagggggagactgcagctgactctcgacttgcctgaaacctaaaaatataaacgtcttagatagagcaatgtttttccacattctatgattgctccctctctgccatgcaggccaccacctcttcatgctaacaacttaaagtgtatttcccccatctttctccaaactttcatgcacagaggcaatatttattttacaaatatttaacaattacat

SEQ ID NO: 762048 - DNA, 575 bp, Homo sapiens
tgttcaactttcctatatttagattgagctcttaatattcatttaaaacatctagggttatgtctttcatttcagtaaatacttcctaaaccttcacaaatgtagtgactaatctataccccaaatattctctataaccatgatctggtagctaggccacataaataaaacataaaaattacagaaattcrccaattaaacatgccataactatatcttaatagcagatgcttttttcaataaaatgtatatagtgaataatattttaagacggagtttctccttaacgtttaaaaaatattcctccccaggtaaatgttacaccaaaggcaaattttgttaatgttcgattctcacacaggaaagtttataacaaatatcaactggcacaaaaactgatttaatgatttatctcctcaaaaatctacacacaaaaattgaatgatttatacttctcagacttcagagtccaaggttctgtataagtaacctgttcagagtccagggttctgtacaagtaaccatgtaacctcagttataaaaaaaaaatttatttgatgctgccaatgggaagg

SEQ ID NO: 762049 - DNA, 564 bp, Homo sapiens
cctaggatcctcaggccacccgtacaccagagtagttgtgcacctcatactacagtcaagacagtgccctccttcttggggttcccaggcttccagcataccagagtagtaaaacctcttctcccagcaccatggatgaggcagcatcttgtcctctggcggcttcaagcccctggcacactagagtagctgtaccccttagtgccacagctgatgaggtgtaccatattccaagggtctggaggatatgctgacccatgtagccacactctgyggggctgatcagacatagtgccttgcatcccagggaatcagagtcttggttgtgctgtgccaccagatcctccaggctgaatagccacagtatcctgcttatttacaattgggctagccccttgcagtctgagctgctgagatgccttacttccgtggagaaggtagttattggtgtgctgcttccctcccaccagggatcaagccacagtagtgccttgacattcctgggtccttgctgctactgcacctggcctcatagaccctgggccactgccatatcctaccacc

SEQ ID NO: 762050 - DNA, 564 bp, Homo sapiens
cctaggatcctcaggccacccgtacaccagagtagttgtgcacctcatactacagtcaagacagtgccctccttcttggggttcccaggcttccagcataccagagtagtaaaacctcttctcccagcaccatggatgaggcagcatcttgtcctctggcggcttcaagcccctggcacactagagtagctgtaccccttagtgccacagctgatgaggtgtaccatattccaagggtctggaggatatgctgacccatgtagccacactctgcggggctgatcagacatagtgccttgcatcccagggaatcagagtcttggttgtgctgtgccaccagatcctccaggctgaatagccacagtatcctgcttatttacaattgggctagccccttgcagtctgagctgctgagatgccttacttccgtggagaaggtagtyattggtgtgctgcttccctcccaccagggatcaagccacagtagtgccttgacattcctgggtccttgctgctactgcacctggcctcatagaccctgggccactgccatatcctaccacc

SEQ ID NO: 762051 - DNA, 521 bp, Homo sapiens
tcatggtgaattattttcttatttattttgagatgtttgattgtgaactcgttttcctctggaagacataactttggaaattttttgaagcctacatttaagaattcctacagagaaaacatgcatctgtttttatgagatgccttctggaactaccagttggctttaaatttaaactaccttttcaggctttcttcttcagagtttatttgaaccatcataattgcgtacattttgttcccgstcatgtgacagctgacctgtcattatgaagaatcgggagtgtctttctactttctccagaaacaaagctgcaagttgatttgtatgattctcattataggatttttttcccctggagtttcacctctccaggagccctggctttatatgtttgttatcattattacaataatcatacatgactactaaagttctaatgaatcaaaacaagggttgcctttcagcaaagtacatttttcacattttcctccagttgttaaataaaactgttcacatgc

SEQ ID NO: 762052 - DNA, 573 bp, Homo sapiens
agaagaaacagacaagtcagaatgcagaaagcatcatggaggacgctcctgtgaaggtctaaacctgaaacaaagacaagtaagtgagaaaaaagagcaagttttgtttttcgttttttgtttgtttgtttgttgagagagtctcgctctgtcgcccaggctggagtgcagtggcgcgatctctgctcactgcaacctccggctcccgrgttcaagtgattctcctgcctcagcctcccgagtagctgggattacaggcgcccaccaccacactcagctaattttttaatttgttttttatacattgtaacactgcaatgtcctatgatttgaacaatttttttaatgaaaaactctgcataactaacatggtggtccagaggctgaaaagacaaggtaaatatgaaactagaccctagcaacctgaagtgtgaggcagctaagtaaagctctgactgggaaatcaatctttgcttcactcacattcatgggagcattcaggaacattacaggctgtttggcagtagctagatgcacccagtgcacagataagcaccctttcattatctctat

SEQ ID NO: 762053 - DNA, 573 bp, Homo sapiens
agaagaaacagacaagtcagaatgcagaaagcatcatggaggacgctcctgtgaaggtctaaacctgaaacaaagacaagtaagtgagaaaaaagagcaagttttgtttttcgttttttgtttgtttgtttgttgagagagtctcgctctgtcgcccaggctggagtgcagtggcgcgatctctgctcactgcaacctccggctcccgagttcaagtgattctcctgcctcagcctcccgagtagctgggattacaggcgccyaccaccacactcagctaattttttaatttgttttttatacattgtaacactgcaatgtcctatgatttgaacaatttttttaatgaaaaactctgcataactaacatggtggtccagaggctgaaaagacaaggtaaatatgaaactagaccctagcaacctgaagtgtgaggcagctaagtaaagctctgactgggaaatcaatctttgcttcactcacattcatgggagcattcaggaacattacaggctgtttggcagtagctagatgcacccagtgcacagataagcaccctttcattatctctat

SEQ ID NO: 762054 - DNA, 507 bp, Homo sapiens
tttttgtgtgctcttcagattacataatctctatttatctataagctctgattcttctgccaattaaagtctactgttgagcttctctagtaaatttttcatttaggttattgtaatttttcaactctatcattccattttkctctgtttttttcttagcaaactttttttttttttttgagacggagtctcgctctgtcacccacgctggagtgcagtggcatgatcttgactcactgcaagctctgcctcccaggttcacaccattctcctgcctcagcctccccagtagctgggaccacaggcacccgccaccatgcccagctaattgttttgtattttcagtagagatgagatttcaccgggttagccaggatggtctcgatctcctgacctcgtgatccacccgcctcggcctcccaaagtgctgggattacaggtgttagcaaactttttatcgcagaacagtttaaaacatacagaaaaattgtaaagacagcccagtga

SEQ ID NO: 762055 - DNA, 507 bp, Homo sapiens
tttttgtgtgctcttcagattacataatctctatttatctataagctctgattcttctgccaattaaagtctactgttgagcttctctagtaaatttttcatttaggttattgtaatttttcaactctatcattccattttgctctgtttttttcttagcaaactttttttttttttttgagacggagtctygctctgtcacccacgctggagtgcagtggcatgatcttgactcactgcaagctctgcctcccaggttcacaccattctcctgcctcagcctccccagtagctgggaccacaggcacccgccaccatgcccagctaattgttttgtattttcagtagagatgagatttcaccgggttagccaggatggtctcgatctcctgacctcgtgatccacccgcctcggcctcccaaagtgctgggattacaggtgttagcaaactttttatcgcagaacagtttaaaacatacagaaaaattgtaaagacagcccagtga

SEQ ID NO: 762056 - DNA, 586 bp, Homo sapiens
tttttaccctgagcattcacaggattgggccctgacccaggaatggaatgttgtgactatgcgagtagccacctgcctgcaggcttattatttctcttattaaatggaggattcgatgagataatcagtgaaacttcttttcagagagaaagctatgatttgatgaattatgaattgaggacgcaggagctgctctattgggtcttaatagttgtaagcctttgtggggaaaaatcatgtaaacaaatagcaactagataagaaattaaaaaaacaattattatagtggacaagctgtaagggaagagctgggaatcttaagctaagaatgaaacagggcttaaaatgaagaaatctttgagctgtgtgtggaaagacawgtaacattcccaatagggaaagaaggaactcatttcaggtcacaaggacagcctgagcaaagataaagtttgtttggttgattagctcaagatagctggggcacactataggtgaacaggtgtaatagaagataaaaatactgatcttaattactgggatttgagagaaagaaaaggtttggtcttgatgcacaagaaagctttaa

SEQ ID NO: 762057 - DNA, 625 bp, Homo sapiens
tagagaaaacgttcaaagatggtatgagaatgtggcacctttagcactcacatatagcatgtacaaaaatattcattttgaaagattatattctttttttacttctattttaagttcaggggtacatgcgcaggtttgttacataggtaaacttktgtcaagggggtatgttgaacagattatttcatcacccaagtattaagcctattatccattatttttcctgatcctcttcctcctcccaccctctaccctattataggcacctgtgtctgttgttcccttctttgtgtctctgtgttctcattgtttagctaccacttataagtgagaacgtgaggtattttgttttctgttcctgtgttagtttgctaaggataatgacctccagttccattcatatccctgcaaagggcattatcttgttctttttcatcgctgtgtagtattccatggtgtatatgtatcatattttctttatccagtttatcactgatgggcatttaggttgattccatgtctttgctattgtgactaatgctgcaatggatatagaagtacatgtatttttataaaagaatgatttgtattcctttgggtatatatccagtagtgggattgctgg

SEQ ID NO: 762058 - DNA, 557 bp, Homo sapiens
caaatttttatctctagctcaccctgctctaagctccacatacacatgtccagtcatttatctgatatctccacttgactgtcttatagtcatctcatagatgacatatccaaaattaaactcttggtcttctccataratctattcgttctcaattatttttaaatactggcctcctcaaatacccagttttacaaatcatataaccttgacaacttcttctccttcatccctatatatattcaatgatcaaatcctaacagttttacctcctaaatatctcctgagtctctccatttaactccattttcaccgacagaactcacaatcatgccatcatctactgcatagataaatctattattctcccaactagtcaccataaaatactatttcttgtcttcaaattttcttgactgtacaactaaaatcatctatttaaattcctctgtggctgtaaagaccaaaaggaaatcctcaacctgccctgcaagggctctctgcagttagccacagtctaccccatcctcacctcaggctgctctccaatgtgctcc

SEQ ID NO: 762059 - DNA, 557 bp, Homo sapiens
caaatttttatctctagctcaccctgctctaagctccacatacacatgtccagtcatttatctgatatctccacttgactgtcttatagtcatctcatagatgacatatccaaaattaaactcttggtcttctccatagatctattcgttctcaattatttttaaatactggcctcmtcaaatacccagttttacaaatcatataaccttgacaacttcttctccttcatccctatatatattcaatgatcaaatcctaacagttttacctcctaaatatctcctgagtctctccatttaactccattttcaccgacagaactcacaatcatgccatcatctactgcatagataaatctattattctcccaactagtcaccataaaatactatttcttgtcttcaaattttcttgactgtacaactaaaatcatctatttaaattcctctgtggctgtaaagaccaaaaggaaatcctcaacctgccctgcaagggctctctgcagttagccacagtctaccccatcctcacctcaggctgctctccaatgtgctcc

SEQ ID NO: 762060 - DNA, 557 bp, Homo sapiens
caaatttttatctctagctcaccctgctctaagctccacatacacatgtccagtcatttatctgatatctccacttgactgtcttatagtcatctcatagatgacatatccaaaattaaactcttggtcttctccatagatctattcgttctcaattatttttaaatactggcctcctcaaatacccagttttacaaatcatataaccttgacaacttcttctccttcatccctatatatattcaatgatcaaatcctaacagttttacctcctaaatatctcctgagtctytccatttaactccattttcaccgacagaactcacaatcatgccatcatctactgcatagataaatctattattctcccaactagtcaccataaaatactatttcttgtcttcaaattttcttgactgtacaactaaaatcatctatttaaattcctctgtggctgtaaagaccaaaaggaaatcctcaacctgccctgcaagggctctctgcagttagccacagtctaccccatcctcacctcaggctgctctccaatgtgctcc

SEQ ID NO: 762061 - DNA, 591 bp, Homo sapiens
cagaaatgcagggataatttgaaaatcccaaagctgacttcaggtgtgaccgtggaaaagtcatgaagcctctgggctcaagtttttacaccatggaatgataatttggattgttatgaaaacactttgagctgctctcacagccagcatctgacaagatattttcccagcagccaaaacattctctataactaatgatggcttgtttttttcatgcacagaaagatagacacaaatattagagatcagtcaatgattaaataaagtgttctcctgcacaaaataatgatttaagtcttcaggacacacagaaactaagtgyaataattctactaaggtttaaatactcagagactaccaaggcaaagcaatttgagcagcatcagaaacacatacacaccatgggcagcaaacagccattttacatttaattaggcaaagaaactccagctgaatgggttaaaaattgccactatttcacagtaagtgattttcttaacccccaagggttcaaattactttggcaggaaaagcaattatgcaattaataggggaaaaatctcaagagctctgtaattttcgaagaggtaa

SEQ ID NO: 762062 - DNA, 592 bp, Homo sapiens
tttcatctaaggaatttgaatgtgatctgattagcaacaagaagtcaccatagatccctgagcacctcatgagtgcattgtaaaaactgaatgagataacatatgcgaaagcgaccagcgctgtggtgcccagtaggtaatgcacaataaatgttagtctgttacagagttatttctgaatagggctgagatataatgaacacgatgtttcaggaacagtgatctgtgcaagtgaaccagaggcggggagaatggtggctgttgcagcaagctggccacagggtgacaagcatgcctcaccactgtgcatgcagaccatatgtcactmggtttccgaaaagctgccatctgccaaggtagcagtctgatggacctctgccgcctagatgatgctagccagggaccttttggacaatgtatcctactgtaaaacgtagttcacacatgtttcttgaaattacagcatagttatagaaacaggcagatgtggcagacaggaaactgaagaaaataggcccattgattgctcttctatgctagggcttcattaacaatctagagaaccctggaattccttatggcaagtgtttgt

SEQ ID NO: 762063 - DNA, 640 bp, Homo sapiens
ctaggttgatataaatccttcatcagaaactcgtattgtggatattttcttctagtctgtggcttctcttttgttgtttagatggtattttcctacgagcaaaagtttataatattggtaaagccaaatttatctattttttatggtttggctttttacagcctaaaaaatgtgcctattataargttgcaaagattgtctcctttgccttcttccagaagttttatagatttaactttgatatttaggctgacataacttttgaattcctgacattttatttttgttttacttgtttatttacagacagagtcttattatgttgtccaggctggactggctattcacaggtgcaatcacagtgctctacagcctccaactcctgagctcaagcaatcctcctgccacagcctcccaagttgctgggactacaggcatgcaccaccatgcctagtgcattttattttttaataaaagtttcataggttatattagtctgttttgtgctgctacaacaaaatacctgagactgggtaatttataacgaacagaaatgtattggctcataattctggaagttgggaagcccaatataagatgctggtgtctgataagagccttcttgctgcatcataacatg

SEQ ID NO: 762064 - DNA, 640 bp, Homo sapiens
ctaggttgatataaatccttcatcagaaactcgtattgtggatattttcttctagtctgtggcttctcttttgttgtttagatggtattttcctacgagcaaaagtttataatattggtaaagccaaatttatctattttttatggtttggctttttacagcctaaaaaatgtgcctattataaagttgcaaagattgtctcctttgccttcttccagaagttttatagatttaactttgatatttaggctgacataacttttgaattcctgacattttatttttgttttacttgtttatttacagacagagtcttattatgttgtccrggctggactggctattcacaggtgcaatcacagtgctctacagcctccaactcctgagctcaagcaatcctcctgccacagcctcccaagttgctgggactacaggcatgcaccaccatgcctagtgcattttattttttaataaaagtttcataggttatattagtctgttttgtgctgctacaacaaaatacctgagactgggtaatttataacgaacagaaatgtattggctcataattctggaagttgggaagcccaatataagatgctggtgtctgataagagccttcttgctgcatcataacatg

SEQ ID NO: 762065 - DNA, 612 bp, Homo sapiens
gaaaaagctgcttctgccccatccctgttttagctagccgtgaatttggtccagtgtccaagccccatctctggagtcaagtcccacctcctacctcaaaatgatcgtaagtcagggacagtctgtacagaatatccatgcaataaaatattactcagtaataacatatatgaattattgacacacaaaagagtacaaataaagagtatatacatgaagagtatctagcttgaacacaagagtatatactgtgtaattttatttatgtaaagttgtasaaaaggaaaattactgtgtaatggcagaaagcagattagtggttgcctgggatcagggctggatgggagactaactgcacacagatgcaagcctgatccgggggcagtgattacacgatgtctacttttgtcaaaactagtcaaacgactcacttaaaactagtacactttactaaatgaaaattattccttaataaagctaattttgtaaaattattattttgtaccttagaaataaggaattgagtgcttgcttgactgctattccttttgccaccacactactacagacctccatcacttcaaaaatatcacaatttctcatggtttaaca

SEQ ID NO: 762066 - DNA, 558 bp, Homo sapiens
ccagtgtacctttcacaggatacttctttcacatagtggacagcctgatgcctatttgtccaacttgtgaccaggggatccttcacacagacaacttgttaatattggcagatgcccttatgactcttgtctgacctgtgttcagtttatacttgcctgacattgctctggtgctgggagcctgagctcatgttctccctggtgtcttgggggaagcccaggctggggagtccctggttcttcagatggatagarcaaattcaatatactactgcagtaggaaacaagttcaaaggtttttacttacagatcctgggcgagaagggcacaatgatttgggtagagctgagaagagtcagtcagggagagaagagcccgaggctttttgcagtatatgtaagggactagagcatggatcattaagttctcactattaaaggataaagcaggaaagtagggatcccagtttgttaggtgggagagaagttatctctgtccactggcttgtgccatttgggtgtggcatagaactggaaatatgtcaaggtctagtgagcc

SEQ ID NO: 762067 - DNA, 542 bp, Homo sapiens
gttgtgacatgattttgtcattgtgtgaacatcatagagagtacttacacaaacctagatggtacagcctactacacatctagggcatatgatatagcattttgctcccaggctacaagcctgtatatcatgttactatattgtaggcacttgtaacacaaagataagtatgtatgtatcctgtatccaaacatatctaaacacagaaaagctacaggtaaaaatgtgatataaaagatttaaaatggtacmtctgtatagagcatttgccatgaatggagcttgtaggactggacgttgctttgagtgagtgagtgagtcacggtgagtgaatgcgaaggcctaggacattactgtacactaagattttataaacactgtacacttaggctgcactaaatttatttaaaaaatttttcattcttcaataataaattaaccttagcttgctgtaatatttttactttataaaatttttcatttttaaacttttgattcttttgtaataaagtttagcttaaaatacacattgtacagctgta

SEQ ID NO: 762068 - DNA, 567 bp, Homo sapiens
agcctaggcctctccagggtcaaggccaccaatagcactgtcctccacctttatatcttacaccactggaaggtcttcaggggcaataacatgtagagctgataacaagtctgccctgataacatttccttccgggattcttcctgaaggactgcttgatgctgttttatacttaatattttttttttattagtggaaggggtacactctaaaattacaataaattatattataataattaggtaaaccagtcatatagtcatttattatcataatcaagtgttatatatactgtacataattgtatttgttgtatttttgtcccatggcagcacagatttgtatacygcagtgttaccacaaacacatgagtaatgcctctcaccgctatgttatgatggtgttgatagaaatttttcagccccattataatcttacgagatcaccatcatatatataagtcgttgacttaaacatcattttatggtgcacgactatgtatataaatatataaagaaggtacttcaaacacaaatattataatcagcacagcagcatcaagcaaaa

SEQ ID NO: 762069 - DNA, 631 bp, Homo sapiens
cagtaattataaggctggggatgtggatttgattgaaaaccaactgcaccaatgtgttcctagcgtttaaagtaatagtgtatgtattattattatctgagacaggatgtcactctgtcagccaggctggagtgcaatggctctgtcatggctcactgcagtctcaacctcctgggctcaagtgatcctcacacctcagcctcctgagtagctgggactaaaggcacatgccaccatacccagctaatttttgtattacttgtagagatgtgatttcaccatgttgcccaggctgtcctgaaactcctgggcccaagtattctgtcccccttggcctccaaagggctaggattacaagtgtgagccaccatgcgtggcaatagtgtatatattaatctctactgaatttwttgaagctttttatatatgaaaaattatttccctctcttctgaccacctctcacatacttttctccctctctgttttgcacttctcatgtcatgtctccttgcctctaattcactcccactcagtgtttgcccctttgagaaagcctaccagaaatatcaactccattttcagaatgcccgcagtatgccagttgtgtgcccaggtatcttcccaacatct

SEQ ID NO: 762070 - DNA, 631 bp, Homo sapiens
cagtaattataaggctggggatgtggatttgattgaaaaccaactgcaccaatgtgttcctagcgtttaaagtaatagtgtatgtattattattatctgagacaggatgtcactctgtcagccaggctggagtgcaatggctctgtcatggctcactgcagtctcaacctcctgggctcaagtgatcctcacacctcagcctcctgagtagctgggactaaaggcacatgccaccatacccagctaatttttgtattacttgtagagatgtgatttcaccatgttgcccaggctgtcctgaaactcctgggcccaagtattctgtcccccttggcctccaaagggctaggattacaagtgtgagccaccatgcgtggcaatagtgtatatattaatctctactgaatttattgaagctttttatatatgaaaaattatttccctctcttctgaccacctctcacatacttttctccctctctgttttgcacttctcatgtcatgtctccttgcctctaattcactcccrctcagtgtttgcccctttgagaaagcctaccagaaatatcaactccattttcagaatgcccgcagtatgccagttgtgtgcccaggtatcttcccaacatct

SEQ ID NO: 762071 - DNA, 577 bp, Homo sapiens
tccaaagggctaggattacaagtgtgagccaccatgcgtggcaatagtgtatatattaatctctactgaatttattgaagctttttatatatgaaaaattatttccctctcttctgaccacctctcacatacttttctccctctctgttttgcacttctcatgtcatgtctccttgcctctaattcactcccactcagtgtttgcccctttgagaaagcctaccagaaatatcaactccattttcagaatgcccgcagtatgccagttgtgtgcccaggtatcttcccaacatctctcctccatgccccagcattrccactcaggtgttcttcacaggtatcctgtaggaacagcagaggattagagacactaggtgggtccacatcgatgggctcccaaatctgtgttcttcctataccatgtcacctcctgtgctattaaatgatgtattaggggcagataatggcttccaatgagtgcttagttcacaattaccacagagcctttaagatttctgtctacttgtaataaatacttctaataaatcctgaccaaaagaggctaagtaaatgtaaa

SEQ ID NO: 762072 - DNA, 616 bp, Homo sapiens
acacaatcctctgagctctgcttatcccctggagaggtgagtttagggcagatgtagtgggtttgggagcctcagagggcgagacctgtcctacccacgcccagatattcatagggaagggagcagtctgtgatgcaggaccttcctggttaagtaaatagccttgttttatttcttctttctaagacaattaggacattatgccaagtgattgaaatttatttgcataggaacattatattacttgtgaataccactaggagaatgaaggggcagtggggctgtttgggttgagaaactgagactcttttgtgtgatggaacaaatacactgttctggaagaagaaggaaactcagatcttttgctggccctratgttgagcagctgagtgaccttgggcaagttacttcatctctccaggcccccatctccttgtttttggagtgttgaggttacattattacatcactttgtagagccttctcatttgggactttgtaatccatgagggaaactgtctgcaagccccaaagcccttaatcttgattgaaatatggtcaaaaatagatctggaagtaattttaaaaagcaatttaaaatgttaaatatgatgta

SEQ ID NO: 762073 - DNA, 634 bp, Homo sapiens
tcttaggtagcagatgtctgtagaggggtacttaggggaggaaatgagggtggaggtggcctgcccaaactctgctagttttctagccatggttctgataattagctttgcgcaagtgggggcctttgtccttagaacgggctcttttaatatcactcctcccttcctttttttttttttgagaccgagtttcgctcttgttgcccaggctgaagtgcagtggcatgatctcagcttaccgcaacctctgcctcctgggttcaagcgattctcctgcstcagccttcctgagtagctgggatgttccagagggtagccacctgttcctcaccaggcagaggagcctggtagctccacgacccatcaagagtcgatctcagcatctcccaaactcactatcgctgaaacgatctctgctccaggactcaatgctttttggggatgtggcaactaaattggtaaagagacctgctccctgcaccgcctgcgtgggtgctgggtgctgggtgctgggtgcataaagcccttgcaggtgatcacgaggcagtggagtggagcacccgaggctgctccacctgggctggctccaagctccccattttctgggagtcagaatcggagcctggtatgcagt

SEQ ID NO: 762074 - DNA, 634 bp, Homo sapiens
tcttaggtagcagatgtctgtagaggggtacttaggggaggaaatgagggtggaggtggcctgcccaaactctgctagttttctagccatggttctgataattagctttgcgcaagtgggggcctttgtccttagaacgggctcttttaatatcactcctcccttcctttttttttttttgagaccgagtttcgctcttgttgcccaggctgaagtgcagtggcatgatctcagcttaccgcaacctctgcctcctgggttcaagcgattctcctgcgtcagccttcctgagtagctgggatgttccagagggtagccacctgttcctcmccaggcagaggagcctggtagctccacgacccatcaagagtcgatctcagcatctcccaaactcactatcgctgaaacgatctctgctccaggactcaatgctttttggggatgtggcaactaaattggtaaagagacctgctccctgcaccgcctgcgtgggtgctgggtgctgggtgctgggtgcataaagcccttgcaggtgatcacgaggcagtggagtggagcacccgaggctgctccacctgggctggctccaagctccccattttctgggagtcagaatcggagcctggtatgcagt

SEQ ID NO: 762075 - DNA, 613 bp, Homo sapiens
aacccagtgctggagagaacacaggatcccccagcttcccaacaccagcctagggaaatgatgttcatctgacaatgaaaatttctagggccggggtggtgactcacacctagaatcccaacactttgagaggccgaagtgggaggatcgcttgaggccaggagttcaagaccagcctgggcaacacagcgggactccctctctacaaaaaataaaaataagccaggcatgatggtgtgtgcttgtagtcccagctacgcaggaggctgaggtgggagcattgcttgagcccgggaggttgaggccacggtgagtagtgattgtgccactacactgcagcctgggcgacagagtaagaccctatctcaaaaaaaagagaaaattttagaattagtggcagtggaaaacgatgcaaaggttcctatgttttgaggtgcatcctataayccagatttattgtaggagaaatttcatagcatctcagatcctaggcttggtggacaatgagaggggaggttaataaatattccttctgctttgggagggtagaataaagaagctgatgtacaaatcaaaaatatttataactaataaatcctatcaaaaccctcac

SEQ ID NO: 762076 - DNA, 615 bp, Homo sapiens
ggtcagaatgcagccgtcgtgagggaactgtgtggcatttgccctttagagctgctaggataagctgcgaggtttggccccacttaaagtagaaaattattttgctgtttcccacattactctaccctttggcacctgttcttctcccccagcagactgcatcttcactgctgacagtcagctccatgagccccgtctcacagcmcagggcttagaggttcattcagcaggcctcacttctctgctggttcctctcctttcctcgaggctcaccatgaagccctgtccttaggcttatgtattagtctgctgtggttgccatgacagaataccgtagactgggttgcttcagcaacagaacttattttcttacagttctggaagttggaagtccaagaccagagttcagtagggttggttctcctgaggcctctcaccttggctgtagatgccatcttctccctgtgtcttcccgtggtcttccttctgtgggtgtctgtgtcctcatctcttcttataaggacaccagtcgtactggattagggctcacttgacctcattttaacataatcacctcttggaagagcctgtctccaaataaagtcacattgagag

SEQ ID NO: 762077 - DNA, 593 bp, Homo sapiens
atcgttaaaattaacaacatattaatctttaaccaatcataaaaagtgtgaaaagataagccacaagccagaaggtatttgcaacacacattatttaagatgagtatctagaactcttacaaatctagaaaaagacaatcaaattgaaaagtaagcaaaagatttatataggcccttcataaagaggaaayacaaatagccaataaactcattaaaggatgctcaatatgactggaaaccagggaaatacaaattaaaatcactcagacatttcaagtttataatgttggtaagcattttaaggtctgattctatcaagtgttggctaggatgtgaagttactggaattcttacatacagctggaaaaacaacaatctgcttttcttggtaaaatagcagatacgcatacctgtaactcaaaaattgtcttaactataccctaaagaattcgtgtgcatgtgtgccagttgatgtgtgcaagaaagtttacagcagaactgtatgcaacagcaaaacactggaaccaactgaaatgtccatcaacagcagaaaagagaaggaaaagacgctctattcatacaaggctgtgaag

SEQ ID NO: 762078 - DNA, 512 bp, Homo sapiens
ttatttttgagacagagtctcactccattgcccaggctggagtgcagtcactataacctctgcctcctgggttcaagtgattctcctgcctcagcctcccaagtagctgggattacaggtgcatgccaccacactcggttaatttttgtatttttagcagagacagktttcaccatgttggccagactggtctcgaacacccaccctcaggtgatccgcccaccttggcctcccaaagtgccgggattacaggcatgagccacctcgcccggccacatttttagtttataaacaacgcccctgcattttcattttgcactgagctactacaactctgtagccagttgtgggccagatggtgtctattttcagctttgtggaccataggtccctgttgcaactactcaagtctgcaggcagcgggagcagcagccagggacagcaggtaatgaatgagcatggcagttctccagtaacattgcatctgcaaacacagccggcatcccggattt

SEQ ID NO: 762079 - DNA, 516 bp, Homo sapiens
tccagtctactgatgagcctttcaaaggcactcttcatgtctgttaatagttttttattttgagcattttcttttcatagagttttcatctctctgcttatattaccccgctgttcttgcatatagtctattttttctattagagaccttaacatagtaatcataattattttatttatttatttattttgagacggagtctcactctgtygcccaggctcaagtgcagtggcgtgatcttggctcactgcaacctctgcctcctgggttcaagtgattctcctgcctcagcctcccgagtggctgggataacaggcatgcaccaccacccccggctagttttttttgcatttttagtagagatggggtttcactatgttggtcaggctggtctcgaactcctgacctcaggtgatcctcccaccttggcctcccaaagtgctgggattacaggtgtgagccaccgtgcctggccttaatcataattattttaaattcctggtctgataattttaa

SEQ ID NO: 762080 - DNA, 611 bp, Homo sapiens
agttggaaggatggatgggtggtaagaaaccatggatctcaaataaggttaataaaccctctgcttttgctctatagttaatcagctcaaagatttgttgcgccaacaagcagataaggaaagtgaagtatctccgtcaagaagaagaaaaatgtcccccttggtaagtatcaacttttccaagttgacaaagcattcctgtgttttactgtattgtgttattttgtagtacatgttgcagaaaaaatttaagcatggcatactaatagtgaaaaacattaaaagtaattctcttccctctgattattttggctgaaaaaatagatttccatggcagagggaatcttgattttttwaatttattattcacttggaaaatgggagcaagggaatagtttggagaatttattttgcaactgttagcaaaatatgtaatataaatatataatatataataaattaatataataaattatatgtcagaatatatgtaaaagataaagtcattattttagtaatttcttttttagagggtcatatctattattgatcatttttagaagttacttaattataattgtagccctactttgtaatattttttaaatttt

SEQ ID NO: 762081 - DNA, 570 bp, Homo sapiens
aattataaaagaaagtaaagtatatctatctttagtcaaactgttctaaatgtttaagcttctagtggttctggcaatatgttctggctgactttcatccactgaacctgaatacctttattaattaattaatatttggtaaagatgaattaactccacacaaaacttaaatggatatatcagatacattcatmttcaacaatatatcacttaattaaaataaaagaggtcaaatatatgtgtatatataaattcataatctaaatacttacacacaccataacagaacacagatagtcccttttcaagtctgacactcaaatccatcgtcaaaacaaacaatatttacaaaattttcatatccgttgcttttaccttcagagagctcaaagggtcaaatgtgcatttcagtgtcactcattcctaatattgatattaaaaacagcctagcctagtggcttatgcctgcaatctcaacaaatttggaggctaaggtgggaggtttgcttgagcccaggagtttgaggctgcagtgagctacgatcacgccattgcactccagcctgggtg

SEQ ID NO: 762082 - DNA, 597 bp, Homo sapiens
gacatttatatttaaatctgcaatccattgagtttgaattttgtatatggtttagggaccaatatatatttttttcaatgttacccggagttatttaccaaaaagactataggttcacccattgaactgttgtgtcatctttgttatgaatagatgacggtatatagtttctattctattgccttagtttatttaactatgctttcagtaatacagttaattakcacgatttttaacagactgtcttatctggcaatgcaaattcttgagcatagtttttcttctttaaatttccttcaactattatttgtcttattgattttttgaatctatgcacatagtataattctccatttatttataccctatttaattcttctcagctatgtattttagttcccactagagacattatatgcatacttcaatagctttattgctattgttgtgcttttgtatatttagttttccatttgtaacgttggtatacagatatactattaatatttaacattgatttcaaatcctagattttactcacttcacttattaacttcaacaggttttcaatacatatttttactatatttgaaagca

SEQ ID NO: 762083 - DNA, 597 bp, Homo sapiens
gacatttatatttaaatctgcaatccattgagtttgaattttgtatatggtttagggaccaatatatatttttttcaatgttacccggagttatttaccaaaaagactataggttcacccattgaactgttgtgtcatctttgttatgaatagatgacggtatatagtttctattctattgccttagtttatttaactatgctttcagtaatacagttaattagcacgatttttaamagactgtcttatctggcaatgcaaattcttgagcatagtttttcttctttaaatttccttcaactattatttgtcttattgattttttgaatctatgcacatagtataattctccatttatttataccctatttaattcttctcagctatgtattttagttcccactagagacattatatgcatacttcaatagctttattgctattgttgtgcttttgtatatttagttttccatttgtaacgttggtatacagatatactattaatatttaacattgatttcaaatcctagattttactcacttcacttattaacttcaacaggttttcaatacatatttttactatatttgaaagca

SEQ ID NO: 762084 - DNA, 597 bp, Homo sapiens
gacatttatatttaaatctgcaatccattgagtttgaattttgtatatggtttagggaccaatatatatttttttcaatgttacccggagttatttaccaaaaagactataggttcacccattgaactgttgtgtcatctttgttatgaatagatgacggtatatagtttctattctattgccttagtttatttaactatgctttcagtaatacagttaattagcacgatttttaacagaytgtcttatctggcaatgcaaattcttgagcatagtttttcttctttaaatttccttcaactattatttgtcttattgattttttgaatctatgcacatagtataattctccatttatttataccctatttaattcttctcagctatgtattttagttcccactagagacattatatgcatacttcaatagctttattgctattgttgtgcttttgtatatttagttttccatttgtaacgttggtatacagatatactattaatatttaacattgatttcaaatcctagattttactcacttcacttattaacttcaacaggttttcaatacatatttttactatatttgaaagca

SEQ ID NO: 762085 - DNA, 624 bp, Homo sapiens
agcatatcatgatccattagccactgacaaaaacatttgcaggttaaaacattctgcttactaaatcaaccctcttttcattccagtaagcttgcctacgttgtctccagtgccaaagatatgcagcttgccttttgtcgcttcagaaatttatgtcactgaaatcgggaaacccatttgaacagtggcatctctcacaattatattctgctagtagtggggagacattgcaaaacttctcaaagatattatccccacaccgtgccatatcctcaatgcatttcctaatgccttttgaagraatatttttttggtcaatccacgtaaaatgcttttttggatgttaagcagtttgcaggcacatgggtagtcctatctccataagctttgtgattccttcccatatattacatggagctgtgctacttcaaacccatttaatataggccatgtatgaatctgtgcttaagttaaaccaaacttattcttcatttctagttatcaagataacataatgaatctacagtccagaatttctatgtaagtaaacccatttggataaattcatcctgattcaatgttatgctcctttttgttcctgatctgacatactatatccctgca

SEQ ID NO: 762086 - DNA, 624 bp, Homo sapiens
agcatatcatgatccattagccactgacaaaaacatttgcaggttaaaacattctgcttactaaatcaaccctcttttcattccagtaagcttgcctacgttgtctccagtgccaaagatatgcagcttgccttttgtcgcttcagaaatttatgtcactgaaatcgggaaacccatttgaacagtggcatctctcacaattatattctgctagtagtggggagacattgcaaaacttctcaaagatattatccccacaccgtgccatatcctcaatgcatttcctaatgccttttgaagaaatatttttttggtcaatccacgtaaaatgcttttttggatgttaagcagtttgcaggcacatggrtagtcctatctccataagctttgtgattccttcccatatattacatggagctgtgctacttcaaacccatttaatataggccatgtatgaatctgtgcttaagttaaaccaaacttattcttcatttctagttatcaagataacataatgaatctacagtccagaatttctatgtaagtaaacccatttggataaattcatcctgattcaatgttatgctcctttttgttcctgatctgacatactatatccctgca

SEQ ID NO: 762087 - DNA, 605 bp, Homo sapiens
tctgaataatatagtaaggtttcaattagttcaataaatttttaataagcacagcttattaataataaggatatcttatatttgaggctttttttcagacagcatagaaataataagttctgattttttaaagaagggagtttctataggcatgcctttcctattattcaatttgacctttgtaccattttatggaaggcatgattataatgactatttctccttaatttttcttcaatataataattaaagcaccattttcaayagctgagactaatttccttatcttgtatctctatgtccttctttgtgttctcttgggattaacaaattgattttacttcccaccatacaatattgttcatgtttcctgttgtcagttatgttcagagttcactgttgaggatctctaaaacatcatctgagatattaatcacattgtaagttccaggctgagtcttcaggtgaaaataaactcttaagaggcagaaaaaaataaacaggcttctgaatctatgctccacttatttgaataatttcaattttgtcgtctgtatgcttttgatattagttattccccagtatggatccccactgggacctcg

SEQ ID NO: 762088 - DNA, 551 bp, Homo sapiens
ttatagtttttaaaggcttgatttgatgttaacattgagtgtgtctttgacaggagttcaaagtagaagtttaccaacagcaaattgagatggagaagcttaatcaccagggtgaactgatgttaaagaaagctactgatgagacggacagagacattatacgagaaccactgacagaactcaracacctctgggagaacctgggtgagaaaattgcccaccgacaggtaaggcaggtggtagatgacatcagtgaactactctccgctcttttctaatttcgtattgaatattccctttctgtcttttcctgagtagcacaaactagaaggggctctgttggcccttggtcagttccagcatgccttagaggaactaatgagttggctgactcataccgaagagttgttagatgctcagagaccaataagtggagacccaaaagtcattgaagttgagctcgcaaagcaccatgtaagtattttcattttttcatctctaaccctattgatttgagaccagatgctgccaccagcagcctttgaatgttg

SEQ ID NO: 762089 - DNA, 533 bp, Homo sapiens
aagctataatcacaccactggactccagcctgggcggcagagtgagaccctgtctcaaaaaacaaaacaaaacaaaaaaagtattttcctcacgatatttattatttacaaaatgaaaaatcgtgacattacagtggagaaacctggcagacaccaccgtaaccagggaatcaaatttcacgccactagtaataagatagattggtatcatattgtcccatttgatgctctgagaagggcatatcactttgaagggggcctgcccctccacrcctgtgggtatttctcgaaaggtggagatgagagactgagaaaagaaataagatacagagagacaaagtatagaggaagaaaagtgggcccaggggaccggcactcagcatatggaggacctgcaccggcactggtctctgagttccctcagtatttattgatcactatctctaccatctcagcgagggggatgtggcaggactatagggtaatggtggggagagggtcagcaggaaaacatgtgagcaaaggactctgtg

SEQ ID NO: 762090 - DNA, 623 bp, Homo sapiens
atgtaaaggcccagaggaaagtgagagcacagtttagccaataaactgaaaggaatcaatataagcagatgctcaagtataaaggaaggtgacagataaggccaaataagtagactagatcccagtgggtaggggctgagargagagttaaccaggtaatcttgagggcaacagggaaccataaaaagggctaagcaaggatatggcattttagaaagattccttagtagtaaggagaatggactggaaggtaaaaaccaagaggcaagaagaccagtagaagctactataataataacagtgaaagcagacagtggttctaaactacaataatatctcaataaagatgaagaagtatagctgactttgaaagaaatataattaccataagatttgatgactgatttgacataggagagtgagagagagaatggaatctaggatgatgtccagttcagacaatgaagtgggaataaaggaaagagaatgtttaattgtgggaggagtatcataggaaataggagttccattttcaggctgatgtgcttatgggcccaagttgcaaataggcagacagatttatataccgttttgaagctcgggacagaaatcagggctggaag

SEQ ID NO: 762091 - DNA, 569 bp, Homo sapiens
accgattttgcttccacctctgaaattctaccatttaaccagaaatttcagcatactgtgacatagtgtgacaaactggtcccattctgagaacccaggatctccatgatttctagtatctttttacataatactatttgtttaatcatgtaagtaggacagatatcctacatgttcatgttaatatcttgtctttttttttgagacagggtctcgctgtgtcacccaggctggggtgcagtggtgcaatcgtggctcactgtagccttgacttcccaggctcaagtgatcctcccaccttaagttccctagtagttgcggctataggcatgtgccaccatgcctaatkgtttctttagttttagtagatacaaggtcttactatgtttcccaggctggtctccaactcctgaactcaagtgatcctcctgccttggcctcccatagtgctgggattatgggcgtgagccaccatgcccagccatattaaacaaaattaacaaggatgaaataaaacaagatctattaagctctataatttatccatcaagatattttgatttgcggaa

SEQ ID NO: 762092 - DNA, 593 bp, Homo sapiens
ctccataaatgtctgttaaacacaaaaaataggaaaaagagttaaatattgtatttttactcttatgggggcaaaggaagagctaggatgggtactttacggcctgtggtggcaggaaaggctgtgtggaggctggtgcctgagttgagttactgagggatgtagtttggatatttgtcccctccaaatctcatgttgaaatgtgatttccaatgctggaggtggggtctaacgggatgtgattgagttatgggggcaaattcctcatgaatggccttsgtgccctccccatggtaatgagtgagttcttgctgttagttcacatgagaactggctgtttaaaaggagcctgctatctcctcctctttctctctctccctctcttgccatgtaacacgctggctcccctttgccttccaccatgattctaagcttcctgaagccctcaccagaagcagatattggcaccatgcttcccgtacagcctgcagaaccgtaagccaaaataaacctattttctttataaattacccagtctcaggaattcctttatagcaatgcaaacggactgacacactgagcaatgaagaaac

SEQ ID NO: 762093 - DNA, 609 bp, Homo sapiens
ctctgtatttctgtgtgtgtgtctttaattcctctagcgctgctgggttagtgtctccacaaccgagctggtcttggcaagtggtgcccatacgtggagtctcgaacccaggtcaaagggtcactggagcgacggttggagaatgtggaactaagctggaggacacctgagtactcataagcaatccctgtggtgaggggagcttggaagcatcagggtaacaatgggacaagtgtgggctctggcttgttctacgttggaaccttttcacactaataataaaaggaaggaaagtataatgaaataacagaagagatgacagagcaggtttgtttgccagctaaagctaaagcagcaaaggaggaagaggttcatccctacccttctgcaccccctmcttattttgaagaaaaagagtggcctgaccctccagagctttcttttccggaggacactgggctgtctaagccatttgagctccttgtgggaggggtagcagccaacactgggactgatagctgcctaagatcccagggtggggaaagggcggcagccatctcttcagcttcaggccatgcttttcccctgctggagccagggaggctagac

SEQ ID NO: 762094 - DNA, 645 bp, Homo sapiens
acaaaatttcaactgtgtttttgctgtgacctgtcctatgaggtcaggtttagaatttttcacttgtggtgtctgtcatgttggtgctcaaaaagtttcagatttgaagcatttcagatttttgatttttagtttaagaaatctcaacctgcactagagcccagtttgtaatcagaacattctatattgaagtgaccaacaacactgaccactggatagaagtaaatgttctagagctatatatgtgtcacttagcaatggggacacattctgagaaatgtgtcgttaggtgatttcatcattgtgctaacatcatagagtgtacttacacaaacctagaggggatagkctattaaactcctaggctatatggtatagcctattactcctgagctacaaacctgtatagcatgttactgtacctaatattgtagataattataacacaaaggtaagcatttgtatatataaacatagaaaatgtacagtaaaaacacagtattgtaatcttgtggtaccactatcatatatatgcaccattgttgaccaaagtgcatgcattatgctgtgctatatgtggtgaatggaattttcctagagaattgaatacacttctagatacaagtggtatcaggaacaaggcat

SEQ ID NO: 762095 - DNA, 601 bp, Homo sapiens
taattgtcagattcaccaaagttgaaatgaaggaaaaaatgttaagggcagccagagagaaaggtcgggttaccctcaaagggaagcccatcagactaacagcagatcgctcggcagaaactctacaagccggaagagagtgggggccaatattcaacattcttaaagaaaagaattttcaacccagaatttcatatccagccaaactaagcttcataagtgaaggagaaataaaatactttacagacaagcaaatgctgagagattttgtcaccaccaggcctgccctaaaagagctcctgaaggaagtgctaaacatggaaaggaacaaccagtaccagccactgcaaaaacatgccaaattgtaaagaccatcgatgctaggaagaaactgaaacaactaacgagcaaaataaccagctaacatcataatgacaggatcayattcacacataatattaaccttaaacgtaaatgggctaaatgctctaattaaaagacacagactggcaaattggataaagactcaagacccatcagtgtgctgtattcaagagacccatctcatgtgcagagacacacacaggctcaaaataaaggg

SEQ ID NO: 762096 - DNA, 707 bp, Homo sapiens
ggcataccgataaacactgcttttctagagcttattttcaacccaaacccacctttttttctagttggtggagatgatctattttcaatggtatagtgattttttaaaaaatatattagatttgcttcgataaggacaatctgggaggggtggcagggaagacagttcttttaagcatcatcagagaaaatcacagctaaataataaggcttataaaaaccatttctccaaaaattaatctgcaatcgctgtatactagaaaatatatttactgctgtggaagtttagtaaaatttcaacacatataaacgctgtcattacaaacagtgactatgtgcaaatttcagccctcattaatatggttaaatgatgtagaaaaagagccaattaaaaaggtaaaaaggatttttcccctcagatagttctgaaaaatcaattccaggataaatgcagtttaaactgtgtcagaggtatcttttcaagataaaatctrtgcaaaaagggacagaggaaacaggaagataaaatctgggtagtggttgttaaaatggccttgagaattgaggaaaatggcagtttctaccatcaagggcttcggccaataccgagtacaatgctgcattcttatatctcgcaattatgatcatatatttaatacatgttatgtgtgtatatatattacaataattatataaattgatatttta

SEQ ID NO: 762097 - DNA, 668 bp, Homo sapiens
acattattcagatggagggcattttgaaatagcagacaacgtatttcccagaaaagcagaagccagaacaccaaccttggaatactattttgatgtgatgccaagtggtattgatctgccactattcccttttcactcttccctcattcgtgaactctgcaggtgattctttcttacagcagtagaaagtggttgtgaattttagaagataagaatcccaaaggtgcaatggatactaagtcacactccagaggagaatcaacagggtaataaaatacattttaagtgtcttcttccaaaataaacaggtaaagggttgtgttagttgtttgacatgtctgttaatattggagtcatatataaatcacacaaaaaattaagctcatttctggagattttccagagctggttgtggattttgattctgcctttaagcactacaaggcccttgggaaagttaattttgctttcagagcatcagtgaattttcactaaaatgagacgaatcacacctacctcygaagtttgctcttaggatgaaatgagaaaataaacataaaactccccacttggtacctagcacataacatgtattcaataaatgttgtcatactgttttaataagtatagttttcaaaattaaaatactgtaaacatttcacactaaa

SEQ ID NO: 762098 - DNA, 601 bp, Homo sapiens
gattagtcctggcttttgacccctctctcatcacttaaggagaagttgttaaaaatttgccagctggggagcggggagggcttaagaagtctatgtatcccattaagtttcatgttgtcctatagaatccaccagatgaacttgcctgyctttttgaaatgccttctccataatgtatgacatgttgctgaggttacaaacttattctgaaagtaacttagtgtccgatcaggcaggtatcctcagcatttgactcacttttagctcaacagtctttttaattgctcttgatattccaattgcttacttaatctcttttagcccttcaagattctgtctctttgttatttttgttctcctcttgtccagatgataaaagtctagaatcttagcaaaggtatcatcatgaataccttctcccctcactctctgactcttttttttcctttgtttaaatcattccccagcaaagcagtgatacctcaaaaatagtggtgttttggccctaagtgaatgttttccaagctgtaactagtgttcaacttgtgacagaataccaatccatgttttgttgtatcttgtttggccattcccctgttca

SEQ ID NO: 762099 - DNA, 586 bp, Homo sapiens
tctttgaagacgaatatcatttttagaacaaaaaagattgtaaaataattatgtcatcagaattcaatgataattcacaggaaaacaggacactgattgtgttggtcaaacagcccatgcgcacggtaagccgagtgtgactttgtttatcaaatgctcatgtggcgagaccgatctctggactctgtcctgggttcccgggctccacccaggctgcatctcccatccccccggtgcacacgctgtgttgctgcatctcccaacccccggtgcacacgctgtgttgctgcatctcmcatcccccggtgcacacgctgtgttgctgcatctcccatcccccggtgcacacgctgcgttgctgcatctcgcatccccccggtgcacaccctgtgttgctgcatctcgcatccccctggtgcacacgctgtgttgcagttcttgcctcgtaggagccgtccatggcagctggcaggtggaggatcctgccttttgagtactgtgttcctgggtcagtgcaaagtcaggtgcactggagcaggctcctatcagctaaacattcaggaagtttgagaggctgatgttaagg

SEQ ID NO: 762100 - DNA, 586 bp, Homo sapiens
tctttgaagacgaatatcatttttagaacaaaaaagattgtaaaataattatgtcatcagaattcaatgataattcacaggaaaacaggacactgattgtgttggtcaaacagcccatgcgcacggtaagccgagtgtgactttgtttatcaaatgctcatgtggcgagaccgatctctggactctgtcctgggttcccgggctccacccaggctgcatctcccatccccccggtgcacacgctgtgttgctgcatctcccaacccccggtgcacacgctgtgttgctgcatctcacatcccccggtgcacacgctgygttgctgcatctcccatcccccggtgcacacgctgcgttgctgcatctcgcatccccccggtgcacaccctgtgttgctgcatctcgcatccccctggtgcacacgctgtgttgcagttcttgcctcgtaggagccgtccatggcagctggcaggtggaggatcctgccttttgagtactgtgttcctgggtcagtgcaaagtcaggtgcactggagcaggctcctatcagctaaacattcaggaagtttgagaggctgatgttaagg

SEQ ID NO: 762101 - DNA, 586 bp, Homo sapiens
tctttgaagacgaatatcatttttagaacaaaaaagattgtaaaataattatgtcatcagaattcaatgataattcacaggaaaacaggacactgattgtgttggtcaaacagcccatgcgcacggtaagccgagtgtgactttgtttatcaaatgctcatgtggcgagaccgatctctggactctgtcctgggttcccgggctccacccaggctgcatctcccatccccccggtgcacacgctgtgttgctgcatctcccaacccccggtgcacacgctgtgttgctgcatctcacatcccccggtgcacacgctgtgttgctgcatctcccatcccccggtgcacacgctgygttgctgcatctcgcatccccccggtgcacaccctgtgttgctgcatctcgcatccccctggtgcacacgctgtgttgcagttcttgcctcgtaggagccgtccatggcagctggcaggtggaggatcctgccttttgagtactgtgttcctgggtcagtgcaaagtcaggtgcactggagcaggctcctatcagctaaacattcaggaagtttgagaggctgatgttaagg

SEQ ID NO: 762102 - DNA, 586 bp, Homo sapiens
tctttgaagacgaatatcatttttagaacaaaaaagattgtaaaataattatgtcatcagaattcaatgataattcacaggaaaacaggacactgattgtgttggtcaaacagcccatgcgcacggtaagccgagtgtgactttgtttatcaaatgctcatgtggcgagaccgatctctggactctgtcctgggttcccgggctccacccaggctgcatctcccatccccccggtgcacacgctgtgttgctgcatctcccaacccccggtgcacacgctgtgttgctgcatctcacatcccccggtgcacacgctgtgttgctgcatctcccatcccccggtgcacacgctgcgttgctgcatctcgcatccccccggtgcacacsctgtgttgctgcatctcgcatccccctggtgcacacgctgtgttgcagttcttgcctcgtaggagccgtccatggcagctggcaggtggaggatcctgccttttgagtactgtgttcctgggtcagtgcaaagtcaggtgcactggagcaggctcctatcagctaaacattcaggaagtttgagaggctgatgttaagg

SEQ ID NO: 762103 - DNA, 593 bp, Homo sapiens
tccctggagcctcctgggggtgggcggtgcacgcctcctgcatctgtgcagagctaactgcacaaggtgggccagggggcttagagccagtgccttccggaacagagcaacacacccgtctcccaggtgagacaggtcactcccaatgcagctcctcagaagccatgccaggagccagccttgctgcagccggattcaggacgtcatggcgttttctgcctggataacaggccgctgcgtgtgcatcacacttggctcatctgttcccctgttggacgctcgggtcgctcccacctttcggctgctgtgaatggwgctgctgtgaacacggggtgcaagcatctgtctgcacctccatttggatgctcggctcgctcccacctgtcggctgttgtgaatggtgctgctgtgaacacggggtgcaagcctctgcacctctattttccattgtttggggtgcacacctaggaggggaattactggatcatatggtaactgtatacttaattctgaggtgttgccaagctgtttgacagtggcagctccattttctgctcccatcaacaatgtgtgaggtcaccaacttctccaca

SEQ ID NO: 762104 - DNA, 646 bp, Homo sapiens
acatgtgattttatgcccttaaagtatttaagaaacagaaagtcaagtgtttcaccaatttccgtaggaagggccgctcactgcacggtggggcgatgctgggcgcgagccgtgtttccgtctattgttgacttcctcacgatgctggctcaggctcagagcctctcatcaccgcctgtgaaatggggaccaccctcctaatctactatccagacctrccttctggaagctcaattatcacgagcacatggtggaaaacgtgggccggtgaaaacaacttaacatgtaaatgtacataataaaattccaggcacaatacatatgaacgcttttagagaactttgggagcaaagcaactgatgtcctgcgtggaaagtcctcttctccccatgaaattatctcaaggatcttccatgggaagatgtgacagaaccaggacactactgcttaatatttaatatcagatactcttaaatcacaggagcataactaaagtattcttcgtttctttagtcaaatctccttttctataaaatggagacggctttcatatgtttgggaaacattttaataacgaattaataaacattttaatatcaaaactaaagtgtttttcttatatggagtacagataaagttatacata

SEQ ID NO: 762105 - DNA, 646 bp, Homo sapiens
acatgtgattttatgcccttaaagtatttaagaaacagaaagtcaagtgtttcaccaatttccgtaggaagggccgctcactgcacggtggggcgatgctgggcgcgagccgtgtttccgtctattgttgacttcctcacgatgctggctcaggctcagagcctctcatcaccgcctgtgaaatggggaccaccctcctaatctactatccagacctgccttctggaagctcaattatcacgagcacatggtggaaaacgtgggccggtgaaaacaacttaacatgtaaatgtacataataaaattccaggcacaatacatatgaacgcttttagagaactttgggagcaaagcaactgatgtcctgcgtggaaagtcctcttctccccatgaaattatctcaaggatcttccatgggaagatgtgacagaaccaggacactactgcttaatatttaatatcagatactcttaaatcacargagcataactaaagtattcttcgtttctttagtcaaatctccttttctataaaatggagacggctttcatatgtttgggaaacattttaataacgaattaataaacattttaatatcaaaactaaagtgtttttcttatatggagtacagataaagttatacata

SEQ ID NO: 762106 - DNA, 460 bp, Homo sapiens
cacacacatgcacacagttacacaccactcgcacatgtacacatgtgcgcaccacacacatgcagttacgcaccactcacacatgtaaacatgcacacaccacacctgcacaatgccgattgtgctgttctggggggcagttggctccaggggcttctggaaacctytgtacagtagcaggaccctggatctatgtgaattcgtacctggagttctagtacacgcagacggcaggtggaggggagtggggccggtcccctgggctccacagaccctgcagctggattgtgtcgcatggaagagccgtgagaacccaaagtgcttcatgtgcactttttgctgccccaggaagtgagtggcagcgcctgtatccagtctcactaaggactggtggcttctcatctatagtgggggcttgaggttggcagcacagacaagccctggccccctctccccagcc

SEQ ID NO: 762107 - DNA, 582 bp, Homo sapiens
tttgtgcctttttgccattgaatagtgttccatgacatggataaaccactgtatgtttaatcatttacctattgaaagacatctgggttattttctgtttttgactattacaaataaaatttctattaatatttacacacaggtttttgcattaacgtagatttccttttctctcaaaaaagtttccaaagtctaactagttatataagaaattgctgtgtactaatccacagtggttgtatctgtatattagtattagtggttaaatcatttcatattctcatcagcaatatatgagcaatgtagygtctccatatttgtcatttgattttgtaatttttaaaatattacctttctaacatgtgcatagtgatatttcattggtattttaacttgcatttccctaatggttaatgatgtcgatcaattttatcatcttaggttaaatgtctatttatgacctttactcatattctaattgaatattttggtattttttacaactgaattttgagagctctttatagattctagacactagttcttttttggatacatgatttgcaaatatgttacccttct

SEQ ID NO: 762108 - DNA, 649 bp, Homo sapiens
tgttgatttcctcatgtgtaaaatcaggaggttgggcaatggtgatatctgatggccctttcagctctaatattctatatgtctataacactagattgaaaattttaaattctgagccagaactccaagcccaggtgtttyctcatatgagggtttttctctttgtggaagatataagaagttatatcttcttcaactgtcaatttaccatcttcagatccctttctccatcaatgaacctagaaagaaaaggaatgtgtcaaagtcattgcatacaattttttttttcattatttaacagaaatttgaatgccagttgtgtgccaagcacaatgctagatccaggggactcagcaattgaaacgttagccatggtcttaaacctcatggagctcacagtcttgagtcaaatcaagcatggtatgcaagggaagcagaagatgccatacagaagacaggaagggcacctctcccagtctcaaaatatcaaggaaagcatttgggaggcagaatgttgcagacaagggggaccagcatctgcaaagactgaaaggcaatagagaaaatgacacactctagaaacgaaagacatcctggaagaacagggctaagaatgtgaagggaatatggtcacggatgagacaggaga

SEQ ID NO: 762109 - DNA, 649 bp, Homo sapiens
tgttgatttcctcatgtgtaaaatcaggaggttgggcaatggtgatatctgatggccctttcagctctaatattctatatgtctataacactagattgaaaattttaaattctgagccagaactccaagcccaggtgtttcctcatatgagggtttttctctttgtggaagatataagaagttatatcttcttcaactgtcaatttaccatcttcagatccctttctccatcaatgaacctagaaagaaaaggaatgtgtcaaagtcattgcatacaattttttttttcattatttaacagaaatttgaatgccagttgtgtgccaagcacaatgctagatccagggractcagcaattgaaacgttagccatggtcttaaacctcatggagctcacagtcttgagtcaaatcaagcatggtatgcaagggaagcagaagatgccatacagaagacaggaagggcacctctcccagtctcaaaatatcaaggaaagcatttgggaggcagaatgttgcagacaagggggaccagcatctgcaaagactgaaaggcaatagagaaaatgacacactctagaaacgaaagacatcctggaagaacagggctaagaatgtgaagggaatatggtcacggatgagacaggaga

SEQ ID NO: 762110 - DNA, 499 bp, Homo sapiens
ctgagcccccttaccctgcagcctcacagagctgccccttgtgtctcctgtacctcgtggggggtgcagcccacccctctcatttgcccctgcagcccgggggccctgcacacagccatagccacgtgctgcatgggaagcaagagtccattgaaggtccccttgcctaacctcccatccttccgaggaaaagcccgtctggctgttatcgccccagtttatgagtccggcctgcttttgaacatctccccagtggatggactcacgatgggtgcgttttgcagagggagacaggaagaccctgcacagcaccgcagtgtcacagcccttggggaatctgccctcrtggcgaggaggccgcaggagcatcagtgggtggtgctggaggcggtggggccagtgccacgtgtgagcagtgactgcttgggaagaactaaagatgtgagccaggagtcgggatggagaacgagccctctgatcagcgaccagcatggagccc

SEQ ID NO: 762111 - DNA, 624 bp, Homo sapiens
cagcttccaacctgcccaggagtgatccctgattggaagggatgtgtgtgtgtatgtgtagctcttcccttcctctcccataccatgggggctggcctggagagtgtgccttggtcttccttcccactgtgctactgtgctgtgggagctgatttggggagggggttgcagtcgccttcagagctggcagcttgttggggtgtctgtacaattcgggagccccattgaggccacacagctggcttggtgggtctcctascttttatcagggatacctacctgactcctgtctttctcaattgatctttcaaatgttgggtcagggaaaagggattgtattggcctcttaaaacctcaacatgaaaaaaaccaaaaactcaaatgtaaattatctgtttggagtacacagagggaaatcttgtttctgacccagaacctttgtctgagcccagaggtccctgagaaggtggggctggtgcagggtgatgctggttggttggttgagggggtagagcttcttggggtagagctttttttggggttgaggttatttgggcctaaggccatgtattcattctcatgctgctaataagaacatacccaagagtgggtagtttataaagg

SEQ ID NO: 762112 - DNA, 624 bp, Homo sapiens
cagcttccaacctgcccaggagtgatccctgattggaagggatgtgtgtgtgtatgtgtagctcttcccttcctctcccataccatgggggctggcctggagagtgtgccttggtcttccttcccactgtgctactgtgctgtgggagctgatttggggagggggttgcagtcgccttcagagctggcagcttgttggggtgtctgtacaattcgggagccccattgaggccacacagctggcttggtgggtctcctagcttttatcagggatacctacctgactcctgtctttctcaattgatctttcaaatgttgggtcagggaaaagggattgtattggcctcttaaaacctcaacatgaaaaaaaccaaaaactcaaatgtaaattatctgtttggagtacacagagggaaatcttgtttctgacccagaacctttgtctgagcccaraggtccctgagaaggtggggctggtgcagggtgatgctggttggttggttgagggggtagagcttcttggggtagagctttttttggggttgaggttatttgggcctaaggccatgtattcattctcatgctgctaataagaacatacccaagagtgggtagtttataaagg

SEQ ID NO: 762113 - DNA, 589 bp, Homo sapiens
ggaagaaaggacgcaagaccctggacacatgctgacgtacaaaaccccaagtcaaaacgtcagaccacgcacttgatctttcaagtcacccgcttggccttcttccaagtgtacgttccttcctttcattcctgctctaaagcttttgartaaactttcactcctgctctaaaacttgcctcagtttctccctctgccttatgcccctcagtcgaattctttcttctgaggaggcaagaattgaggttgctgcagaactgtacagatttgcggccggtaagagaagcaaacaaaacagaatgctgacaaaccagaaacctcctaggaaatccgaaacgagagagaaaagacaaagacatcctttatttgataaagagtaacacaaaaggaagaggaggaggaaggggaggggaaaaggtgctgaggagaaggagaaaaagcaaacactgagtttcatgacgaaactttagagtcacgaaacgataaggacatcaggaactttctagaatactgctatcatagtgccttcctgatacttttctgcgggtgctggccaattcaatgtaaggaacagaactgacagaatgtg

SEQ ID NO: 762114 - DNA, 589 bp, Homo sapiens
ggaagaaaggacgcaagaccctggacacatgctgacgtacaaaaccccaagtcaaaacgtcagaccacgcacttgatctttcaagtcacccgcttggccttcttccaagtgtacgttccttcctttcattcctgctctaaagcttttgaataaactttcactcctgctctaaaacttgcctcagtttctccctctgccttatgcccctcagtcgaattctttcttctgaggaggcaagaattgaggttgctgcagaactgtacagatttgcggccggtaagagaagcaaacaaaacagaaygctgacaaaccagaaacctcctaggaaatccgaaacgagagagaaaagacaaagacatcctttatttgataaagagtaacacaaaaggaagaggaggaggaaggggaggggaaaaggtgctgaggagaaggagaaaaagcaaacactgagtttcatgacgaaactttagagtcacgaaacgataaggacatcaggaactttctagaatactgctatcatagtgccttcctgatacttttctgcgggtgctggccaattcaatgtaaggaacagaactgacagaatgtg

SEQ ID NO: 762115 - DNA, 658 bp, Homo sapiens
tgtttcttgtatgtattctttcagaaaaccttaagaaggaaaagtctgggccacagagaaaacagggaggtgaagaaagattctcaaatatttttctttagaagtcaagagtttgctctaatcagtttcaagaaacagcaacaacagaacccaaaggccatgatgaatctgttatgtcctctctccctcgtccctcctcctccttccttccctcccactctccttcttttggacacaatcagctccaaatggaataaacaaggaaaatgatgcttaggtgggttccacaaacactgacgtgctgatcaccatgaatgtgctggaaatacaggatgcacaaggtctccaggagttcatgcctattggacttggcaagtggaygaggtgggtgttaaagaaggaacaatcttagtagctgcaagtgagatggagcacacatatttggatggagtgggttgagccacttaaacatggcgggttgggattcaagcacagagagcccttgggttctctaccaggacagtcatcttcttgctcctcttatcacctccttcaggcaaaattgttccctttcttcatgctctgccctgccacagacctttctctaacacctgaaaatgactggtcttgcctttagtcttttttagtccttatcacg

SEQ ID NO: 762116 - DNA, 656 bp, Homo sapiens
atggaatggggttgaatgagccatgtagggagatgggggcttcaatggagggaggggcttctgctcatccttattttgacttggatgcctcccttgaaatcaacagattgtaccaaagcagtggcttctgctcagagtgaagggtggaattcggccacacagggtaccacacaaagggaccatccctgctgatcagaggctggaaggcatyagttgggagtctgggaggagaacaggggacagctgtgaggatgccaggccccaagctgttaaggaaccaagacacacagggtctgagcctgtgccaagcctcctaggagtggccagggtaggcatgaaagcaaaatgagccacccagtctcaggaccaccaactactcctgtttatttgggactttccaggtgacagcactaaagtcttacatcccagggttttcctgggactgtctgaattttaaaactgagagtcctacattccagaaacccccttagtgctggacaaaccaagatggttggtcaccctgccaggtccccacccagagaagggcaaccaggtcataaaggtaccggcaaggacgtggtactgtttttagaggagcctagtcaacctgccctgggaggagacccagagctgctcccactagcccccctggctcc

SEQ ID NO: 762117 - DNA, 583 bp, Homo sapiens
gctttagctaccttgtcagcagaagtgttgccctgagcgatgggatctgatgccttttgatggcccttgcagtgaatgactccagcttcctttggaagtaaagcagccttgagaagagtttttattaaagaggcattaatgatggaggacccttgcgtagtgaggaaacttctttttgcctatataacagcatggtggtgcaggatatggaaggcatatttagagtcagtataaatattgacatgtagtcttttgcaagagtgagggctcgagtcaaggcaatgagttcagcttgctgagaggtggtggaagggggcasaaagtatatgcgtcaggtgtgaggaagaaaatagattttgcaagttttgagaactgtagagagtgagttgagcatagttttttattttgagggcctctaaaagtattaaagcagcggcagccgccgcacgcagacatgagagctaagctaaaacactaaggtcaagttgtttggacaaaaaggctacagggcgtggtcccggctcttgtgtaagaactctgaccgcacagccctgcactttggctgtgtgtaatgaaaagggag

SEQ ID NO: 762118 - DNA, 733 bp, Homo sapiens
tgcttgaaccaagacttctccagggatccaaaagtagatgtttatgcaccttctatttacgacattggcaccaaccagccaattacagcagtggagataaggccatgaaatacagacataacttctggggtctactgctagaaattaaaagatagttcctaaagaatggggaactgctttaagttgagaaaccaatgcaaaagtatattttaaacgatttctgaaaaaatacactccatgcccatattacagaaattctcggtattatcctaatwaaaaatctggaatagtctgtgagacagattcaactgcagtgtagtatataataaaaatagagtacctggttttaaataccatatatactgtgataataattagattcctatctccagaccagatattccctctgagtaaacagactcacagtgaacttccaacttcatatcctatgtgagtatctcaaagtcctaacatgtccagaaaatccttatgcctaccctactctttctcatactatgtttgttgctcaaacaaaaacccagaaatctatcctggatttctcaatttctgtcagcccccatactgcatccaaacttgttaattctggttccaaaatatatttcaaattcttacttctatccccagtgttaccacggtagtagagacaactatatgccatttggattaccataacaacattttccaattaacccaacttgcacttatttttttt

SEQ ID NO: 762119 - DNA, 624 bp, Homo sapiens
ataaagcaattttaaataataaatttttactttcaacttttattttagatacaggggggtacatatacaggcctgttacatggttatttatattgcacccaggtagtgagcacagtacccaataggtagttttgtaacccatgcccccatgccctctgtagtagtctgcagtgtccactgttctcatatttatgtccctgagtatccaacgttccatacgaaatttagaatagcctttttttaattctgtgaagaattacattggtagtttaatagygatagcattgaacctgtagattgcactgggcagtgtggccattttaacgatattaattcttccaattcatgagaatagagtgttttctatttgtatcatctccaatttctttcagtagtgttttttaatattccttatagagatctttcacctccttggttagatgtattcccaggtatttcattttttgtgtggctattatgaatgagattgtgttcttcatttgattctcagtctaggcattattggtgtatagaaatgctactgatttttgtacactgatttcatatcctgaaaccttgctaaaattgttcatcagttcttgcagccttttggtggagtcttta

SEQ ID NO: 762120 - DNA, 587 bp, Homo sapiens
aaagtctgttttatctgatataaatgtagctattcctactcacttttggcttccatttgaatggagtatctttttccacttcttcaccttcagcctacaagtgtcctttccagataggtgggtttcttgtaagcagcatctggttgtgtcatgttttttacaaatctgttctgccaatgtttgtcttttaaatggagtatttaaggcatttatggtcaagattaatattgatatgtagggtttcttcttgtcataatgtttactgttacctagttactttgcagtctcatttgtctaattattttrtaagatctatgagttttatacttttgtgtgcttttatgatggtgagtatcaatctttcgtttccatgtttagaattccctggagtatttcttataggactggtttagtggtgatgaattccgttagcactttcctgtttgggaaacgactattctctttcatttatgaagcttatactagtaaaataacaaattcatggttgacagttttgtttttaagtccgaaaatgggaccccacttttttcttgcttacacagtttctgctgggaagtctgctttta

SEQ ID NO: 762121 - DNA, 594 bp, Homo sapiens
tttaagaggtaaattattgctgatactctataattcagatgtgtgtccctataagaatcatactttatattataaggaaatacctttcaaaacttagcttcatctgttttcatattcagtataattcacaactaccattgtcagcaaaaatctacattttctgaatgtagattactcttcttctttgtaaaacaatttgtaataaatacttcatgataaactaataatcacagttaaaaattactacatgaagaagraagctacatgtgttctagttccctagacaacaacagtaatgagtcatggctcactttagtataaaaacttaatgattatagacctatttacagacaattattcacagagaaagtaaatgagcatatattattagttgagaggaataactgcagtctcacacaaagaattgttatcagataaatcttttagtgaaaagaagaaacaaacaggtcataaaagaaagccttttgtttaagtcagatttttagttttgtaggaaaaaagtcaggtttaaaggtcaagtctcaagaaattttgaacatgcaggaagactgagtgagaaaaactgaaatttca

SEQ ID NO: 762122 - DNA, 614 bp, Homo sapiens
cacacaaagaattgttatcagataaatcttttagtgaaaagaagaaacaaacaggtcataaaagaaagccttttgtttaagtcagatttttagttttgtaggaaaaaagtcaggtttaaaggtcaagtctcaagaaattttgaacatgcaggaagactgagtgagaaaaactgaaatttcaatatgtaaaactgctttttaaagtatttaatatagagaataaagaacatcaagcacctaaattgggattcattttgttgagccatccaaatgctaatcccttcactgtcrgcaaccaacaagtgtgtattatgtttttcaacaatgaaagaataagcttaaagcacaggcattgttttcctttgctgctctattttattttaagcaatttatttcttcatgataccaactttagttgtttgtaatgctaatgagagagattaacaaatgttttatggaaagagaatactacttgaccattttatggtagattataacacataaatgggtccaagcaagcagcatattctgtagttaagtatgctctaaaatttattaaattgagaaagaggggataaaatagtgtttcttataaaaacatcatagggagacaa

SEQ ID NO: 762123 - DNA, 614 bp, Homo sapiens
cacacaaagaattgttatcagataaatcttttagtgaaaagaagaaacaaacaggtcataaaagaaagccttttgtttaagtcagatttttagttttgtaggaaaaaagtcaggtttaaaggtcaagtctcaagaaattttgaacatgcaggaagactgagtgagaaaaactgaaatttcaatatgtaaaactgctttttaaagtatttaatatagagaataaagaacatcaagcacctaaattgggattcattttgttgagccatccaaatgctaatcccttcactgtcagcaaccaacaagtgtgtattatgtttttcaacaatgaaagaataagcttaaagcacaggcattgttttcctttgctgctctattttattttaagcaatttatttcttcatgataccaactttagttgtttgtaatgctaatgagagagattaacaaatgttttatgraaagagaatactacttgaccattttatggtagattataacacataaatgggtccaagcaagcagcatattctgtagttaagtatgctctaaaatttattaaattgagaaagaggggataaaatagtgtttcttataaaaacatcatagggagacaa

SEQ ID NO: 762124 - DNA, 449 bp, Homo sapiens
gattataataaaacatttttaagtctatgttttgctacagggtaaaaaattgcaattttttgctcaggatataaaatgtgcacaaagcaagtattatctcaagtaaagacttatctatcactagcacagctaagtaagttgtgatccctgctcaagcactcagtcatgcagcatatttggccttattttttgaagatgtatatctgagcatgttactccccagttcaaaatgcctctcttgcttccattacttgtagagtaggtccaacttttcttaccaccgcatttcatgtctttcatgatwtattattttcattcagcaatatttattaagtgcctgctgaatgataggcactgtactaatttgaggacatacaaagatgaataaaacaaaagttctgccctgaagggactcacagtctagtgggaaagacagacaaagcaacagt

SEQ ID NO: 762125 - DNA, 623 bp, Homo sapiens
  misc_feature 603, 604, 605, 606, 607, 608, 609, 610, 611, 612, 613, 614,615, 616, 617, 618, 619, 620, 621, 622, 623: n = A,T,C or G
gaccaacagcagacttctcaacagctacaacaaaggccagaaggcagtgcagtagtgtaacatactacatgctagacattgttctaagtattcagtatacattaatgaaaaacagatataaattttggcttgcatgaaacttaattctaggtaaagaagagagagataaacataatacaataagtatagggtatgtgagaaagagataagtactgtggggtggagggaaaaacagggtaagcagaattaagagtgctagtgagaaaggaggtgtactattaaataagggtcaaggtataaggctcattgggaatgtgacatatgagcaaagacttgaaagaggtgagggagttaaccatgtaaaaatctgaggaaagaacackgcaagcggatggagcagcccatcctgagcccagagtgcgtgtgttgtgttcagggagtagcaaggaagtgcatttagctagaactccatgattgaggagtaaagtagtaggaggtaaagtaaaagaggcagccctctcactccaacccaccaaaatctatatttttcaatactcaatactcacacaaacaaaaaaaacttcgtaagtcaactcagtgccnnnnnnnnnnnnnnnnnnnnn

SEQ ID NO: 762126 - DNA, 623 bp, Homo sapiens
  misc_feature 603, 604, 605, 606, 607, 608, 609, 610, 611, 612, 613, 614,615, 616, 617, 618, 619, 620, 621, 622, 623: n = A,T,C or G
gaccaacagcagacttctcaacagctacaacaaaggccagaaggcagtgcagtagtgtaacatactacatgctagacattgttctaagtattcagtatacattaatgaaaaacagatataaattttggcttgcatgaaacttaattctaggtaaagaagagagagataaacataatacaataagtatagggtatgtgagaaagagataagtactgtggggtggagggaaaaacagggtaagcagaattaagagtgctagtgagaaaggaggtgtactattaaataagggtcaaggtataaggctcattgggaatgtgacatatgagcaaagacttgaaagaggtgagggagttaaccatgtaaaaatctgaggaaagaacactgcaagcggatggagcagcccatcctgagcccagagtgcgtgtgttgtgttcarggagtagcaaggaagtgcatttagctagaactccatgattgaggagtaaagtagtaggaggtaaagtaaaagaggcagccctctcactccaacccaccaaaatctatatttttcaatactcaatactcacacaaacaaaaaaaacttcgtaagtcaactcagtgccnnnnnnnnnnnnnnnnnnnnn

SEQ ID NO: 762127 - DNA, 569 bp, Homo sapiens
tcactggatccctagaaattttaccgaggtaacaggtgtccctgaattttagttagatttatttcccatcccctggcatgcaaatgtctcaccaataagtccagtgtgtttgctacttcttgctcactggatctaatcagcataatgtcatcaatgtcatggaccagtatgatatcttgcagaagcaaaaagcgatcaagatctctctgaataagattatgtggctcacacctgtaaccccarcagtttgggaggccgaggtgggtagatcacgaggtcaagagttcaagacaagcctggccaagatggtgaaaccccatctctactaaaaatacaaaaaattagcagagcgtggtggcacacgcctgtaatcccagctacttgggaggctgaggcagaaaatttcttaaacctgggaggcagaggttgcagtgagctgagatcatgccactgtactccagcctgggtgacagagtgagactctgtctcaaaaaaaaaaaaaaaaaaaaatctgacacaaagccagagagttgttatacccctgaggtagaatgataaagatatactgc

SEQ ID NO: 762128 - DNA, 666 bp, Homo sapiens
atcactggatccctagaaattttaccgaggtaacaggtgtccctgaattttagttagatttatttcccatcccctggcatgcaaatgtctcaccaataagtccagtgtgtttgctacttcttgctcactggatctaatcagcataatgtcatcaatgtcatggaccagtatgatatcttgcagaagcaaaaagcgatcaagatctctctgaataagattatgtggctcacacctgtaaccccagcagtttgggaggccgaggtgggtakatcacgaggtcaagagttcaagacaagcctggccaagatggtgaaaccccatctctactaaaaatacaaaaaattagcagagcgtggtggcacacgcctgtaatcccagctacttgggaggctgaggcagaaaatttcttaaacctgggaggcagaggttgcagtgagctgagatcatgccactgtactccagcctgggtgacagagtgagactctgtctcaaaaaaaaaaaaaaaaaaaaatctgacacaaagccagagagttgttatacccctgaggtagaatgataaagatatactgctggccttgccagctgaagacaaattgcttcttgtgggccttatggacagaatggagaaaaaggaatttgccaaaaccacttctggtacagcagctg

SEQ ID NO: 762129 - DNA, 666 bp, Homo sapiens
atcactggatccctagaaattttaccgaggtaacaggtgtccctgaattttagttagatttatttcccatcccctggcatgcaaatgtctcaccaataagtccagtgtgtttgctacttcttgctcactggatctaatcagcataatgtcatcaatgtcatggaccagtatgatatcttgcagaagcaaaaagcgatcaagatctctctgaataagattatgtggctcacacctgtaaccccagcagtttgggaggccgaggtgggtagatcacgaggtcaagagttcaagacaagcctggccaagatggtgaaaccccatctctactaaaaatacaaaaaattagcagrgcgtggtggcacacgcctgtaatcccagctacttgggaggctgaggcagaaaatttcttaaacctgggaggcagaggttgcagtgagctgagatcatgccactgtactccagcctgggtgacagagtgagactctgtctcaaaaaaaaaaaaaaaaaaaaatctgacacaaagccagagagttgttatacccctgaggtagaatgataaagatatactgctggccttgccagctgaagacaaattgcttcttgtgggccttatggacagaatggagaaaaaggaatttgccaaaaccacttctggtacagcagctg

SEQ ID NO: 762130 - DNA, 633 bp, Homo sapiens
ttgcaatctatcatatgagaaaaaaaattagtgtgcctgcttaaggcaggcagctctaaggtagcattcattcattgagcaaaatatacagtaaacactaactatgctagagagtaagggaagcaccagtgatgaagacatggyttctatattcctaaatcttaagagaaagactgtagaaatctaaaaaccacacacgcagcaaagtaatgtaattagtggatctggatttcagcctacctatgagtaataaacataagataaaatcctggtattttccataagttctgtccatccccctgcctatctcccactggttatgaggttgcaagctagataaatgaggactgatgatgtgtagtttaatattttaaaataagtttttaataaaaatgcattaatgttttctaaaattcacatatatgtcgtttctgtatcctcaggcaagcactgggttgaacatatactcaataaatggcttctatatttcacattgcatgcctgtatcaaaacatctcatgtaccccataaatacatacacctactatgcaccctcaaaagttttttaaatatacaaaatttaattaatagtttccaaataaattttattatttatgtaccaagtccctagaa

SEQ ID NO: 762131 - DNA, 554 bp, Homo sapiens
cttctctcaaataccatccttttgggggttagaatttcaatagctgaatcatgggagggagaaatattccatacattgcatctagcttcctgtcccacaagcattctagataaaatagtttctcaatacatttatttctacctgtactaattacaatagtttcataaatttacctgtcaatatccaaacrcaattttctttcatttcttcctgtttttcaagcctcaagaaaagttcaggtacccagtgtatatgtttacatttacatcttatatgtaatgtttaaggctttagagatttataaatctttaatttttatgctttgttaatttcttatcatttttaaaatgtttcctcattgctttccttgatgatgtaaatcattagtcttagactctgtgactgcttcccttaggtcaaggacatggaaactcccctaatattttaggaggaaatatggtttatgacaaatgaatatagatacctctgttttatttcttttactctttctggtgatgctcacagtcataatgacctcattgactacagaagaa

SEQ ID NO: 762132 - DNA, 615 bp, Homo sapiens
aaaatatctatcattgaataatcagcctaagaagaaagagcaaatatttagaaccctttggagaaatggccaaggaatcggcttagatacttaggattcacattcaagaatgatactgatggaatcaaacaaaaaggggccagtactttctgagctaattgtttagaactagattttcgctccagctgcaataaattggaagatggatgatgtgagcatttgtaatttgtaatttaaaacttcgcgaaccatgaaactttctggagactttggtcagtcagttgattyactagaaatgatgagaccaccaaaattcataaactgtctattttcccaccacatggcaatgaaatagaggagaaaaacatgcaaattgctcatttatggtttttttattttgctttcctaaattgcttctaagctcactgagtcgaatttctataacatctttaattatgatgaagtcttggcttaaaaaaagaaaagttgtttagttagaacttcataattggcaatgaaacatttaaccaaagtgccagctttcaaatttgttaaattttgtttttttatttgaactatgagaacagcatcatggtgatctgcagaatttgatat

SEQ ID NO: 762133 - DNA, 647 bp, Homo sapiens
tgctcatcctgtcaaccagcaccagttgttacctcatcccttacaaggcttttcttaatagctattaccactacttaaagttatatatttactttgtattctgtcttttctaccagaatttaactctatgagatagggtctctgtcttgttaactgcagtattctcattgtctggaaaaattccaaaacatatttgctgaataaatgattaaatcatataaaatttaacttggtaatgagcatttatataatctgattaaagtacaatttcttttactgcctcattagccttttgaataaacatcagcaaaacactatggtatacaggaccagctttttcactgtttctctaattaaccatgttgacctacttccagctccccctctgactcgattactaaccagccttcttacacgggagagttactttgcagagcatcatygatagaagtaattttttttaattacactttaaattctagggtgcatgtgcacaacgtgtaggtttgttacctaggtatacatgtgccatgttggtttgctgcacccatcaactcatcatttacattaggtatttctcctaatgctatccctcccccaatcccccagcccctgacaggccccggtgtgtgatgttccctgacctg

SEQ ID NO: 762134 - DNA, 647 bp, Homo sapiens
tgctcatcctgtcaaccagcaccagttgttacctcatcccttacaaggcttttcttaatagctattaccactacttaaagttatatatttactttgtattctgtcttttctaccagaatttaactctatgagatagggtctctgtcttgttaactgcagtattctcattgtctggaaaaattccaaaacatatttgctgaataaatgattaaatcatataaaatttaacttggtaatgagcatttatataatctgattaaagtacaatttcttttactgcctcattagccttttgaataaacatcagcaaaacactatggtatacaggaccagctttttcactgtttctctaattaaccatgttgacctacttccagctccccctctgactcgattactaaccagccttcttacacgggagagttactttgcagagcatcattgatagmagtaattttttttaattacactttaaattctagggtgcatgtgcacaacgtgtaggtttgttacctaggtatacatgtgccatgttggtttgctgcacccatcaactcatcatttacattaggtatttctcctaatgctatccctcccccaatcccccagcccctgacaggccccggtgtgtgatgttccctgacctg

SEQ ID NO: 762135 - DNA, 670 bp, Homo sapiens
  misc_feature 1, 2, 3, 4, 5, 6, 7, 8, 9, 10, 11, 12, 13, 14, 15, 16, 17,18, 19, 20, 21, 22, 23, 24: n = A,T,C or G
nnnnnnnnnnnnnnnnnnnnnnnnttttgtaaacaatacattttggttataaattcacactactaatttcatagcaaatgtataacacatgtaccaccatgaagtcaaggcatgctgtaatctgtaatcagactgctttgtgaatttactataacagaatgattagacactggatttaatcatgccatgtstgggatttggcattctatcaattgtagcccagctgccagtcctgccacagtgatagaaacttaccagtttttttgtaataaggcatgtctgcagctatgtcttttattatgatagagagagggagagagacagaggtagggagagagaaacaagtatgtacatcacctgcatttgcagagatggcatgactctcataattagaagcttttcttacatactttactacccaattgtgtctatttgagtagtaagcaccatgaacccaagaaatgggtgtccataaagtttttatgatcatactaattctaataaattcagatgaggatgcactaatactcaaaaagttcaaattgtgttatacttcagtatacagtagcttgctatttcattatgtactcaactttccaagttctcaagttttataagtgtgtgtgtgtgtgtgtgtaattatagaaatatgcttattataacaaatttt

SEQ ID NO: 762136 - DNA, 571 bp, Homo sapiens
tatgcctgttttcaacctcaccaaaattccaaactgggtaagttgcatcatattttctttctgaaaactaacttctagaatagcgatgccactaatggaataacagaaatgttgcaaaggaaaactgagtggaaaggaatattataattctgtttggaaattttagaatttccaatgacattacattatacaggtgaaggttgagatgacaatgtgattatcttactggtgttcctaaataggacaaacaatgcaagctgctataataagaaatctgaaaattttatagctttatatttttttaaaaaatgtattctttgtttaaatgcagtaattcttgttggcaagtacttcatgtaatttaggaggtatactctttacatctgtggctytgaccttgtccagtatttccattcagatgatgaataaagattaggatatttaaatatggtagagaagactttaagaagttggattttgaaatgacatataatcactcttgcctacattctattgtgcaaaactctagggaggctgggaaatatcatctacatttatgcccatgagtaaa

SEQ ID NO: 762137 - DNA, 350 bp, Homo sapiens
tgacacagtaacatcttaatttgggatgctataacaaagtttcatagagtgggtggcttataaataatagaaacttatttcttttagttttagaggctggacatctgatatcagggtgccagcatagtcaggttgtggtgagggcyttctttctgattgcagatgactgacttttcagtgtatcctcacatggaggaaagaatggagagagctctctgaggatctcttttataagggcactaatcccattcatgaggatttcattctcataacctaatcacctttcaaaggacccacccccgaatactgtcagtggaaggttagaatttcaacgtaagaattttggagag

SEQ ID NO: 762138 - DNA, 631 bp, Homo sapiens
accagaacttgcttcaaatgcatacaggaggcagtggtattataagatacatgaactatcaagaaatcctaccacatccttttatatttgtgttacttccctgtattagccaagcacttaattgtataacaagtagaaaacattatggcaagtcaatagatggagaaagaatggaaaaaaaaactttatattttagtattattgatgcttttcccacctgctttttaaataacgggccctacattttaaatttgcagtagacccttgaaattatgtagtcaacccttgaaccagtttacaaatggagaargttgagcatgtctaagcctatgtgaaagataaaaaatgattaatagtatgcctaggtaaccttagccagagcatgggtaaaccctgtttacttacatatttggacgcaggaaggtaggctgcacaacatatgtttatgtattcataacactttaagttccctaaatgtttctacttgagagaaagagaatctatgggataaaatattagttttattctgtgctgtaatcaattctccctcttcccacttttgggagtgctaaagtgagggattatttgagattttgttgtaatctgtagaaattttataacaaataactaa

SEQ ID NO: 762139 - DNA, 631 bp, Homo sapiens
accagaacttgcttcaaatgcatacaggaggcagtggtattataagatacatgaactatcaagaaatcctaccacatccttttatatttgtgttacttccctgtattagccaagcacttaattgtataacaagtagaaaacattatggcaagtcaatagatggagaaagaatggaaaaaaaaactttatattttagtattattgatgcttttcccacctgctttttaaataacgggccctacattttaaatttgcagtagacccttgaaattatgtagtcaacccttgaaccagtttacaaatggagaaagttgagcatgtctaagcctatgtgaaagataaaaaatgattaatagtatgcctaggtaaccttagccagagcatgggtaaaccctgtttacttacatatttggacgcaggaaggtaggctgcacaacatatgtttatgtattcataacactttaagttccctaaatgtttctacttgagagaaagagaatctatgggataaaatattagttttattctgtkctgtaatcaattctccctcttcccacttttgggagtgctaaagtgagggattatttgagattttgttgtaatctgtagaaattttataacaaataactaa

SEQ ID NO: 762140 - DNA, 617 bp, Homo sapiens
atttatgtatatttgcaatatgtagtgcatttgtagtataataaaatattaaaaataaatttatttatttgttcatttttttttgagatggagtcttgctctgtcgccaggctggagttcagtggcttgatctcagctcactgcaacctctgcctcccaggttcaagtgattctcctgcctcagcctcccgagtagctgggactacaggcacgcaccaccatgcccagctaatttttgtatttttagtaaagacagggtttcaccatgttggccaggctggtctcgatctcttgaccttgtgatccgcctgcctcggcctctcagagtgctgagattacaagcgtgagcctccgcgcccagtcaataaatttattttttaattctaaaatttacagattgatatyaaacactctaggcttagaataaatatgtgaaatatacaatacagatagaaagtgagatgtaaattaagatatttacgatgactgggaaagcatacaagctattctgattataactaccttcattgtcttaaagcattacattggaaattagtgtgataaaagttacaattggcatcatgtcactcgtcttgttctataagcccttaagaaat

SEQ ID NO: 762141 - DNA, 606 bp, Homo sapiens
gagcaaagctgtacagccagctgagctgggactggcatggagccaagagaagattcctgatacagagaagtggtgagtgagagacccctggggttccacaattctgccatggacttgtacaatcctagccatgggagatccccctctactcctcccaggcctttagtctaatacagggtgctgcctggagacagtgcataggtactgctsaagcctacctagaattccgcaggctttggaatgctgagaagcctggtgccggctgctgcagctggatcagggagggagcagacaggccagacacttttgcatgccccaaagacagatacaacagctgcagtagagaggagtgggtgggccatgcactgcaatgactgcctgcctcaggtgctccttgaaaaataggcctcccttcttcagcacggttctgcagtgcagctgccctgcccctgtatgtacatattggctgcagcccgatattctactgaaagccaggacctctgaagccagtgacccaccctttggctcctatagcagttgccatcaccaccacccaccaccactgcagccactcctgtcacccctgaacctgggttgggggaggag

SEQ ID NO: 762142 - DNA, 489 bp, Homo sapiens
tgtagctaggatcccaacatttcacagcaagagtgggttgcctcaccatctcttcactcagcccttccccaggagccgttctaggatggaactagcactggcatttgacaaccctgtacagggtttccagcttcctttctctttaccctcagggtctgcattgcctctgtatcaactcttggtgttttctctccatggatctattcaaagtatgttcccttattgtactttaataatagataagtaagacttattttgctctatccctagatatgtcactttgtatttataccactttatattttgtctttgtatttaaatttcttatacttttgwttctttgaatatattgtgagattttattggtaatatgatatagtattctatataatattaatagtatagcattttaataatatgtaatgttatgcaattatataatacataatattaacattacatgagtaatgaattacatacatatgaaac

SEQ ID NO: 762143 - DNA, 630 bp, Homo sapiens
aatataataatgctactatgttaattcctgtgtaaagaaatcccttagtaaagaaataagtatattgaaccacagcagatatgactttttaaaaacttaaggccactagaatgaaatgaacatttttgagaaacagaaaataaactatgaaaatctaatgtagaaatgaatttgtttttcagtttggaatattttcttgagttacactaaaattctgtatcctaagaccsataaaatctatttagtcagtatttttgcatagatatatgtggtacgttaacacttgggtaactattttttcattaattttaactgattcttttattcattgattccacatataatcattaagactccactaaactctgttgcaaatagtaggtgagcaaaattacatgtagtctctactttcatgaagctacagtctggattaaaatagtcattaaacaaacaatcccatccatgaatacatcacaaccaggataagtttatatagagagagagacagaaagagagatggaaccatgagaaaatataacaccatccacaacctaaattgaagggccaaggcagcttcccttagggagtaaagctcaagctgaaagaggactcatgagtagcagttgacta

SEQ ID NO: 762144 - DNA, 527 bp, Homo sapiens
ggaatggaaataatgaacatacacaaccctttcaaggaactggctctagagaagagacgagagttttcagccttagaacttatagctctttttttcagctttatgaggtaaaagtgataaataaaaattgtatatatttgagatatacaacatgatgttttgatattcgtatgtattgtgaaataattaccataatcaagctaattaatataaccatcactgtattagtctgttttcacactgctataaagaaatacccgagaytgggtaatttttaaattcactcactatcaggagaacagcacgggggaaactgcccccatgatccaatcacctccctcccttgacacataggaattacaatttgagatgagatttgggtgggaacacagaaccaaaccatatcagtcacctcacatagttatcattttttgtgtgtgtggtaagaacatttaagatctaatgtcttagcaaatttcaagtatacaaaacaatattattaactatagtccccatagctctccgga

SEQ ID NO: 762145 - DNA, 599 bp, Homo sapiens
tagccagggttctatggatagagctctgatctgttcctgggacagagctcctggcacagagggagtggggggtggaagccgccatctctgcagcagttcagttgactcagcctctctagcctgctggcttggagaatagagtctggaagaggaagggtcccacttccacccccaatgcaacacacctgctataccaaaaggcagccagattgcttttttaaaagggtccctgatctcatttcccctgrctgggtgagacctcccaaaaggggtcaccaaccacctcctacaggtgtgttcaggctagcaacaggtcagtaccctcctgggatggagcttccagtggaaggagctggctgccatctttgccatttcacggctttcactggagatacctccaggtatggaaaaaccaaggcaaccaaagcagacccccagcaaacatcagcagccctatggtagagtggcctattaaaagaaaaacaaacaaacagaaaacaacaacatcaacaaaaaacaccacacactaacctcattcaaagggcagcaacctcaaagaccaaaggtagataagcccacaaagatgagaaagaatcaat

SEQ ID NO: 762146 - DNA, 614 bp, Homo sapiens
ttttctaaaccattaatagtttttaaaaatgtgaatccattaagttgaagaaagactgggttgcctttctattctttctacagaaaatattacacagtcctttgcttacaaagaggtgatcaacaagtacatagcccccaccccccccmaaaaaaaagaagtatcagggaaaaaatcaaggtgttcaggtatattaggcagtgaattaataaaaatgttgtgctatttgtatggattttgtaatgtttatgatgtttgtgtgctatgattccttttcccagcctaaataaaatttaacttccatgcctaattttgtatttataattttttctaaaagagagttccttaaacctggatctaccccctgattgtgacaatgagaataaaatgaaaagaaaagatgcagacattcaggaggaatcatgaagagggaagaggcccaacctgaggaattggaagaatgaaggcatctcttcaatttggtttttagatatgctgggtttacctgatggagcagaatagaagagtctaatatcatcctgaagcctaagaaacagatttcaggctaaagactgtttaaagcagcatcctccctgggattatctcaaagcatg

SEQ ID NO: 762147 - DNA, 589 bp, Homo sapiens
aggcttcctagcaaaaaaagctgcaacatcggcaaagtgggaggttagacccccataaaacccctaggaaagaggccaaatccagggagctaagcagcaacagtttgtaagccccacttccacagcacctcacaggctaagacccactagcttggaattccagttagccactggtagcagtgttgcacctccctgggacggagctcccagggggagggytggggtgggctgtcatctttgttgtttgggcatcttagccattccagccttctggctttggagaatccaagctgacgaggggtggaagggatcccccagcacagcacaaatgctctgtgaaaacatggccagagctttttaaagtgggtttctgattccgtttctccttactgggcaagacctccctaccatggtttccatttatgcctgccagtgctttctggcaaacagaaatttgaaacctccctgggatggagctcccagagagaggggtgggctgctatctttgctgcttgggtgatttaactattctggccttcaggctttggaatgtccgaggtgaccagggcctgaagtgtacccctagcac

SEQ ID NO: 762148 - DNA, 589 bp, Homo sapiens
aggcttcctagcaaaaaaagctgcaacatcggcaaagtgggaggttagacccccataaaacccctaggaaagaggccaaatccagggagctaagcagcaacagtttgtaagccccacttccacagcacctcacaggctaagacccactagcttggaattccagttagccactggtagcagtgttgcacctccctgggacggagctcccagggggagggctggggtgggctgtcatctttgttgtttgggcatcttagccattccagccttctggctttggagaatccaagctgacgaggggtggaagggatcccccagcacagcacaaatgctctgtgaaaacatggccagagctttttaaagtgggtytctgattccgtttctccttactgggcaagacctccctaccatggtttccatttatgcctgccagtgctttctggcaaacagaaatttgaaacctccctgggatggagctcccagagagaggggtgggctgctatctttgctgcttgggtgatttaactattctggccttcaggctttggaatgtccgaggtgaccagggcctgaagtgtacccctagcac

SEQ ID NO: 762149 - DNA, 560 bp, Homo sapiens
gatttgtgtatgttgaaccagccttgcatcccagggatgaagcccacttgatcatggtggataagctttttcatgggctgctggatttggcttgccagtattttattgagaatttttgcatcaatgttcttcaaggatattggtctaaaattctctttttggttgtgtctctgccaggctttggtatcaggatgatgctggcctcataaaatgagttagggaggattccctctttttctgttgattggaatagtttcagaaggaatggtaccagctcctccttgtacctctggtagaattcggctgtgaatccatctggtcctggactcttyttggttggtaatctattgattattgccacaatttcagagcctattattggtctattcagagattcaacttcttcctggtttagtcttgggagggtgtatgtgtcgaggaatttatccatttcttgtagattttctagtttatttgcatagaggtgtttgtagtattctctgatggtagtttgtatttctgtgggattggtgatgatatcccctttatcattttttatt

SEQ ID NO: 762150 - DNA, 539 bp, Homo sapiens
cacttatgaagcttagtttggctggatatgaaattccaggttgaaaattattttctttaagaatgttgaatattggcccccactctcttctggcttgtagggtttctgcccacagatctgctgttagtctgatgagcttccctttgtgagtagcctaacctttctctctggctgcccttaacatttttgccttcatttcaaccttggtgaatctgacaatcatgtgtcttggggttgctcttctcgaggagtatctttctggtgttctctgtatttcctgaatttgaatgttggcctgcctgctaggttggggaagttctcctggatatatcctgaagagtgttttctaatttggttccattctcaccatcactttaaggtataccaatcaaacrtagatttggtcttttcacatagtcccatatttcctggaggctttgttcatttcttttcacttttttttctctagtcttgtcttctcactttatttcattaatttgatcttcaatcattgatacccttccttcgcttgataaaat

SEQ ID NO: 762151 - DNA, 610 bp, Homo sapiens
aggttagctaacttctttgagcctcagtttttctatctgctaattaggtgtgacatctactttacaaagttgtcagactgaaagtagataagttaaaagttctgacatggttcttttgaatggaacaccctcagctattatgctgccattagtggaaagttagggacagtttttgagatagcaatgagttagtaaatatgggctataatattaatttcttttcatctttttttgctagcaactagtgatatgcatttacaatatacttgttatagttaaaattgactgtagaatataatttttattgatctgaacaagcttttctaagtacatgacttcaatagaaaaattttcatatcaccttgctattacccaattagtgataagttgtaatgacctcaaaaattgatagaatttcaaaaawtgtctaattatcctcagtcctaaataatgcctggagataacaaatttaattttctttaaatattggaaaaatataagaatatctggacatattatgactgaatccagtacatttcaggttttatttttcaataaatgagtaacacttatgcatttattattttaattttttaaaaattatattctc

SEQ ID NO: 762152 - DNA, 630 bp, Homo sapiens
tagtaaatgtttccttgggcccctatggtttctgatgagaagtccacagtcattcaagtggcagtttcccttttattttcatttggctgccttcaagatttttatggttttccttagttttcagcagtttgattatgatgtgtctgggtatggatttctttgggtttaacctacttgacatttattgaacttctaaagtgttttgataaatttgatatgttttcagccattaattcttcggagttttctttctggaggacctctttctcttcttcctgcaggattacaatgatgtgttagatttttcttatttttctgtttgtccgggaggctctgttcatttgcaaaagcactcctttttctctatygttcaggttaggttggtatttttgttctgttttcaagttcattgactttattctgagtgtctcaattttgttattgaaataacccattgaagttttttttctcctaatagttttgatgaatacattttttaatttttaagtttaaaatcagtgtttagagcttccagatacttgctaagacttcccaactttccattcacttcaagagtgttatcctttcattcatggagcattgttgtaataactgcttaaaagtatgtgt

SEQ ID NO: 762153 - DNA, 530 bp, Homo sapiens
atttttgtatttgttgtagagacaggttttcactgtgttgcctaggctggtctcaaactcctggtgtcaagggatccactgatctcggcctcccaaagtgctgggattacagaaatgagccaccacgtctggccctgggcttacctttcaagtcaactttgattcattgtcttccttgaaacaccacattcagtgattagtcaaataatgaacattattcttgcacaactcttttgaatctatcaattactttctactcatttagtacatattcactggggagatgctctgtgccagacactgtagtaagatcaggtarttcagaggaagtatagacaccccagacctcaaacgaagacaagataaatatggacaagggaagatccacctccacattcaccattttcagtctttctgtcatttccagctaaataacgtcttcaaaaatgtttcaaaataactaagtcactatttcaaactctttcaataatagcacccttctatacgctggactactcttaattttctca

SEQ ID NO: 762154 - DNA, 540 bp, Homo sapiens
tgaagaaaacatcctccatgaacatcatagcatggataaagaaggaggtgagtaaaacagaagaaaaagattctgcagagtttatgcaggaaggatctacagtatttgtcaagacattgggtggagagatttgagggagaggagacaaaggcactggcaagtcttgagccyggtgtggcagacacagaagagattttgaattcatatctgatcgatgcaagaataaatccactcatttatctgtatttggtaaatgaatgaatgttacatgagtgagctggtgtgaagaaaatagatgataagactatgtgctagactaaagcaagagcttgtgatttttttcattgagaaagaaatctgcttctcatatctggtttccctctttaaagttatgtgatctaaggaaaatggtttaactgctctgagcttcagtgtcatctgtaacactagggtaataatacttggggaagctgaaaaactatatcgaccaacttacataaaaattaataaacagtcagtatagtttctagcacatagagc

SEQ ID NO: 762155 - DNA, 540 bp, Homo sapiens
tgaagaaaacatcctccatgaacatcatagcatggataaagaaggaggtgagtaaaacagaagaaaaagattctgcagagtttatgcaggaaggatctacagtatttgtcaagacattgggtggagagatttgagggagaggagacaaaggcactggcaagtcttgagcctggtgtggcagacacagaagagattttgaattcatatctgatcgatgcaagaataaatccactcatttatctgtatttggtaaatgaatgaatgttacatgagtgagctggtgtgaagaaaatagatgataagactaygtgctagactaaagcaagagcttgtgatttttttcattgagaaagaaatctgcttctcatatctggtttccctctttaaagttatgtgatctaaggaaaatggtttaactgctctgagcttcagtgtcatctgtaacactagggtaataatacttggggaagctgaaaaactatatcgaccaacttacataaaaattaataaacagtcagtatagtttctagcacatagagc

SEQ ID NO: 762156 - DNA, 535 bp, Homo sapiens
cttggaccatatcccccacaaataaggtgggattactatattgtatttatggcaggtgagaattaaagtacactattaaactaaaaaaccatctgaagctgaaatggccttttagaaaagaaaaattttagaaacccttaaaaaccaaataattaaaggttaaatataaaaatttatttttttaatgaactaaaggcattaaaaaagatctaagtatggtcaggtgcggtggctcccgcctgtaatcccagcactttgggagaccgaggcaggcrgatcatatgaggtcgggagttcgagaccagcctgaccaacatggagaaaccctgtctctactaaaaatacaaaattagccgggtgtggtggcacatccctgtaatcccagctacttgggaggctgaggcaggagaatcacttgaacccaggaggtggaggttgcggtgagccaagatcaggccattgcactccagcctgggcaacaacagcgaaactccgcctcaaaataaataaataaataaataaatctaagtacaaa

SEQ ID NO: 762157 - DNA, 558 bp, Homo sapiens
tatgagaagctgttcaatctcataattagagaaatgcaaattaaaataagtgatattactaggaacaaagagaaacttcttcaagttgataaagcacatctacaagaaaaccactgctaacatcatacttaatggtgaaaacttagaagctttcagctaacatcaggaacaaggtaagaatgttctctctcaccactgcttttcaacataatactggaatagagagataatgctacaagacaagaaaaggaaataaaaggtatagagattaggaaggaagaaataaaactgtctttgtaagtgacatgaccatatatgtaaaaatctgaaaaaatcattgacaaaaaactcctgggactaggaagtgattacagttaaggttgtayaatacagggttaacatacaaatcaattattttcctctataccagcaatgaacaagtaaaatttgaaattaaaaacacaataccatttacattaacactctaaaaaataaaacatcttaagtataaatctaaccaaatatgttcataatttatgcaaagaaaatttgaaaact

SEQ ID NO: 762158 - DNA, 634 bp, Homo sapiens
aaaataatttttatttagtagaaaagacctggagattataaataacaataataataatttgttaaaaacaagcaccctgcccaaatatagagaaaaccacttttgacatgttggaaaacagcattctccacctgtctgactctctaacattctcattttctcatctgcctctatctttctctttttctttttacacacaaacatatagatacacagacacaccttacatgcacactcacacacagacacacatgcacattctgtctttatttccttctatcttcccatacccatttttttcatcagataatattcggactctttttataacaaagttatagacatgaattatcaataaaatatattacatgtgtaaacgacacacagccctcccttggcacttatgggggattgtttttaggttcccccatacatatcaaaatccacagatgcccaaatttctaatattttcaatgtktggctgggtgaatccatggatgcagatgccatggatactgaggaccaattgtacatgttttcatgtacctactgggattaaaaaataattacaaagcctagtctcacattatttacatttggagcaaattttaaaaatagaaataaaaacacaatc

SEQ ID NO: 762159 - DNA, 634 bp, Homo sapiens
aaaataatttttatttagtagaaaagacctggagattataaataacaataataataatttgttaaaaacaagcaccctgcccaaatatagagaaaaccacttttgacatgttggaaaacagcattctccacctgtctgactctctaacattctcattttctcatctgcctctatctttctctttttctttttacacacaaacatatagatacacagacacaccttacatgcacactcacacacagacacacatgcacattctgtctttatttccttctatcttcccatacccatttttttcatcagataatattcggactctttttataacaaagttatagacatgaattatcaataaaatatattacatgtgtaaacgacacacagccctcccttggcacttatgggggattgtttttaggttcccccatacatatcaaaatccacagatgcccaaatttctaatattttcaatgtgtggctggktgaatccatggatgcagatgccatggatactgaggaccaattgtacatgttttcatgtacctactgggattaaaaaataattacaaagcctagtctcacattatttacatttggagcaaattttaaaaatagaaataaaaacacaatc

SEQ ID NO: 762160 - DNA, 596 bp, Homo sapiens
gtgcttaagccaagaagagtaagaaatttatataaaatatgactgaactaaatgagattaattataaggtgttgcaggttagcaattttcccagagactcctgttggttatttttaaataaaaatctcaaccgagaaatttttaaacatacagaggatattgccagatatacatatactcaagacccaaagtcagcagttattattattttgtttgatgtatttacatatgacttgttttaaagaataaaacattgaagtcctctaatccctttcttaaccccctgtccctccctctattcccagaggtaatcattaaagagacataactcttattcatattttaatactcagacctctattttatttatctttgctgctatacaatatgtawaaagcacagtttataaatccatccccctattcacaggctgacgtttgtttgaagtttttgtctattatacactactgaaattagaattagaaattagaaacagtgttgcaaatgacctctttctacatgtgtccttgtgttcatatgtgagtgttggtcgttctgtgtatccaggtagagaaattgtggggttgggaggtaca

SEQ ID NO: 762161 - DNA, 631 bp, Homo sapiens
aaagtgctgggatcgactggacttttaacttttctaaaataagatgctattgcatatttcttccatagttataagtttacttgttttaaccagtattagttcaaactcttacagtacttgattcagatgtaaaacatactgagcctctgccatgttccagccatcatgctgaaagtcaccagggatccaatgatgaacaaaagaacatgcctcctaccttacaatctaatggggtagaccaatgctaatcagacgtcagatgtaatacaaataatgtagtattttaactgtgatgagaagccagatggaaggtttataggagaaggacaatttgacctgtcagtaaaaagttcacttmcctgcagaatggcaactgaactggggtctacaggagagatgcacattctttagactaagaaggaaaggaggtgttaagtggaaacaacagtgtgtaaaaatgagcttccttcacaacatcttttctcaagattagattcttgatactttcaaaaagtttagctgattgggcagaatccgtactgaaacaagaacatcctctaaaaattttgcaagctaatttttaatttaatcagtttgttttgtttttatttgctgagaggagcaaaaatcc

SEQ ID NO: 762162 - DNA, 400 bp, Homo sapiens
tacaaattagatacagagatgatcatggacaattatcaatcattagtataaacattattaatcattagcttttaatattactctttgttgcattactaacataaactaggaataaccggcgagtatagggtcaggtgctgaagggacattgtgagaagtgacctaraaggcaagaggtgagccctctgtcatgcccgcataagggccgtttgagggctccttggtcaagcggtaatgccagtgccagggaaggcacccgttccttatcagactgcaaaagggagtctcctttccttggaggagtcagggaacactctgctccaccagcttcttgtgggaggctggatattatccaggcctacccacagacatccagaggcctaaacccctccctgtggtg

SEQ ID NO: 762163 - DNA, 537 bp, Homo sapiens
ccctgtcccatgatcatgtgacttgcttgaccttatcaatcacttggatgacttatcctccttaccctgcccccttgtcttgtatacaataaacatcagcacgcccagccatttggggccaccaccggtctcctcatcttggtggtagtggtccccggggcccagctgttttctctttatctctttgtcttgtgtctttatttcttacaatctcttgtctccgcaagcggggagaatacctgctaagtcctgtagggctggaccctacaccattagtttttgtttttgttttaaawagtgttttctaactataccatgatatgattttattttaaaatgttgcaactttaggcacttttataaaataacatttaataaaatggcaatgttgtttgtgctccctatcttcttagcataaaactttgaagcatgtttgttaatttttctattaaaaagatttcagcattaaaatttcctcttatttcagggtatcctagatatcaacatcataagataaattatttttagagtagattg

SEQ ID NO: 762164 - DNA, 537 bp, Homo sapiens
ccctgtcccatgatcatgtgacttgcttgaccttatcaatcacttggatgacttatcctccttaccctgcccccttgtcttgtatacaataaacatcagcacgcccagccatttggggccaccaccggtctcctcatcttggtggtagtggtccccggggcccagctgttttctctttatctctttgtcttgtgtctttatttcttacaatctcttgtctccgcaagcggggagaatacctgctaagtcctgtagggctggaccctacaccattagtttttgtttttgttttaaaawgtgttttctaactataccatgatatgattttattttaaaatgttgcaactttaggcacttttataaaataacatttaataaaatggcaatgttgtttgtgctccctatcttcttagcataaaactttgaagcatgtttgttaatttttctattaaaaagatttcagcattaaaatttcctcttatttcagggtatcctagatatcaacatcataagataaattatttttagagtagattg

SEQ ID NO: 762165 - DNA, 622 bp, Homo sapiens
ctcagcctcccttgtagctgggattacaggcctgcaccaccacacctggctaatttttatatttttagtagagacggagtttcactatgttagccaggctggtcttgaactcctgatctcaggtgatctgccctcctcagcctcccaaagtggtggaattacaggtgtgagccatcttttctggcctgagctctgtaatctttgccaaactacttgacctctctgaacctcagtttctttttccataaaatggcaggggtgggatggcttakctgaggtggagtggggagggacaggtaagacaaccatctcccagaatggtgcagattaagcaggataatatacataaagtgtttagcagagtacctgctctatagcaagcactcactaattgataactcttgttatattatttttaataaagaagaaggcttgggtcatgatttggagaaaggtgagtgaagtagttaatgagagcaggaacgaatgagcagttcccttgtatcttatctaggaaggatattttctcttctttttcttccacttcatccatcatccttcccttgaattcattccccgggtcttcactatcaagataagatgtgtttcttcttcattcttc

SEQ ID NO: 762166 - DNA, 463 bp, Homo sapiens
cccattttggggagaatcacgtggtaagatgggcattcctgtgggagtggggcctttctcctagaatgtaagctccaggagggcagggaccatgtccccagtccatccctaaagcctggtgtggtgcctgcactcagatmtagagcaaagagttgctgaatgaatcagtgagcagagctcttgcagctggtgttctgagtgatttctccaatgaaggctcactttattttcaggctgctatagactctgcttccttagcttagctccaggccagctgcaaagactctctaagctggaggcaggaggggtgattctgtcctgtgtaatctttttaagtgacttctttggaaaaggctttgcatgcattaaacactgggttcgcagagtcttaggcatctttcagagacagtgtcaggcagctgctgccaatagggaccacgcgaggctgggtgaaagatggatg

SEQ ID NO: 762167 - DNA, 599 bp, Homo sapiens
atagccgggaagttgatgttgactgaaaccaaagagtctgagaccctgcgtccctgctcagcttggctcccggagagtgcaacagtggccaagtctcagtactcaaagggtaatgagaagagcaccagcctcagcatcatccgggaatttgttagtaatgtaggatctcgggccccaccccagacttgcggcatcggaatctgcatttccacaagatccccgtgtgacgcaggtgctcgttaaggtctgagcagtgctggtttaagcacaggcttacagatggaaaaggccaggsctccatgaccttggagaagccatagagcctctctgagcccatttccacttccgtaaaataggcataaaaatacaatctatcagatagatttgtttaacttcagagttaaataaaaggatatgtatgcagctcttagtacagcatcccccagaaaaagtgttggaagtattatcattattaacccgattattaccttctgaccatgttcttttgggccagtcacactgtttctaggagccagctaaaggcactgtaaacagtgaccctctgtcaagttcttgcttcatcgtaacccattttcctt

SEQ ID NO: 762168 - DNA, 589 bp, Homo sapiens
ggggtacttgaggagaggcaatggaaaggtcattaaagacactttggggtaatttatggggtctcattatcttttctcctaaaaatacataaaatctggcaaactcttcatctgttttggaaaaaatatctaagagaatagaatatatcaagaagggccaagtggatgtttccatcaaccatgtrgccccatctcccctggagattttggccagttgtggtggttcacatctgtaatcccagcactttgagaggctgaggcaggaggatcacttgaggccaggagttcgagaccagggtggacaacaaagtgagaccacccccgaccccgccaaaaataaaaaaaaaaaaattagctaggcgtgatggtgcatgcctgtagtaccagctactcaggaaactgagatgggaggattgcttgagcctatgaagttgaggctgcagtgagccaagatcacaccactgtactccaggctgggtgacaaagcaagactcagtctcagataaataaataaattaattaattaataggagattttctctttgctaacattcctaactcgaatggcctatttgtaaagaataagcag

SEQ ID NO: 762169 - DNA, 527 bp, Homo sapiens
ccagaaagataaaacaaaaaatcaagaatttcagttaaaaagttcacctcttgccatatcaattgacatggttttaattgggtcattccataaagagtctctgttgatacaattttcaagcttcctagggtcttagaaatcatccaactcyatccttgtatttcaggagggaggataaagaacctggagatgagaaatgacatgcccaagttcacacagctactgagtgtcaacagctattaagagaaagggatgggaatattccactcactttatttccagtccagtgttcttttgtgcaaggaaacctagagaggtaatatagttgccatggctgcagaacaaattgttccaaaacctagtggcataaaacaatcactcgtggattcggtggattgggaattcgatagggcaaatgcttctccatgcttcttggtgtctgcggactgagctgaaagggacaaaggcttggggctgggttcatctgaagacctgttcattcacgtgaatgctgtctgttgactgag

SEQ ID NO: 762170 - DNA, 438 bp, Homo sapiens
atcatttttgttggcatttctactaatttttcatgttttaaacaataactgatattttaccaaaaaaaaaaaaaaccttgtaatcaacttccaaaataacagctattttcatatattagtgaccttatagaaagaacgcccagaacttaataaaaccccagaagactttagaaagtcctggttcacaggaacacagtgcttctttggtttcaggccattggctacctcattgttgggattttccaagtcagatagtatwacacttggaatatgccagtgaacattaataatcatgaccataaatgaaaagttggccttctccaatgggatataaaagactggcgctccacacctcctcagagcagcagagggcagtgaaagcactggtaatggataatataaacccagtattaccatcgggagagaaacgtacttttt

SEQ ID NO: 762171 - DNA, 596 bp, Homo sapiens
ctatgcaggagatatgtttagagacctctcagaaaaacttgcctggtttgagggtacacagtaccattttaatcttctgaaaatatctgtattcctgctctttttctgctgtcactgtcaatctgctatatttttcactatcctattaaaatattactgtctcctttatctgttcaatgtccatattttaaaaaaatcttccttgtatgagctattctgatcyaaataatttctctgatatttctctatatggctcccacaacaatttcattgttgttagcatatctatttctccatacattgtaaaactgtaatccttaggtatttctaaaacataaagaggagaattaagtcagctgcagaacaatggggctgattcttctgctttttctctggaaaatctttcattgcttttggtggaaatttacctagaggttacaaccacaggatgtagcttggtctcttatttgcctttttgggaaaccaattaagattaatacaggataaaggaaaaaagcaatctattcattatataacacagttgtttgtattacttgttccctgcaaaggaaatctgttgaatgcttgcattttga

SEQ ID NO: 762172 - DNA, 663 bp, Homo sapiens
tagatctgtattctgcaggcattttctcagctggactcaacagccaggatctacattctagaagagatgctacaggtcagctaatatcttgtttgtatttcaaactaggaagcaaactcaaagttcaatatttgggttcttaaattgtatgttacttgtgcaatatggcagaaacaccaattttctattattattttttaacttattttgggttcaggtgtacatgtgcaggtttgttatataggtaaattgcatgtcatggaggtttggtgtacagattatatcatcgcccaggtaataagcacagtacctggtaggtagttttttgattctctctctcctccccaatccatcctcaaataggccctggtgtctgttgtttccttctttgtgttcatgtgtactcaatgtttagctcccacttrtaagtgggaacatatgatatttggttttctgttcctgcatgagtttgcttaggattatggcttccagctccatccatgtggctgaaaaggtcatgatcttgttcttttttatggctacacggtattccatggtgtatatgtaccacattttctttttccaatctactgttgatgggcatttaggttgattccatgactctgccaggaaacgccaattttctgaagctgccatcgtgtt

SEQ ID NO: 762173 - DNA, 612 bp, Homo sapiens
gaatgatgaattaactagactttacttttctgagtatgctgcagtgaaaattgtgttgcaaattcctatccttattgacaattcatcacaagatgtatcttaatctcaagagaactttcccactgtgtcttgaatgcttattcccattatcctctaagacacattcacacacacacacacacacacacacacacacacrcacctgacaggcaccattctgtcacatcctcccattctgcagcagaaacaggctagctaaagacattatctttttatttttgtataatctaaaaaattcccttttatctacgccatgttcagtaatttagttacttaacaatatatttatatttttgaggtgactcaagaagtatcacagaaatcaatcaaggtaggaagagtgtggatttggcacccaaaataagtttgagtgatttcttatctacttgctgttaacatgcctttttcactgccatgagccacagcttgcttatttgaattaaaaaaaaccctataatatctggcttatagatgtgattaccattttgtaacacaacgcaaataaaacattgtgtaatgcggtagaaatccaacgatgtcttctataaatgg

SEQ ID NO: 762174 - DNA, 523 bp, Homo sapiens
agccttgtgtcctatctttcagggtggtaagctcccctctggcccacggcaggtcccagaatgctgtctgggagtagggcctggagtcaggaaccttaggaatctacttgttgctctattctaccacagctgagctggcactcatgctacaagataaagttattcccattcttctctctattttccttatacagaatgagtctcttcccatggcctgtagtaattactgcmtagctgccaccaatgttcactcaaggcccaaaggctcttcagtcagtcaacttctggtgaatactatcaggcctgggtctctctcttcaaggcaatgggctccattttggccaagaatgggtctagaagggccattcagggtataagccctgaaatcagggatcccaggagcccacttggtgctctataccactgtggttgagctcgtacccaagatgcaagacaaagccctctttactcttccctctcttttcctcaagcaggagtctcttcccatggccaccacacctgg

SEQ ID NO: 762175 - DNA, 509 bp, Homo sapiens
tccatgcctatttgttagcatatgaacacattggttagaaatttgatttttaaaaacaaaatacccaagcttttgcctatcacaacaagtttgcacttacgcatgcctgccatattggtacatcccagtacaggtattctgtccttgtcatctttaattcctrtaggggctttctcatcagctgtagtcagtgtctttctgggcaataatgatttttaattagccaaaaaatgatgtttaattagcatcatggacttgtcctgatatcagattttttttatcagcaataaccttggcaaagtcatcaatgaatttctctgcagctttatgatcagcagatggtttatcaccacaaatctttaaaaatttagagctggtcctttccttaaatctctgcaaccagcctattgaatatacatgattgccttcaattttcagttcattgtcataaatatttgcttatttcatgattatcctaccattaagtggcatgccttttctgttatgct

SEQ ID NO: 762176 - DNA, 642 bp, Homo sapiens
tccaggcaagagtagtaaacttctactaacaaaattacttcagaggagctaacattataaattatattggtagaaaataatttatgcacttgatatgggctagacactacatgttttacattgttgattcatttaatcttcaccacaatcttaggagatttgttctaatatgtatctcattttatagwaaagaaaattgagacaaacagaggtcaggtcaagtaaattggctataagtagtttgtgctatttatcttttactgatttagatgagagagttgagaggctaaacaacacttttcatggcctcacttgcctagaagaaatacaaattaaagtccagattatactcaaagtgaagccttggtaaatctcccagtgtaaagactggaaacttacagaacttcactctaggaaaaaaggtaaactataagaaaaccttcccttaccagatcacagcccacatttgaatcatctgagtggccttgtatatctcaagtctaattttgaatgaagatgatgccagatttatagtctttttaggcattggcagaaacaaatataaattctctcagaaagaagatgacatccatcattcggggactcaatagttttgtaaaataatgactttttgattcaaag

SEQ ID NO: 762177 - DNA, 642 bp, Homo sapiens
tccaggcaagagtagtaaacttctactaacaaaattacttcagaggagctaacattataaattatattggtagaaaataatttatgcacttgatatgggctagacactacatgttttacattgttgattcatttaatcttcaccacaatcttaggagatttgttctaatatgtatctcattttatagtaaagaaaattgagacaaacagaggtcaggtcaagtaaattggctataagtagtttgtgctatttatcttttactgatttagatgagagagttgagaggctraacaacacttttcatggcctcacttgcctagaagaaatacaaattaaagtccagattatactcaaagtgaagccttggtaaatctcccagtgtaaagactggaaacttacagaacttcactctaggaaaaaaggtaaactataagaaaaccttcccttaccagatcacagcccacatttgaatcatctgagtggccttgtatatctcaagtctaattttgaatgaagatgatgccagatttatagtctttttaggcattggcagaaacaaatataaattctctcagaaagaagatgacatccatcattcggggactcaatagttttgtaaaataatgactttttgattcaaag

SEQ ID NO: 762178 - DNA, 642 bp, Homo sapiens
tccaggcaagagtagtaaacttctactaacaaaattacttcagaggagctaacattataaattatattggtagaaaataatttatgcacttgatatgggctagacactacatgttttacattgttgattcatttaatcttcaccacaatcttaggagatttgttctaatatgtatctcattttatagtaaagaaaattgagacaaacagaggtcaggtcaagtaaattggctataagtagtttgtgctatttatcttttactgatttagatgagagagttgagaggctaaacaacacttttcatggcctcacttgcctrgaagaaatacaaattaaagtccagattatactcaaagtgaagccttggtaaatctcccagtgtaaagactggaaacttacagaacttcactctaggaaaaaaggtaaactataagaaaaccttcccttaccagatcacagcccacatttgaatcatctgagtggccttgtatatctcaagtctaattttgaatgaagatgatgccagatttatagtctttttaggcattggcagaaacaaatataaattctctcagaaagaagatgacatccatcattcggggactcaatagttttgtaaaataatgactttttgattcaaag

SEQ ID NO: 762179 - DNA, 667 bp, Homo sapiens
agcagaaagattatattctctccagataatggaatcattatatacaggccaaaaaaactaatggatataaaattataaactttctattttagcaagaaaatagaaagtacattgaagtcaaagagaattggatagaagtagaacttaaaaaatacaaaaagaaatattatttattttactgatggtttgagaacatattagagacaactaagaagaagaatgaactggaatatagatcaggaaaaayatccaaattaacaaaggaaaatgaaatgagtaaaacacagaagataagaaagatttacagagaacacaacaataatttctaatatgtgttatttgtatcccagaggagaagagaaagaaattatggcagaacaaaatgtacagagataataagataattacccaaagctaatgaaatgtatcaagccatggaattaacaagctaacacatcctaagaggatttagaaaaaggaaatttaggccgggcacggtggctcacgcctgtaattccagcacttagagaggccgaggcaggtggatcacctgaggccaggagtttgagaccagcctggccaacatggtgaaaccccgtctctactaaaaataccaaaaattagctgggcgttgtggtgctcgcctgtaatcccagctactcaggaa

SEQ ID NO: 762180 - DNA, 667 bp, Homo sapiens
agcagaaagattatattctctccagataatggaatcattatatacaggccaaaaaaactaatggatataaaattataaactttctattttagcaagaaaatagaaagtacattgaagtcaaagagaattggatagaagtagaacttaaaaaatacaaaaagaaatattatttattttactgatggtttgagaacatattagagacaactaagaagaagaatgaactggaatatagatcaggaaaaacatccaaattaacaaaggaaaatgaaatgagyaaaacacagaagataagaaagatttacagagaacacaacaataatttctaatatgtgttatttgtatcccagaggagaagagaaagaaattatggcagaacaaaatgtacagagataataagataattacccaaagctaatgaaatgtatcaagccatggaattaacaagctaacacatcctaagaggatttagaaaaaggaaatttaggccgggcacggtggctcacgcctgtaattccagcacttagagaggccgaggcaggtggatcacctgaggccaggagtttgagaccagcctggccaacatggtgaaaccccgtctctactaaaaataccaaaaattagctgggcgttgtggtgctcgcctgtaatcccagctactcaggaa

SEQ ID NO: 762181 - DNA, 513 bp, Homo sapiens
tttaaaattaagctgcagccaaaccaccttgggcacctgttcttgggatgtcctggggctatatcatgggccattgttcactcacatttggctcagaataaatatcttcaaatattttacagagtgaatctttttgtcaacattgtatgrgcaataagttaaagaagaatatttaaaactgaaaaactaaattgtaaaatgttaagtagtaaagtgggactaagagcattaaaaatcatgtaaatactagagtaaaaaatagagtataaaaatactaaccattaaaattatgtaaataaaaagggaattattagaaccaaatataaacctttttaaatatcaaaacttagctaagtcaaaaataataaatacacatcttacaaagaaacatagcaaatatgtcataatacacataactcaatgaaaagttttaaaatttaactcacaatgaaacaactaaattttgtatcttgtactaaatacatttaaaacaaatgaattgtgaaaggctaa

SEQ ID NO: 762182 - DNA, 625 bp, Homo sapiens
gtcaccatttggttaagtttatgataatccactgtcattctccaggatccatctgtcttctgcacaggccaaatgggagagttgaacagggatgtggtgggaatcaccaccccgcgtttttcaagtccttcatggtggcaggcagtaatctccacaatccctccagggatacagtattgtttttgatttattattcttctaggtagaggcagctctaatggcttccatttgtcctttcctgccataatagccctcaccctaccagtcagggagccaatgtgggggttctgccagctactaagtatgtctcagccaattatgcattctggcaccggggaaattaccacagatgagtccaaggtgataaatactttgcatggttggggcaaagttctctagaaagccacgtwtgctttaaatcatcgtccaatacatggtgttgtttctcccgtaggtaggattcacgggtccatgagtcaaggggtagaagttgaaatggcaccactcaccgccacttccatttccactccaacatattgaaaatatgtgatgggcttgttgaagtactaaagctgtgttcattcataacataataagaaatgactgcagtttataaaatcaaaga

SEQ ID NO: 762183 - DNA, 670 bp, Homo sapiens
tttattgagccataaccatctgtgaggcattcttctagtactttaggcacatcactaaattaaattcctgagccttttttaacacttaaatgtttgatttacctgcaattgaatatttttgtggtgtgaagtttgattctattttatttatctttgatagatataatcagttatcagagctctttttaaaaagtatatccctttttttcagttaattgcagtgccatctctgtaacaaataaagtattcatagatrtgcagaaatatttgtatgctcattactttgtccagtatgttcttttttgatccttatttcaatatcacacattcttaattactatagcattaaaataaaccatcatatttggtataaaagtatttctaatatgtcattcttcataaatattttgtatatttggagccctttgctttgtcatataaattttaggcaaggttatcaagttccacacaaacaatgttagaattttaatgcaaattgcattttagccataaatcagtttgagatgaattgtcatatttatgatagccatgaacatgatttgtttctatctatttatttttggtcttttataatgattgtgagtatcgttgtacagctagctttaaaaatatcttatgccatttcttatgcattatttctagatatttt

SEQ ID NO: 762184 - DNA, 670 bp, Homo sapiens
tttattgagccataaccatctgtgaggcattcttctagtactttaggcacatcactaaattaaattcctgagccttttttaacacttaaatgtttgatttacctgcaattgaatatttttgtggtgtgaagtttgattctattttatttatctttgatagatataatcagttatcagagctctttttaaaaagtatatccctttttttcagttaattgcagtgccatctctgtaacaaataaagtattcatagatgtgcagaaatatttgtatgctcattactttgtccagtatsttcttttttgatccttatttcaatatcacacattcttaattactatagcattaaaataaaccatcatatttggtataaaagtatttctaatatgtcattcttcataaatattttgtatatttggagccctttgctttgtcatataaattttaggcaaggttatcaagttccacacaaacaatgttagaattttaatgcaaattgcattttagccataaatcagtttgagatgaattgtcatatttatgatagccatgaacatgatttgtttctatctatttatttttggtcttttataatgattgtgagtatcgttgtacagctagctttaaaaatatcttatgccatttcttatgcattatttctagatatttt

SEQ ID NO: 762185 - DNA, 670 bp, Homo sapiens
tttattgagccataaccatctgtgaggcattcttctagtactttaggcacatcactaaattaaattcctgagccttttttaacacttaaatgtttgatttacctgcaattgaatatttttgtggtgtgaagtttgattctattttatttatctttgatagatataatcagttatcagagctctttttaaaaagtatatccctttttttcagttaattgcagtgccatctctgtaacaaataaagtattcatagatgtgcagaaatatttgtatgctcattactttgtccagtatgttcttttttgatccttatttcaatatcacacattcttaattactatagcattaaaataaaccatcatatttggtataaaagtatttctaatatgtcattcttcataaatattttgtatatttggagccctttgctttgtcatataaattttaggcaaggttatcaagttccacacaaacaatgttagaattttaatgcraattgcattttagccataaatcagtttgagatgaattgtcatatttatgatagccatgaacatgatttgtttctatctatttatttttggtcttttataatgattgtgagtatcgttgtacagctagctttaaaaatatcttatgccatttcttatgcattatttctagatatttt

SEQ ID NO: 762186 - DNA, 584 bp, Homo sapiens
atctacaactatctgatctttgacaaacctgacaaaaataagcaatggggaaaggattccctatttaataaatggtgctgggaaaactggctagccatgtgtagaaagctaaaactggatcccttccttataccttatacaaaaattaattcaagatggattagagacttaaatgttagacctaaaaccataaaaaaccctggaagaaaacctaggctataccattcaggacataggcatggacaaggacttcatgtctaaaacaccaaaagcaatggcaacaaaagccaaaattgacaaatgggatctaattaaactaaagagcttctgcacagcaaaagaaactaccatcaatgtgaacaggcaacctacagaatgggagaaaatttttgcaatcccacacttatcttaaagtttatgggtaaaaaaatatttaaacatatttggggtttaaaatagcccttaccacacttaagcacaggctgccttaatacacttyctgataacaagtgtgtaggtgtctttgcaacacagagaagtgacaaataaaaactttgcaacaaggaaaacacaaatctagacat

SEQ ID NO: 762187 - DNA, 542 bp, Homo sapiens
ggaggagctggaacaggaagcccctgggtggtaagaaggagctaaaaaacttttcccatgggcctttctttagggccctgggagagggtaaaggcatgagaagtcaaaacataagcctgaaacgtgaacttggaaaattaagtgaaaaccaggmcctctgaatataacttattagggaaaaaaggatcatgacaaggatggttcttttcaaaattcctgtatgaacttaaaaattcataaatttgaaagataaaaatagtttgtcaaaacatttgcaaaataatttgttaaatagaacaaatctttgaaaaatataactttcccaaataaactgataaatgcaagaaaacaaattgttctatcactatcagtatttttttaaagtgaaagaaaactactaaccagaaaaatacagatgattttataggtgagcaccaacaaatatataagaaatagtatttaggctggtccaagtgcaatggtgtttgcaactaagtgattacaaacagttgtggatctctttgtttcttctccactcccac

SEQ ID NO: 762188 - DNA, 542 bp, Homo sapiens
ggaggagctggaacaggaagcccctgggtggtaagaaggagctaaaaaacttttcccatgggcctttctttagggccctgggagagggtaaaggcatgagaagtcaaaacataagcctgaaacgtgaacttggaaaattaagtgaaaaccaggcccwctgaatataacttattagggaaaaaaggatcatgacaaggatggttcttttcaaaattcctgtatgaacttaaaaattcataaatttgaaagataaaaatagtttgtcaaaacatttgcaaaataatttgttaaatagaacaaatctttgaaaaatataactttcccaaataaactgataaatgcaagaaaacaaattgttctatcactatcagtatttttttaaagtgaaagaaaactactaaccagaaaaatacagatgattttataggtgagcaccaacaaatatataagaaatagtatttaggctggtccaagtgcaatggtgtttgcaactaagtgattacaaacagttgtggatctctttgtttcttctccactcccac

SEQ ID NO: 762189 - DNA, 586 bp, Homo sapiens
aaggaaatgtgctttagcacaagagtccccagtgtgagtttacagcagtgttttctatatgtgacagaaaagggtgtcaatatcactctctaaactttttaggaaatctctgaaaacgaaatagtaatgggaatttttgmactttcagggagtgttttttaggtaatcattaggaactcatgatataggtggtatttttgtgtgccctttccatgcatttctcaccccagactttcctgctgccaagttgaggtgggagactagcgttttcaaggttggatcacacattaaaatgtcagaattgacctaggggttttgcaaatgtgtattaggagattcttataaaacagaggaggacaactgagagaaaacttgagacagtcagactttttaaatgataatggaagggtactattacatcatgactcaagggaaaatgtaaagactttggatccccagaaagatagtagcactgccaaggcctaaacttactatcatggatgtgatttactgcaataggtttccatatgatttatatttcataaatgactcgttattataaaaggcaatcataaatgacacaaag

SEQ ID NO: 762190 - DNA, 586 bp, Homo sapiens
aaggaaatgtgctttagcacaagagtccccagtgtgagtttacagcagtgttttctatatgtgacagaaaagggtgtcaatatcactctctaaactttttaggaaatctctgaaaacgaaatagtaatgggaatttttgcactttcagggagtgttttttaggtaatcattaggaactcatgatataggtggtatttttstgtgccctttccatgcatttctcaccccagactttcctgctgccaagttgaggtgggagactagcgttttcaaggttggatcacacattaaaatgtcagaattgacctaggggttttgcaaatgtgtattaggagattcttataaaacagaggaggacaactgagagaaaacttgagacagtcagactttttaaatgataatggaagggtactattacatcatgactcaagggaaaatgtaaagactttggatccccagaaagatagtagcactgccaaggcctaaacttactatcatggatgtgatttactgcaataggtttccatatgatttatatttcataaatgactcgttattataaaaggcaatcataaatgacacaaag

SEQ ID NO: 762191 - DNA, 586 bp, Homo sapiens
aaggaaatgtgctttagcacaagagtccccagtgtgagtttacagcagtgttttctatatgtgacagaaaagggtgtcaatatcactctctaaactttttaggaaatctctgaaaacgaaatagtaatgggaatttttgcactttcagggagtgttttttaggtaatcattaggaactcatgatataggtggtatttttgtgtgccctttccatgcatttctcaccccagactttcctgctgccaagttgaggtgggagactagcgttttcaaggttggatcayacattaaaatgtcagaattgacctaggggttttgcaaatgtgtattaggagattcttataaaacagaggaggacaactgagagaaaacttgagacagtcagactttttaaatgataatggaagggtactattacatcatgactcaagggaaaatgtaaagactttggatccccagaaagatagtagcactgccaaggcctaaacttactatcatggatgtgatttactgcaataggtttccatatgatttatatttcataaatgactcgttattataaaaggcaatcataaatgacacaaag

SEQ ID NO: 762192 - DNA, 583 bp, Homo sapiens
ggaagcaatttttaaaaacatacagctataattctaatttcagtaccccaaagaattaaaaaacaactgacctaaattaacaggactggtatggcctagatggaaaaggtttgaattaagggaatgaacatctccctaggtaattcttgtgcccaacaaagttggtgaaccactggaatagaagtagaaagaaaagagcaaagctattacaatagtccaaatgaaaagttcaagaaactaaaataagacaagtggcaatagaaatatacagaaaaaagtagatttgataggcattaaggctaagtgatttagggatccaagacagtaagagatttgaggaataggaagctgaaaaacttagattatgtaaattatagcatattaaccaaaagagggaaaggagaaggaggagaaagtaaatgtggaaagataaaaatrcggcttttatattttacttaagatgtctgtggagcagtagattaagatatctattagttagaaatgtgggtcaggaatgcagaagaaagatgtgaacctaaaatatagataagagctatcaccataaaggtggttagaagaaaaa

SEQ ID NO: 762193 - DNA, 676 bp, Homo sapiens
gaagcattagctgttttctattattctgccttgctgcacaccccaaccctcagcctctctgaattctaagaattctgtctggaagaggagtgacatgttccctgctgttaaggaatctctcaggctgactgtcatttgttccttttaggggccctggaactttccctcctaccttccccactctcaggattcagcacctcctactttattattgctattattaatcaaaacttcaaasggaatgtataatcctggtacaaaaattgaaacatacagataaataaaaagaaattaaaatcagccccaataccaccatccagaaagaactatgggtaacattttaaagtatatctctttctagacatttccccattcaatacatttgtttaaatatacatgtacatatattaaggtcaaggggtcagcactctcagccttaggccttccatagaggcctgtcccttgggtggggcataagaccactgttggcttctctgagcccaggaccttggaaggtcaagggcaggacctttctgcctgactccactgtgctccccagcccccagctgagcctggggctgccttcctccagctttgcacgaaatgcccatcttggagctgcttttgatccatcccctggaggtggcttattgtatgggatgattgtgtcagaagg

SEQ ID NO: 762194 - DNA, 605 bp, Homo sapiens
actatttcttttgctgtgcagaagttttttagtttaactaagtcccatctatttatctttgttttattgccataataaaaaaagtaataggtgttgacgtggttgtggtgaaaagggaacactttcacactgttggtgggaatgtaaactagtataaccactatggaaaacagtgtagaaagaactaaaagtagatctaccatttgatccagcaatcccactaccaggtatctacccagaggaaaataactcactataagaaagatacttgcaygtgcatgtttatagcagcacaattcacaatcacaaaaatatggagccagcccaaatgcccatctatcaatgggtggataaagaaaatatcatacacacacacacatacacacacacacacacacacacacaccatggaatactactcagtcacaaaaaggaacaaaataatggcatttgcagcaacctggatggaattggagaccattattctaagtgaagtaactcaggaatggaaaaccaaacatcgtatgttctcactaataggtgggagttaagctatgaggacgcaaaggcacaagaatggtacaatggactttagcaacttgggg

SEQ ID NO: 762195 - DNA, 623 bp, Homo sapiens
tttttttttcttttcttttttttttagaggactttcaaacttatttggccacagaattcctttattcaaaaaacatgtattaataaccaaagggataccggttttacaaaacaacactggaaaaagcagatataaatgtgtccagtgaagcagaaacacagtgataataatgaaactgactttggtaaatatgggcaaatccaatacaaaattttcaggtcaaatataattcctttcaggcctaatcattcctgcaaattatcttcaaagctaaattagctctcaaacttcttaagcaggtaggtctttgtgtacagatattaactttacgtgatttgcattttaaaaaaggaaaggtttcaggcttttctatacaaattgaggaactattgaagtgtactctggtttgtgttgtcccttcagtgackgagaactctaaaccaatttgcaatccgacaaatccaacaccttttggataatgcaaactaagaaagtgctaattggtttccatggtcatacctacagctttatttaaatggattaggaacataaaaaaaatacagaatatataactgcagagccatttaaattataatgaaaaacagtctagttgaatgaagtgg

SEQ ID NO: 762196 - DNA, 633 bp, Homo sapiens
aagaatacacaaaatgtttcttgttctgttttctagtaagacactttgtttttataacaaaaaatccatacacttaaattgaaacttaatcctttgatcttgaaagccatgaagtttgatacatattaagtttatggcttcaaaacatgccatcatttttacattctaatgcaaagtatccccataagaaggaagacagtgaatgctttcttgytaaactacattttatttgagaaacctaatttcatagtagatccttttcaaattgattttgctattgacactttggttgctcttcagatctcatttacgaggaaaacataaattattttattagcttcaggtaaataccataacttcttcagagtagttcaatccagatgcatctaaaattttctttcaataaaaaaagtcttcaagtgaaagatgtcagcagcattcagaaaatgcaagatcacaagaaagaatacaacacaaaccaacccgtcaataaggcatacaatgaaaatcacttaatagttcactgtgtcctctttaaaaagtcactaataaactagaagtcagctcttattaagatagcagaacattagatctgtaagaaatttaaatattttctagtccaggggattttaa

SEQ ID NO: 762197 - DNA, 633 bp, Homo sapiens
aagaatacacaaaatgtttcttgttctgttttctagtaagacactttgtttttataacaaaaaatccatacacttaaattgaaacttaatcctttgatcttgaaagccatgaagtttgatacatattaagtttatggcttcaaaacatgccatcatttttacattctaatgcaaagtatccccataagaaggaagacagtgaatgctttcttgctaaactacattttatttgagaaacctaatttcatagtagatccttttcaaattgattttgctattgayactttggttgctcttcagatctcatttacgaggaaaacataaattattttattagcttcaggtaaataccataacttcttcagagtagttcaatccagatgcatctaaaattttctttcaataaaaaaagtcttcaagtgaaagatgtcagcagcattcagaaaatgcaagatcacaagaaagaatacaacacaaaccaacccgtcaataaggcatacaatgaaaatcacttaatagttcactgtgtcctctttaaaaagtcactaataaactagaagtcagctcttattaagatagcagaacattagatctgtaagaaatttaaatattttctagtccaggggattttaa

SEQ ID NO: 762198 - DNA, 624 bp, Homo sapiens
tttggaggaacatatactctctactttgctctggcttctgtccacttcgcttgattcattcatattacttcatatgatgcctatgggcccttgtcattgcaagccttgcagaaagtgtgacaacgtaaatgacagaatccagtaaaaaataaaaacaggaggacctattcaaaaagcagtaaatgagattttttcctttttccytcagtggtgttgctccaaacctgtcagggtgttttttgtttgtttgtttgtttatttttttaatgtttgtttgtttgagacagagtcttgctctgtcgcccaggctggagtgcagtggtgcgatctccgctcactgctagctcccccgcccaggttcacgccattctcctgcctcagcctcctgagtatctgggactacaggtgcctgccaccatgcctggctaatttttagtattttttagtagagacggggtttcaccgtgttagccaggatggtctcgatctcctgaccttgtgatccacctaccttggcctcccaaagtgctgggattacaggtgtgagccaccgtgcccggagggtgctttttatttactcttttttgccatactcccttggatgtggggctacgtgagtacaga

SEQ ID NO: 762199 - DNA, 624 bp, Homo sapiens
tttggaggaacatatactctctactttgctctggcttctgtccacttcgcttgattcattcatattacttcatatgatgcctatgggcccttgtcattgcaagccttgcagaaagtgtgacaacgtaaatgacagaatccagtaaaaaataaaaacaggaggacctattcaaaaagcagtaaatgagattttttcctttttccttcagtggtgttgctccaracctgtcagggtgttttttgtttgtttgtttgtttatttttttaatgtttgtttgtttgagacagagtcttgctctgtcgcccaggctggagtgcagtggtgcgatctccgctcactgctagctcccccgcccaggttcacgccattctcctgcctcagcctcctgagtatctgggactacaggtgcctgccaccatgcctggctaatttttagtattttttagtagagacggggtttcaccgtgttagccaggatggtctcgatctcctgaccttgtgatccacctaccttggcctcccaaagtgctgggattacaggtgtgagccaccgtgcccggagggtgctttttatttactcttttttgccatactcccttggatgtggggctacgtgagtacaga

SEQ ID NO: 762200 - DNA, 630 bp, Homo sapiens
caggtttttaagttagccatctttatataaattgtctcccttcttctttcggaagacgtaaaagtatattttccctagctagtgaggtgcaaggaaacactaatgttatacctgccaaatagttgttttcaaagcctataagacattttccacaagtgtctttttgtttctgtttctttttcctaattccacaaaaagtctctgtgtctgctacctaattctatcacactgatctcttctgcaggcatagtcattggttcttccctttattcttatggcaggcaacmctttgatgttactcattcattcccccatatatatatccattcatcaaactcttttcaagttaggtcctggggatactgtggtaaactggacagacatgtttcatattctcagagcacatacagtctagagggattttgtacactggagacttaaagcagacttggcttagacaaggagtcagaagaagcttccaggcagaaatgattttaagttaagatctgtggtggtgagaaagttctcttctggttcactatggagggtagaggggagggaaagatgatggtgtcatggtgcaagatgaagctggagaagaaaccatggccagaacacatgtatatatta

SEQ ID NO: 762201 - DNA, 543 bp, Homo sapiens
actttgataaattgagtaaaactaaagaaaatgtagctaattgaagatgcctttagagactgtggtattaaatgaattagaaacataactttgtatactcccttttttaattagttgttagaaaagtttcagtgctgattacaagtctagtcaatgctggtagtaactcagcattttaaattaattcaattgggtttctgtgatattatgtgaagatattccctgatcacttaaattggcttacgtttgcaaataaggttacagtaattccattaagcattttttgtttgttttacttaatttctgatagtgactgtaataattacctgacttgaacaactgtatttagcttcttataatargtatttgggaagcaaataaatggtgttagattacacttaaatcctacccggctgatgcaggtaagaaccattcttttgaagtcaaaaaagagaatcctgctcactctaaatcactatgaggctgtcctttctcttttcaacttgttttgttgacaaaattgatggcatatgaatctggata

SEQ ID NO: 762202 - DNA, 571 bp, Homo sapiens
agagagacccaggagctttacatactctggcgctggatccctgacaaaggtgaatacaactcagccaaggcaagaggtccatacatacccctgggaaaggggctgaatccagggggccaagtaacatccgtctgcaggttccacttccatggcccctcacaagaaaagatctactggcttgragttccagccaaccactggcaacagggtaaatcctgcctgagatgggacagaacccccaaggggaagggtgggccaccatttttgctgtttggacaactcagccactctagcctgtgggttttggagagtccaaatggctgggatgaggaagcaccccctgtactgcagcacagctgctttaccaaacgtggcctgactacttctttaagtaggatcccaatccatttctcctcactgggcaggacctcctagctggggtctccggccacccccactggtattctaggacagagctctgatctctctctgggacagagttcccaaaaggaggagcaggttgccacctttgttgtttgggcaactcagccattccagcctgtgggatttg

SEQ ID NO: 762203 - DNA, 621 bp, Homo sapiens
agaaatatgctgagtagttatctttggcaggatcatagatggttttattttcttctttttatttatctacattttccaaattctctaccaggaaaatatattacctttataataataaaaatatactaagtgaaattttaaaacaaatgctaatacatctcagtcaataaaaaatatactattcggtatttcaatactaaattcacttgtcctttaaaataaacaaacaactctggataaaagacaaacattctccatgaagtaaacctagctcacagatgccacgccaagggccatctttgttctgtcaaccatgaatgtccttttctttaraggtttgtttttcaaataattgttttaattatcttctctactttataatttggaaatctagcttaaaaggaatagtgtatgtgtaaacaaattctaaaaaacaaaatgatcaaaataagtatcgtttatgttataaaaatttttcttgtggtattacccacatgaacttctgagtgttgtaaagacagtttgtttacttaacatgttgtacttttatagtgttattttttgtaagccaatgcaatgttgccaatcaacaattgtgcaaatgatctttggagaatgatg

SEQ ID NO: 762204 - DNA, 538 bp, Homo sapiens
gaagtaattccaaaacctagaaggaatactattttttcatatataggacatactttcagtgttttctctatatgtctctctatgtacatttctatgcaaatataaaattataccttgtatattttgtaactatttttaatggagaatatgtagtgatcatatccttatgtcatatattagtaggcgtaatttatgtaactacttgtctcgagttagaattaggtattctcatttttttctttattacagataataagtcattgaacatcctcgcacataaatctttgtgtacaagatcttctctcacctttccacagacaagacagatgtsttctagaaaactaaaatatgattccagaaacattaatttgttagttcagtgatattttataaattacttgttcatatttacagttatagaacatttttcctctgaacattctgagcagttttatattaaaacttacttgttattgtttaatggaaccatttattttagtgataggaataaagaatgtggcaggaaaggatttggagt

SEQ ID NO: 762205 - DNA, 615 bp, Homo sapiens
agactgtgcgaaaagatatacaagatataaaagataaacaagaatacctgaataaatgggaaacatatatcaacaactgatgtaaaaattaatgttttaaagataccaaaaatccttgacaattaggattctaaaatctgtacacaagaataaaggcagtcacttccaaaatggccaaataggaacagctctggtctgcagctcccagagagattgacgcaaaagatgggtgatatctgcatttcaaactgaggtacgtggttcatctcattgggactggttggacagtgggtacagcccatggagggcgagcagaagcagggcagggcattgcctcacccgggaagcacaagggrtcggggatttccctttcctaggcaagggaagccatgacagactgtacctggaggaactgtacactaccacccaaatatgcgcttttcccacagtcttcacaactggcagaccagggaattcccttccgtgtctggctcagcaggtcccacacccacggagccttgttcactgctagcgcagcagtctaagatcggcctgtgagacgacagcctggtgggaggaggggcgtccaccattgctgaggcttgagtaggtaaa

SEQ ID NO: 762206 - DNA, 615 bp, Homo sapiens
agactgtgcgaaaagatatacaagatataaaagataaacaagaatacctgaataaatgggaaacatatatcaacaactgatgtaaaaattaatgttttaaagataccaaaaatccttgacaattaggattctaaaatctgtacacaagaataaaggcagtcacttccaaaatggccaaataggaacagctctggtctgcagctcccagagagattgacgcaaaagatgggtgatatctgcatttcaaactgaggtacgtggttcatctcattgggactggttggacagtgggtacagcccatggagggcgagcagaagcagggcagggcattgcctcacccgggaagcacaaggggtcggggatttccctttcctaggcaagggaagccatgacagactgtacctggaggaactgtacactaccacccaaatatgcgcttttcccacagtcttcacaactggcagaccakggaattcccttccgtgtctggctcagcaggtcccacacccacggagccttgttcactgctagcgcagcagtctaagatcggcctgtgagacgacagcctggtgggaggaggggcgtccaccattgctgaggcttgagtaggtaaa

SEQ ID NO: 762207 - DNA, 656 bp, Homo sapiens
agttaccatgaatgagatccagacatgacacatagcattatttgaggccaagaatattatataacaaaattcctagacagatattgtataatacatatatcgaaaatgaatgggtaaaaaatattatcaaaaccaagtgaaaaaattgtcttaaaattcaatagtaccaaatagaaatctacaaattawaattttaacaggcaagtaaaaccacaaattaaatactgcatgaagagagtcagaaagcaacaaagaaggatgagggaatgaaatttatgaagaaagtgttaagtaaaatagaaaagaataaaaatgtcagcatatatttaatagccattctagagagagtaaagagaaaagaagcaatatttgaacatttctaagattctaaaaacacattaatccttatatctagaaataacaagtatcaagcaagataaaaataaagaaggaatgaaggaagaaagaaaatcaatatgtacccatagcatcaaactccaaagtcaaagtgatcttaaaaacaggaagacctatcaccatcaaataaataatactttgatatattgattttactagcaaccatatgagccagaactcaaggaatactctgcaagatgctaagaaaaaataatcgttagcacctaatactctcaatt

SEQ ID NO: 762208 - DNA, 644 bp, Homo sapiens
ataacattatttaaacttaattctatagggtatcaatgatgaattgtgtcttaggttgaatatgttaccacaagtttaataagtttctatctttctttttttttttggttaaggatatattaaacctatattcctccttctcttccttcttttgtttctctttctagtttggtcaatcttttctttgtgaaagatctcactggtagggaagaagaaagtactatagcatagtatttcttaaagtgtgtttcaagggttgttaaacgtgatacacattaaaaatagttaatcaaataattttaaaaatatgctatataaaactaagtttaaaatatttatttaggcaaaaaagtaagaccctgtttcaaaaataaaactatttatatgattattatttgctttcccagctgaagaacaagctttctgagagtggtggctgagtcactgttgctcctgcttataaatccagggtctagtataacgttctgtataaggtacamcataagttattatctttagttgaatcctagacctcctgatatgctaatgtactgagtgaaaatctgagaaagaaaatgcagtgtttaagtctctgaaccaaaataactactgtataattttaaaaatgtattatagttttgaaa

SEQ ID NO: 762209 - DNA, 488 bp, Homo sapiens
attagttagacagtgattatcttggataagagcccaaatgcacaggcaacaaaagcagatactaacaaatgggattgcattaaactaaatagcttaagcacagcaaaagaaacatttcagagtgaagagacaagccatatattgggagaatatatttgcaaatcatacattggacaaagggctaatataaaaaaatctaagaaactcaaactactcaataacaagaaaacaaataaccatrttaaaaatgggcaaaggacttgaatagatatttctcaaaagacgacatacaaagggccaaaagatataggaaaaagtgctcaacatctttaatcagaaaagttaattaaaagcacaataagatatcacttcatacctgttaaattggctattataaaaaagatgacagataagtattgatgagtactgtgggaaggtgagcccttgcacactgttggtattttaaattagtacatccattttggaaa

SEQ ID NO: 762210 - DNA, 392 bp, Homo sapiens
agcacagcaaaagaaacatttcagagtgaagagacaagccatatattgggagaatatatttgcaaatcatacattggacaaagggctaatataaaaaaatctaagaaactcaaactactcaataacaagaaaacaaataaccatattaaaaatgggcaaaggacttgaatagatatttctcaaaagacracatacaaagggccaaaagatataggaaaaagtgctcaacatctttaatcagaaaagttaattaaaagcacaataagatatcacttcatacctgttaaattggctattataaaaaagatgacagataagtattgatgagtactgtgggaaggtgagcccttgcacactgttggtattttaaattagtacatccattttggaaa

SEQ ID NO: 762211 - DNA, 435 bp, Homo sapiens
aattcagatattcaaaagtcattttttctttgcaatcatagttgttttaattttatcatagtctaaaaaatttttcttttacatatgatgtaggaaacatggggttttcaataaaattgtgaaagataatgttacagtattttttttataaaatttgaacatcatgcaatacatttaaacgtactgaaaacttttttgagactagattttcttttcagttgtaaagtaatggcaaataatttgttttaaatatggaaaatgtaaaraaataaattcaggcatactttcattacctagagaaaccactcacattttaatatattttctccctgaaaaaagcctatatctgcatacgtgtatgtatagatatagctgtttatcaattctatgcattatttacatgactgtgttgtttctttaactataaatatttgc

SEQ ID NO: 762212 - DNA, 527 bp, Homo sapiens
  misc_feature 1, 2, 3, 4, 5, 6, 7, 8, 9, 10, 11, 12, 13, 14, 15, 16, 17,18, 19, 20, 21, 22, 23, 24, 25, 26, 27, 28, 29, 30, 31,32, 33, 34, 35, 36, 37, 38: n = A,T,C or G
nnnnnnnnnnnnnnnnnnnnnnnnnnnnnnnnnnnnnnagctagaaaaagagctacagagtaaacagaaagtagaaaaaaggaaatgacagagaaaaaatttaaggaatagaaaataaagttatagtagagtgaattaaagccaaaaatggtttattaaaaattataacaaaataaacaaaccttaggtaaaattaatcaaaataagagagagcaaaacttaaaatatgtgaacaaaagtataaacacaaaagagaatgataaaaatataatgtttgtgccactaaatatgaaaacatagacattatgaacaatttcttcggaaactacaacttgactaaygactcaagaaaaaaaaaaacactggacaggtttatacattttaataatataattacttctcaaaagtcagccaaagagccactagacacagatagatttagaatcaagttctaaaaatgattgaagataaagtattttgaaatgaaactttttaaaaatggacaaagatgttttattcatcttatg

SEQ ID NO: 762213 - DNA, 599 bp, Homo sapiens
ttcactaatgcttttctctattttttttttaatagagacggagtctcgctctgtctcccagataggagtgcagtgatcttggcccactgcaacctctgcctccagggttcaagccattctcctgcctcagcctcctgagtagctgggattataggagcccactaccatgcccaccttttttttttttttttttttttgtatttttagcagagacagggtttcaccatgttggccaggctggtctcgaactcctcaagtgatcctcagcctcccaaagtgatgggattacaggcatgaaccaccacgctcatccatgagtgcttttcttaatgccctagttaaaagaataccttcagaagcttcttgtggatatgaytggggcttagctaagaagagtacacaaaatatattctcttcaacgttcccatctccctgaatttttagactccttctcctatggcatatcagggaaattaaagcattttaaccacatatctataaaccagctttgaatccaggcttgaatttgctaacttaacagacttttaatgccacttgcatttcttcaaccaaaaacattcatttttaattttaaatga

SEQ ID NO: 762214 - DNA, 635 bp, Homo sapiens
agtggatggtaaatgtagaaaatcaaagtcagatgacattgaaagacacaatacacacataaaacatttgttagaatactacaaaaagtgactgcaacttttacagtgtttttgtcccatcgatatgcatgttttattttaacagtgatccacatgcttttgtaaagagttgtaaagacacgggttgatccattaatgaagttaattgacactaactgattgctttcacyttaaaccagaaggttcataaaatgtttagccatttacttcattgctgcattggaagcacagttaataggaagaagctgtataaacaatggaacccagaacaatttaatgggttaacaatattttacaaactcagaagttgtgattcctaatcctgctcttatagttaacagagcatgtggtgtttctgcattagtttctctggttataaaatagctgttttcctcaactctcaaggggatcctacaaaatcaattgaataacgacagataagtactttgagcttcttggagagaaaactaaatcttataattgccttcttccaccaccttcattttattttatagactgaactggagtaaatataagagatggattaatcttatctccttttatttttctctcag

SEQ ID NO: 762215 - DNA, 504 bp, Homo sapiens
tcttgatcttgtaccttacaacgtccagaattgctagcaataaatttctattgtttaagcaagacagtctatggtatcttgttataacatcccaagctgactaaaatagggtcaagttctgccttgggacattggcgaatagcttttataaaaataaatcagtgagtgtaaaatatacgcactgagagcattttaaattttatagyattgttatcttctttaatgaaaacaatatcaattgaattaagcccaacttcatcacactcattcatacttactcaagccatcaatatatacatattcttcaatcagaaaaactatgaaagttcttttttttctttcctctagtgtaatatggctcttacaatgtttataaaaatgcttttatacaaatattcctaggatgaaaaaaaagactttctcgtaagtaaaatttggcctggagggaaaaataaaacatggtaggttagagctggagataataaaacttctgagcaaactttg

SEQ ID NO: 762216 - DNA, 624 bp, Homo sapiens
tcattaaaaatatatttattcccgattatattgtatcctagcacttttgtaaatattggggatataacagtaagcatgataaaggctctgccctcatgaaacttctattgaggggataaacagaataatatgattcaatgcctatctttaatcagtcaataattagaacacttgctttcactaatttgcagccgtatgattttttgtgtgcatctacaacttttaattttaatatatttttcctcataagaggatgaagatatatgttttatttaacacaaaacaatagwtgaggataaaaaaaacagaatataatgtccttttttaagatatcaatcagaaatgaacagatttgatttgtagttattttctcaaatagtacccactacagtattcatgcctgttatactattgcagtaagccttctcttctacatgtccacagcattttgtacaagaatcataacactttggttagagttagttggacacttgactatttcttccaaaacataaataaggacattgttctattcatctattccttaaaaaaaatctgccctttattatattccatcgtatcaagtagaataaaacttaaaattgaacacagggacaaaaagct

SEQ ID NO: 762217 - DNA, 582 bp, Homo sapiens
cagaggaaagagcccgtgggaagttctaggaatataagaattaacaggctgcaaatgtttgggtgtgactagtacacagggttcctgggtgtttgtatgtggcaagtaggaaaagggctggcagtagcggtagaggaaagacatgaatttgggaggtaagcagggggtcaaattgtgaagggctctctgtatactgctgaagattctatagtttctcctgaaatccatgagggagccccctgaaggattttggmcaggaaagtgtcatgaatcaaatttctattttaagaatagtatcgaggcagcaatgtcaaagtttgtttagaaaataggatggttcctgtaatcccagaacttttggagaccaaggcgggaggattgcttgagtccaggaatttgagtccagcctgggcaacatagtgagacctcatctctacaaaaaaaaaaaaaaaaaagtttttaagttattcaggcatggtgacatgtgcctgtattccccgctgctcaggaggctggggtgggagaattgcttgagcctgacagggggtacaggctgcagtgagctgtgattgtgctgctgcg

SEQ ID NO: 762218 - DNA, 597 bp, Homo sapiens
acgcctagctaatttttgtatttttagtagagaggggtttcaccatattggccaggctggtctcaaactcctgaccttgtgatccgcccatctcggcctcccagagtgctgggattacaggtgtgagcgaccgcgcccagccaaacatttttaaaatcatggtatatctctatttaatgtaaaagaaaaattcatgaaaacctgctgagaatatttgattacagmacactatgtaaagtttgaatacacacactaatacatatacgatgtgtatacacacagaactatgcatactgaaaaatatgaaaggataggaactgttaagggaagtcatctttgtgtgttgagattatgggaagctcactttttacttctcacattcctatagtttaaaaattttttaataattatatgttaactttgtaaatgaaaaaatatattttaaagatattcagaaaaagaagatatgtttggttattatttaacttttttaggactatgaaggaaacttgtaaactatagtgtaaactaagattggacattaaaatgtgggcctctaaaaataattgcagagcacacttccttaaaaataggatt

SEQ ID NO: 762219 - DNA, 597 bp, Homo sapiens
acgcctagctaatttttgtatttttagtagagaggggtttcaccatattggccaggctggtctcaaactcctgaccttgtgatccgcccatctcggcctcccagagtgctgggattacaggtgtgagcgaccgcgcccagccaaacatttttaaaatcatggtatatctctatttaatgtaaaagaaaaattcatgaaaacctgctgagaatatttgattacagcacactatgtaaagtttgaatacamacactaatacatatacgatgtgtatacacacagaactatgcatactgaaaaatatgaaaggataggaactgttaagggaagtcatctttgtgtgttgagattatgggaagctcactttttacttctcacattcctatagtttaaaaattttttaataattatatgttaactttgtaaatgaaaaaatatattttaaagatattcagaaaaagaagatatgtttggttattatttaacttttttaggactatgaaggaaacttgtaaactatagtgtaaactaagattggacattaaaatgtgggcctctaaaaataattgcagagcacacttccttaaaaataggatt

SEQ ID NO: 762220 - DNA, 465 bp, Homo sapiens
accttccttgtctatatagtttttgtgttgaaatctattgtatatgatataaatatagctactttttctcttttttgtttccatttgcatggagtatctttttccagctctttattttcagtctgtgtgtctcttcataggtgaggtgtgtttctagtaggcaaaagaccattgtgtcttcttcttatatccatttaaccatactatgtcttttgattggggagtttagtccagtyacattcagtgttattattgctaagtaaggatttactcctgccattttgttatttgttttctgattgtcttagagtcttctcttccctttttcttatcttcctgacttcgttttagtgaaggcggttttctctggttgtgtattttaatttctagcgtttttgttttcattgtatattttttgatttgaggttaccatgcggcttgcaaataatatctcataacttatta

SEQ ID NO: 762221 - DNA, 483 bp, Homo sapiens
aaatttcagagtagaggccaaatacattcaaggaaatttgtcctgatgtccaaaaagaaatcaaaatcacttttatccctaagataatttttaagtgaatgctggtaagtgctaagaagaaggtgtgagggagcatgggcaggggggtgccctggtgaagccttcactaggaaggtaccattggtgtgcagaccaacccacatgaggcagctagacttcagttaccagaaaggaaagartaacaggcagaggaaagagcagagccaaaggccctaaggcaggaacgtggtgtacctctcaggcctgctcagccgcagcaaggaagcaggaagggctgagctcagagaggcaggagtgagtcctagggacctctgcaggtctctggaaggacatggttcttcctcacaggagggctttgagcacaagagtggcctgatttcactgagatgttaacactgctctagctgcagtgttcagaacaga

SEQ ID NO: 762222 - DNA, 621 bp, Homo sapiens
ttaaggtcttcggaggagaattatagtttggaatttaaaaaaagcaattgtgtgtatgatctatattaaaaccaccgagtaaacactataaatatagtttatatattaacagtaaacagttatcataaacactgcatttaagctcaccaattcagcaacttacctaaatgagaattttcatttttgttccctgtttccacttttttttaatgcaatgctattttatttgtattaagaggaaaaaagtttttagccrcagaaatgtttgtcggtagctgcttcatgctcacattctcacaggtacatttttttttcataaatggtgaggaaatcaatgcttggcagagctctgacaggctattggaccgagtgcttgtcttcccaaggtccctggcaataggaagaggcacttagatgttatgcctgggtctgcatggctgacacatgaggaaagttactgaaggtagtatagctctaggcagaaatatttgaaataaagcttctaaagcattaagagtttttataggaagtcactatccactgctacatgtatattttgtgagataaaaaacaaatacttgtgtgcataaaacaagaactattgcctaagggatattattt

SEQ ID NO: 762223 - DNA, 642 bp, Homo sapiens
ttagttttgaaaaagcaccaagttacaaacaaaatacatttgctattgtcaagaactactttcagtttttgaaaagtaatttaaagtttaataaaaaatcagagtagctttttacgttcttaatagaaaccattcatctttagtgagtaatttgcaataatgtgaagtacaaatttacttttattgataggaaagtgttagttaggggatmagaattggtattaagtatgactaagagttccaagcatctataaatctttatgaagactgaatacttgtaaggtcagagtaaatcatgcctagaaaatgtcacatgtatacatgcgtgtgtgtatggggaaattttattgaagtgggcttactattatgttttctgttggaacatgcaggccccagattttttccagttatttactttaattggcattgtgttttatataattttaaaagacatttggtgctttgtcatgtttgacacaaacataggacataggaaagaagagataacattgccctttcccacagatagtttgattgtctgcatggaaaacccaagagatgctataggcaacccattggaattaataaaatagccaattttctgagaataatgtcaacatacgaaactcactggtattttta

SEQ ID NO: 762224 - DNA, 667 bp, Homo sapiens
cttacccagtcttaatttataaaatttcataattaaaacactattgtattgattcactcattaataaatgggccagttaaaaagagtaggggtcacactttacacgtacggaaacttgacatatgagggggtagaaaataaatggggaaaagatggactatcaatacgtgatgctgatatgatcggttacctacaaggaaaaatatctctactctcagcatatcaaagatgagtcttattaaatgtagaaatctttaactcttacaaaagaaaatatgagactggttatatatatggcattgagaataaagaagacggtttaaacaagaagaaatgcagaagctcacaaagaaatagataaataaaactaaatgaaaattgaaaacactacaaaatatgccattgtttacaatktgactattcaagtcacaagttgggaaaagataattatagtccagtaaccaatacaaaattagtattcagaatttattaagaactcctgcaaaccagtaagaaaaaccagtaaataaataataaaattggacaaagaatgttaacagacaactcaaagaaaagaagcctgaataattaaaaaggtttttaaagcatgcccagactccttgttgtgacgacttcgaagaacaatgaagcaatatctgataagact

SEQ ID NO: 762225 - DNA, 632 bp, Homo sapiens
gaaaaaaatcatgagatggcttgagattagtcagaattacacaaagaagagataagatgtcttagtcagtttggctgctatagcaaaagtagcatagactgggtcgctcacacttctggaggctgggaagcccaagatcatggtgccagcagaatcagtgtctggacagggctcccttcctggtttgcagacagccatcttcttgtatactcacatggcagaagaagcaagctctagtccctctcttcgtataagccactcatcccattgtggagcgccaccattatgactttatctaaacataattagctcccaaagaccctwtctcctaattccatcccattaggggtgagggtttcaacatatgaattttggaggggcacaaacatgtagtccatagcagaagagtaatgtggtgtcagaactccagatcaaatatttacattattatacatctgtaaccatttatagtgtgtgctaccaaagcaagaatagacaatagaacggaacagacagcccctacaaagatgctagtctacttaagtggcagttatgatattaatgaaggaattcctctaggtcctgatgtactacatttaaaaatcagtcaactcagagagggaaaatcatcc

SEQ ID NO: 762226 - DNA, 600 bp, Homo sapiens
ataactctaaacatgccactaaaatgaattatgtgcaaagcccattccttgcaagttagaacttctacatgttgattcaagtcccattcacatggctcttcaactaatctctcagtgttccaagtcaatgattgggcttgaaagcttttggttgggggaaaaaaaatgggcttcatattttaacacatacggagttaagacaaagacagtatggagatataaagtgattcttttaaaaagatcctctttatgtaatagtttaatcagatgttgtatttcatggtgtgatagtcacaatgtcttcaacatcccaatgtcataagtgctgcctaaattctggctatgtccaaaaggtacttttaagccaaaaagcaggattttccwgccaaggtaccctatagaatgtttcattatgtcatatgctagtctaatctctacagtcttccagaaatgtcccaccagtccactctttcgctgtttcagcctgacttggacatgctcttgtccatgatcctgaagtctaagatgtgccacatcaccactcccaacagcatgtccaaagactcccagaattaattacattatgtcctgatggtgtct

SEQ ID NO: 762227 - DNA, 631 bp, Homo sapiens
gtgaggctgagatacttccttggactgcacaataaccaagaaaaaccacaatcgaacagtaagagaaacagttctttgaccatgtcatccttctaatatgctagccagagcaattaggtaagagaaaaaagtaaaatgcatcctaataggaaaagaagaaggaaaattgtctctatttgctgatgacatgatcttatatatagaaaaccctaaagactccatgaaaaattgttaggactgataaatgaattcagtaaaattacaggacacaaaatcagcacccaaaaatcagcatcatttctatagactaacagcaaactatctgaaaaagaaattaagaaaataatcccatttacaatagcaaaaaaattaaatacataagtataaatttaaccaagaagataaaatacttgttttctgaaagctataaaacactgatgaaataaaktgaagaaaacacaaataaatggaaagatatcccgtgtttatagattggaagaataaatgttgaacaggtgttcatactacccaaagcaatctacagcttaaattcatatggaatcataaaagataccaaatagccaaaacagtcttgagcaaaatgaaaaagtctggaagcatcatgccccct

SEQ ID NO: 762228 - DNA, 601 bp, Homo sapiens
aaatattttctcccaacatgaatttgaatattggcagctgtttagaaggatgagctatttcagaccaagaagcatggaaagtaaatttacccctgtggctgctggccatagagaataggagttcaaatggattttctaaactgtgcaaggaataaaaatttcttgtttttgtttcgtgtctgaatgttttccatgaaactaaaatygaacacagagcagttaaaaagaaatctgaacattttcctacaggggatttttgaaatggattgctgcttttcctaaggaaaaagaaaaagtaaagtgtagagctaaaggtgggaattttacaaggtgataaattgcaagtaccaagaagagtaagtcgtgaaaattatatcttctttcacgtttaataacgcagggatctttctattataaatagtgaggaagatatttattttcagattacaatgttcgtaaagatatatatatatatactaatttatttattaaatatagcacactctaggttgccacaaaagcaaaatgaaacagaggaagtggctttttatctagctaagtgagacaaaaaccatcttattcaaggaaagagagatttgca

SEQ ID NO: 762229 - DNA, 595 bp, Homo sapiens
tattctaatggactcgtacattttatttagtaacctgctttttccttaaacttaatatgagcaccattacatattaaaatttttttccattccacatttaattcctaatacaaaaaaagtgctctgcatcagtttgaatgactaggtattatataattattggcaatgtaggctgtttctatttttttttttttataagcaatgttgtattgatacctgccttagtgggttcaggctgctataacaaagagccacagactggaggtttatagacaacagaagttctggaggctggaagtctgagaccagggtgccagcatggatgggttctggcgagggccctcttctgggttgcagacttctgacttctcattgtgtcstcacatggtagaaagagggcaagagagctctctgggatctccttgataagggcactaactccattcatgagggctccacccttatgacctcattacctcccaaagaacccccatcctgatcccatcacactggggattaggacttcaacatagggattggaggggatcacattcattctgtgacaatatctttattgtgaagttcacgtataatg

SEQ ID NO: 762230 - DNA, 596 bp, Homo sapiens
tgccacttacccgctgtgcgacccaacgtacgttgcttaacctttctgagcttcagtgtactcttaataaaatgaagatggaatagagaaataggcaaaggattcaaacaggtagtttaacagaaaaggaacacaaatggccttaaaagcattaaaatgggatgcttaaccacactcataattaaataaatacaagttaaaacaagatgtatttcagcccatcaaactggcaaagtgaaaaatgtcaagaatgttcaatactggaggygtggagaaacagagcttcttgtgtactgtgaagatggaacagcttttctaaacagcaactaggcaataggcatcataatgtaaaatgcatcttttctttgacttaccacctccatttctaggagtgggtcctactgatcttgccatatgagaacacagagtcagacaaacaaggacgtttccttgtaacaatgtttataagagcaaaaagactgaaaacaatgtaatgtccctccatgaaatacacataataagactgtgtgagcctgggcaacatggcagaaatcctgtctgtacaaaaaatacaaaaattagccaggcctggtggt

SEQ ID NO: 762231 - DNA, 631 bp, Homo sapiens
cagctacccctggcccctcagtttcctcatctgtaatttaagaataaaaatgccggctgggcacggtggctcacgcctgtaatcccagcactttgggaggctgaggtgggtggatcacgaggtcaggagatcaagaccattctggctaacatggtgaaaccccgtctctactagaaaaaaatagaaaaaaattagccgggcatggttgcgggcgcctgtagtcccagctactccggaggctgaggcaaaagaatggtgtgaacccaggaggtagaggttgcagtgmgccgagatcatgccactgcactccaacctgggcgacagagcaagactctgtctcaaaaaaaaaaaaaaaaaagaaaagaataaaaataccattcgggtgcagtggttcatgcctataattccagcactttgggagacaggaggacttcttgagcccaggagtttgagaccagcccgggcaatatagtgagaccctatctgtacaaaaattttaaaaattacctgggtgcggtggcatacacctatggtcccagctattcaggaggctgaggttggaggatcacttgagcctgggaggtcaaggctgcagtgagctgtgatcatgctactgcactccagtctaagc

SEQ ID NO: 762232 - DNA, 629 bp, Homo sapiens
tttctggtgacaagaatatttattctctcctggcacagggaggtcagagtgtcccttttgtatctgttgttttccaagtgcctttagctagaaaaaaatccttctgccactcttcagcaggcattgttctagtgtttgggacttatttgtatatcaaagacacaaaaatccctgcttgtgtgtcttacattctaggaagagaagaaataaacataataagttaattctataatactttagaaagtaataagtgctgtaaaaatcaagaagaagacacctgtgtgcatgtgtgtgtatgttgggcgtgaggggtgggctaagagggtagcattttgtcgtacagatcgccttctgaggagaggatatttgagcaaagacttgaaggaggggaaagaccgtttcaggcagtgagaatagccagtgcaaagccctcrggtgggagcatgcctggtgtatgtaaggaagcttggagaccaacataagagtatagtgagcaagattgagagtgtacgagatgaaatcagggaggtcacaggggcaagagcacacaaaacctacagggtattgtcagggtttgccttcaggagccatgggggcattttgagcaaagtgaagtgatctgacttaga

SEQ ID NO: 762233 - DNA, 579 bp, Homo sapiens
caaggggtggattattcatgaattttctgggaaatgggtgagcaattcccagaactgagggttcctcccacttctagactatatagggtaacttcctgaggttgccatggcatatataaactgtcatggtgctagtgggagtgtcttttagcatgttgaggtataataattagtgtataatgagcagtggggacaaccagaggtcacttttgttgccatcttggttttgatagattttggccagcttctttactgcaacctgcattatcagcaaggtctttgtgacccgtatcttatgctgacctcctatctcatcctgtgactaagaatgcctaacctcctgggaatacagcccagtaggtctcagccttattttacccagsccctattcaagatggagttgttctacttctaacacttctgacaatttccataatttctccaggtgcagaggcctgctcatcttttctactacagaggaggttcaggtacctgtctacaagcaaaactgttgtctcactcaaagagaataactaaatatttgcctccaaaaatttttatctctctgccccagaactg

SEQ ID NO: 762234 - DNA, 621 bp, Homo sapiens
catggcctatgccctacttaacagaactactaataaataatatttatttctcttattctattatgtacactatacagcgtagtacatatatgaatataaaatatacatattgatttaacaataagtgcacaacttgaaaatatgctggaaattgatttaggttgttcttttttaaaactttagtataaaatgcttttaaaagactgaagaacttattgcaacacaagaacgcttattgaarcatgcatttttaacaccagggcagagcagacagcctcgattaggaaagctagaggatatttcatttgattgctccaaaagatgaaaaggcaagaaagaaaaaggatgaaacaatttcagatgctttcaatgcatttatcaaatcagaatgaactgcttttgactgttgatgtaataagtcagaaggcattcactaaaccaaaacgcaagaacttcttttccactgtgactaattcaacttaatgaattatttttaaaaaaaccctacatatatgagatacaagaagaaaagggaagatgatagaaaggcaagtaacagctagtacattttatgagaagacaatagccacaattttgaaccgattaaagttagaatttctc

SEQ ID NO: 762235 - DNA, 643 bp, Homo sapiens
gagctaaggtaggtggggcatgggaaggctaagaatggcctcgtgcacagggcaaaatcaggggcccacccattaagtgcccacctggtgctccaacagccccatagagacccctcccaacccacttcatccagcgcacataaataagcaaatcgatgctctgccactaactaattgtgcaagtcattgtaatattctggaggtgcccctaggccactcccaggaagcacagagttgacagcaaggccactcccagraagcacagagttgacagcataggacgtatgtcatgggctttgggctcaagcagacctgggttcccattgcagccctgcctgctactaaccataagacctgactgagtctcttttcctctctgggcctcagtggcctcatctgtaaaatggggctgacacttcctactccctcattaatgccctgataaactgctaccacgagcacggcattgtcagtagctctgggaaagaaaaccccagggtgacgagggtgcagaggagggagggtgcggggaagccaccctgccaggtgacagcagggcagagaaggtccctggaaggggcacggggcagggctgtataggatgagctggtgggtaagtctggggaagccctgggtggtgtcc

SEQ ID NO: 762236 - DNA, 613 bp, Homo sapiens
ttttacaaacgaggaaacttgcccagggtcacacaactattcagtagcggtagcaagatttgaacttaggcagcataacccgagggttgagggaggcatcgtcccctgagcagagaatcttggaattagaaggagccagaaccccaggttcacacagcactgactcactcggtggtattagggagtctccacctgtctgcacttcagttgtcccatctgtaactgaagagggttaaggaaggtgacttgcaaggctcctctgagcactggcagatgtctgaggatttggggcatctctaggaacccccagagactgttctgcatgagattcacaaggacgcccacccccaggggtccasttagcccctggagtgtggtcttaggcagagcccaggtgagggccctttgttgaaaacccgactagccacctggaacaggctgtctgcctctgagaggagaacaggtggccaggacgacaagccagaaatggaatcccagagccagaggagtctgcaggagagttattcaggccagccccctgtcttcatgccaggctgtgcttagaagctgaggctcccagcaggaagggatccgggcacaactttgtgcccag

SEQ ID NO: 762237 - DNA, 624 bp, Homo sapiens
aaggctcagggaatcctggggacccccgcaaggcccctgcagccttagggcagatttggtgttagggtcccattctcagcagccacagagactgcttctagagctgcagatgctccggcgcagaggccttggggcacaccagggcctccttgtttcagagtctgtgttaaccccttctgtgccagccctggcaggctgcgagggcccaggagggacccggggtactgagtggcaccttctgtggcttcctgtggaatcggctggggcgggtggccgtctaccatggctgagctgtcctcctccagcacgaggaaggggtcggctgggcagcacgcccgggccagcrtgagtcaccaacagcaggatttagttagtggggagctgactcagcaaaagaaaggcgtgctggggaggcagggggcaagcgaagcgttccagctgagccagcaggggaggggaggaggaggaaagacaggagggactcaggcgacgaaggtaggacttagacacgtgggttctggggccagtttgggattgccttggacgtgacaccacaccaacaccttggaccttctggcactcctggccctccacatccccactggcatgggggggcagggtcca

SEQ ID NO: 762238 - DNA, 521 bp, Homo sapiens
aggctgcacagctaggcagatcttctgcttttaggcacctgcctcactgtagggacagctgagctctacagaggcccaggggtggtggatgagagcccaggagggagaagtccctgtgaaaccagggaggacctgaaagctaacaggagggaacagcgtgagccacggggttgggggattggcaattggaggggacgtaatgcggggagttaccacctacagacgcgtcccaaaccccaggctttcaccccacctccactcccygctcatttttaatacccgtgcagtggggaattgatactgtggttttcaatgtcacccacactgcagcacggccacagtcaccatcccgatttttgctacaaatgaaaattactgtataatgagctccttaacacttttctttaaacctgtgtttggaagacttgtgttggtgtggccctgtgccctaatacctgtgaaatcacagcaccgatgagctggttccaatttttaaaatatatacatgcagtacttccatg

SEQ ID NO: 762239 - DNA, 691 bp, Homo sapiens
cctttgcagggcaggtctcagattctctctgactgcaggtgttctggtatcccagataagtaggattatttctggacaagaaagggagaaagggaggagaaaaagaggaaagaggccagggtgagggacagaaaacaagtgttcacacaccacaagaacattatgagaaaaatcgaagtagattagcttttgtacwtaaaattctaggctataactttctgagtaagtttgaattttaaaaattgatttttacactttatgtgaaaaaaatctgccagaaaattttttctagcagaaaagagaagacacacttgagttgggtaactgaaggattaacagagaaattatcacaaaggtgtaagcaggaagagcaaaaagggatagaatagttccctaaactagtgacagcagtgtaccattggcagccccatgtgaaggggcaaggagactgagtgccaccacccagagggagccagccatccaatggagggggtggccttccacaggaagatgcagggacccagcagggaaggagccaggggaataaaatcccaactccactcttcctctgccctcttccccttaccccaaagtggccaagctgccccagaagccagagggcaaggctgccaacagatcagtcttatggagcgtacagcagggcagaggcagagggggaatgcatttaaag

SEQ ID NO: 762240 - DNA, 517 bp, Homo sapiens
tcgctatgaagagaaaaagagcagccctcaaagctcgtagcatacctgggacccattcaccacacaccatttgtactcagagaagcgaggtagcccaacgtcacacagctagcaagaaaatgaacacggggttaagaccaaggtcttgctggcttctctacctccacccacagctgcagctgcaccagggagcttccatttcccaaggcaccgaggcacacagtcctggcaccagggactgactgagcacttgtctctgacctgtggccacctcccatccctgcccagtcacctgtacacttagcaactactatggccrcctaagcaaatgccggcaagcatggctctgccaccgacaagcaagacaccagaaatgcagagacagagactgtcctcctctctgactgaaagaaatgaaaggtggctccatggagcctcagctactatgtgcctcacaactgatcctactgcaaaagatgtaacattttttaaaagttgtggtaaaataagatgtaac

SEQ ID NO: 762241 - DNA, 594 bp, Homo sapiens
tataaatgtcaccatcaaatttagcctgtgccacaaaaaaaatccctatctgatcattcccatctaggtcaggaaagtcagactatctcctaagaatctttaaattattttaaattaaattatattaaatgtataattgatataaagtatattaactgtccagcctcaaaactggggaagtactcttataatcctccaagaactaaggctcataaaccccaccctttttttttttcttgttaattctaattttaaaaaagagtttggtatggttttaaagtttccattgaacctctgaaggtggcttatgtctcgactcctcttctaggactggtcatgagctgasaagcatagaggcaaagtatctcaacattacaaaacccccaatcttcaaggaaaggagcacattaccatggagccacaggactccaaaggacctcagaaagcatttagccaaatctccttatgcaggaaataaatgagaatttaaggctcagatgggttaaggtgatttgtcaaggtcataagaacttgtcagttccagacttgtagtccagggctgcgtccttttgtaaaccagaaacgtctgcatag

SEQ ID NO: 762242 - DNA, 594 bp, Homo sapiens
tataaatgtcaccatcaaatttagcctgtgccacaaaaaaaatccctatctgatcattcccatctaggtcaggaaagtcagactatctcctaagaatctttaaattattttaaattaaattatattaaatgtataattgatataaagtatattaactgtccagcctcaaaactggggaagtactcttataatcctccaagaactaaggctcataaaccccaccctttttttttttcttgttaattctaattttaaaaaagagtttggtatggttttaaagtttccattgaacctctgaaggtggcttatgtctcgactcctcttctaggactggtcatgagctgacaagcatagaggcaaagtatctcaacattacaaaacccccaatcttcaaggaaaggagcacattaccatggagcyacaggactccaaaggacctcagaaagcatttagccaaatctccttatgcaggaaataaatgagaatttaaggctcagatgggttaaggtgatttgtcaaggtcataagaacttgtcagttccagacttgtagtccagggctgcgtccttttgtaaaccagaaacgtctgcatag

SEQ ID NO: 762243 - DNA, 612 bp, Homo sapiens
aaacagatttgcagtcctgccaaaccagacgatgctgctggcaggaagatgcacatggtctgatgttaatgcaagagtgagaaaacctctgtggcacagtcatgggaggtcagcccaaatgtagagtttccttccttccttccttcctccctccctccctccctccctccctttttttactttctgtaattctaaagtggcaggaacgacttgactctttagaccatatatttttttcagaaatacatttctgaaaatatattctctgttttgtatgttttctctgktttgtctctgttttgtatgtttttcctgggtactacagatttctaaaaacattgaaagagtaaagccttttttggaagtccattcataagatgtccaagaagaattcatcacagaaacttcaacctattttttttaaaaagtagactccaacaactcccttcagatgggtattatcttgattttacagatgaagcttagaagagttaagcaatttgctcagggtcaatagccagcaaagcaacagcatcaaaacttagatccagttttgctgatgccaaaatgcatgctccattctataccattcaactaacctagctgtagccc

SEQ ID NO: 762244 - DNA, 700 bp, Homo sapiens
tagtttttggtttcttacccttaacccgaaaggatggaaacggaacaggaggtgacctgccctgcatgactgagggtgcttgcattaggcacagggtttcactgtgggtgcaagaggaaccatggaagggctgctctctgccccatccctggattattgttgtgaggatcaagtcgaataggggttatgcttagttttgtatgttataaatcaataagtaactaaaacataatattattttcttgataattgcaggctygagagctcaaaagatgttttcaatttattgcgtacctgtgttcccaggctatctaaggacttcccacatgttagacccaactaaaatccaagcttgatgagagcagggagttagccttctgccaggagttagccttgtgccagtcacatagtgagacttcaataatttttttttaatggtagaaaaaatgatttctaatccagactgccccctagggcattagccttgctgtacagatgggagtatggaggctcagaaaggttgagtgacctgctctaggtctcaccactagctagtcggtgagttggggtaggagctcagtccctctgtctgtgaagctcaggctcttcccatgatgcccaagctgacctggagctttactgagcttagttgtccttgacagagcaggctgctgtgccaggatcatgtgggatcctaggg

SEQ ID NO: 762245 - DNA, 642 bp, Homo sapiens
ggccatacagagataggagctgaggggacatagtgaggtgtgaccagaagacaagagtgcgagccttctgttatgcccggaccgggccaccagagggctccttggtctagcggtgatgccagcgtctgggaagatgcctgttaccaggcggatcgtggtccagcagtagcaaaaggtgtcaaggaacaacacccgatacttagcagaccaggaaagggcggggggggggggggtctccctttccccgggggagtttagagaagactctgctcctccwcctcttgtggagggcctgacatcagtcaggctcgcctgcagttatccggaggcctaaccgtctccctgtgatgctgtgcttcagtggtcacgctcctagtccgccttcatgtttcatcctgtacacctggctctgccttctagatagcagtagtaaattagtaaaaatactaatagtccctgatatgcggaaataatggcataagctgtctttctctctgtctcctctccctctctgcctcggctgccaggcagggaagggccccctgtccagtggacacgtgacccacgtgaccttacctatcattggaggtgactcacattctttaccctgccccttctgccttgtatccaataaataacagc

SEQ ID NO: 762246 - DNA, 453 bp, Homo sapiens
ccttcttctaatttattttaggaaataatgcaaagtactcacaaaaatttatatagaaagatgttcattgcagaattcattataataaaaacctttaaatgctctgagtgcccagcgtcagcatggtgataacatacatacgagggaatattgtgcagctgcagttagttcttattacatttcacaggcatcttaaatgctttgtgaacaccggtgcatagatttttttgtttggtatagatggcaatgattagatgggtgaaataatwtaaaaaatggacatataattttaaaaatattgagtgacagaaaaaaatgaaaaaatgttaaagaactttttggttatgatattatcactaaaaggccgtgtctccttgctcccttctttggggacggttctggccttgcctggcccgtgggtgggaattgtggtgctccaagtgccttcagctg

SEQ ID NO: 762247 - DNA, 453 bp, Homo sapiens
ccttcttctaatttattttaggaaataatgcaaagtactcacaaaaatttatatagaaagatgttcattgcagaattcattataataaaaacctttaaatgctctgagtgcccagcgtcagcatggtgataacatacatacgagggaatattgtgcagctgcagttagttcttattacatttcacaggcatcttaaatgctttgtgaacaccggtgcatagatttttttgtttggtatagatggcaatgattagatgggtgaaataattwaaaaaatggacatataattttaaaaatattgagtgacagaaaaaaatgaaaaaatgttaaagaactttttggttatgatattatcactaaaaggccgtgtctccttgctcccttctttggggacggttctggccttgcctggcccgtgggtgggaattgtggtgctccaagtgccttcagctg

SEQ ID NO: 762248 - DNA, 447 bp, Homo sapiens
cccggctgtgccatttagccactgtgtcctttcaggcaagtggcttgtctcagcctccctcagcttccccatgagtacagtggggctgactacacctgcgggagctattgtgagaattgcctgagtagctcatacagcgggtatccagttagccaccgtaggtgctcaggataagaaggcggcctcccctgctgcttccagtgtgtcatgggggaggagaccgraaggtgctgcctgagatgagagttgtacagggacaagcaggcagccagccgagagcggggaagcttccacctggtacggcaggcgggatggtgataaggtggagggaaggaagtccaggccaggagagaggccggcccatgagtggcccgaggttgctgactgctggccgttgagcctgatgtagcggcctgatgtggcctgaggatggggccacacggtgtg

SEQ ID NO: 762249 - DNA, 577 bp, Homo sapiens
tattccctgaactattgctgttatcctgttcttttttcagggtgcccacatttcatattcctcaaacacacacgctgtacaatttgtatagttaacgcaattattacagggtcctgagacgatatacatccttcttggctgacaggattaagagattaaagtaaagacaggcataggaaatcacaagggtattgattggggaagtgataagtgtccatgaaatatttgcaatccaygttctactgtcatgacttcagccggtccctccgtttggggtccctgacttcccgcaacagtgttgactctcatacctaaaactgggacatgtgcaggattgttaatctcgtccctggacctacctgcaggtgtgactgacatgtcatgtgcccagcacccagcatgatttgagtctcagcccagagatgaaattgtgatatatcactggacccagaacataggtgatgttattctattctgccttggccctgcctacatggagcattgtcacatgtttctaggccccgcacttagcactcaggttatatgtctcttctgcctgtgcccagcccgtgtgggt

SEQ ID NO: 762250 - DNA, 577 bp, Homo sapiens
tattccctgaactattgctgttatcctgttcttttttcagggtgcccacatttcatattcctcaaacacacacgctgtacaatttgtatagttaacgcaattattacagggtcctgagacgatatacatccttcttggctgacaggattaagagattaaagtaaagacaggcataggaaatcacaagggtattgattggggaagtgataagtgtccatgaaatatttgcaatccacgttctactgtcatgrcttcagccggtccctccgtttggggtccctgacttcccgcaacagtgttgactctcatacctaaaactgggacatgtgcaggattgttaatctcgtccctggacctacctgcaggtgtgactgacatgtcatgtgcccagcacccagcatgatttgagtctcagcccagagatgaaattgtgatatatcactggacccagaacataggtgatgttattctattctgccttggccctgcctacatggagcattgtcacatgtttctaggccccgcacttagcactcaggttatatgtctcttctgcctgtgcccagcccgtgtgggt

SEQ ID NO: 762251 - DNA, 577 bp, Homo sapiens
tattccctgaactattgctgttatcctgttcttttttcagggtgcccacatttcatattcctcaaacacacacgctgtacaatttgtatagttaacgcaattattacagggtcctgagacgatatacatccttcttggctgacaggattaagagattaaagtaaagacaggcataggaaatcacaagggtattgattggggaagtgataagtgtccatgaaatatttgcaatccacgttctactgtcatgacttcagccggtccctccgtttggggtccctgacttccygcaacagtgttgactctcatacctaaaactgggacatgtgcaggattgttaatctcgtccctggacctacctgcaggtgtgactgacatgtcatgtgcccagcacccagcatgatttgagtctcagcccagagatgaaattgtgatatatcactggacccagaacataggtgatgttattctattctgccttggccctgcctacatggagcattgtcacatgtttctaggccccgcacttagcactcaggttatatgtctcttctgcctgtgcccagcccgtgtgggt

SEQ ID NO: 762252 - DNA, 609 bp, Homo sapiens
gtttttctttctcagaatagtattggcttttcaagtgtttgtttttttcagctccacatggattttataattatttttctgtttatataaataatgtcatttggggctgggtgcagtggctcatgcctgtaatcccagcactttgggaggctgaggtgggtggattgcctgagctcaggagttcacaaccagcctgggcaacatggtaaaacctgtctctactaaaatacaaaaaattattcrggtgtggtggcatgcacctgtagtcccagctacccgggaggctgaggcaagagaattgcttgatccagggaggcagaggttgcgatgagccgagactgcaccactgcactccagcctgggcgatagagtgagactctgtctcaaaaaaaataaagaatgtcattgggattttgaaaaagattgtgttaaacctgaatgttgctttggaaaatgcggacatttacaaaatattaattcttccaattcataagaaatagatatctttccatttgtttgtataattttccaatttttattactgttttaaatatgtagatttgtattagtccgttttcacactgctgtaaagatactcaccttagactg

SEQ ID NO: 762253 - DNA, 621 bp, Homo sapiens
atctcaaacgtaatgacacccttgtcctcaaagtaaaggtttggagaaaagacctatcatctaaatggaaaacaaaagacagcagaggtcactattcttatattagataaagataaaacttactttttttttttttttgagatggagtctcactctgttatgcaggctatagtgcggtggtgctatcttggctcaytgcaacatccgcctcctgggtttaagcgattctcatgccacagcctcctgagtagctgagattacaggcatgtgccaccatgaacaggtaatttttgtatttttagcagagatgtgggttcaccatgttgggcaggctggtcttgaactcctaacctcaagtgattcacctgcctcagcctctcaaagtgctgggattacaggcatgagccattgcacctggccaatactttaaaccaacaacagtaaagaaacactaagaagggtgcggcacaatgataaaaggttcaatgcagcaagatgacttaaactatcataaatatatatgcacccaacattggaacactgagattcataaaacaagttcttatagacttacgtagccacacaataatattggaggacttcaatactgcaatgacagtg

SEQ ID NO: 762254 - DNA, 629 bp, Homo sapiens
aattattcaaaccctcctcccctgaggtcactcattggtgagtactcacatgggatacaaatatcttcacagtttttgaccactcagagaggctcatccacctacctcttctccaaatttctttgtcaccaaatttctaatcatgtttcttccaagaacctgaccattaagccaaaccattgggctacagcccataaatcaacatgtaatcgcacatctggtcatttctacttccatgcaaagtgcacaaccaggtgcactgcttgaagttctgcccactgggaagatttccyttcaccgcatccttcagggatgtcctaccttggggctgtggtgctgcagctatccacttttgggtggtgcctgcatatcgtgcagaaccatctgtgaaccaggccctagtcttttcttcccctgtcaactgattatagggaactcctcatgagaccctcagtgcaggatgagggagagaaggcagggtgacaggagtggagaccatgggcatttgagccacttcctcatgtaacttacttgtgtcttcaggacctactcgaacctgatcatatatatagccacttccatttgatgatggaatgctgctgtgcatgacccactttatggttagatgg

SEQ ID NO: 762255 - DNA, 648 bp, Homo sapiens
aggcatataaagagattctcatctactacagccagatagcagaagtagcttaagatcagactccactctaaatgtataagaaaaccagaggtccagagaaaagaagttgaattctctaccccagctgttatgccaccaaagtgagaccccaagactcagaatggggacatgtrggttgagatactcaagagtcttgaaccctcagatcctactcaacgctgtagctctgcacaagtggttcactctcctcccataaagcttggtattctgcccttacttgaagatgctgcaaggccttgaaaaagaacacatgcccttctcagattctaccccacctccatttctggccacaagactaataaatagggtcaaattacagcataacccagccaaggatgcactgggcttgctaagagaagagaaacacaggaggagctgcagggcccagggaccaagattcagcaagaaccagaggagcgtgtgcaggacaagatccctagggcactagatcaggagtatagcacataaacttgggtaagggagcttttatcaataagggggcactgtccagtgacacaggaattaataatttggcaagaaccctggaagatgggtgctaacacactgctagcatggcttttggaagcc

SEQ ID NO: 762256 - DNA, 648 bp, Homo sapiens
aggcatataaagagattctcatctactacagccagatagcagaagtagcttaagatcagactccactctaaatgtataagaaaaccagaggtccagagaaaagaagttgaattctctaccccagctgttatgccaccaaagtgagaccccaagactcagaatggggacatgtgggttgagatactcaagagtcttgaaccctcagatcctactcaacgctgtagctctgcacaagtggttcactctcctcccataaagcttggtattctgcccttacttgaagatgctgcaaggccttgaaaaagaacacatgcccttctcagattctaccccacctccatttctggccacaagactaataaatagggtcaaattacagcataacccagccaaggatgcactgggcttgctaagagaagagaaacacaggaggagctgcagggcccrgggaccaagattcagcaagaaccagaggagcgtgtgcaggacaagatccctagggcactagatcaggagtatagcacataaacttgggtaagggagcttttatcaataagggggcactgtccagtgacacaggaattaataatttggcaagaaccctggaagatgggtgctaacacactgctagcatggcttttggaagcc

SEQ ID NO: 762257 - DNA, 601 bp, Homo sapiens
tcctccaaaggaatacaactcttcaccagcaagggaacaaaactggatggtgaatgagtttgacaagttgacagaagtaggctacagaaggtcggtaataacaaacttctccgagctaaaggagcatgttctaatccacagcgaggaagctaaaaaccttgataaaagtttagatgaatggctaactagaataaccagcgtagagaagagcttaaatgacctgatgaagctgaaaaacacagtacaagaactttgtgaagcacatacaagcttcaatrgccaattcgatcaagcggaagaaaggatatcagtgattgaagatcaaattaatgaaataaagtgagaagacaagattatagaaaaaaagagtgaaaagaaacaaacaaagcctccaatgtgaaaagaccaaatctatgtttgattggtgtacctgaaagtgatggggagaatggaaccaagttagtaaacactgttcaggatattatacaggagaacttctccaacttagcaaggcaggccaaaattcgacttcagaaaatacagagaccaccacaaagatactcctcaaggagagcaaccccaagacatataattgtcagat

SEQ ID NO: 762258 - DNA, 601 bp, Homo sapiens
tcctccaaaggaatacaactcttcaccagcaagggaacaaaactggatggtgaatgagtttgacaagttgacagaagtaggctacagaaggtcggtaataacaaacttctccgagctaaaggagcatgttctaatccacagcgaggaagctaaaaaccttgataaaagtttagatgaatggctaactagaataaccagcgtagagaagagcttaaatgacctgatgaagctgaaaaacacagtacaagaactttgtgaagcacatacaagcttcaatagccaattygatcaagcggaagaaaggatatcagtgattgaagatcaaattaatgaaataaagtgagaagacaagattatagaaaaaaagagtgaaaagaaacaaacaaagcctccaatgtgaaaagaccaaatctatgtttgattggtgtacctgaaagtgatggggagaatggaaccaagttagtaaacactgttcaggatattatacaggagaacttctccaacttagcaaggcaggccaaaattcgacttcagaaaatacagagaccaccacaaagatactcctcaaggagagcaaccccaagacatataattgtcagat

SEQ ID NO: 762259 - DNA, 645 bp, Homo sapiens
atggaaccaagttagtaaacactgttcaggatattatacaggagaacttctccaacttagcaaggcaggccaaaattcgacttcagaaaatacagagaccaccacaaagatactcctcaaggagagcaaccccaagacatataattgtcagattcgccaaggttgaaatgaaggaaaaaatgttaagggcagccagagagaaaggttgggttacccacaaagcgatgcccaacagactgacggcagatgtctcargagaaacccgaaatccagaagagaggggggccaatattcaacattcttaaagaaaacaattttcaacccagaatatcatatcctgccaaactagcttcataagggaaggagtaataaaatcctttacagacaagaaaatgcggagagattttgtcaccaccaggcctgccatacaagggctcctgaaggacgtactaaacatggaaaggaacaactggtactagccactgcaaaaacatgccaaattgtaaagactatcaatgctatgaagaaactgcatcaattaacaggtgaaataaccagctagcatcataataacaagatcaaattcacacataacaatattaaccttaaatgtaaatgggctaaatgccacaattaaaagacaca

SEQ ID NO: 762260 - DNA, 634 bp, Homo sapiens
tcatcactgggcattagagaaatgcaaatcaaaaccacaatgagataccatctcacgccagttagaatggcgatcattaaaaagtcaggaaacaacagatgtgggagaggttgtggagaaataggaacacttttacactgttggtgggagtgtaaattagttcaaccattgcggaagacagtgtggcgattcctcaaggatctagaactagaaatatcatttgacctagcaatcccattactggacaaatacccaaaggattataaatcattctacgataaagacacatgcacacgtatgtttactgcggcactattcacaacagcarcgacttgcaaccaacccaaacgtccatcagtgatagactggattaagaaaatgtgtcacatatacaccatggaatactatgcagccataaagaaggatgagttcacatcctttgcagggacatggatgaagctggaaaccatcattctcagcaaactatcacaagatcggaaaaccaaatactgcatgttctcactcattcgtgggagttgaacaatgagaacacatgacacagggagcgggacatcacacaccggggcctgcagggggtagggggctagggaagggataacattaggagaaatat

SEQ ID NO: 762261 - DNA, 595 bp, Homo sapiens
attggaaaacatggagaaaatgaataaattcccaggcatgtacacctatcaagattgaaccaagaagaaatagaaaagctgagcagaccaattccaagttacaagattaaatcagtgataaaaagtatctcatcaaataaaatcccaggacttggtggaatcactgccgaattctatcaaacatataaagaaaaattaayattaattcttaaactcttcaaaaactgaagaggagggaattccctcacactcatttttagggccaacattctctgatacctaaactagacaattacacaacaaaaaaagaagctataggccaatatctctgatgaacacagatgcaaaaatcctcaacaaaatactaacaaactgaatacaacagcacattaaaaagattttttaccatgatcaagtgggatttatcccaggagatctgaagggtaaaaataatatgatcatctcaatagatgaaggaaatgtatttaataaaatgcaacattatcttcacttaataaacaaattactcaactaatatgagcctatagaaggaattgtactttaacacaataaaggccatatatgatacatatgc

SEQ ID NO: 762262 - DNA, 595 bp, Homo sapiens
attggaaaacatggagaaaatgaataaattcccaggcatgtacacctatcaagattgaaccaagaagaaatagaaaagctgagcagaccaattccaagttacaagattaaatcagtgataaaaagtatctcatcaaataaaatcccaggacttggtggaatcactgccgaattctatcaaacatataaagaaaaattaatattaattcttaaactcttcaaaaactgaagaggagggaattccctcacactcatttttagggccaacwttctctgatacctaaactagacaattacacaacaaaaaaagaagctataggccaatatctctgatgaacacagatgcaaaaatcctcaacaaaatactaacaaactgaatacaacagcacattaaaaagattttttaccatgatcaagtgggatttatcccaggagatctgaagggtaaaaataatatgatcatctcaatagatgaaggaaatgtatttaataaaatgcaacattatcttcacttaataaacaaattactcaactaatatgagcctatagaaggaattgtactttaacacaataaaggccatatatgatacatatgc

SEQ ID NO: 762263 - DNA, 626 bp, Homo sapiens
ggatagatgaataaacaaaatgtgtacatacataggagggaatattattcagccttgaaaaggaaggcaattctgacacatgctaccacacggatgaaccttaaggatacaatgctaagtgtaataagaagcttcgcagtgttccaacttacaaggtaaatatcactcaggtagctatatggctgcctgaaatctaatgacatttgggaactcaaatttttctgaaaaacagagtgagataacatttgctttggcctgagcttttaaagtcctactagtatattacaactatattctacataattttcagtaaatatattttttaatacaatgttgaacaaagagaatacaagagaatctcctaaaccaaacaataacaacaaaactaacaaaaacccacaaaggaaaagtggactcaaacttgaatgataagcaaataagtggtcttggaggcaaatgccaatatcaggtaataggaactgaaactcctkgggtctctataaaaccagagagctgagcttgagtctgccctattaagccacagtcgtcgaagggggcttgtagtgaattcttataatcttatattgccttggcatccattttgaagacatatttaactattttat

SEQ ID NO: 762264 - DNA, 627 bp, Homo sapiens
atcattttttggtgttggaaacatttgaaatcttctcttctgctattttgaaacatataataaattattgtgaactatagtcacgccatcgtgttagagaacattagaatttatttctccaatctaattgtaattttgtacctgttaacaaacatttccatattctccttccccccacccttcacagcctctggtagccactattctactctctaattctatgagatcaactcttttagctcccacatgtgattgagcatatgtagtatttgtctttttgtggctggcttatttcacttaacatgatgatgtacatttccatccatgttgttgcaaacgacaggatttctttctttttaatggctgaatagaattccattgtgtatatgttccatattttcttwatccattcatttgttgatggacacttatgttaatttcatatctttattattgtgaatagtgctgcaatataaatatgggagtgcaaatatgtcttctacatacagacctcctttcctttggatatacacccagtagcagaatggctggttaatatgatagatgtacttttagaaacctccataattttccataatggctttactaatttgcattcctaccaat

SEQ ID NO: 762265 - DNA, 627 bp, Homo sapiens
aagaccgcaacaaacagaaacataatccttgagttaggagttgagcaggtgggcctcctcttggcctgacagcaggccttgataagtccctttattgctcctgacaaataggctttcagtatctcctgtgaagagaaacagggtggcccagttataaaaggccccttgaaagatttaaatacgctgccttgtgtaagatgaagggtgtcaggaccttgaagaccacagaggaaatagctgtatgctgccaagatttaatacatctagaggttatttagggggccatctataccttggtaaaaggaaataaagaatctgtcaattaaaagagttattaatttttytatactgtaacagaatattaaatctcagtgaacatatttatttacctggctgggtttctgtgcaattgctagccctgagctgtcagcagtcacttatctttagtgatccccttgcaaattttgtgagaattttcagggttgatagggaatcactattctctttcatgttattacagtaatctaataaaccacctgaataaaaaaattcatgaaacaacacttcagcaaaaggagatcatggcttttggggtataaattttcatttttatacaaacagtgtttt

SEQ ID NO: 762266 - DNA, 621 bp, Homo sapiens
tcacacactttccctataaggagggaatatccctgaaacttcatacaaactaataaaatccttctaagttagattgccatctgaaattgaagctattaaacttacgtaagaatattggcatatagtatcatgctataaatgcctattaagttgaattttggttttggatgcattattactgttgagctgtcttagctgtatcctagacattggtgaaatgaaaggatgagaatatttaggcttaaaagaattttgagagaagtggtgggcaggaaagtataraatggtgtaagagctcttttccttgattaaataggatatttcgggggaaaatttttgcttcataatctgtatataaatgtatacagttttcatcactatgactgtcatttctacatttacaaatcaacgagctatgtcagcatttgtcccctattcaactagatctttttttctctctaaataagggtgtaactggagattgacagaatctggtgggttgcatttgcattatggcgcagtggaaatctcaagctggttaattatatttccagcccacactgtgcactaactacccccctcctctcttctttctctgattcccattcactaccttagagc

SEQ ID NO: 762267 - DNA, 540 bp, Homo sapiens
tttaattcaaatactgaaatgcttttaatattaagtattattaagtgcaagtacattaaatacttaatatttatttcacattggtagattattatgctttatatagtttatgtaattaaaatgttcatataaggaaaatacataaaatttactcacaataaattacaatcataatttaaagtttttatcattttaatcatagagtatctaaatcttcagccattagtacacagacactacagatataactagaatattgcatcatgaataaggtgcgaatagtggactaacaacgtagctgaaataactatggtgtggaggagcactctaatatactgggtagttrtaagaacactgaagcctaggtttcatgaaggataaaaatcctggaaactttaaaagcattattttaaataaattttttcaccatctgttcacataattttaactacaagcagaatataacttaattatattggtcaaaaacaggataaagtgatataaatgtgaatctcttcctgacacaatgtggtctacatc

SEQ ID NO: 762268 - DNA, 578 bp, Homo sapiens
tacatggaatacatatatataaattacaaatgaactcagtatgaaatttaaaatttcagcttcaagtcactgtatacaaagttctccaaagtcagaggcacaagacaatcaactgaggtataggcaaaaaccctattaattatatttattttttctcattccttttaaggttctgtttttctgggagacagggtctcagctctgtcacccaggctggagtgcagtggtgtgatgacagctcattgcagcctcgacctcctgggctcaagtgatgctcctatctcagcctcccaaatagctgggactacaggcacatgccaccatgcctagctaatttaattwttttttttttttttttttgagacagagtctcactctgtcgcccaggctggagtgcagtggtgcaatctcggctcactgcaacctccacctcttgggttcaagcaattctcctgcctcagcctccctagtagccgggattacaggtgcatgccacatgccgggctaatttttgtattttagtagagacgaggtttcaccatgttggccaggctagtctcgaactcctgacctcaagt

SEQ ID NO: 762269 - DNA, 612 bp, Homo sapiens
agtttactgaaaaagacaccatgccaacaggaaagaagtcacggctaagtcattccgagatttcccacggcatgaatctagttccacaatcgactgaggtttgcttcagtgaactctccatccaatttatggcaaattctaacttttagctcctcttctgtagtctttattaatctatttcttcccactgttcctctcattttagtttartccactaggagacagcagtggacccttagggttcctttccacacttagttcccagggaggggaaaaatgaagtcgcccgtttggtttaagacacaaagtctgatagacagtaatctttgaaaaaaagaactagccagggagataatcatatgatatgaaacaatttcccgtctcttcttgagctgggtattttcagaaaagtgtcccttcattttaagaacaggatttcatagatccataacactttgatgaaaaaataagcctttaaaacatctaaatgtacagccctctaaacacactgtattttaatcctaaattttagtgctccccttactttttgccaatcttgcacacagaactcacttgtttattctatgatttacttaaatcacagtaaatcat

SEQ ID NO: 762270 - DNA, 612 bp, Homo sapiens
agtttactgaaaaagacaccatgccaacaggaaagaagtcacggctaagtcattccgagatttcccacggcatgaatctagttccacaatcgactgaggtttgcttcagtgaactctccatccaatttatggcaaattctaacttttagctcctcttctgtagtctttattaatctatttcttcccactgttcctctcattttagtttagtccactaggagacagcagtggacmcttagggttcctttccacacttagttcccagggaggggaaaaatgaagtcgcccgtttggtttaagacacaaagtctgatagacagtaatctttgaaaaaaagaactagccagggagataatcatatgatatgaaacaatttcccgtctcttcttgagctgggtattttcagaaaagtgtcccttcattttaagaacaggatttcatagatccataacactttgatgaaaaaataagcctttaaaacatctaaatgtacagccctctaaacacactgtattttaatcctaaattttagtgctccccttactttttgccaatcttgcacacagaactcacttgtttattctatgatttacttaaatcacagtaaatcat

SEQ ID NO: 762271 - DNA, 612 bp, Homo sapiens
agtttactgaaaaagacaccatgccaacaggaaagaagtcacggctaagtcattccgagatttcccacggcatgaatctagttccacaatcgactgaggtttgcttcagtgaactctccatccaatttatggcaaattctaacttttagctcctcttctgtagtctttattaatctatttcttcccactgttcctctcattttagtttagtccactaggagacagcagtggacccttagggttcctttccayacttagttcccagggaggggaaaaatgaagtcgcccgtttggtttaagacacaaagtctgatagacagtaatctttgaaaaaaagaactagccagggagataatcatatgatatgaaacaatttcccgtctcttcttgagctgggtattttcagaaaagtgtcccttcattttaagaacaggatttcatagatccataacactttgatgaaaaaataagcctttaaaacatctaaatgtacagccctctaaacacactgtattttaatcctaaattttagtgctccccttactttttgccaatcttgcacacagaactcacttgtttattctatgatttacttaaatcacagtaaatcat

SEQ ID NO: 762272 - DNA, 607 bp, Homo sapiens
aatttccctgaaatgtctctcggttctctatgagctaattatgaatgaaaagttatcaactgcccacaccaaagggggcttaaatactattttgtagagttcttaatgtcaaaatattgttcaaaacagcatgctgtcccactccaaatacaatgcttgggttaatgtaaataccagtgaaacactatcaattttcctcaggtttcccacaatgtatacataaagcaaattctccagcacttgtcagcttaacaacaaaataaagatcatttcatcaagtaaatctatattatacctacarctcatttccacagtaatagcagttcggtgcttatagttttgcatatcacaggctacataatcttcaaatagcactatatattttttcaggaacgatgctactggattattagcttctaggcatcaatactcagatttaccccagcatacagatttattatactaaatcagctcaacagcaattgacaaaatgtaaactccttttatggaacctcagtttttgaggaacaatttccacagcctgcattcatgatggacaattattttctttacatctataagcctaagtgcctacatcttctttttt

SEQ ID NO: 762273 - DNA, 697 bp, Homo sapiens
aaagaattgtcacagtgtagtatatggatcctgctgcaatccataatgggatcagactaccactcttgcctttacaaactataaaactaggaaagttattttaagcaactgttttcaggtattggacaacctgataacagaaagcacagcactgtgttccctgaaagaaggaaaactcaagatgcagtcctataattgtctcagcttcatgcatgggggcacatatcagactatggtacagaaaggtaaatcccaagcagaacaaagcaatctcacagagcagaaaaggtagggattggcattcagrcatgctgagtcaaatgacatttctgaggcagagttctgaagaggagttaagcaaaaaaggagtttcagaaatctgcacagtctttgtctacaatgagactctgtgaagtgggacaagtaatgagaagttctaacaagtcagagtaaagattttgctgaacactctgggcattaaattgagacacaagaaaggtaaaacgtaagaagaagagcaactctatgactgcccatacaatgcttaatatcaatcactaaaaggattaagctgatcagcagtagtagactgctgaaacaaatctaaatgctgtataaaggaagacagtaaaatccaggctcccagtaacaaagcaatcagaacatcaattacacacttaaaaatcattaactgtat

SEQ ID NO: 762274 - DNA, 574 bp, Homo sapiens
ggcggatcacaaggtcaggagatggataccatcctggctaacacggtgaaaccccgtctctactaaaaatacaaaaaattagccgggcgtagcagcgggcccctgtagtcgcagctactcggaggctgaggcaggagaatggcgtgaacctgggaggcggagcttgcagtgagctgagatcgcgccactgcactccagcctgggcgacagagcaagactccgtctcaaaaaaaaaaaaaaaaaaatttattataaacaaacgcactgataaaaaatttatatcaagctgtatgtaaaagataatacaataaaaaggacaaaaakgttaagtaaaacaatcctaccataaagttacagtaaaaattttttgtaaaaaaatttaagataggttagattgcaaagagtgattttaatttttatgtaaaacaataattatttcagaaaaatttgcctaaattaaaacgtgtgcttgtgtaagttatatcatgtgataagaaactaccctctaagcagaaaacaattattaaaggactcaaatatcagatgtggagaaaagtttttctccaattctgga

SEQ ID NO: 762275 - DNA, 574 bp, Homo sapiens
ggcggatcacaaggtcaggagatggataccatcctggctaacacggtgaaaccccgtctctactaaaaatacaaaaaattagccgggcgtagcagcgggcccctgtagtcgcagctactcggaggctgaggcaggagaatggcgtgaacctgggaggcggagcttgcagtgagctgagatcgcgccactgcactccagcctgggcgacagagcaagactccgtctcaaaaaaaaaaaaaaaaaaatttattataaacaaacgcactgataaaaaatttatatcaagctgtatgtaaaagataatacaataaaaaggacaaaaaggttaagtaaaacaatcctaccataaagttacartaaaaattttttgtaaaaaaatttaagataggttagattgcaaagagtgattttaatttttatgtaaaacaataattatttcagaaaaatttgcctaaattaaaacgtgtgcttgtgtaagttatatcatgtgataagaaactaccctctaagcagaaaacaattattaaaggactcaaatatcagatgtggagaaaagtttttctccaattctgga

SEQ ID NO: 762276 - DNA, 577 bp, Homo sapiens
ctgtagatgagaaaatctcaactcctctgcctttatattttattttttgaaaacataaaatgaggaacttgttgctctaaagtttcttctagtgatgacagtctatttgattctagtaagtggaactgacgatagttctactttgttttaataawcccgtggaaatcctatgcaagaatcacccaactcacataataatctgtttttctttaaaaaaatctttcaaaaccatacatatacacattttctttctttcttcatccactgatgaacattggggttattttgctaaaaacattcatgtgcaggtttttgtgtggacattaaatttgccacttgtttgggtaaatacccaggagcacaactgctgatcatacgttaagactatgttttagctttgtaggaaactgccagactcttccaaagtgctgtaccattttgcattgtcaccaacaataaatgagacttcttgctctcttcatccttgccagcatttggtgtggtcagtattttggattgcagtcgttctaacaggtgtgtagtactatttcattgttgttttaatttgtaattcccg

SEQ ID NO: 762277 - DNA, 542 bp, Homo sapiens
attggggtatttagcccatttgcatttaaggttaatattgttatgtgtgtatgtgtgagtttgatcctgtcatcatgatgctatctggttattttgcaaacttatttatgtggttgcttcatagtgtcgatggtctttacaatttgrtatgtttttgcagtggctggtactgattgttcctttccatgtttagtgcttcctttgggagctcttgtaaggcaggcctgatggtgacagaatccctcagaatttgcttgtttgtaaagggttttatttctccttcacttatgaagcttagtttggctggatatgaaattctgggttgataattcttttctttaagaatgttgaatattggcccccactctcttctggcttgtagggtttctgctgagaggtctgctgttaatctgatgggcttccctttgtaggtaacctgacctttctctctggttgcccttaacaatttttcctttgtgtcaatcttggagaatctgatgcttatgtttcctggggtttggagtatcttagtggtgttctct

SEQ ID NO: 762278 - DNA, 618 bp, Homo sapiens
gacatacataggctgaaaataaaggaatggaggaaaatttaccaagcacatggaaaacggaagagagcaggggtcttagtttctgacaaaacagactttaaaccaacaaagatcaaaaaagacaagggcatttacataatggtaaaggcttcagtgcaatgagaagagctaactctcctaaatatatatggacccaatataggagcacccaaattcataaagcaagttcttagagacttacaaagagacttagactcccacacaataatagtgggagactttaacactccacttaccatattagatcatgaaaacagaaaattgacaaagatattcaggacctgaactcagctctggatcaagccgacctgatagatatctacaggactcttcaccaaaaagcaaaagaatatacattattttcattgycacatggcacttaccctaaaactgatcacataattggaagtaaaacactcctcagcaaatgcaaaagaatggaaatcataacaaacagtctcttagaccacagtgcaatcaaattagaatgcaagttgaagaaagtgactcaaaaccacacaactacatggaagttggacaacccgctcctgaatgact

SEQ ID NO: 762279 - DNA, 618 bp, Homo sapiens
aatttcatttgaaaacaaaatgtatatatatatatttgagacagggtcttgctctgtcacccaggctggagtacagtgacatgaatatggctcactgcagcctcaacctcttgggctcaagtaatcctcccaactcagccacccgaatagctggaaccataggcacacaccaccaggcctggctaattttattttttgtagagatgcacgtatgcccgtatcaaacatattggcctgttgccatgtcgctcaggctggcctgaactcccgggctcaagcaatactcctgccttggcttcccaaagtgctgggattacaggtgtgagccatcgtgtctggcggaaggtgaaatccccctcttaatttctttgattcattgggtgttcaggagcatgttgtttaatttccatgtatttgtggattttccaagactgagcmatttctttttctttgtagagagggtcccactatgcttgcccaggctctatcttgaattcctgggctcaagagatgctgccacctcaaccttccgaagtgctgggattacaggcgtgagccactgtgcctggctggaagttatgttaagagcactacttgaagacagtattgtatttactt

SEQ ID NO: 762280 - DNA, 623 bp, Homo sapiens
ctgctgtagagtattgccacctctcaaaccccaaattactgctttgatgtgacagtcaacggccccttgaaattttatcttttcaaataatatacttgctatgtaatatttctattattttcaaagcagtagttggaactattcagcatttgccacaaaacaaaccaaggtagtaatccattactccagcttttgtgttccaaaagtatatctgaaaatcagccattagaaatttagaacacatttttctggagaaaaaaactacacaaatagccaaaaaccacttccagagatttgcaagctactcatagggagtctcagaatcctatttaacctataatataccaggaacgtcagtaagccaccatatataattctctctcgtgctcgcgccttagcagtacttccctagctacagacaggatccaggattaaacattgggaggaaaaagctatctatgaaaaaaaaaatctttcrtgaattcacgtaaagtttatttgtgactcctaaatcaatgcccatggtgcttctgtggtcatttgtgacatgtggagaatgtcaaaaaatttgagtcccgtaacatacatttctaaatgaggtgaagcaggataatgctctgcct

SEQ ID NO: 762281 - DNA, 602 bp, Homo sapiens
taatcctcttgcatcttaaaggaaaacagcattcaatgttggatctgctctccaaatttatgttacccatttataagaaacttctgaaattttcagtttggggactctggtctccaaagcatgtgggggaaggctgcttaaatcacactatctcagcaatgtcactttcagccttccattctctaaaaacaatgccagagaaggtgcactctggttcactcctgtttccctataactgttgcattttgacaatttgcattttattttggaccatagctactgtaattgtaaattggtctactttctttaatctgggagtagcagcaaatcatttttaatagcccttaattcccccttwtaatgagatatctgcattcgactgactcaaccatgtactgccgtaggctagggtggatgaatcacagaaaatagacggaagaaacccattaggtaatctcacgcagtcctctgccagactccggatgattcccaacaataaaacttctaggaccagttcagcatacttttaatgctcctccaaggatggaactgctaaccctcccaccacaggccatccagtcatttggacagcccgcactccc

SEQ ID NO: 762282 - DNA, 602 bp, Homo sapiens
taatcctcttgcatcttaaaggaaaacagcattcaatgttggatctgctctccaaatttatgttacccatttataagaaacttctgaaattttcagtttggggactctggtctccaaagcatgtgggggaaggctgcttaaatcacactatctcagcaatgtcactttcagccttccattctctaaaaacaatgccagagaaggtgcactctggttcactcctgtttccctataactgttgcattttgacaatttgcattttattttggaccatagctactgtaattgtaaattggtctactttctttaatctgggagtagcagcaaatcatttttaatagcccttaattcccccttttaatgagatatctgcattcgactgactcaaccatgtactgccrtaggctagggtggatgaatcacagaaaatagacggaagaaacccattaggtaatctcacgcagtcctctgccagactccggatgattcccaacaataaaacttctaggaccagttcagcatacttttaatgctcctccaaggatggaactgctaaccctcccaccacaggccatccagtcatttggacagcccgcactccc

SEQ ID NO: 762283 - DNA, 597 bp, Homo sapiens
taacttctttgcttggtttcacagtaagtcacattatggagaagttgttacaaacagatgaaaccccaggaagggaagtcagaatttccagatctgatgagacagtgggtggaagaaaagtttgtcatttaaagctttaattcaaagagaataggaaaggggaggagaaactgacatcccatctgaggcttctaagggatccttttcatgttcctaaattagtacaagggggtgtggggtagggtgccaaaccttgggctcatcagtcacttcatgcatctgagttgaaaaacatttaaccctgagatgcacataatttaaacatgctgattcactggtgrccaaatgctgtgagcccttgggagccaggaattcccaacatgatgtggtaatgcattttacagcatgaacttcagatctccaggacccaggctggggaacaagacagggactctacattctaaagtttctgcataacaaacacagaccctcccttccaaatgcattgaaaatgagggatcccaaagggcaactcccacttccagccccaccaccccacataccttttcatttctgtttgcgccattaggtcaggag

SEQ ID NO: 762284 - DNA, 606 bp, Homo sapiens
ataattgctggatgttgtcagatgcacaaatataataggttgtcaaatgcacaaagctttctcaaataagcatgatttacctaaaggcatctcctttactagtaacctaaactgattcttttcaacctaaatgaaattctttcggttctggtatattcttgagcatgtcaaaataaaaatctcataatatttaaaaaacttatcaagttttattttttaaacaatacatttttaaaaacctgattatattagccaggcgtggtggcgggcgcccgtagtcccagctactcgggaggctgaggcaggagaatggcatgaacccaggaggcggagtttgcagtgagccgaggttgcgccactgcactccagcctgggcaacagagcaagactccgtctcaaaaaawtaaaataaaataaaataaaaaacctgactatttttcagaccaagtaaacactgtaaagttaaaagacttataacgacttgtaattcaagcttaagatctgatttgaaaaaccgctgaaggaaaattttcaattagaaagcagaacattgaagataaatgagacatgactataagttctcttcctggcgttagactatgactt

SEQ ID NO: 762285 - DNA, 659 bp, Homo sapiens
ctgtaggataactatagttaacaataatatattagtttcaaatagctagaaggaggatactgaatgctcccaacacaaagaaatgatatatgtttgagattatcgatatggtaatattgatcactatacactatatatattgcaacatctctacgtactataccccataaatatgtayaatttttatgtccaatttaaatttttaatttaaaaaaggaaaatgtggtatagatacacaatgaactgctattcaaccttaaaaagaaggaaagtctatcattagcaacatggatagcctggaggacattatgctaagtgaaataagccacaaagagaaagacaaatatcacgtgatttcacttctatgtgaaatctcaaaaagttgaacctaccaaagcagagagtagaatggtgtttacctggggctggagtgtcagggtgactggggaaatgttggtcaaaggatacaaaatttcagttagacaggggcaatgagttcaagagatctattgtacaacaggttgactgcagttaataaagatgtgttgtatacttgaacattgctaagagtagattttaaatattctcaccagaaaaaaatggtaagtacataaggtaatgcttacattgttaagcctaacttagttattccactgtgt

SEQ ID NO: 762286 - DNA, 628 bp, Homo sapiens
aaagtataataataaaaaaaaagaacaggtgttagctcaaaagcctcaagttttgtgcttcaattttagcatggggtttacttaactctcactgtctttggaagttcttcccttagcagaaaatgtttcaagctaacttgactgccttctcttggttgaatcttttctttacaacgggaaggcagtagaaaagatttgggaaggctttaaccaaataatcaaaactacctccctctcctttcaatcaacttttggtctcgactttagttactgccagagggtaaatgagggacaaatgaaggaaatgctcaactgttttctctctgcttgaactcatcccttaggagaggctggctcatgccctctagacctcggcaggcaggattgtgccttccttccccacaattctctgcaggaatttgtacattccctgagagttgaataagtgcttttaaacaggcagtgtgatggttgaarcttggagtgaagcccattacaagctgaaaagaattcccagctgcatttcactagtccctgatcccagctgcagcaatgcacagggcactctatttcttaagccctgtacgtatatgtacatattcacatcaatacgtatgaatgcacgact

SEQ ID NO: 762287 - DNA, 659 bp, Homo sapiens
ggtttgttttcatattaggagggaaaatgagattttcaggatacaatctgagaaggacagactgggacagggatattgtaagagaaagagaagatgtggaaggagtcagagcaatgaaacatgtgtacttgctcccmaatctaaaataaagtcattgattttcaaaagtgaagcaaaattcttcaccttccatcttcttatgaaggatcaaattcttcctagagtccctgcccctcctacactcccctgacattgctttgtggagctaatcacatgtgcctctaatccctgcaactgtcctgggctaggagaggctcactgtcctcaccgtgcccagcaggatacagctggtgccctaggcagcaaaggagaagaggatgctttccatgaagtcgataagagcttttccacattttacatttcactataattctaagtaaagttgtgtagagagaagagaacatatgggcaactttatctggtgggcttggaagaggccaggctctgagaatgacaatgaattcacaattctaattttcaaggtggcaaatgctagctttagcacttgtggaaatctggattttgagtttaagaacaagacagactttcaggtactgcaataaatgaggaaacatttagaatagggtccttagcccagg

SEQ ID NO: 762288 - DNA, 642 bp, Homo sapiens
gaaatttttgacgacaaatattgcagactgcaagagacgcttcttgttcgtggaaatagaaataaagcatggtgtctgcgcccggctttccgctgtaagctgaagtacttcacggcagcaggaattgggcaacccaccgtttacactccaccctttgaaactgggctgaatggggtgggggcccgcctttggggagaaaagcaaattttatttaagcccctgaaagaggagagggttggccaggctcggtggctcacgcctgtaatcccagcactttgggaggctgaggtgggtggatcacttgaggtcaggagttcgagaccagcctggccagcacgatgaaacccagtctctactgaaaatacaaaatgaaccaggcgtggtggcacatgcctgtaatcccagctactggggaggctgaggcaggagaaycgcttgaacccgggaggcggagtttgcagtgagccaagatcattccattgcactccagcctgggtgacaagagcgaaactctgtctcaaaaaaaaaaaaaaaaaaaaatgcgtattccccagccaccggaaaatgagatttctgagcagctggatctgataattaccatgaggtgtcattacatgatatacacgtgcttggaaacagtat

SEQ ID NO: 762289 - DNA, 623 bp, Homo sapiens
ctcaagtgatcctcccaactcagcctcccaaaatactgggattacaggcataaaaccactacatcgggccatctcccatttttaagctccatctgcgtcactagctgatgggagtcatcatgacccaggttggaggaggcagtctgtggccctgggttttcagggacagccgtctcttgggtggtgcagggtcaaaaacagatgaatacccagggkcatggtcggtaacatttattgcgcaactctgaggccggggcggacccagctggggagatttactgtgggaacgtctggcccggccccttcctcccctccgggcgccgctggccgcctccgttcccggtccgggccgcgttcagcccctgaaggggccccgtggggcctgcgctagacccggagggatcgggggctccgaagggggccgcctggtgggtgtcaggacgagtctaggacctccgagagcgacggtgcttcttgtgactttcgattaatttctgggaacggatcttgagtgatgcgcgggtcactacctcgttgtcctcctcctcactctcttcgtctaaggggggtggggggatgagcagggagcgatgtgggatccaggtccccatccctggctcccc

SEQ ID NO: 762290 - DNA, 670 bp, Homo sapiens
tgtcttgtgccagttttcaggatccatatggctcttctttgaccaaaataattatattaagcagtcaatgacaaaggatagaggaaaatcaaaagtggaccacaatcatgagaaatattagcaaatttgactatgtaatgagtttgtctttgtaaaactacaaaactttcatacataaaaaaatcrtaaatacatacagtgtatctctggaagagaacacaggaactgtatttcagtggttgtttccacttaagagaactgagggattcattttaaagggagcagcctattaccctgacatagtatagcaaaaggcattctcatcaattgctggtgaaagtctaaattgtatggcctgttaaaaaagaaaaaagcaatttgcaatatctaccaagagccttataattttcatgacttttatctcagtaattccatttttaggaatttaatcttaagaaataatctaaaatgtgaagaatagttcttatggcaaaatacattgctgaaagtattttttataaaagtgaaaatatgggaaaacttaaaagccccaaattaagggaatggtcataataaagtatagttcaatcacataataaaattgtatctagttgtagatttaataaggttatgcacatgaagtaaaatgactatttttgtttaatttaca

SEQ ID NO: 762291 - DNA, 708 bp, Homo sapiens
cttgtaactatatgctatctatatatatctcagagagatttcaggtaaatcttcctcatacctgctatttttgtcctgttctcttcaagccccttttggtgaacagttctgctggttttggtttttatctcttttttttttttttttttttgagacggagtctcgctctgtctccccggctggagtgcagtggcgggatctcggctcactgcaagctccgcctcccgggttcacgccattctccagcctcagcctcccgagtagctgggactacaggcgcccgccaccacgcctggttaattttttttgtatttttagtagagatgggtttcaccgtgttagccaggatggtctcaatctcctgacctggtgatcctcccgcctcggcctccccaagtgctgtgattacaggygtgagccaccgcgccggggctgtttttatctttttagttactccttttttttcctcctaaaggatattctatagctaacactctgtatcaatatacagagctcattttttggctgcatgtttcatttcactgtttatcttaattcattaatcattccaatattgattgacattggagttattttcaatcttttactcttagcaatgctacaatgaataattttttccatttttgccggtgtatctttgggatagtctctaaggaacaggatttttagggcaaaggatgagcatga

SEQ ID NO: 762292 - DNA, 612 bp, Homo sapiens
gtccaaggcgccagctcttctggtgcagaaaccacagactcagcagccaggatgtcatcagcatactcgagattacatcatctccttctgccaaccttaataccactatggtaaccatcaacagcaatacccatgattatttcagtagaaatattgaacagatgtgrcagccttgtcaaactcctttgctggtgtccaaccactctgttataccttttgcaattctaaaatctctcttctggccataatagagacagcacatgctgacctcccgctagggaaactgctcccatagcgtcagttggcatatcaaagactaactacgaacaccaccttatatacacagtgctttacagcctgctaatcatttttgcagacattctcctttttgactctcaagccagctgagacagctgtggtataagttgaaagggcactggagtttctgtcaggagttttgactttcttggttgcttactacctttgaaatcttgagcaaatcactctgagcttgttttttgtcagtaaaatacttcttgttctcaacctaacttgaaaaacaaatgaggtggtacatttaaaaataataaattatgaagatagttactcaaa

SEQ ID NO: 762293 - DNA, 593 bp, Homo sapiens
aggtcaggagattgagaccatcctggccaacatggtgaaaccctgtctctactaaaaatacaaaaattagccaggcatagtggcatgtgcctgtaatcccagctactcagggggctgagacaggagaatcacttgaacctgggaggcagaggtttcagtgagctgagatcacrccactgcactccagcctggcaacagagcgggactccatctcaaaaaaaaaaaaaaaaaaaaagagttccagtaaaggtttgtttttaaaggaaaaaagaggccttttccctattttgatacatacattgtgcctgaaaagaaatcagtcatgattacttttgctataactatgtgttgaatgagatagtcatcattgaatgttgttataataaactacttgaaaaaaagttttaaaattacagtcctgataaggtgtgcatgtggagcaaactgttaaaacaaaagtctcttggtgccttagttttctcattggaagctgatttcttcttccctcatcccccacccttgctgaccatggcaggtagctgctttaatcactaagcatttattatgataggcaattcgctcctttaaaacaa

SEQ ID NO: 762294 - DNA, 647 bp, Homo sapiens
catgaatgttcatggagttttcattcacaatagccaaagagtagaaacagcccaaaagtctataaactgataaatggatacataaaatgaatgtggtatatccagaaaatggattattatttggctatgaaaaggaatgaagtactgatgtaaggttcatgaataaaccttaaaaacattatcctaagtgaaagaagccagtcacacacacacacamaaaaaccacattgttagacttcactcatataaaatgtccagaataggccaatataaagaaacagagaatagaccagtacttgcttaggacttggaggagaaggaaataaggaagggtctcaggtttctctctggggtgatgagagtgtcataaaattgactgtggtgatggttgtacaaccatgtgaatatactaaagaacattgaatagtctgctttaaatgggtgaactgtatggtatgtgaattacatgtcaataaactgatcttggaaaaaaagaaaaaccccgtaaaggtgattggaaaggaatggccagagatataaagagcacagcatgtcacagaatgtttcatgaaggaggaggtggtcatcagtggccaatttggtcagagagcaagtaagacagaaccaaaaagtgcccagcagagcta

SEQ ID NO: 762295 - DNA, 647 bp, Homo sapiens
catgaatgttcatggagttttcattcacaatagccaaagagtagaaacagcccaaaagtctataaactgataaatggatacataaaatgaatgtggtatatccagaaaatggattattatttggctatgaaaaggaatgaagtactgatgtaaggttcatgaataaaccttaaaaacattatcctaagtgaaagaagccagtcacacacacacacaaaaaaaccacattgttagacttcactcatataaaatgtccagaataggccaatataaagaaacagagaatagaccagtacttgcttaggacttggaggagaaggaaataaggaagggtctcaggtttctctctrgggtgatgagagtgtcataaaattgactgtggtgatggttgtacaaccatgtgaatatactaaagaacattgaatagtctgctttaaatgggtgaactgtatggtatgtgaattacatgtcaataaactgatcttggaaaaaaagaaaaaccccgtaaaggtgattggaaaggaatggccagagatataaagagcacagcatgtcacagaatgtttcatgaaggaggaggtggtcatcagtggccaatttggtcagagagcaagtaagacagaaccaaaaagtgcccagcagagcta

SEQ ID NO: 762296 - DNA, 641 bp, Homo sapiens
atcagaaggataaaggaagtaagcagaccagcagacctggcctctggcatgtgaaacagcatccacatgcccccctcccgatgtcctatcagatctcattaaccctctcccattccattatccaggcactgcctccttacctgccttgattatctcggctagctgccagggttgataagaaatctgtcccaaaatggcagagggctaacagattaaggggttccctctcagggacttagcccttcrggtgggctgtctcacagttcccaattcttccagagccaaaggaaagccacagaagcatgaagtgtcaggaagattagacagacatttctgggccacaagcctgtgtgatgcttttcagatcaaaacccaggtcgtgcctgctatgtttgtaggaaggagggagtctgggtgggaaattagagaaagtacagcaccctctgtcctgaagaacctttcatccctgaactcagaggtgtaagctgcccttctgaaacacaaatccttatctactctcattttccaaatgttttgtgtttctatatgaaaatctttagatttgctgaaccattgggccccaaaaatatggcccaggtcactcaaacctatatattttcttcctatgattttcctcaggg

SEQ ID NO: 762297 - DNA, 621 bp, Homo sapiens
ttccagttaggcagagacatatgaagggctcatacattccttctctgactttctttagtatctccgtgttaaactcatggctggtccaccactctcaccaactgggactgcaatcttttgctagcagagctgtggattttctcttttattttctaccraaggtattacttttattgacagtgctgacaggtatggattttcctttttgctccaaattgagtcagcctcccatggcaaggaagctgctgtttgtcatggttcacccaattctgatactaccatagcacaaagtgagctgaggtagcagatgtagatgggtatagccccaaccaaaaaggctgaaggtttctaccgttctttcctaaatttctgggtttctttttttcatgaataaacacctttcaatttttcatttgcctttgctttagtcaattttcagagcacttatatggttttatgggttttttttaaacagatttatgttttttgttggggagaatattagcgtatctcttcacttcactatagctagaagtctgtctcctgcaatttctcaataattatttattttaataaaacaattatagtctcatttagcatatagcactaacagatatggac

SEQ ID NO: 762298 - DNA, 621 bp, Homo sapiens
ttccagttaggcagagacatatgaagggctcatacattccttctctgactttctttagtatctccgtgttaaactcatggctggtccaccactctcaccaactgggactgcaatcttttgctagcagagctgtggattttctcttttattttctaccaaaggtattacttttattgacagtgctgacaggtatggattttcctttttgctccaaattgagtcagcctcccatggcaaggaagctgctgtttgtcatggttcacccaattctgataytaccatagcacaaagtgagctgaggtagcagatgtagatgggtatagccccaaccaaaaaggctgaaggtttctaccgttctttcctaaatttctgggtttctttttttcatgaataaacacctttcaatttttcatttgcctttgctttagtcaattttcagagcacttatatggttttatgggttttttttaaacagatttatgttttttgttggggagaatattagcgtatctcttcacttcactatagctagaagtctgtctcctgcaatttctcaataattatttattttaataaaacaattatagtctcatttagcatatagcactaacagatatggac

SEQ ID NO: 762299 - DNA, 648 bp, Homo sapiens
gtcaattttcagagcacttatatggttttatgggttttttttaaacagatttatgttttttgttggggagaatattagcgtatctcttcacttcactatagctagaagtctgtctcctgcaatttctcaataattatttattttaataaaacaattatagtctcatttagcatatagcactaacagatatggactcggtaaatgcattgtcctgttagcactagataccagaaacctaattatctgatattttacagaataagtgacttctgcatgggaaacttaggaaaagaggtagtgggtgtgcaaaaraaatgtcttctctaatttttttcagtctcaatctagttagtaatttccttgttatattccagataagcatctgacaagagaagcccacactcctccactggttcaccaagagtttctaaacccctagtcagttactccttttcagggttgtcgaaaagggcactctaaatcaatcttatgtctgagccaaagaaaagtcacagaatggataattggggtcctgtcctctaatggggaaatccagaggctctaagattttgcatatcaaaaacacttttctattttttaaaaattagaatttttactttgtcaattaagacattttttaaaaatagc

SEQ ID NO: 762300 - DNA, 610 bp, Homo sapiens
cacctgtaatcccagctacttgagaggctgaggcaggagaattgcttgaaccctggaggtggaggttgcagtgagccaagatcttgccgttgtactccagcctgggtgacagagcaagactctgtctcaaaaacaaacaaacaaacagaaacaaaaaaactcttatgaattgtttatttctggaatttgtcatttaatattttcagactgtggttgatcacaggtaactgaaattgtggaaagcaaaactgtagataaggggcctacatactttcagctstatattatctcatttctatacagctttcaacataattgatctctctgttcttcttgaaacattctctttccttggcttccagaatactgcatttgattgtctcaaaggaagctcgagttctttgtgtcctaaaataaacttacgatctttcccccaaacctaatcctcttctatctcattggatggtgccatttatccagtttagcaaatcaaaaacttagttatcatccttaacacctcccctttcttgtaatctattaccaggttgcatcattttttaccttctaaatgtttctcaaatcaatccaaaaattttcatctccatcacta

SEQ ID NO: 762301 - DNA, 610 bp, Homo sapiens
cacctgtaatcccagctacttgagaggctgaggcaggagaattgcttgaaccctggaggtggaggttgcagtgagccaagatcttgccgttgtactccagcctgggtgacagagcaagactctgtctcaaaaacaaacaaacaaacagaaacaaaaaaactcttatgaattgtttatttctggaatttgtcatttaatattttcagactgtggttgatcacaggtaactgaaattgtggaaagcaaaactgtagataaggggcctacatactttcagctgtatattrtctcatttctatacagctttcaacataattgatctctctgttcttcttgaaacattctctttccttggcttccagaatactgcatttgattgtctcaaaggaagctcgagttctttgtgtcctaaaataaacttacgatctttcccccaaacctaatcctcttctatctcattggatggtgccatttatccagtttagcaaatcaaaaacttagttatcatccttaacacctcccctttcttgtaatctattaccaggttgcatcattttttaccttctaaatgtttctcaaatcaatccaaaaattttcatctccatcacta

SEQ ID NO: 762302 - DNA, 613 bp, Homo sapiens
ccatcaaaatgcaaggtctgaaagataccccaaccaccagttttacgttttacaatagtgatgttatctataggagcaattgtggaggttgcaaaattcttgttacttttggctacataactcctaaacaataattctaacctcgtgtaattttacaaagatgcttttagtctctgagcaaggagtgggttaattttgggaaaggastgttaatcatctttgttttaaagctaaactttaaactgaatttctcccatagttagcattgccaacactcaggaatgagcaaagagcttgtgagattaaaagcaaagatagggccaggcgcagtggctcatgtctgtaatcccagcactttgggaggcggaggcaggcggatcacctgaggttgggagtttgagaccagcctgaccaacatggggaaaccctgtctctactaaaaatacaaaattatccgggcgtggtggtgcatgcctgtaattccagctactctgcaggctgaggcaggagaattgcttgaacccaggaggtggaggttgcagtaagctgagattgcacctttgcactccagcctgggcaacaagagcaaaaactgtgtctcaaaaaaaaagca

SEQ ID NO: 762303 - DNA, 493 bp, Homo sapiens
tgggagccccaatagagcttatacacatcaggttgtaaccaggtaagaatctcttaaagctacatgtgcaggagtttgatcagaaatgagcatcaactggcttctctgaactatcttggcagagttaaggaatcattgttgatagataccgtcttaaaaaatactgccatttggccaggcgcggtgactcatgcctgtaatcccagcactttgggaggccaaggcaggcagayccacgaggtcaggagtttgagaccagcctggccaacatggtgaaaccccgtctctactaaaaatacaaaagaattagctgggcatggtggcgcacgcctgtaatcctagctactcaggaggctgaggcaggagaattgcttgaaccagagaggcagaagttgcagtgagcagagattgcaccaccgcactccagcctgggcgacagagaaagactccctctcagggaaaaacaaaaaacaaacaaaaaaaaaacctgtca

SEQ ID NO: 762304 - DNA, 581 bp, Homo sapiens
acttacaatgggtttatcaggacctaaacccactgcaaattgaggagcatctgtaatgcaaattttctctcagggctcaaaatctgtgtgaccaggctgggcttgtgtaatcccagcattttggggaggctgaggtgagaagatcgcctgagcctaggagttcaagaccagcctgggcacagtgagaccccatctccataaaaaataaaaaaaattagccaagcgtggttttgcatgcctgtrgtcccagctgctccagaggctgaggcaggaggattgcttgagcttgggaggttgaggctacagtgagcagtgatcatgtcgctgtactccagcgtgggcaagagtgagaccttgtcaaattaaaaaattataacaataataaaataaaaattttgtgtgaccattatctaatcatcactgtgcttgactcttgactaattcactcagcccagttaaaagattccctccactttcccctcatacccattttgcagtcagttcacaatgcttatatttaaaatgtaataattacctgtctaatgcaagcttttttatctcaaaagcaacttttacctctt

SEQ ID NO: 762305 - DNA, 625 bp, Homo sapiens
tgcatatcaaaatccgtggatgcttaaatcgctgatataaagtggtatagtatttgcatgtaatttatgcacacccccccttacactttaattcatttctggatgacttagaccacctaatataatgtaaatgctctgtaaatagtcgttatactgtattgtctagggaataatgacaagaaaaaaagtgtgcgtgttcagtacagaggcaattttttttccaaacatttttcatccacggttggttgaatccacagatgtggaacccacagatacagagggctgactatgtgtgtataccttgaagattaggatttcaacaaataaatttcgggggaacataaacattcaaaccacaccraccataaaactgttagaagaaaacataggtataaatatttatggccttagattaggcaatgatttcttagatataacatcgaaagtacaagcaacaaaagaaaaaataggtaaattagacttcatcaaaatttaaatcttatgcttcaaaggataccactaagaaaacgaaaagatgcagacacgaagaggggaacaacagacactggggcctgcttaaggatggagggtggaaggagggagaggatcagaaaaaatgtctatt

SEQ ID NO: 762306 - DNA, 617 bp, Homo sapiens
aaactggtccctggtgccaaaaaggttgggaaccactgtcgtaaagaattagaaaagcaagagcaaaccaaacccaaaatttagaagaaaataaataatatagatcagagcagaaataaatgaaattaaaatgaagaaaatacaaaagatcaatgaaacaaaaagttggtttttkgaaaagatcaagaaaattgacaaaccattagccagactaactaagaaaaaaagagagaagacccaaataaaatcggagatgaaaaggagacattagaatggattactgcagaaattcaaaggatcattagaggctgttacgtgcaactatatgccagtaagttggaaaacctagatgaaatggataaattcctagatacatacaacctaccaagactgaactatgaagaaatctcaaacttgaagagaccaataacaagtaatgagattgaagccgtaataaaaactttcccagcaaagaaaaacctgggacccaatggcttgactgatgaattttaccaaacatttaaagaaggactaataccaatcttactcaagctattctgaaaaatagaggaggagaatacaagtccatactcatcctatgaggctggtattaccct

SEQ ID NO: 762307 - DNA, 617 bp, Homo sapiens
aaactggtccctggtgccaaaaaggttgggaaccactgtcgtaaagaattagaaaagcaagagcaaaccaaacccaaaatttagaagaaaataaataatatagatcagagcagaaataaatgaaattaaaatgaagaaaatacaaaagatcaatgaaacaaaaagttggtttttggaaaagatcaagaaaattgacaaaccattagccagactaactaagaaaaaaagagagaagacccaaataaaatcggagatgaaaaggagacattagaatggattactgcagaaattcaaaggatcattagaggctgttacgtgcaactatatgccagtaagttggaaaacctagatgaaatggataaattcctagatacatacaacctaccaagactgaactatgaagaaatctcaaacttgaagagaccaataacaagtaatgagattgaagccgtaataaaaastttcccagcaaagaaaaacctgggacccaatggcttgactgatgaattttaccaaacatttaaagaaggactaataccaatcttactcaagctattctgaaaaatagaggaggagaatacaagtccatactcatcctatgaggctggtattaccct

SEQ ID NO: 762308 - DNA, 554 bp, Homo sapiens
caaaagtgaggctacagttctcgtttttattattttattctgtgatggctggagaagggtctcacctgccagagatctgtgcaattaaaaacacccacagctgaaccgttcaggggctggcaattttttttttttttgagatggagtctcgctctgttgcccaggctggcgtgcagatgggcgatctccgcttcctgcagccctgacctcccgggctcaagcgatrggcccacctcagtctcccgagtagctcagaccacaggcgcacaccataatattcggctaatttttaaattttttgtggagaccggagtctcgctatgttgcccaggctggtctccaattcctgggctcaagcgatcctcctgccttggcttcccaaagtgctgggattacaggcatgagtcaccgcccccggccggaggttgacgatttttgcaaaaatatggaacatttgggattttcatttcttagattatcctccttgcgccgctccctgctcccccaccaaataaaaaaagaaaaacaaacaaaaaacaaaacaaacaaacaaa

SEQ ID NO: 762309 - DNA, 570 bp, Homo sapiens
aacatacctttccgtagagcagtttgaaacactctgttgtgggatccgcaagtggatatttggacagcttgagatcttgctggaaatgggaatatcttcacatataaactagacagaagcattctcagaaacttcttcgtgatgtgtgcattctactcccaaatttgaatcttccttytcatgaagcagtttgaaacactctattgtgcaatctacaatggataatggaacccttggatgcccatggtagaaaaggaaatatcctcatatgaaaagtagacagaaggattcacagaaaatgcttgtgatgtgtgcattcaaatcacggagttgaatctttcttttgttagagcagttttgaaacactgtttctgtggaatctgccagcggacacttggagcgctttgagggctatggtggagaaggaaacatcttcccataaaaactagaaagaagcattctcggaaacatttatgtgaagcgtgccttcaactcacagagttgaaccttccttttgatagaacagttttgaaacactcttttgaacaattgcaggtgaatctttggagc

SEQ ID NO: 762310 - DNA, 605 bp, Homo sapiens
aacatacctttccgtagagcagtttgaaacactctgttgtgggatccgcaagtggatatttggacagcttgagatcttgctggaaatgggaatatcttcacatataaactagacagaagcattctcagaaacttcttcgtgatgtgtgcattctactcccaaatttgaatcttccttctcatgaagcagtttgaaacactctattgtgcaatctacaatggataatggaacccttggatgcccatggtagaaaaggaaatatcctcawatgaaaagtagacagaaggattcacagaaaatgcttgtgatgtgtgcattcaaatcacggagttgaatctttcttttgttagagcagttttgaaacactgtttctgtggaatctgccagcggacacttggagcgctttgagggctatggtggagaaggaaacatcttcccataaaaactagaaagaagcattctcggaaacatttatgtgaagcgtgccttcaactcacagagttgaaccttccttttgatagaacagttttgaaacactcttttgaacaattgcaggtgaatctttggagcgctttgaagcctttgtggaaagtgggaatatcttc

SEQ ID NO: 762311 - DNA, 555 bp, Homo sapiens
aaaactgctctattaaaggaaggttcaactctgtgagttgaattcacacatcacaaagaactttctgacaatgcttctatctagtttttatgtgaaggtattactgtttcctatgaaggcctcaaagtggtccgaatatccacttgcagattctacaaaaagaggttttcaaaactgctctatgaagaggtatgttcaactctgtgwgttgaatgcaaacatcacaaagtagtttctgagaatgcttctgtctagtttttaggggaagatatctccattggcacaatagccctcaaagcgctccaagtatccactggcagattctagcaaaagagtgtttcaaaactgctctgtgagaagaaatgttcaactgtgttagttgaatgcccacatcacaaagacgattgtgagaatatttctgtctagtttttattagaagatattcccgtttccaccaaaggacacaaagcgaagcccattatccgcttgcagaccttacaaaaacacgtttcaaaactgctctatcaaaggaaaggttcatctctctgggttcaa

SEQ ID NO: 762312 - DNA, 620 bp, Homo sapiens
acacatgtaactaacctgcacattatgcatatgtaccataaaacttgaactataataataataataaaagagaaagtttcaacactgtgatataaatgcacccataataatgaagtttctcatgatgcttctgtgtagtttttatttgaagatatgtccatttccacgataggcctcaaatccctccaaatatccacttgcagattataaaaaagagtgtttcaaaactgctgaatcaaaacaaagtttcaactgtgaggtgaatgcacacatcaaaaagaagtttcacagaatgcttctgtctagtttttatgtgaagatatttccttttccaccatattcctcaaagcactgcaaatatccacttggaaattctwcaaaaagagtgtttcaaaactgctcaatgaaaagaaagattcaagtctttgagatgaatgctcacatcacaaagaagtttctcagaatgcttctgtctactttttatgtgaagatatttccttttccactagaagcagcaaagcgctccaaatatccacttgcagattcaacaaaaagagtgtttcaaaactgctcaatcaaaagaaaggttcaactccgtgagttgaatgcacacatcacga

SEQ ID NO: 762313 - DNA, 548 bp, Homo sapiens
tgggatccgcaagtggatatttggacagctttgagatctttgctggaaatgggaatatcttcacatataaactagacagaagcattctcagaaacttcttcgtgatgtgtgcattctactcccaaatttgaatcttccttctcatgaagcagttttgaaacactctrtttgtgcaatctacaattggataattggaaccctttgatgcccatggtagaaaaggaaatatcctcatatgaaaactagacagaaggattcacagaaaatgctttgtgatgtgtgcattcaaatcacggagttgaatctttcttttgttagagcagttttgaaacactgtttctgtggaatctgccagcggacacttggagcgctttgagggctatggtggagaaggaaacatcttaccataaaaactagaaagaagcattctcggaaacatttatgtgaagcgtgccttcaactcacagagttgaaccttccttttgatagaacagttttgaaacactcttttgaacaattgcaggtgaatctttggagcgctttgaagc

SEQ ID NO: 762314 - DNA, 562 bp, Homo sapiens
agagcagctttgaaacactctgtgtgtgggatccgcaagtggatatttggaccgctttgagacctttgctggaaacgggaatatcttcacatataaactggacagaagcattctcagaaacttcttcgtgatgtgtgcattgtactcccaaatttgaatcttccttctcatggagcagttttgaaacactctgtttgtgcaatctacaattggagaattggaacgcttggatgcccgtggtagaaaaggaaatatcctcatataaaaactagacagaaggattcacagaaaatgctttgtgatgtgtgcattcaratcgcggagttgaatctttcttttgttagagcagttttgaaacactgtttctgtggaatctgccagcggacacttggagcgctttgagggctatggtggagaaggaaatatcttcacataaaaactagaaagaagcattctcagaaccatttatgtgaagcgtgcattcaactcacagagttgaaccttccttttgatagaacagttttgaaacactcttttgaacaattgcaggtgaatatttgga

SEQ ID NO: 762315 - DNA, 562 bp, Homo sapiens
agagcagctttgaaacactctgtgtgtgggatccgcaagtggatatttggaccgctttgagacctttgctggaaacgggaatatcttcacatataaactggacagaagcattctcagaaacttcttcgtgatgtgtgcattgtactcccaaatttgaatcttccttctcatggagcagttttgaaacactctgtttgtgcaatctacaattggagaattggaacgcttggatgcccgtggtagaaaaggaaatatcctcatataaaaactagacagaaggattcacagaaaatgctttgtgatgtgtgcattcaaatcrcggagttgaatctttcttttgttagagcagttttgaaacactgtttctgtggaatctgccagcggacacttggagcgctttgagggctatggtggagaaggaaatatcttcacataaaaactagaaagaagcattctcagaaccatttatgtgaagcgtgcattcaactcacagagttgaaccttccttttgatagaacagttttgaaacactcttttgaacaattgcaggtgaatatttgga

SEQ ID NO: 762316 - DNA, 601 bp, Homo sapiens
ccaaaggacacaaagcgaagccaactatccgcttgcagatcttacaaaaacacgtttcaaaactgctctatcaaaggaaaggttcatctctctgggttcaacgcacacatcacaaagaagtttctgagaatgcttctggctagtttgtgtgtgaagatattcccgtttccaacaaaggcttcaaagccctccaaatattcacctgcaattgttcaaaagagtgtttcaaaactgttctatcaaaaggaaggttcaactctgtgagttgaatgcacgcttcacataaatggttctgagaatgcttctttctagtttttatgtgaagatatttccttctccaccatagccctcaaagcgctccaagtgtccgctggcagattccacagaaayagtgtttcaaaactgctctaacaaaagaaagattcaactccgtgatttgaatgcacacatcacaaagcattttctgtgaatccttctgtctagtttttatatgaggatatttccttttctaccacgggcatccaagccttccaattctccaattgtagattgcacaaacagagtgtttcaaaactgctccatgagaaggaagattcaaatt

SEQ ID NO: 762317 - DNA, 564 bp, Homo sapiens
tattcccgtttccaacaaaggcttcaaagccctccaaatattcacctgcaattgttcaaaagagtgtttcaaaactgttctatcaaaaggaaggttcaactctgtgagttgaatgcacgcttcacataaatggttctgagaatgcttctttctagtttttatgtgaagatatttccttctccaccatagccctcaaagcgctccaagtgtccgctggcagattccacagaaatagtgtttcaaaactgctctaacaaaagaaagattcaactccgtgatttgaatgcacacatcacaaagcattttctgtgaatccttctgtctagtttttatatgaggatatttccttttctaccacgggcatccaagccttccaattctccaattgtagattgcacaaacagagtgtttcaaaactgytccatgagaaggaagattcaaatttgggagtacaatgcacacatcacgaagaagtttctgagaatgcttctgtccagtttatatgtgaagatattcccgtttccagcaaaggtctcaaagcggtccaaatatccacttgcggac

SEQ ID NO: 762318 - DNA, 503 bp, Homo sapiens
gctgtccaaatatccacttgcggatcccacaaacagagtgtttcaaaactgctctacggaaaggtatgttcaactctgtgagtttactgcagacatcctaaagaagtttctgagaatgctgctgtctagtttaatgtgaatatcttttcttttccgccatagccctcaacgagctccaaatatccactttcagattctacagagtgtttcaaaactgctctatcaaaaaaaagtttcaactcggtgagtcgaatgcacatatcacaaagcagtttctgagaatgctttcgtctatttttcccaggaagatatttccttttggaccgtaggcctcaaaycgctccagatatccacatgcagattctacaaaaagagtgtttccaaactgccctatcaaaaggaaggttcaaccctggtagttgaatgcaaacatcacaaagaagtttctcagaatgcttctgtctagtttttagaggcagatatttctttttctaccataggcc

SEQ ID NO: 762319 - DNA, 644 bp, Homo sapiens
ttttattttctaccaactagatgtttaccttaatcaagtcatcgattgctctgggactctgtttttcatctttacaaggtgattgaattagtcgatctcttaggcgagagcatctcacttagaagatccgagatgtggtaaggccttgacactatttaactgtttgaccttgggcaagtcacttaaccttggtcaagtcgtgtttcctcatctgtgaaatgaggggattgttgtcttctgggaggtcattttcaacttcattaatctatcagcctttaaaacttcttttttaaaaacttatratttacttctccccaaccctccaactttgttttttcagttaagaggaactaatacatacatatttacattgtgtaaacttttgaagaggacacagaagttttcttttttactttcaaacatgactctaaagattttattaaaaggatttttttttctgttttgttttcagacatggctttaaatatttatatctggaaaaccacactgaagttacaattagtcagtaataaaaataatgtgtgacatatattcaactacccaaaccatccaacatcccttatcagagttgatgagttgaatcctgaagtttgacgcagggagatcgcaactgtgctgtatct

SEQ ID NO: 762320 - DNA, 611 bp, Homo sapiens
aaaaaaaatcaaaaccaaacttaaatctaaatgtactgaaaataatgctgaaacagtcagagtttaataaagaaacatgttctttgaggctgttaattatatatgtaatgccagagttatgttttattaaggcaaaggacccagcatgggckctaggtccaacaaggcttctgtccacagcatacatgtttcattctcattagcaatttacagaaaatatagctgggcatggtggctcatgcttgcagtcccagggctttgggaggtgaggtgggaggattgctggaggccaggagtttgagaccagtctgggcaacatagagatatcccatctctaaaaaaaattttttttaaattaattagccaggtgtggtggtgtgtacctatagtcctagctactacctaagggaggaagatcctttgagctcaggagtttgaggttacagtgagctatggctgcgctacttcactccactctgggtgatagagccagagtaagaacttgtctcaaaaaaatagtaagaaaaaaaaagaagacatactgtgtactattctgtttgctaggatgatgacttgtgaatttcaaatggtggttatgcattttctaaagt

SEQ ID NO: 762321 - DNA, 629 bp, Homo sapiens
catatatatgctttccttcctaatacccataagaggcattagggggaaggagaagaatataaacacagaaaccacatcctaacagctgcctctagttagctctgcttccccccccatccccacccccgagcttttaaatcttgcagcggcacctaatttgtcccacatggctttcctcccagtggaaccactggcccttttcttgctgccctttttgatcaaaagcaaacagttatgaagaatcaactagtttaactagtttaggccactgtcattaggctgctggtgtgcaggtgcctatgaataggcaggagataaccatttgtagattgggagagacttaaaacagtctgaacctagttaggtgccagtggacctatgaaaacatcccgcaattaagcactaagtgagacagtgaaccgctgagtgaactaccgtgatgggaatagrtgagtgatttttgacctagtggggcagatcagaatcatgtagggcgcttaaacatttcgtacacatgccaactcctgccactgacattctgcctctattttaatacgcctggcagtgatgaatatagatactacagatctgtgttctgacatgtctgcacggcaagtgggttgcaactt

SEQ ID NO: 762322 - DNA, 583 bp, Homo sapiens
aaagttacaccatataaatggatgtgattgttttacaatgtaaagatgtagacttctgcaaattgatctacaaattcaatgcacttcaataaaaattccagcagaatatttgcagggaactggataaactgattctaattaatatggaactataaattaattaattaatatagaacaactaagrcaattttgaaaaagaaggcaaataagaaaactgccctagcagacactaagaaatactacagatattatgacaaattatactagttaaaacaatatactactggtgaaagaacaaatgacaaatacaaaataacagagttacaaaacagtttcgtagggttatacagagtttcagggcaacctttgaagcctcagggcagaaaagtatgtctttaagtagaacccccaaggcataatccataaagagataaggactgagtttgactacatcaaaataattcaagtttcctattccacaaggaatactacacacaacattaataaatgactcgtagactgggagatcttcacataaataaccgacagaacattagtttctagaatatctaagaaactctca

SEQ ID NO: 762323 - DNA, 606 bp, Homo sapiens
tagacattagtaagatttcttttcaataagcggtctacttaaaacaaaacaaaaatcagtactgggttgatgccaatggctaaattccattacgagatagacattcttcctttcaaacagatggctgtaaagaaaaaacaaagtaaaatgcaagtatatccaaagtttctaatttgtatatacagctataacatttttttaaatgtagatttttatcagtgtttaaaaaattagatctatagcttccctaaggaagggtagaagaatagatgacatcttaattttgcattcattcctaatattacagatgtgtttactacacaggagaagagaaactgtgaggagaagggaggcgttaatggtacaattytgggggctcgaataaaagaggttgagagagcaaaatgctccatcttgtcttctctccacatgaacttggccgtgatccatgttctcagatgccagcacccagcccaccccaacacacggcagccagttctcacctccacatcaaacagcgtcgagccatagccaggccactccttgatcaaggccatgtacttggccatggcctgttcctggttcattccctgaaatttcctccac

SEQ ID NO: 762324 - DNA, 480 bp, Homo sapiens
  misc_feature 23: n = A,T,C or G
gtgcatcaatctcgtatgactcntggttcttcaaaaaaagtcaattaaaatttttcaagggccagtacagtaaacagtgctctgtgtgatgctcacacctgtgcatgagggagcaggatgtgggtaacacaaagtcaacagcgcagactcacctggcatcttctggggactctgcaatcaggtggaaagtcctatcggccataatgatgtcgatcccattctccttggtggtgttatctatgatctctctgcaaagaagcaaaagcaacaaacgcacatcaggaacaccaaattctgawtaactgaggaaagcaactaatgaagccaatgactagagttgggaactgtctgttactgacgaaacggtacacagttggctctccatatctgcgagttcaggatttgtgggttctgcacctgtggattcaaccagcagcagatcaaaaataaaaatccaatttaaaaaataataatactaca

SEQ ID NO: 762325 - DNA, 627 bp, Homo sapiens
atgtcttctttcgagaagtgtctgtttatttcctttgcccactttctgatgtttatttttcttgtaaatctttttaagttccttttaagctctgcatattagacctttgtcagatggatagattgcaaacattttctcccattctgtaggttgcctgttcacttcggtgacagtttcttttgttgtgcaaaagccttttagtttaattagatcccatttgtcaattttggtttttgttgcaattgcttttggtgttttagtcatgaagcctttgcccacgcctgtgtcctgactagtattgccttggttttcttctagggtttttatggttctaggttttacatttaagtctctaatccatcttgagttaatttttgtataacacgtaaggaaggggtccagtttcagttttctgtatgtggctattcagttttcccagccccatttgttaaataggaraattctttctccattgcttgtttttgtcaagtttgtcaaagatcagatggttgtagatgtgtggtgttatttctgaggtctctattctgttccattggtctatatttctgttttggtaccagtaccatgcaccctaactcattttatgagtaaactggtaagagatac

SEQ ID NO: 762326 - DNA, 525 bp, Homo sapiens
agttttatatctccccccaaatccctattctttatatatgaaaccctcccttttcttcacaaaacactgcaaaacactaatcttttgctgtctgcatggtctgctattttctttctttcttttttttttttttttttttttgagaaggagtctcgctctgttgcccaggctggagtgcagtggcctggtctcgactcactgcagcctccrcctcaaatgattctcctgccttagcctccagaatagttgggattacaggcacccgctgggctaatttttgtatttttagtagagacggggtttcaccatgttggccaggatgatcttgatctcctgacctgtgatccccccgccacggcctcccaatgtgctgggatcacaggctggagccactgcacccggcctgtttgccattttcataaagtcttttttttttttttttttgagatggagtctcattctgtcgcccaggctggagtgcagtggcgcaatctcggctcactgcaggctccggcccccgggttc

SEQ ID NO: 762327 - DNA, 634 bp, Homo sapiens
cagctttctgaatttcatcctggcaaggagagggatgctcatggcccttcctggagtttcctgccactctgagagggaggcactgggtggcagtgctgtgtgaccgtggccacgtcctgctccatctctggccctctgtttcttcttctgggaaatggggattctttgttaaccctctggagaccaggtcttctgcctgtagcatttgatggtgccatcctttttagtttaatcattttgtctctgcagtgttatcttcatcaccaccactgtcacyttcatgaagcacacaccagttgcttcacaagcatttaatcatcacacctctccaaggcaggtggtattatccccattttccaagtgagggaattgaggttcagagaggttgagtaactacccagggacacacagctagtgagtgataccacacgtattacctctctgcatcatttgtgctcattgataggtgattagggatctgtgtgggatttgttctagtgaccctggcacccatggctaaggcagcggttcaggggaaatgcaacaagtttaattatgtagatccaccatttaacttagagtttctattaaacaatgctgcaagatgtaacgtttcattgggttgcatccttta

SEQ ID NO: 762328 - DNA, 636 bp, Homo sapiens
acaatttcacagacttatagatagttacaaaagagaccttggagataaatacttcccaacaaagccaaatgaattgcttcaatatgtcaaaggccccagtatcttacataaaccaaaacgtctaatatgcagttcttcattctttattaycaaactctccctgacttttacattattattctttcaggacacagcaagatgttgcctgtgtcattaaagcatcagattgattactgcaagcacagtgatgaagttcataggctttggagtcagtttatatcatattcccaaggttcatgttaaaacaattctctatactggtggcataatcttaaagaaaatgatatatttctagcagtctcactactcttatgtttaaaatcaagaaatacatgtgaaccctggcaccttggaattattcaatgtatgataattatgaattaaaattttttccctattggacgtccatttcaatttttatacttgaaaatgctttccttgataactctcagttacaaaataaaacaacacttttgtggttctgaatgtccagtctctggtgcaaatggttacaaataggcagttggtaaactaaagttattttaaaaggacaagggacccacactccgaaaaaaa

SEQ ID NO: 762329 - DNA, 635 bp, Homo sapiens
gtgtaggaatgtgaataggtgaaacctttatgggaaactgtatggagagttctcaaaaaactaaaaatagaagtaccattcaacccagcagacccactactggctacatttccaaaatgaaagaaatcattatatccaaaagataactgcactcaaatgtttattccaacactgttcacaatatcaaacaaaggtatggaatcagtctaagtgtctatcagtggaggactggacaaagaaaatgtggtacacatatacaacagaatactattcagccgtaaaagagaattaaatcatgtcttttgcagcaacatggaggaaactggaagccattatcctgaaatgattcagaagcagaaagttaaattytgcatgttttcacttataagtgggagttaaacatgggtacatatagacgtacagagtggaatgacagacactagaaaccacaaaaggtgagagggtaggagtagggtgatggttaaaagattacctgttggatacaatgtttattatttgtgtgatgggtacacaagaatttcagacttcaccgttatgcctgtaagacatctgcagttgtaccctctaaatatataaaaataaacttttaaaagattataagaaagtctcaagga

SEQ ID NO: 762330 - DNA, 618 bp, Homo sapiens
ttccccactcaaatctcatcttgtagctcccataattcccacatgttgtgggaaggatccggtgggagatacctgaatcatgggagcgggtgtttcccatgttgttgtcgtgatagtgaataactctcacaagatctgatggtttttaaaacgggagtttccctgcaaaagctctctcttctcatctgccgccatgtgagacatgactttttccttccaccatgattgtgaggtctccccagccatgcagaactgtaagtccattcaacctctttctttcgtaggttgccccgtcttgggcacatctttatcagcagcatgaaaattgactaatamagaagtaattgagtagacagaactcaacctcactaccccttcagctataggatttgacctccaaggagcttatattctggtccgtttttgccccagtagcaagtttactgggaaaggctctgagctagggaaaagcggtcttacctgtaacatggtattgctgattctgggagcagccttttgttgccacacggtgagccatgcttccccagcagctccatcaattatgtgattgatagttaagagataacaaatttatctcttaactggttcagcaatttg

SEQ ID NO: 762331 - DNA, 647 bp, Homo sapiens
atttctttgtgctgtgttctagagtaacttttcattcatattttatttctagaactataaaacgtaaattagtttaatcagtacactcaatggactaattagttatagatactttcaggacatttaaaactaaaaatactacaactaaaaaagtgaatatactataaattatattcgaggactgttattaaaggaaataaaagctctttaaaataaacagactctttggcagttgaaacacatgggtttcatcttaaattactatttggtttaaccgaattaatttttccaagtaaaataatgacttggctgatataatgccccctaagttctcatttgctattttcagtccttgaacatttcaaggtctacaagtcttacaggaatctgacatcaaattattgcatggccaaaagcaggtaaaggtggcctgggaaacatagagcaatttgaytcaaatctatacgtaatgctgtggctttaaacatttgcataaaattaataaagccaaattattttagattaaacatttcttactttacctactggttgcttctccacactttgtaactctaggtcccacacacaatgagataaaagtaggaccaaaatatttcagaaagagagaatttattctctgtgctcat

SEQ ID NO: 762332 - DNA, 525 bp, Homo sapiens
ttcacttgatcccactataccactgttcaagtgttgagagctctgactttgagatccaccattttccaatttaacgattttccaagactttatgcttttcagttaactttgcatcttctatcttttcagaaatttatttttaaaacatgtaaaatgcaacaaaatgaaacagcgatttaaattcayggcaaattgtctcctaaacttcaagctcactggacctagcatccgtagttccccacacattattactatggtgctattacagttccttcttctaaaatattataattgctttctctaaattataaaatatctttcattttgtcttattaaatgtagaataaatctattttactatgttagtagtagtaaatactattgtacgtcattgataaataatgacactaaacattaaaattagaatagtaaacatcattaaaagaattatttttatcagttttattaacaagaagaaaattaaccaattggtaaatattttctccctttcagtactcacttgtt

SEQ ID NO: 762333 - DNA, 518 bp, Homo sapiens
cacagagtggtaagctagacaaaaaagcaggagctaatgatatgctgtctacaagagacccacctcacaggtaatggcacctatagactaaaagtaagggataatggaaaatctaccaagcaaatggaaatcaggaaaaaaaagcagaaattacaatcctaatttcagacaaaacagattttaaaccaataaagataaaaaaaggacaaagaagatattacataatggcaattatgtaataattaccataattaacawaattaacacagcaacaaggcttaacttttaaatatgtatgcacccaacacaggagcatctagattcataatgcaagttcttagacacctgcaaaaggtcttagactcccacacaataatagtgggagacttcaatattccactgaaagtattagacagatcatcaaggcaggaaatcaacaaagatattcaggacctgaactcaacattgagccaaatagatctgatagacctctatagaactctccacttgaaaacaaa

SEQ ID NO: 762334 - DNA, 622 bp, Homo sapiens
ttctttttgcactaggaaaaattcatatataattttcttattttaaatttgtattttccagtatggaaccccaatttgtctactgaggactatatattttgtacgtatctgtttcctctgctaaattggatcttcttagggcaacaatgtatctttatttactttgtattctcagtgctttcttttcttttatctccctttcgctgttgttgcccaggctcttttttctccrtttcactcttgttgcccaggctggagtgcaatggctcaatcttggctcaccgcaacctccctctcctgggttcaagcaattctcctgcctcagtctcccaagtagccggggttacaggcatgcatcaccacacccggctaaatttttatttttagtggagacagggtttctccatgttggtcaggctggtctcaaactcccaacctcaggtgatccgcccgcctcagcctcccaaagtgctaggattacaggcatgagccactgcgcccagcctattctcagtgctttctacggctgctttgccatataagcaaaccagcaacaagcacagcttggtgatttactggattaaattttaaatgttctttttaattgccaaataatagttat

SEQ ID NO: 762335 - DNA, 630 bp, Homo sapiens
atgaattctgcacatccaggtagaaatccagaacattaactgagtcctacgtaaacttacaaaaatgttccaaagtgtaaaaccacaatctatgagatagggttacaggggcacttgtttcttcccaagggactcactgggagctaccagtggtctcaatctgattcactgtctgagtctgtttgggctaagtctcataccatatatcgggtggctgagacacagaaatgtattctcagatgtctggargctggaatgtccaagatcaaggaaccagcagattcggtgtccggcctcataaatcacctgctgtcttctccctgtaacctcacagggcagaaggggcctctctggggcctctttcataagatcactcatccattcataagggctccactcccacgacttaatctcctcttaaaggctctatccccaaataccatcaccttgggaatgaggggttcaaaacagaaatgtgagggggacacagacatccagaccctagcactcaccgttctcctatttgccatcccatcgacctttcaatccctgttgatggttaggaataggaaaatcactggggatgacctccccagacggtgtttgattaggtgactaagtgaggaacgg

SEQ ID NO: 762336 - DNA, 320 bp, Homo sapiens
tatctgttggactcgattagccaatttattagatcttattattgagtaagccaggccatcatggagctcaccgatccatgttgaggaaaaataaggaaatcaaagatttacatcattaaaagaaaaatagcaactataacaagagctgttgatgagaggaggctgaagggatctacctgcctyggcctcccaaagtgctgggattgtgggtgtgagacactgcatgcagcctgcctctaatttttgtggcaatcttattggcatgggactctggtaagttctgtgatgcacacgcacgcaaagtgctagggtgctctcgc

SEQ ID NO: 762337 - DNA, 469 bp, Homo sapiens
cacaataaaccttgctactgctcactctttgggcccgtgccacctttaagagctgtaacactcactgcaaaggtctgcggcttcattcttcattcactggaagcaaccaacttgggacacaccaccatgcctggttaattttttgtattttcagtagaggtggggtttcactgtgttagccaggattgtcttgatctcctgacctcatgatctgcctgcctctgcctcccaaagtgctgggattacaggcgtgagccgctatgcccggtgaacacrtacattttcaacagaagagcaagagagcatagaacccagaatagcagaggcatataggccccgttttgcaggagtcaaataacttaattcttagcacaatcctgtaagatgaattctgttataatcccactctctagataaagaattcaaggcaccaagagtttagttcatgagcagtaagagatttgggccc

SEQ ID NO: 762338 - DNA, 531 bp, Homo sapiens
aagccttttatcaaaaaaaaaaaatgcatcattcacaaacatttccaaccatccttgtcttttgatcagcaggtcttcatttttattcaatcaaatgtattattttcagaatctgttatgaatcatgcttcagatgttatagtaaataaaactttgacttcacttcatacaattttatcctaattttcttctrgaaaccttataggtctttgatccattttgagttgcctttcatgtatgaggaggtgtatgggtagagattgtttgtttagtatatggttattgaactgcagcaattctctttccagctactctcacctaggaacttcagccactcttatcttcctggaattccatctctgcctctgcaactggagatatctaggctctgcagtaccttcctctttacttggcagcctgggagttttctcttggtagtaagctgaagcaattgtagggctcacctcatttatttctcctctctcagtgaccagttgccctgcactgcctgaggcctgaggtcagaaactc

SEQ ID NO: 762339 - DNA, 531 bp, Homo sapiens
aagccttttatcaaaaaaaaaaaatgcatcattcacaaacatttccaaccatccttgtcttttgatcagcaggtcttcatttttattcaatcaaatgtattattttcagaatctgttatgaatcatgcttcagatgttatagtaaataaaactttgacttcacttcatacaattttatcctaattttcttctagaaaccttataggtctttgatccattttgagttgcctttcatgtatgaggaggtgtatgggtagagattgtttgtttagtatatggttattgaactgcagcaattctctttccagctactctcacctaggaacttcagccactcttatcttcctggaattccatctctgcctctgcaactggagmtatctaggctctgcagtaccttcctctttacttggcagcctgggagttttctcttggtagtaagctgaagcaattgtagggctcacctcatttatttctcctctctcagtgaccagttgccctgcactgcctgaggcctgaggtcagaaactc

SEQ ID NO: 762340 - DNA, 609 bp, Homo sapiens
actttgttttatgaacaaaattattaaaaatatcatggaaaattaccttcaggctatatgtataaggtgtgtgtgtgtgtgtgtgtgtgtatacatgtatgtatataaaaattaatgtaatgtttagtcctgggtgccatccctaaggtatctaattatgtatatacaaatattccmaaatctgaaaaagtccaaatctaaaacacttctggtctgaaggctttcagataagggatattcaacttgtattagaattccaaatcactaaaaacactctcacccaacttcctacctttaaaggagggtattaaggatacctcagttgagtaaatgtcaaacaactaagttttgtttttgtttcctgatgtttttccatttataaagtaaacatacacttcacatataatactttaaaatatcacaaatgtataattatgtcaccataaatacagtattaaaaacttacaaaacagcagagctgaggagcaagcacatttcatcatcctcttcttgaagcactgaacttattttctttcctgtagctttacttatagatgtcttgagtttcttagctagcttttttggtgtgttggttatagaagattcttc

SEQ ID NO: 762341 - DNA, 625 bp, Homo sapiens
tgtattactttgttctcacaatgctataaaggaccacctgagattgggtaatttaagaagaaaagaggtttaattgactcacagttctgcatgctatacaggaagcatggcttggaggcctgaggaaacttacagtcatggcaaaagggtgaagggaaagcaagcatttccttcacatggcgacrgaagagcgagcgaactaatggggaaatgctacacacttttaaacaaccagatctcttgagaactcactatcatgagaatagcaagggggaaatccgcccccatgattcaatcacctcccaccaggtctctcccccagcactggggattacaattcaacatgagatttgggtgggacacagagccaagaccatatcaatgaactttttcttatggtcttgttattaaatcataaacagacttatttgtttctgtttgctttttttctctttgaattaattacttttttggatagatagtgtttctgtgtcctccttcccagtttccaattagtagctcttgtcacggttcccaccccaagaatcagccactattctgacttttttttccactgtaggttaattttgcctgttctggaacttagtataaatagaactataca

SEQ ID NO: 762342 - DNA, 626 bp, Homo sapiens
ataccttgagagttactctgataatctagatggcagctaagtgactaatgagcaggtgatgtgtacagcatggatacactggacaaagggatgattcacatcccacagggcagtgtgaggtttcattacactactcagaatggtgtgcagtttaaaacttatgaattgttaggccaggcacagtggctcatgactataatcccagccctttgggaggccgaggtgggtggatcacttgaatccaggagttcgagaccagcttgggcaacatcgtawaacactgtctctaccaaataacataaacattagctgggcatggtggcatgtgcctgtagtcccagctactcaggaagctgaggtggcaggattgcttcaacccaggaggcggaggttgcagtgagccgagatcatgccactgcacttcagcctgggcaacagagtgagacccttcctcaaaaataaataaaaataataaaacttatgaattatttatttctggaatttttcatttaatattttcagactgcagtttactctggacaactgaaaccatggaaagcaaaaccatggctaagaagagaatactgtatttggtttcttagttcaagaatgttttttattattgg

SEQ ID NO: 762343 - DNA, 604 bp, Homo sapiens
agtaattgatacaacattgctagcaagaaacagcggctctgcacctaagaagggaggcaggggggcatactgcatggattttacagggctgtttctgccctgagctttcttcctcatctgtaaagtgagggatttggatggaatgcttgctaagggatgtttaagcattgtgatgttgtaatatctataagaaagcaattaaactctgcttttataaaccttcacatttattgtggcatttttcatcatcagattgkcaaagattgaaacacatggggctaatgaggagataacaaaacagatgctcttggccttactggtgggtgaataaattggctcaacctctgtggatatctataaaaatataataacaatgacaatcataatttgcagcgcatatacccatttacactgataactcatttctgggaggttctcctagagctatgtttgcacatggaagattaactacggtgctgtttattgtaacaggaagctaggaatgacctgcatgccctttggtgaaggatggtgtgctaaattgggctacatctaagtaaatgggacactacaccagccctaaaaagaataaggtagatgaaca

SEQ ID NO: 762344 - DNA, 578 bp, Homo sapiens
gtttccttgccttccaaacttctagaagctgcctacattccagtgtacagcccatctttaaatgtggcatctttctgacccttctgttggtatatcattctctggctgcagttgggaaagcttctctccttttaatgtttcgtgtgactagattggggccccctgataatccaggctatcaacccatctcgaggaccataaccataatctgcaaagttccttttgctatgttgggtaagatattcacaggctccagggattcaggtgtgaacatctgtgggcggagtgtggkgtgggggaggggcatttttctgcagaccacaggccctttgcacatgttgtttgctttacctaaagtgctcttccacccacttctcatcagcctaactcctttaggccaaactttgggtcctcagagagacctcagtaaaaatctactttaaattagaccctctggttactatggctcctgtttctttccctcgtagcactttcagcagtctgtaattagatatatttgtgtaattactacttgatcatttttcccattggagtgaaaactctgtaagaacaggaac

SEQ ID NO: 762345 - DNA, 601 bp, Homo sapiens
aataatcatcccacccaaataagagttatttctttcccaacagaccttttccaggctcagtaatttcactgttaatagcagagaaaaagcaatcagctaggtaatgggtaccactagcactgaagtcatttaattagcaccagtaaatgagagctgcccaggtgctcagatgtaattagctgtgcccaaaacatytcctacattggccagcaactacagtcaaggacagggagctatgcgccattggagaagaatcttcccaagctgaggacatgaccaggcccgtggtccaacccttcaacaggctgagcaatgccacagtccccaaatcttgaggaaggcctcactcttgaagaggaagcaaagaaatgagttatgggctctgaggccatgttgcctaggtttgaatcctagctatatgctttgacaagttattaagatctttctgtttcagttttctcacctgcagaagggggataacaataaaatctacctgaggttcaacagttaatatgtgtaatgtgcttaaaaggctaaagagttaatgtgtataatgtgcttagaagactggcacatggtaagccttctctaagtgttggtc

SEQ ID NO: 762346 - DNA, 601 bp, Homo sapiens
aataatcatcccacccaaataagagttatttctttcccaacagaccttttccaggctcagtaatttcactgttaatagcagagaaaaagcaatcagctaggtaatgggtaccactagcactgaagtcatttaattagcaccagtaaatgagagctgcccaggtgctcagatgtaattagctgtgcccaaaacatttcctacattggccagcaaytacagtcaaggacagggagctatgcgccattggagaagaatcttcccaagctgaggacatgaccaggcccgtggtccaacccttcaacaggctgagcaatgccacagtccccaaatcttgaggaaggcctcactcttgaagaggaagcaaagaaatgagttatgggctctgaggccatgttgcctaggtttgaatcctagctatatgctttgacaagttattaagatctttctgtttcagttttctcacctgcagaagggggataacaataaaatctacctgaggttcaacagttaatatgtgtaatgtgcttaaaaggctaaagagttaatgtgtataatgtgcttagaagactggcacatggtaagccttctctaagtgttggtc

SEQ ID NO: 762347 - DNA, 601 bp, Homo sapiens
aataatcatcccacccaaataagagttatttctttcccaacagaccttttccaggctcagtaatttcactgttaatagcagagaaaaagcaatcagctaggtaatgggtaccactagcactgaagtcatttaattagcaccagtaaatgagagctgcccaggtgctcagatgtaattagctgtgcccaaaacatttcctacattggccagcaactacagtcaaggacagggagctatgcgccattggagaagaatcttcccaagctgaggacatgaccaggcccrtggtccaacccttcaacaggctgagcaatgccacagtccccaaatcttgaggaaggcctcactcttgaagaggaagcaaagaaatgagttatgggctctgaggccatgttgcctaggtttgaatcctagctatatgctttgacaagttattaagatctttctgtttcagttttctcacctgcagaagggggataacaataaaatctacctgaggttcaacagttaatatgtgtaatgtgcttaaaaggctaaagagttaatgtgtataatgtgcttagaagactggcacatggtaagccttctctaagtgttggtc

SEQ ID NO: 762348 - DNA, 601 bp, Homo sapiens
aataatcatcccacccaaataagagttatttctttcccaacagaccttttccaggctcagtaatttcactgttaatagcagagaaaaagcaatcagctaggtaatgggtaccactagcactgaagtcatttaattagcaccagtaaatgagagctgcccaggtgctcagatgtaattagctgtgcccaaaacatttcctacattggccagcaactacagtcaaggacagggagctatgcgccattggagaagaatcttcccaagctgaggacatgaccaggcccgtggtccaacccttcaacaggctgagcaatgccacagtccccaaatcttgaggaaggcctcactcttgaagaggaagcaaagaaatgagttatgggctctgaggccatgttgcctaggtttgaatcctagctatatgctttgacaagttattaagatctttytgtttcagttttctcacctgcagaagggggataacaataaaatctacctgaggttcaacagttaatatgtgtaatgtgcttaaaaggctaaagagttaatgtgtataatgtgcttagaagactggcacatggtaagccttctctaagtgttggtc

SEQ ID NO: 762349 - DNA, 555 bp, Homo sapiens
gcatttgtactgcaattgtttaggcactcttttaatcaagccataattggtgctggaaattaacacatgggcacctctctaaaaatcttacaggctctaattgtgctcacagtctcaaaagtaccacgtggtactgaaacaaaacttcagaattaaaactttgctccctcaattagggttttctgttgctacataactatgatttcattaaggaggtcctgtgttaagatacaaatgccatgaaatctgasgtcagcctccccatgaattgttcaaatccctatcttcaaacatcttatcaagcaagcatatagcttctgctggtgttcctccaaggactgtgaacttactacttacaatgggggtcctctaatggactgaaatctgcctcctggtaagttctatctaagatctaagatctatctacaggagctacatattctaagtgtaacttttcttccccttgacaggctgtcagatattaagaatcagacttcttcctgaatagtgacttcaaggatgggtactatactgaaaatggaatgtctcagattg

SEQ ID NO: 762350 - DNA, 525 bp, Homo sapiens
atgttttcatatctttcatatgtgacgtttagaatcatgaaaatgaagtctggagttttgaagatacttaaggcgatacaattttatatagggtagtcaagacaggactttagacaggtgttctaaactaaatgatagtttcgtgaacatattatggacaaattcaataatattcctcaagactcatcttccaatctccagacttcattttccaactgcctcttatgcttcyacttggatgtctgataaacatctcaaacataacatgtgcaaaaccgaatccttgatatctctgccaaaccagccccacacacacaaccttccccatttcagttgatggcaactccatccttctacttgatcaggcccaaagctttgatgtcatccttgactcttcccttcctctcctactctacatccaatctgtcctgaaacctcccttttggctcacccttcaaaagcacatccagaacctgaccacttctcactgcctgcactaaagctggtctcagccaaccttgattc

SEQ ID NO: 762351 - DNA, 459 bp, Homo sapiens
gggctccagaggccaacaccagagtttggagagctaacacttccttaattgcacctacacagtttgttggatccaagcttgcatttggaatccgctcccataattacaatggacagtgctgaatacacacaggggctggcagttgcggtgtccttatcgggcttctcccagcgtgtgtgacgcgtyttcctctcacctgccatccactcgatctgtgggactggaatgataaacatggggcttgaatagcccagccttgaaccggtactggtcacaggtgtgcatgtctgcattggtagaggtagcacccgatttgaaatgtattcatattttcacaattagtaggggtgggaggggaaattagtgtgtaaacccataccagttctaccatgagtgtatcactggttttatgaaacatgaaaccatgctattgtagaatgtgtgcttgcaggattcttg

SEQ ID NO: 762352 - DNA, 527 bp, Homo sapiens
ccctgattatgtagatagtactaaaagactgaggtctggaagttctgcaacaatcctttattgggctaaaaaataacctttggctagctctaccctggctagtgctctaaaatgtaactaaaaataattcaaaaacagcaaacagaagaatcacgccmggatgacatccccaccctacccctcaggtcatcaagccttttagtcaggaaggaggaacctactgcaaggcttcctgtgcctcatcccagtgggcgcagcagaaccaagaaactccacttccactgctggagcagaaaggggtgattgcctccttctcatggcactttgccacgtttcaggagatggaactgggaggcaacacaaaagctgtgggcctggaaaacatgcttctgatggttgtacagtctccctgcacccgctcagcccaggagtgagcctcttcagagctggtcacacttgttggggtcattggagggagtcattgaggactctacacatgagtctctgcacatggggatccctgcctg

SEQ ID NO: 762353 - DNA, 618 bp, Homo sapiens
aaattcatcactgcttatatgaattatatgttttttcaatgaaaagaagaaagctctgttcactcatggagacttttattcaagcgtcaagctgtattttaattttctagtagcaagtattgcagtcagccacactcttaaacaatgacctcaaattcctctttgccttcattgcagtgacaatgttgytacagctgactaatgtttttttctcagttggcatggctaaccaatattttctgagttaaatacatctctccaggtttccccaggtaggttctgggaaggaaactcttacccctgatttggaagaaaggtccctgggttcattttaaaataataaatatacaagtgtatattaattaaagaaaataaacaaatgacatcatctgtgggtttagaactcttctgttcagctgttggatccaaataggtttttatgatcctggatttacattcagattggtatagtgcctgtgactatggtagactttaacagagagaaaggagttacattataatctgtatgcaataattcctttcccataggtggcaagaacatgcttttcttcctgaatttccttcacttgggtgtgaacgtaaaaataatcagttgga

SEQ ID NO: 762354 - DNA, 601 bp, Homo sapiens
gaaccgagactgtccaattgtgttcgcattggtgcattaatcatgcagctcctgagtgaagggctcgcactgtcatgactttcattacctccagaccaggcactggcaaccactccacagatcattgttccaagcaagccattgttccagctttttcctctgggcaagccttggatggagtaaggtcttctccagcctaggaggctacactgtgcagtttcagggaaagacaaaaggctggattcagtctgaactcagcccgcacatgaagcagctgctcaactagctggagctccaggccagctcttgggctcccaggtcacaggccaagcccagccagacaatagaggtgagatgatgccaccctccagtgggcaggcaacacccaggaggtggggcmtttagtcactcacttcattgttacagtcataaggaaggaaagcatttagttattttctttagggcaaaaattgtcaaaggaagaaaagagctgagtgctcttagcagccctcccactgcttctactagcaagccccttctgtctacctggccaccacctggtagtgtttatttgtataataaaggctgaaacagattatac

SEQ ID NO: 762355 - DNA, 622 bp, Homo sapiens
atcatagtcacattgcttaacactggtgaaaaagataaagtcttataaacagaagaggaacaaaggtaagaatatagctgacttcttgataataaatatatcttgaaaataatacattccagaatacaatgaaacaacaatttttaagtactagaggagggaaaataagctgtcatcctatagttttatacccagcaaaaatatcttaaaaaacaaaagtgaaataaagactttttcaggcatagaaaactgaaagaatttactagctgtagacctgcacttcaggaaatgttaaagtccttctggaacaaagacaattataacagacagaaatctggtcaatacaaagaaatgcagagcaccagaarcagttaatatgtgggtaaatataaaagtggtttttaaaaaatctctttaagagatcattgacagtttaaagaaaaaataataacaatgtatgatggggcctataacatatatgtagaagttataaatgataaaacatgaacctatgataaaagccaaggcagtgactactcatgtgggaagccaggtggtttgagctggtgatagggcagattcaggaattcctggaatggctgacaaggttctatttcatgtg

SEQ ID NO: 762356 - DNA, 606 bp, Homo sapiens
tgtagaagaaaatacagaaaggatatgaaataatagtagttattacatgggtattgagattaaggatgaggactgcttttctattttttccaaaatgcctatataaatattatttacttctctaatgaggaaaaataagtaaaaacaaatattctcaatggaaatactttcattgtatatgtttccttggaaacaaaatttatacctttgcacttacttcactaccttggcttctttgcttccatttttacatcwgtcctgtccatccctatctgcattgctctgtggtatgtactagcaaccagaattaaggaactggcaggcatttttaaaatttcatatacagtctaggcacagtacctcatgcctctaattccagcactttagggagccaaggtgggaggatcacttgaagccagaattttgagaccagcctggacaacaaagtgagaccctacctctacaaaaaataaaattattggctgggcgcagtggctcacgtctgtaatcctagcactctgggaggtgtatcacttgaagtcaggagttcgacaccagcctggccaacatggtaaaaccctgtctccactataaaataacaacaac

SEQ ID NO: 762357 - DNA, 628 bp, Homo sapiens
aggggaaaaagaaaacaaacaaactttttatcagagggatgtgagccccctttaattatcaggcccaatgaggcactgaaatgtggcaccatatgacagcagttacatttcaccacccccttgagctaaatacttagctctcgaagccacttgctacatgggctctagactcactgatgccaagtagccataaaatgccatacactggacaccataactcataccctatagttcaacagttatagccaatcactaatcaatgttatttctataaaccagtgagaatccctgtcaagcaactttattttgctgttttttgttctgttttgttttgttgttttttgagtaagagtcttgttctgtcacccaggctggagatctcagctcactacaacctttgcctcccaggatctagtgattctcctgcctcagcctccygagtagcttgattaccagtgcacactaccatgcctgcccggctaattttgcatttttagtagagacagagttttgccatgtcggtcagactggtctcaaacttctgacctcaagtgatctgcccgcctggcctcccaaagtgctgggattacaggcatgagccgcactagcccttgtcaagcaactttgt

SEQ ID NO: 762358 - DNA, 501 bp, Homo sapiens
cctaccaacaggctaactgttgggatcctcatttgaacacacaccctgactcagaggctgataggcatgtagcacttgctgggtcttcattcgagcttatctgacttaatctcatgaaattccttgcatgggcacacacatgcacacgtcctcayacaaaagccctgttcacagttgcactcacagccaaggccacagtcacacatactcatagccaataatatatgccccaactcaatctgctagcaagtgagtttgggggtgcaggggcagcaggtgagcaggatatagagctctgttatgtgggaaatttcatggtcctgaacaaacgggggtctgtttttagaccccactccaaaagaagagtgaagcttccagccagaaggggctttgctgtgatgtgtgtgcccatcactgcagaatggcaggtgctcactgcagagaactgacaaaggctccgtgtggagcaagggctgagctccgtcaagcaaccaagcttgt

SEQ ID NO: 762359 - DNA, 501 bp, Homo sapiens
cctaccaacaggctaactgttgggatcctcatttgaacacacaccctgactcagaggctgataggcatgtagcacttgctgggtcttcattcgagcttatctgacttaatctcatgaaattccttgcatgggcacacacatgcacacgtcctcatacaaaagccctgytcacagttgcactcacagccaaggccacagtcacacatactcatagccaataatatatgccccaactcaatctgctagcaagtgagtttgggggtgcaggggcagcaggtgagcaggatatagagctctgttatgtgggaaatttcatggtcctgaacaaacgggggtctgtttttagaccccactccaaaagaagagtgaagcttccagccagaaggggctttgctgtgatgtgtgtgcccatcactgcagaatggcaggtgctcactgcagagaactgacaaaggctccgtgtggagcaagggctgagctccgtcaagcaaccaagcttgt

SEQ ID NO: 762360 - DNA, 705 bp, Homo sapiens
aatggacccccatcttggccaaggggatcccccaaaaacctgaaaaactagtacaggccatgacaggaagaggaagtccaacatgtctccttataaccacttcctttggagtttaggcacagctgaccaatgtctatattaaaacagagatcataagactgacgaaacagactatttgtagcaataagataccaaattccaacctagctctagtatagcatcacatgacggatagcaggccctgaaagaaatctaagtattttagcccaaaatatatctctgtgacatatcctgaaatgaccctgcaaagatggtcttttgctggggragtgtgcattctgtagataatctccttcccttaagtgggtcttttccagggagtctaataccctttaagtttccataagagacatttaccatctactgcttacttagaggctttgtctatataacaagaacatagcaagaaccttggcttccagtccccttatctcaatgcacatctctctttctgctgactcaattctttaggaaaagatcaactctttcaaccaattgccaatcaggaaatctttaaatccacctatgacctgtaaccccccagcttagagatgtcctacctttctgggctgaatcaatgtataccttgaaagtatcaatttatgtcttttttttattattatactttaagttttagggtacatg

SEQ ID NO: 762361 - DNA, 598 bp, Homo sapiens
attgttttcatgatagcaatggacagccctggctggcatttgctttttacccttgcccttcttcctttgtcttacccaaacagagttgggtttcttagacaagaagcagccatcttgtgaccatgaggctgaagaccataccctaagggggcagagcaagaagaaggattctggcactgtggagctgtggcagggccctggactgtctactgcctgagaaaaacaaacccttctttggttaaggcactggaactaattttctgtcgcctgcagcaaaacatgatcctaactgattgaagagccgaagctgtggaaactgatctgggttagagatagagatttgggtcagcctctagackgtaacagtgctagggtagatacaagaaaaccagacatccacctatgcacagatagaaattatgagttaaagaaaagagagggcttggcttataggcaatgcggaaaggaaggaattcctgttcacagggcaagcatctttagggtactttaaaaattgttgatgtttccataacctcattcaaaacaaaacaatcaaattagagctattcaattaatactcaacttcatcaaatttatt

SEQ ID NO: 762362 - DNA, 666 bp, Homo sapiens
ccagaggctcaacatcattagccattaggaaaatgcaaatcaaaatcacagaaatatcacttcacatccactagaatggctataatcaaaaaagataaataataacaagtgtagggtgtggagaactggaaccctcatacattgctgttgagactgtaaaatgatgaagctgctttggaaaacagcttggcagtttcttaaaaggttaaatattgagcaattccactcctaggtatatacccaggagaggcgaaaacatacatacacaaatgcaaacaaaatttggtcattaatatctatagcagcattattcataatagtcaaagagtggaaataatctaaatgttcatcaattgatgagtgcataaataaaatgcagtatattcttacagtagaatatttggcaattaaaagaaatgaagtactgatatatgctacaatgtgggtaaaccttgaamacattatgctaagtaaaaaaacccagttaccaatgaacatatatagcttaaggtaaattcatagagaccaaaagaatagtggttgcttagggatgaggaggctagggaaaagagtcagacattactgatggtgggcatgggatttcttttgggattgatgaaaatgttttcagattgtggtgatgattgcacaattctgtgaatatgc

SEQ ID NO: 762363 - DNA, 635 bp, Homo sapiens
tgaagcctctgtacaagtatgaagtggaagtctccatacttccactacagattattgcccagaccatcgtcatttggccaggtgaatgcaaaaataaaataaaattactcagtaattaataaatatcctcaaatagctttctgtgtcagtttggattaggttcagctgcctataagaataaaaaataaatgtaacttaaataaaatatatatatttttttctatcacaaaaagaaatttgaaggtaggcagtacaaacttgatatggtggattcatattgtcataggaatgtagttttttttaactttttaaaaaattattctctgcctatggctttcattctcatggaaactatggaccaaaatgaatgtcagagccccagttaccatgtctacatttcaggaaattagaaagaataataataggagactatcasttccttttaaagatatttccaagaagcccccctcacaacacatccactacaaataattggcaagaacatggttatgtagccactcatagctgcaagagaggcagaaaaatataatatttagctagctgggatgtgtctcagtaaaaattgttttctattgctgagcatgagaaaagatggatcattctggggaatagat

SEQ ID NO: 762364 - DNA, 631 bp, Homo sapiens
atagattaagaatattattcaatattaattttctaattttgataattgtttcaggtttaagatgttaatattttgggaagttggattaaaggtataaagaaactttgcactatttttggcaacatttttgtaaacctgaaattatttcaaaattagaactttttttaaacaagagaaatttctagaatgggagaagaatctctgctctttgaaagactctgttaagaaattaaaaagacagacctccaatcaggagggaatatttscaatacatacatctgacaaagacttacattaagaatatagaaagaattcttatgattcagtcagaagaagacctatataccaactaaaaatggaaggaaggaagcaggaaatgaagaagagaggggagagggaggaagaaaattatacggttatagcaattagaatagggtaatattggcacaagaaaaaaattatgcaaattgagtataacagagaggccagaaatcattccacatatatacataaacttgacaatgacagaaattgcattgaaaaggagagaaaagattagtagaacaacagactattatgtagtcaagaagtttacttctatccccacatcacaccataagtaagttccagg

SEQ ID NO: 762365 - DNA, 631 bp, Homo sapiens
atagattaagaatattattcaatattaattttctaattttgataattgtttcaggtttaagatgttaatattttgggaagttggattaaaggtataaagaaactttgcactatttttggcaacatttttgtaaacctgaaattatttcaaaattagaactttttttaaacaagagaaatttctagaatgggagaagaatctctgctctttgaaagactctgttaagaaattaaaaagacagacctccaatcaggagggaatatttgcaatacatayatctgacaaagacttacattaagaatatagaaagaattcttatgattcagtcagaagaagacctatataccaactaaaaatggaaggaaggaagcaggaaatgaagaagagaggggagagggaggaagaaaattatacggttatagcaattagaatagggtaatattggcacaagaaaaaaattatgcaaattgagtataacagagaggccagaaatcattccacatatatacataaacttgacaatgacagaaattgcattgaaaaggagagaaaagattagtagaacaacagactattatgtagtcaagaagtttacttctatccccacatcacaccataagtaagttccagg

SEQ ID NO: 762366 - DNA, 631 bp, Homo sapiens
atagattaagaatattattcaatattaattttctaattttgataattgtttcaggtttaagatgttaatattttgggaagttggattaaaggtataaagaaactttgcactatttttggcaacatttttgtaaacctgaaattatttcaaaattagaactttttttaaacaagagaaatttctagaatgggagaagaatctctgctctttgaaagactctgttaagaaattaaaaagacagacctccaatcaggagggaatatttgcaatacatacatctgacaaagacttacattaagaatatagaaagaattcttatgattcagtcagaagaagacctatataccaactaaaaatggaaggaaggaagcaggaaatgaagaagagaggggagagggaggaagaaaattatacrgttatagcaattagaatagggtaatattggcacaagaaaaaaattatgcaaattgagtataacagagaggccagaaatcattccacatatatacataaacttgacaatgacagaaattgcattgaaaaggagagaaaagattagtagaacaacagactattatgtagtcaagaagtttacttctatccccacatcacaccataagtaagttccagg

SEQ ID NO: 762367 - DNA, 649 bp, Homo sapiens
gaagtaatggcaaatgttagagtttttaaatatttatagccaatttgtattcttaagagtatttcatctatttatattactgatctgcatgaagtaaacagatgcttccagtagcacatacttctacaactagttgtttcttgaccaacacattttagtaaaatgacagttttagtgcttgttttaatgatgatattgcaaaataattatagtaaccattatttatgtgtttatgagtgtgtgcatttgtgtatcatgaatgaactagagcaaagaagcccataatattgtccactaaagtggtccataggccaaactagccaaaatggaattgtaaattccattttaatatttgataaaccaataccctatatctatattatatacacaaatgtttataagtataaatctgcaagatttatctaataaattagagttgcgatcctaattttttcagctaaatgtaattttccaagcaatggttaaacctaacttaacaaaatatctacaccraaatatgacccttttctggtgatagtaaccttcattatcatcatttattctagaccttcaaggaatgtgttgaccattaagtcccaatatttttatactctattgtgatcctctgaaaatggatcattctgagtga

SEQ ID NO: 762368 - DNA, 633 bp, Homo sapiens
atacttaagttagtgaaattacaccactaaattcgaggttcaatttgccccaaataatcatatttaactaatgaaagtttccaaaacctttttttgatagatacactggcctttaaatttattttctagacatttagctgaagaacatttagctaattcagaaatgctttacacttaatttcaatgaactatggagttacaagaacaaacatttccacatactcccacattttaggattagattaagtcccataagtgaagtggccacacagaacagaagcagaaacagcacatcacagcataccatggtatttcttagttctcagagtccctgaaaggcatgtttagtaggttgggacatgtctttgcaaggtaatrgacagctcattttttttcaatacaactgccctttacactcaaagcttgcataatcatgccagaagaatatattacaataatttatgcacatccatttattagcagttttataggcaagaactttcttcgttcttgtgcaggtagaggtagtagtcagtaccaattgtacttgaacaaaagcactatcttcatatttctagctttccaggaagcccatttcttcatggatcccatgaagacgtgtgcaccagcatg

SEQ ID NO: 762369 - DNA, 633 bp, Homo sapiens
attacaataatttatgcacatccatttattagcagttttataggcaagaactttcttcgttcttgtgcaggtagaggtagtagtcagtaccaattgtacttgaacaaaagcactatcttcatatttctagctttccaggaagcccatttcttcatggatcccatgaagacgtgtgcaccagcatgctacaatggcattactttaaatggygtaataaagtatgtgattccagttttgatatttgaccattgacagttttcaggctgcactccttcacttttcccccagcctcacatctgggcaggctggtaagaaagccagtgtgctccctcgcttggcacaaggagggaagttcaaataatgcaaaaattggcacacatgtgggaactctctccccaacactactccctaagcacaataaaaaaccaaaggcttttgctccttccttcactcaagccaaacaaactgacttggatgcctgccctgctctctccagaaagcctcatgatgtaatgaatattttcacaccttcctggtgcttttgtggcattgtccgtcttgacatctgaaccaattttgggagggggtgattgattccacttctctgctaagcaaccacctgacaactggccc

SEQ ID NO: 762370 - DNA, 624 bp, Homo sapiens
agtttttggttttctgtacacaaatctccctgtaataatttttttctttatacctattccttttatttcatttcttatcttatagaattggccatgacctctagtacaatattgaacataaatggtcttgaaagatacccttgtctcattttcaatctcagcttttaattttattatgtctaatgagtgctatagaactgttatcattatcctttatcaattagaaaagkcatcttttcttttgttatgagttttcaacatcaatgggtattgaattttgtcaaatattaaatattttgtgcctctgtagaggtgatcatttgcttttctcctttattatattaatgtgatgaattacattgatcattttttaaaatagactttattttaggaagaagtttcaggttcaaagcaaatttggacagaaaatagagtaacttcccagatactccctgccttgacacttggacagcctttcacacgatcagcatctcacaccaaagtggtacatttgttacaattgattaatctacattaacacattattatcacccaaagtccatggttgacatcagggttcactcttagtggtgtatattctatgggttttcatagatatgaaat

SEQ ID NO: 762371 - DNA, 472 bp, Homo sapiens
acacatgagattcttacctagcctgaggaagatttccaatttttattttgtggctccaataatcataggtattaagtatgactgcctctcctaggctaacctgcaaaagccagaggctgggtttctgtggcaccgtgctcactgaagcagtattttcctagtcatagcagccacctcccatctgccacctcgtctctctgcctggaatatccagaaacactttggtgtattattcccacatttaaatggacaaagtttgctcatagaaagtactaatttygatgagcatttctttttaatttaattgctctgatgaaaaccctcataatcatgtaattcttaaagattagtgtaaggttattgccctgaaaatatgtctagtttggcacacagggtaaatacgtgattattgctaacccttggttttacgcaagaaaattatcattatccatcaaagcaaaaatgtttagta

SEQ ID NO: 762372 - DNA, 619 bp, Homo sapiens
ataaatggaaagacatttaatgttcatggattagaagacaatattgttaagatggcaatactccctaaagtgagctaaagattcaattcaatccccataaaaatcacagcgggctcttttaaaaaaatacataagctgatcgtaaaattcatatgaatatgcaagggaaccagaataaccaaaatgttcttgaaaaattacaaagttgaaggactcacacttcctgatttcaaaacttagaacaaagctacaataatcaagacagtatcttattgaagtaaggatataaatatagatctatggaayacaattgcaagtccagaagtgaacacatacttttatggccaattgatatatgaaaatgatgccaaaacatatcaatggagaaaaatcattttttcaacaaatggtgctcaatagccacatgcaaaattatggtgctggaccccttccttatagcatacacaaaaattaactaaaaatggattatagacctaaatgtcagagctaaaaccatgaaactcttaggagaaacctaggagtagtctctatgcccttcagtttaggcaaagccttcttaaatatgacacaaaaagtacaaacaaaaaaagaaaaaaga

SEQ ID NO: 762373 - DNA, 619 bp, Homo sapiens
ataaatggaaagacatttaatgttcatggattagaagacaatattgttaagatggcaatactccctaaagtgagctaaagattcaattcaatccccataaaaatcacagcgggctcttttaaaaaaatacataagctgatcgtaaaattcatatgaatatgcaagggaaccagaataaccaaaatgttcttgaaaaattacaaagttgaaggactcacacttcctgatttcaaaacttagaacaaagctacaataatcaagacagtatcttattgaagtaaggatataaatatagatctatggaacacaattgcaagtccagaagtgaacacatacttttatggccaattgatatatgaaaatgatgccaaaacatatcaatggagaaaaatcattttttcaacaaatggtgctcaatagccacatgcaaaaytatggtgctggaccccttccttatagcatacacaaaaattaactaaaaatggattatagacctaaatgtcagagctaaaaccatgaaactcttaggagaaacctaggagtagtctctatgcccttcagtttaggcaaagccttcttaaatatgacacaaaaagtacaaacaaaaaaagaaaaaaga

SEQ ID NO: 762374 - DNA, 671 bp, Homo sapiens
tctgtgtgtagctctcaaaggaatgggcattcgccagatatttgattttactctattttaaacagcaagcaatcaaggctttactttattgaaggaattcacagtgacatttaacaccaaagattatgtttaactccaaaagtatagaaaagtatgcttctctgtagtctgccaaaatatttccacaagtggaaaggaaggtagagaggaagggaataagacagacagaagggagacaacaggaaaggcagaaaagagggataaagagagcggggaggagtatagcattggtctattaatatttcagacccagtaatgaaacttactaagctaaaaaaaggacatcaaatgaaagcaatgacccagtatccctgagttgacagaayagacagactcattgacccacacacagagagctttggccagtaaatcaaatatttagaggaaattatctgtcgtcacttgttcttgcttactcactgtactcctggaggggaaatacaattgtcttgcatatctctaatgcaacttgtctgtgggagaatgttaagtgtgattaggtctcaggtggaggaacctgaattaatgacattttggggcaataatgatgggtagtttccctttatcttgcttacatgaatgtgattattctggaacaactggtgggagtc

SEQ ID NO: 762375 - DNA, 614 bp, Homo sapiens
ttaacaaagcagaaattgtacatctcttcacaatataacataacccaagattatttataaacattttaaaatgcccaagtgtgtggaagtatgtgaactctccaaaataatcattggcttgagaaagaaataaaaaatgaaagactacatagaaaatgacaaacaggaaatgctgtgtatcaaaacctgtgagatgtgatgaaactcaactccctggtaaaatctttaagatttaaaagaagagaaccaaaataattgggaaagcaggagagcagaagctgaggcaggaaggtctgtcctccgtctgaaccttttctttcaccaccttcccctgcatccttccctctacttctccctccccgctacactcctgcttcagcctaagcagccctcccrcatctcctgcatgtctttagatgaatgcaaattcacaaaggacctccttttgtgacttcttaggcattgagatgattccactatgagcttgggattgggtgggggagagccaggacttgtggaatgcatgaggcacttgcttccctcaagtggacctgctgctcagagtctcatggctgcaattcacagactacacacctaaatgtcagaaaaagaat

SEQ ID NO: 762376 - DNA, 604 bp, Homo sapiens
tccccttacacactccagtatgtatctctgccatcaaactgtccacgtgtgagctgaacctgctatttgttcattaacttactgttttataccatttgagcaggaagttgtagtcattctctggctttgtagtttgctttattgctcataagtaataactggaaaaaggagttttaaaacactcattattttcaaacattttgactaatatttattctgaaatgtcagggtaatttggtaaaatatcaaaatgctaaaactgaagacttatttttttctttaccagaaagtaataattacatatatttataactgcagagtccaatacaatgaattaatatttcttycaaatgttcttacttaacatctttctagctttagcaaagcagtatcttactttcacattaaaaaaaagaaacccttcataatagtgtaaggcagtttgtggaaaacttattaccgtcattttacactttactaaattcaggctaaaccatcatcaaattaaccagaattaagattagggctcaagtcttctgacttctggtctaagttgttgggtgttttgggttttttttccccctgcataaggccatcttccaca

SEQ ID NO: 762377 - DNA, 587 bp, Homo sapiens
gatacatgcataaaattctcaccgtcactctgaaaagcacattgaacaattttcaataatgtagacgttttttaaaaggaagatttcatttgggctgaacagatatccaagttttaacatatgaattattgaatgtatttcaagggctttcagcgattctggtttcagtcctggaatgattaggcccgtctggaatgatgcacacaggctaataagcatatggcgttggcattttgaggcatagcttgttcaactatgcccacgttggagcttattgtygggaagcaaggcacttactgtaatggtaatgcagatgttttatgcatagtttgagtaacataaaataagttaatatttttgattaaaatgagttttttataatttatatgtcttttatagaagcaactaaatgatatatttgggataattaaaaataagaagaggtttgggagagagtcattttcatccctgcttcggctcttaggatgagggttgatgaaaacaccggaaagaacatccattggatctgaaaagcaacaagctcttaaaactgctgcaccagcggcactttgacagtctttacttct

SEQ ID NO: 762378 - DNA, 587 bp, Homo sapiens
gatacatgcataaaattctcaccgtcactctgaaaagcacattgaacaattttcaataatgtagacgttttttaaaaggaagatttcatttgggctgaacagatatccaagttttaacatatgaattattgaatgtatttcaagggctttcagcgattctggtttcagtcctggaatgattaggcccgtctggaatgatgcacacaggctaataagcatatggcgttggcattttgaggcatagcttgttcaactatgcccacgttggagcttattgtcgggaagcaaggcacttactgtaatggtaatgcaratgttttatgcatagtttgagtaacataaaataagttaatatttttgattaaaatgagttttttataatttatatgtcttttatagaagcaactaaatgatatatttgggataattaaaaataagaagaggtttgggagagagtcattttcatccctgcttcggctcttaggatgagggttgatgaaaacaccggaaagaacatccattggatctgaaaagcaacaagctcttaaaactgctgcaccagcggcactttgacagtctttacttct

SEQ ID NO: 762379 - DNA, 617 bp, Homo sapiens
aaaggtgactgcaagagcctggtgactagcctgtagcctgatgcttgtgtgacccaaagaccaacattgcatgtgcaatgttgactcagctcataaacgtcataacattgctctaatgttgaaagattgctgcagaacacattttctcagagcaccggaattttcctagagcggctgttttactttgctaatttgaggatttttgtttggatgccttagagtaagtgacaagagaagagaggggaaaagtgttattttaatgctgctgaatttaatgacaagtaattggttccacaggtactgtattcattgacctttttccatatggagctctcagaaaattccattgctattgatcccctccgattttaatgctataatgatgttgttcccacacacaagggaaatgattatgtgctgtgactgctayactttgaattgtgtgaataattgtgtacatatttatatacatatctttgttgtcctagtggagttctcaatgcacttgaaatggtttgtgaaacgtcttttctaaatcccctccagatgtgtcaaatagcatactgtaaatcagacttttctttccatttttttctttttcctttggtctgctggta

SEQ ID NO: 762380 - DNA, 532 bp, Homo sapiens
catgcccggccatgaataatgataatctaagaaaaattgtggattgaactattgctgccagtccttccctttctccctgttacggatttatacctccatgatctttgccatgggtctttgcagtacctctcccagggtaagcagagtatacttccctgacccattaaggctggacttggctggaatatcagcaaatatgacacaggaagagactctaaatgtgtattcataatttgacgtggcctctgcggtcttgggatacatcattaaaaacaaaacaaaacaaccatacctcacgtagcctctgatcctgcaatgaagcacagaggaagcagaattgaatctacttgcaacctggtgctaatcctcacctggcccagytgagatcagccaaaccccactgtgaatagaaaacacaaatatttgtatttgtaatttaccaagatttatggggttgtcagttatgtagcattatttccatagtagccaactaatataattggtataagaagttaaaataagcataaagaac

SEQ ID NO: 762381 - DNA, 647 bp, Homo sapiens
aaacaaaacaacaaaaacaaagaatggaattactaaagctgtagtagggaatgaagttctgatgcatgctacaacatacatgaaccttgaaaatatgctggctgggcgtggcggcacacgcctgtaatcccaggactttgggagggcgaggcgggtagatcacgaggtcaggagatcgagaccatcctggctaacacggtgaaaccccgtctctactaacaaaaaaaaaaaaagaaagaaggaaaagaaaataatatgctaagtgaaataagcaagacacaaggatacatattgttatgattccatttatatgaggcatctagaatgaacaaatccatagatagaatgtgattagtgattattaggggctggggagaggaagatggcaaattattgcctaatgggtacaaagtttgtttgggatgatcagaagttctagaaatggakagtggtaatggttgtataacattatgaatatacttaatgctactaaatgtacccttaaaaacagtttaaatggtatattttacgttatatcaaaattaaaaattaaataatgaagaaactttatattactgatttaaggcaatctccaaaataaactgctaaatgcaaaaggtatgatatagaacaagaggggaaaggaa

SEQ ID NO: 762382 - DNA, 636 bp, Homo sapiens
tctcaaaagaagacatttatcagacacacagaccaatgaaatagatttgagaactcagtaataaattaatacatctatagggaactaatttttagcaaagttgccaagaacatacactggggaaaggaccctctcttcaataaatggtgctatgaaaactggatatctgtatacatagggataaaactagacccctttctattgctttatacaaaaatcagataaaaatggattgtagacataaatctaagacctcgaactatgaaactactaagagaaaacattgaggaaactctccagatatgggtcttggcaaaaaattcttgagtaataccccaaagcacaggcaacaaaagcaaaaatggacagatgggatgggatcacrtcgagttaaaatgcttctgcatagaaaaagaaacaatgaaaaagtgaagagacgacccacagaatgggagaaaatatttgcaaacaacccatctgaagacagtttaatactcagaatatatgaggagccagaacaactcaatagagaaaaatctactaatttagttaaaaacgggcaaaagatttgagtaggtatttcttaaaagaagacaaacatatggcatacagatgtatgaaaagacgctcaatgtc

SEQ ID NO: 762383 - DNA, 622 bp, Homo sapiens
aaaattgataaattttatctaaacaaagattatattcatcggtgaaaagctgaaagcttttcttttaaggtcaggaacaaaataaagatgcctactctggcaccatctatccaacatagtaatagaatgcctggccagagcaattaggcaagagaaaggaataaaagccatgcaaatcagaagggaagaagtaaaattatctctatttggtaatggcatatcttatatattaaaaactgttattttataaaaaagtaaaaactgacaaattcagtagtttcatgctacaaaattaccacacaaaaaatcagtagcatccctatatactaacaacaaactatccaagaaaacaaattaagaaaaaaaatcccatttacaattgcatcaaaataaagaaatataatacataaataaaattttaggaagtaaatttaaccaaagaaktgggagatctgtgcactgaaaactgtaaatcattgatgaaaaattgaagaggacaccaataaatgaaaaactattccatgttcctagattggaagaattaatatagttaaaatgtccatactacccgaagtgatgtatatatttaattcaatttctatcaaaacttcatgttattttc

SEQ ID NO: 762384 - DNA, 543 bp, Homo sapiens
taatacagcagcagaaaaccacatgttctcacttataaatgggagctaaaaattgagtgcacatgacacgaagaaaggaacaatagaccccagagcctacttaaggatggagggtgggaagaggatgaggattgaaaaactacctgccgagtactgtgcttactacctgggtgatgaaataatctgtacaccaaactcccacaacaggcaatttacccatgtaacaaacctgcacatgtacccactgagcctaaaataaaagttggaaagaaaaaaaaatgaccttacaatggcctctaagtattcaactgaaaggaaragttgcacagctctcaatttaaatcaaaagctagaaataaaataagcttagtgagtaaggcatgccaaaaagctgagacaggctgaaagctaagcctcttatactagacttgtgagtacaagttagccaagttgtgagtacaaaggaaacgttcttaaaggaaattaaaagtgctacttcggtgaacacaggaatgatgaagtgaaacagccttattgctgata

SEQ ID NO: 762385 - DNA, 571 bp, Homo sapiens
aagcacattcaatttatttatttgtaagtttaaataaataaatatttaaagcttactaggatgtgtgataggggtttctatgggccgtatggatgttttatgtgtagcttagctaaggacaaaggtcagagggtttgaacagaaagtaaacttttacttacatttctctaataaacagattgtaagtttttagtatactgatcttcattctcctctctaacgcattacctcctctgcacaatagtagttagcgactagtttctgaactggaaaacaggaatacggtctcttttaatttgttatatcagtttaagattgcctyaccaccaccacatgtttaataaagatcccagtgctgtgtctacaataaatggatcttcggaatctgtccttcaatgtcaggtatcaatatgcatgtgcaattattgttccagctccaacaaaaaggacacccaaggtcagcatttctcgtttatatggggatagatttagctgaaaatgaatttagaagtagaggcttcatcttattcatgtggtagaaaaataatatatttcatttttctaaagtgaa

SEQ ID NO: 762386 - DNA, 635 bp, Homo sapiens
acctagataatactgatattacaaaggaaatgaacattagctagcctgtataatgtaaaggctaaaactgtagtgaacactgactctatatcatggtcaactttaaatattatgtaacaacagacactcacacatacatttccaagatccatctgatacttgaaaatgatgctgccagaaacgctctttccctttagtcattggccttcactcatagcctggcctatgcttgccttgaatgrcaagtatgaagtgagggaaaaaggtatttctgccatacagagaaacttggggctggtaggagattaagggatgggaaccctgagctccaggcttggctcactcatgtactaaaggtgtgatcttgtgcaaatcatttaatctattgagtctcagtttcctccttcatttatttattcattcaaccaacatttattatacatagagactcaagtatggtgtctcccttatgcaagaaccatgcagtaggtgagctggaagtaagcaaagtggaaatgctgacatgttcagtgcatgttatggggcatgcagatccaggtgagagccatgagagtggagccttttctctctcactcagtgccatagtttcacccctgacgcagtgcccagtacat

SEQ ID NO: 762387 - DNA, 635 bp, Homo sapiens
acctagataatactgatattacaaaggaaatgaacattagctagcctgtataatgtaaaggctaaaactgtagtgaacactgactctatatcatggtcaactttaaatattatgtaacaacagacactcacacatacatttccaagatccatctgatacttgaaaatgatgctgccagaaacgctctttccctttagtcattggccttcactcatagcctggcctatgcttgccttgaatgacaagtatgaagtgagggaaaaaggtatttctgccatacagagaaacttggggctggtaggagattaagggatgggaaccctgagctccaggcttggctcactcatgtactaaaggtgtgatcttgtgcaaatcatttaatctattgagtctcagtttcctccttcatttatttattcattcaaccaacatttattatacatagagactcaagtatggtgtctcccttaygcaagaaccatgcagtaggtgagctggaagtaagcaaagtggaaatgctgacatgttcagtgcatgttatggggcatgcagatccaggtgagagccatgagagtggagccttttctctctcactcagtgccatagtttcacccctgacgcagtgcccagtacat

SEQ ID NO: 762388 - DNA, 545 bp, Homo sapiens
gtatatagagacctttgagacctcctgcactttatgaccttagctggtcctccatgctctattacctgcttgacctggacataccccattgcctcttcagctgcatctgcatctcaggccttgacctgtatgtttgtggttataattcctggtcagacccatccaagctcttagaccaggacaatctgtcagctttgccagtctgcttccgatttcctaaagaagttcaacttggaatgcacacccccttttgcacaggaattgtgggcatcagatcttgctcatacaatatcagtcacaccttcaggagggcagagttaggtttgggaccaagacctatatgactccagagtttctgtgcttttaccttgcatacacacctgcytttggtgtgtacgaattcccaaaaaagttgcacaaagaacagacactgataccctacagaagagatgagaaataaccctttctaactgctttatccacttacggaggagcagatccattagaaagtcatttctcccacttccctgacaatcataataatc

SEQ ID NO: 762389 - DNA, 525 bp, Homo sapiens
gccatgttgtgcaataaagtctccgaacatatttggcaaattagtattcctcgtctgcacttgcagcttatgaagattttgagcacagctttaagacagctctgaagttgggaagaactctggggtgcttttacctcatgggcagccacactgcctccactccaccttggaatcttgcttccttagccatctgaacacaagttctcttggttcagccagagccgggatcaggccaggaggttggctggtgacactgaagatgggaatattttccacaaagctgagaagtgatgaagggcttcwggctcaagaaaatgtatgttcacattaaaaattcaaaactctcctgaatgccacttagagtttttaaatattagatttatttcctcctaatatacagggatgctgggaaacgactggatgacacaggctaggactgaacttcaggatgtagaatgaaagaaaaaaaatcttagcactgctaagttcttattttataaaagaatttaataacctcataaaata

SEQ ID NO: 762390 - DNA, 590 bp, Homo sapiens
attacaattattacatataaatatgtgtaatatgtgtgcatatgaatttgataattgttttaattgtatataatttattaataattttaatcattaccaaaaaaagtatgacaggttcttacccttaagaaggttagcatctgttccaaaaaaagtcctgtcttttttttttgagatggagtttcactcttgttgtccaggctggagtacaatggctcgatctcagctcactgcaacctccacctcccaggttcaagtgattcttctgcctcagcctcccaagtagctgggattacaggcaccygccaccatgctcagctagttttttttgtacttttagtagagatggagtttcactatttgggacaggctggtctcgaacacctgacctcaggtgatccacctgccttggcctcccaaagtgctgggattacaggagtgagccactgtgcccggcctaaaatgcccatttttaattggctacttctcacaagacaaggcaaatgggttgcctgagaaataaagatttgtgtttgagtatttatgacaaaaagtccatttgggagccaggctaattcataagatatgtg

SEQ ID NO: 762391 - DNA, 389 bp, Homo sapiens
gtctagggaagaattcttccttgcctcttccatcctgtggttgctatcagaattccttggcttccttggcttgtgataacataatctaatctctgcctccatcttcacatagccttattctctctgtctgtgtctgccccttttctaaggamacttgtcactggatttaaggaatacctgaatattccagatttatctcatttcaggattcttcactgaattacatctgcaaagatctgtcttccaaataaggtgccatccacagttttgaggattagggcacagatttcttttgggggtattcggggtactgttcaaccactacagtctgccccctagctccccacaattcacatttatctcacatatcttctttcatcttctttcat

SEQ ID NO: 762392 - DNA, 635 bp, Homo sapiens
aagcaatttttgattttttcttttctatttatttatttatttagagacggagtcttactctgtcgcccaggctgcagtgcagtggcgccatctctgctcactgcaagctccgcctcccaggttcacaccattcacctgcctcggcctccygagtagctgggacgacaggcgcccgccaccacacccggctaatttttttgtatttttagtagagatggggtttcactgcgttagccaggatggtctcgatctcctgatctcatgatctgcctgcctcggcctctcaaagtgctgggattacaggcgtgaaccactgcgcctggctgattttgtttttctctattgcttttcaattctctatattatttatctccactttcatttctattatttcttcccctgcttgctttaagtttagtttgctcctcttccattgtcttaaggtggaaggttaggttattgatttgcagcctttcttcttttttaatataggtatttataactataaatttccctctaagcactgctgtatctgtatctcataagttttggtatattattcttcattcattcatctcaaaatatttttaaatttcccttgtgattttaccctttagtaatttaggagtatgact

SEQ ID NO: 762393 - DNA, 659 bp, Homo sapiens
gtagtggaattgctgggtacatggtagttctatttttagttttttgagaaatcttcatactgttttccatagaggctgtactaatctacattcccacctacagtgtataagatttcccatttctcaacatcctcaccaacatttgttatttttgtctttttagtaatagctattctaactgggrtaagaggatatctcattgtggtttcgatttgcatttccctgatgattggtgatgttgagcattttttcacacaactgtaggccacctgtatgtctacttttgagatctgtctattcatgtccttaccccatttttaatgggattatttgggttttcttttctttttcctgttgagttgtttgagtttcttgtatattctggatatgagtcccctgtgaaattagtaggcaaatattctctcttattcaacaggctgtctcttcattctactgattgtttcttttgctgtggagagctttttaatttaatatagtcccacttgtctatttttggttttcttgcctgtgattttgagatcttagccataaaatctttgtctagacctatgtcctgaagagtttttcctatgttattttctagtaggtttatagttttgggtcttatgtttaagcttttaaaccatcttgagttgatt

SEQ ID NO: 762394 - DNA, 659 bp, Homo sapiens
gtagtggaattgctgggtacatggtagttctatttttagttttttgagaaatcttcatactgttttccatagaggctgtactaatctacattcccacctacagtgtataagatttcccatttctcaacatcctcaccaacatttgttatttttgtctttttagtaatagctattctaactgggataagaggatatctcattgtggtttcgatttgcatttccctgatgattggtgatgttgagcattttttcacacaactgtaggccacctgtatgtctacttttgagatctgtctattcatgtccttaccccatttttaatgggattatttgggttttcttttctttttcctgttgagttgtttgagtttcttgtatattctggatatgagtcccctgtgaaattagtakgcaaatattctctcttattcaacaggctgtctcttcattctactgattgtttcttttgctgtggagagctttttaatttaatatagtcccacttgtctatttttggttttcttgcctgtgattttgagatcttagccataaaatctttgtctagacctatgtcctgaagagtttttcctatgttattttctagtaggtttatagttttgggtcttatgtttaagcttttaaaccatcttgagttgatt

SEQ ID NO: 762395 - DNA, 601 bp, Homo sapiens
ttccctcagaatgctggaaactttctccattgtcttctagcacccagcactggtattgagcaatgccattctgattcccagatttttgtatgtcatcttttctctttttctctgaaaatttttggcatctcctttaacccctgtgttgtgaaattttatgatgatatgccttgctgtggaccttttcatttattttcccgggtactcagcagccattttcaatctacaaattcatgcctttgggttatacagaaatttattctattattatgttgattccttttttttcttctgtttctcttctggaatctttcattttcatgctagagctcctggactgatctttcaactttgttaccacttctcttcttgtccatytcttttattctactttttgggaaatttctcatgtttacgagcctcttcactattactcatttttcctttgtacaacttctattaattgatcctctcattttcttaactcttcttccttattgttcattttaaaatctaatttcttggacatgtgttccaagttttacatatttcttattagttttctcaatttctaagaattctttagtaatcatttaacatt

SEQ ID NO: 762396 - DNA, 628 bp, Homo sapiens
cttttttaacattcaattaaaaattagagtacatttcattttgatcatagaaacagtacatacttagagaatttgtgaaatacaaagaaattggaagaagaggagaaaactgaaattcttattatataaataaaattactgattatattttgctatatttcctttcagatggatattaaataatattttaataaatgtaaatgtagtatagttttttataattaggagaacatataaatacataaataagaatacattccaaagtaattactatagatttttagtaatttgtctttcaacattttggtttatagtcctttttcttttatttatgtagttttaatcttatagtctatgaaattttatattctgaattttaggtattataattatygtggaaatttttttaattgctatataatattatattatatggataaagcatcattagcacatctattccctcatacttgatacttcgttttttcttactctttaaaaaatgttataattattatctttgtatatataaagtgtttccatgaatttttgtttgtttgcttttgtttgttttgtttttttttccttaaaataaactgtggaataataaatagtggaatttttaggg

SEQ ID NO: 762397 - DNA, 573 bp, Homo sapiens
tgcccccaccagggtccacattataataggcactcaaaaattatttgttgaatgaacaaatggtgaaatatccccattccctacagcctgctcccaaatatgtccctattacctaatgaaacagaaaatgcactggatggaggtattttcttaagtaaaagatcacccccaggtacttctgggatgggtaatactgcarccacaccagtcacacaattctccagagaaataatttctggaaatgggaagaggaacagacatgggggaaagtgggaggaatgggaagagagaagaggccacagaggtcaggctgcttccttcacatcttttcctggggtggatctggcctcggctggaggcccttcaccctgaactcttaaacgaacaaaaagtgtccttcccaccctttccgtagcttgctttcaaacatgtttctgggaaccccctggagatagcaacagagtctgtggaccacctcccacctccacttattttttgttatgtcacagcattgatctttgtgactaagtggcaacccaaaaagcccaggaacagcatgcctccctcaagagt

SEQ ID NO: 762398 - DNA, 560 bp, Homo sapiens
ctagctcctgaattccattgttttaatttttagctcttgcaaataagtgagggcatatgaagtttgcctttctgtgcctggcttatttcatttaacatactgacttctggttctatccatgttgttgcaaatgacagtatcttatccctttttatggctgaatagtaytccattgtgtataggtaccacattttctttagaggactaggtaatttgaaccaagcctttgactgagggcaaacagaaaagctggatgaaaaaatacacacacacacacacacacacacacacacacacacacacacacacacacatacacacactttaaaatatcagagagctaataaggtagttaagaattatttttctatgatctaggaaaagacagaaatatatagagttgagcctggcaaatagggcttttttccttggaagtgcttaatgatttctgaatagactgttgaaaggcagagcagaattttgagcagcttcagaggctaaaggatgaaaactggagtctaggaccctctaagataacatatttccatgctttgaattgg

SEQ ID NO: 762399 - DNA, 469 bp, Homo sapiens
attctgggttgaaaattcttttctttaagaatgttgaatattggcctccactctcttctggcctgtagggtttatgcagagagatccactgttagtttgatggggttccctttgtgtgtaacccgacctttctctttggctacccttaacattttttcctacatttcaaccttggtgaatctgatgattatgtgtcttggggttgctcttctcaaggagtatctttgtgatgttgtgtatttcctgaatttgaatgttggcctgccttgctaggttgggraagttctcctggataatatcctgaagagtgttttctaacttggttccattctccccatcactttcaggtacaccaatcaaacacagattttgtcttttcacatagccccatatttcttggaggctttgtccgtttcttttcactctttgttctctaatcttgtcttctcgctttatttcattaatttga

SEQ ID NO: 762400 - DNA, 515 bp, Homo sapiens
catgggatgatgatacagcacaaaggtcattgccagatgccagtgccatgctgttggacttcccagcctccagaaccatgagccaaacaaacttctattgcttgtttataaattatgcagtctcaggtactttattatagcaacacaaaatggattaagacatggtgttaaagcataattctcaaactgttaagaaacataattytcatacatatagatgacaagctcatgaaggaaccagtaacaaaataagagctagtttgaaaaaaatttgaggaacagggattacatggctagtggggaaaggaatatagaaataagattgctaaatagatacaaaacaagttaatgctctatagagtaaaaaaaaccacacgcacaaatgcaggcattggagttatcttctctaccaagctgccttctcctccctcaaaaatcaccacaccttatcatttttctacaagttcatctctgacttttcaggatgaagacatgtgtagaccatggtcaaaagc

SEQ ID NO: 762401 - DNA, 451 bp, Homo sapiens
tccccgtgatccccacttgccaggcccacctggtgccagaacacaggatgcactccgcagttgctcagtcctcccctcccgcagggccgggggctgcattctccgagtgggctgggtccgggaaacacccctcccttycccgcgggccatccctggtggagactgcccaggaactttccagcgcctgccgcccccagccctggcatgggcccgccgccgcctgggccctccccccgcattagctcttaagctgtgcaaatagacatcggagggagccctgtttaaagtatttagacgaaatgaaaaaaggctttcatcggcactaatgagccattcaggatgcctccccggtggattctctcccgctcccgcctccctgcccgcgccgccccgctatggcccctcttgggattggaggccccttcctcccaaccccagcctgggactccct

SEQ ID NO: 762402 - DNA, 574 bp, Homo sapiens
gcttttaggggccccgcagcctcccccatccccatttccacatctgcaagccagcaggtagctgacctggtgtctggactgtggtgatggtggtggtgatgatggtggtggtagtggtggtctcctcatcatctcctgaagctgtggaggaggtgatggtcccctggatcccgatccctgcgccctgggacacaacctctgcaacccacggccttcccatgtctccaggaccctcttgggttggtgtccaggctctgctggggggtgtagtgctggctatctcccctgggcctagggtgggcactgccatgctgggccctggaggtaggggagctgtgattcgaagcataggggactctgactccggactccagggtccctccttggactggggctgagtgggtaccgcasccatggctggagtggggctggtaaagacagggcggctgtcctggttggccaggcggggaagggcacttggggtgaagggtgcaggtgggtcaggctgaaaggacagtgctggcctcagctcctcatctcccttttccagcccctcgtgtaggaattcctcaag

SEQ ID NO: 762403 - DNA, 555 bp, Homo sapiens
atacacagatttgaagttgtaaaccaattcatatttggtatggagtagattcttgttcttttattacgaaaataatgtagcaaactatctgcatcctgatctagtgtttaactgagatttgttttttaatcttagttttttttctttttgagacggtgtctcaccctgttgcccaggctggagtgcagtggtggaacctcagctcactgcaacctccacctcctgggttcaagcgattctcctgcccagcctcccragtagctgggattacaggtgcgtgccaccatgtccagctaattttttgtatctttagtagagatggggtttcaccatgtcggccaggctggtctcgaacacctgaccttgtgatccgcctgccttggcctcccaacatgctgggattacaggtgtgagccaccgcgtctggcctatcttactttcagccaagagaaatttttataataaaatattcttactctttagaataaatatattaatctttaactctttaaagatcttattctttaaaataaacacttactatatatagtattg

SEQ ID NO: 762404 - DNA, 555 bp, Homo sapiens
atacacagatttgaagttgtaaaccaattcatatttggtatggagtagattcttgttcttttattacgaaaataatgtagcaaactatctgcatcctgatctagtgtttaactgagatttgttttttaatcttagttttttttctttttgagacggtgtctcaccctgttgcccaggctggagtgcagtggtggaacctcagctcactgcaacctccacctcctgggttcaagcgattctcctgcccagcctcccgagtagctgggattacaggtgcgtgccaccatgtccagctaattttttgtatctttagtagagatggggtttcaccatgtyggccaggctggtctcgaacacctgaccttgtgatccgcctgccttggcctcccaacatgctgggattacaggtgtgagccaccgcgtctggcctatcttactttcagccaagagaaatttttataataaaatattcttactctttagaataaatatattaatctttaactctttaaagatcttattctttaaaataaacacttactatatatagtattg

SEQ ID NO: 762405 - DNA, 584 bp, Homo sapiens
aatattgctgaattctttttctcagcaaggaacagccctgagaaagagaatgtgttcccaaggggaggcctctgaaatggccgctttgggaacgtctgtcttttacagttgtagattagggatggaataagccccggtctcccgtagagctcccaggcttattakgaagaggaaattcccacctaataaattttagtcagaccggttgtctgctctcaaaccctgtctcctgataagttgttatctgtgacaatgtgtgcccaaaacttcactagcaattttaatttcgccctggtcctgtgatcttgccctgcctccatttgccttgtgatattttattaccttgtgaagcatgtgatctctgtgacccacaccctatttgtacactccctccccttttgaaaatcactaataaaaactttctggctttgtggtttgggggcatcatggaacctgcagacatgtgatgtctcccccgaacaaccagctttaaaatttctctcttttgtactctttccttttatttctcagaccagccaacacttagggaaaatagaaaaggatccacgtgaaatattgggggc

SEQ ID NO: 762406 - DNA, 595 bp, Homo sapiens
atctgtaagatttattatttttcctttcacacgtagatctactttccacctggaacagattttggtagattgccttaagtactgggcttttttgtatatgagtacccagttgtcctagaagtatttattgaaagttatttctttttcatattgatctgaaatgtcattactttttggacataaatataattgtcctatgagggtaggtctgcttttgggctctcgattcttttcaaagattccattggtttatttttgccccagtgtcccaatgatagaaccatggccctaatatccctcttagtatcttaccttgttctttctttgtaatatcttagctatcctcggccwtttgcatttcaatataaattatgaatcagcttgtcaattcctactctccgaaaatgttggagttttcactggagtttcatagatcaatttaaaaagaacataaacttctagtctttcaatctataaacaaaaaatattctccatttatttagcttcctttaaattttcttcaataaagttttatattttctgtgtagagttactgtacatttttgtttataccaggctattgatatgcacacta

SEQ ID NO: 762407 - DNA, 608 bp, Homo sapiens
ttaaaacataagggatgctctcatacaaaataatagtacaggactcaatcatagtaagaaaaagaaaatattgatatagctcttactgtttatggaaagtgtcccaactccagcttagctgtattaatttgctgcttayattaacattatcctatttttattttataaatgaagaaactaaggtgtgtgtgttagggttctctaagggacagaactaatagaatagaatatatatatatatatatatggagggagagagagagagagagtttaagtacacacttttctgcctgctttatattcgctggcagtttattagatggtgctcacccagattaagggtgggtctgcctttcctagtagactgactgaaatgttaatctcttttggcaacatccccacagacacatccaggattaatactttgcatccttcaatccaatcaagttgacactgagtattaaccatcacaatacggaaaaacagtataatggtaaggtagcaggtgtgaggtggagtcactttttatatgtagacagattggttcaaaacttctgccttttgcttgtctgctaggtgataactgtgatgaatataaggagatgaag

SEQ ID NO: 762408 - DNA, 625 bp, Homo sapiens
ttccaattaatactttttctgaaatagttatgaattgtctaatattctgaaaatgttatattttttcttaacattctattctaatctgtttttaacctacagggtttctttcagctttacttagattacattattaacatatgacccactgcatttctattttgggaaagcatccttttagagactttctactaggatatcttaaaattctttatgataaggccaccaccagaagaaattattcagaaacagtttagagatgtgaaacccttgcctaatgctatcttagagtgccaagggagaaaagcayatcttaatatgtgcttggcatatattcagagaaagcatgtcaaacaagcttaattttgtgtgaatctcaagactttttctgtgaaacagctttcttctactactcactagaaaaaaaaaaactttcccttactttcagatattacccactttgcctttccttttgcatttgaagtgtttggaaatacagtcatagaccacataatgacagtctgcatatgcaacggtggtcccataagacataagattataatggagcttttattgtccctgaagaccttccagtgacacaaaacgtggaggtggaagacagtga

SEQ ID NO: 762409 - DNA, 670 bp, Homo sapiens
gcctcttggatccatgggttaagtgtgtggatcaattttcaaatattagagattttccaaataactttgttatttatttctaatttaattcgactgtggcctgagaatatactttatatggtttatactttaaaaaattctattgaagttaaagaaagtattttgtatttcaacccttttaaattgattgagactaaatcatgtgcacataaaaagaatgtatattctgctattgctccttgtagtgttctgtaaatgtcggttaggtgaaattgattgatataagtcttctgttttcttgctgattttcttcagtactctcaattatcaacgtggaatggtgaattcaactattattttgcattatctatttmtctcttaaattcattcagttcatgagtgtatttgtgtgtatattctgttcactattttaagtacatatatttataattgttataacttcctcattaatattttcattactttaaagtgaccctctttgtctctagtaatattttggccttaaagtttattttttctgatatttatgtggccatttcatttatctatgtttactatttgcacagtataaatgttttcatcattttatgttcaacttatttgtgtatttgaatccaaagtgtatcttaataattttcctaggaattat

SEQ ID NO: 762410 - DNA, 670 bp, Homo sapiens
gcctcttggatccatgggttaagtgtgtggatcaattttcaaatattagagattttccaaataactttgttatttatttctaatttaattcgactgtggcctgagaatatactttatatggtttatactttaaaaaattctattgaagttaaagaaagtattttgtatttcaacccttttaaattgattgagactaaatcatgtgcacataaaaagaatgtatattctgctattgctccttgtagtgttctgtaaatgtcggttaggtgaaattgattgatataagtcttctgttttcttgctgattttcttcagtactctcaattatcaacgtggaatggtgaattcaactattattttgcattatctatttctctcttaaattcattcagttmatgagtgtatttgtgtgtatattctgttcactattttaagtacatatatttataattgttataacttcctcattaatattttcattactttaaagtgaccctctttgtctctagtaatattttggccttaaagtttattttttctgatatttatgtggccatttcatttatctatgtttactatttgcacagtataaatgttttcatcattttatgttcaacttatttgtgtatttgaatccaaagtgtatcttaataattttcctaggaattat

SEQ ID NO: 762411 - DNA, 637 bp, Homo sapiens
cataagggtaaacctggtagcaggaaagaagtgacagggagtgaatttttttgtggataacgtggtttaagcaagaaaagaaatttaggaaataaccacataatgttaatttcattctacatgtcttaaggatctgttggtgtcaggctctttgatgggaggaggggaggggagaaggaagactccaagaatgaataagatatggctcatgttctaaggcaggattcctcaatcccagttattattgacattttktgcgtggtgggtctttgtcatgggggctgtcctgggcattgtaggatgtttaggagcattcttggcttatacacactagacaccagctcttcctaatagtgacaaccaagaatgtctccagatatggccaaatgtttcctggagaacacacttattttcagttcagaattaccgtgctacataagacatgtcaatgtaatgtgttaggtgctgtagggaggatattgcaaagtgtctgaggagaatagaagataactctgctaaagttagaaggaaaatagatcagcaagtgtgatatttgacctggattataaaataggatttccccaggtgaactagaaggaaaaagctaatctaggtagaaggaaaatggcaggcttaa

SEQ ID NO: 762412 - DNA, 585 bp, Homo sapiens
cagtttgacaccaaccttggcggtgtctacactgccaacatcagtgctatgagagtgccgggattgcccttccccaaatccaggcagtgcagtgtgaggagagacttgttctgcctagaggaaggcgaaggaagaggactttgtctttcaacttgggtacaagctcagtcacagtaaaacaaagcaccgggcagatytcttaagcctcgaattccaggcttttgctcccagaagttgttttgagacccaacttgggccagaagataatctgctgcattggtgagatggaaacagtcacagcaggatttacaacctgctgactaaaacagctttaggcctgtaataaacatcagtgacagccaggcagcagcagactgaggccttgggtgagcccgagtactgtgctggtgaaagactgtgggcttcaaatgcaacccagcatggtgccagctgtggtggccatggtagtgcccacattacccctcccccaactccaggtggcacagtgtagtgagaaacttgttctgtttgggggaaagtgagggaaggaagtaagaaaatttacttgggaacccaagtaaagga

SEQ ID NO: 762413 - DNA, 666 bp, Homo sapiens
agggcaagtctttaggaattttctttgtaactctgagtaaaacagtagtgtcaatattcccttgggttaatgtaagcagatctgctattaatactaggcaaaaaaaggaaataattcttgaactttctcatattttatatattatggtaaattatgctgaatgaattttaaaaattagtaattgtgaaatgtaaatttaattttcttaaaatatatcaggactatactatagtttaaaattcatgaaaaattataagaagtttacatttattgacaaaaattaaaactatagaactcttgaatcaccaaacctaatttcatacttcggcgataattctgtgtgaacagtatttccaaagagatgaattaatgtatgtagyctattaaagttccttgtgagagtgagataattctataaatacataaagaagtttataattaaacaaaacaactttcattatatattgacactgcatgattaataactgctttctaaatttgtgatgcttactatatatacttgtattacatttcaaatattaacataattttctcaacatatatttaaacatgtgttttctataagatacatgctagatagtgtaagtctctacatgaagccgaaactgtagaaccttctccttttagggaatttatactacaatt

SEQ ID NO: 762414 - DNA, 662 bp, Homo sapiens
caatgaaataaaatttgaattagtaacaaaaataaatttgggaaactcaaaaatatgtgacaattaaacataacctactactgaataactactggataaagaaaatcagaagaggaaatggaaaatactttgatgttaactaaaacaaaaagacaatatactcaaacttataagtggaagctaatacgttgttcagagaaaagttkatagctataaacacatatcaataaaaaatacctcaaatcaatagcaataacttctgcctaggacaatgaaaaaataagagcaaactaaacagaataagtagaataagttaaataataaagattagagcagaaataaatgacaaagaaaatagaaaactgtagagaaaattaataatacctcaagtctctagctaccattcatcaccatagttcagacagcaaacagaaaagtgacatgaggagtggtggagactgacagcatggggtttctattccatattgtttttcattttttttcatgatcaaatagactgaattgtgcattacatagagagtaatttcaccatgctcacgctcttagttcatgtccttataccagtgcttgaattattataacaaccaagaaaagacacagggaatggtggagagaaaaaaaaaacaatgtatcttttaaga

SEQ ID NO: 762415 - DNA, 662 bp, Homo sapiens
caatgaaataaaatttgaattagtaacaaaaataaatttgggaaactcaaaaatatgtgacaattaaacataacctactactgaataactactggataaagaaaatcagaagaggaaatggaaaatactttgatgttaactaaaacaaaaagacaatatactcaaacttataagtggaagctaatacgttgttcagagaaaagtttatagctataaacacatatcaatmaaaaatacctcaaatcaatagcaataacttctgcctaggacaatgaaaaaataagagcaaactaaacagaataagtagaataagttaaataataaagattagagcagaaataaatgacaaagaaaatagaaaactgtagagaaaattaataatacctcaagtctctagctaccattcatcaccatagttcagacagcaaacagaaaagtgacatgaggagtggtggagactgacagcatggggtttctattccatattgtttttcattttttttcatgatcaaatagactgaattgtgcattacatagagagtaatttcaccatgctcacgctcttagttcatgtccttataccagtgcttgaattattataacaaccaagaaaagacacagggaatggtggagagaaaaaaaaaacaatgtatcttttaaga

SEQ ID NO: 762416 - DNA, 585 bp, Homo sapiens
cagtttgacaccaaccttggcggtgtctacactgccaacatcagtgctatgagagtgccgggattgcccttccccaaatccaggcagtgcagtgtgaggagagacttgttctgcctagaggaaggcgaaggaagaggactttgtctttcaacttgggtamaagctcagtcacagtaaaacaaagcaccgggcagatctcttaagcctcgaattccaggcttttgctcccagaagttgttttgagacccaacttgggccagaagataatctgctgcattggtgagatggaaacagtcacagcaggatttacaacctgctgactaaaacagctttaggcctgtaataaacatcagtgacagccaggcagcagcagactgaggccttgggtgagcccgagtactgtgctggtgaaagactgtgggcttcaaatgcaacccagcatggtgccagctgtggtggccatggtagtgcccacattacccctcccccaactccaggtggcacagtgtagtgagaaacttgttctgtttgggggaaagtgagggaaggaagtaagaaaatttacttgggaacccaagtaaagga

SEQ ID NO: 762417 - DNA, 550 bp, Homo sapiens
ccgacatcctggtctttatttcttctacctcttctctgaatgttctgcaaaagacatgtgaagatcatgggatcccatatagaaaaggctgggccatgtcattgatttttctgaaccagactcttcacttactacttcctaaaagtaacctttgtgtcgccctggtggccaatatatggactatctcctagtgatgctcaccaatytaagctaacatagttctatgataattcccctcggtctggggattctttaataaaaacatttttattgtcacacgttgctgagtagtctcatgaacattaattttactgatgctcacacatgcaagtgggtaaaagtgatttttagcatcagccattggctacgtagaaccatgagtccctcaaaacactttaagccctaggattaaggtcacctgactcattctttcttttgataggtgcatcacttaatctcagagggtccagttgtttctactcatctaacttcaagtatgaaaatcccagtttatgatatatgtagattattttgatttttaattaaattg

SEQ ID NO: 762418 - DNA, 590 bp, Homo sapiens
ttatttttttgagacatagtctcattctgttgcccaggctggagtgcaatggcacgatcttcgctaacagtaacctccgcctcccaggttcaagcaattatcctgcctcagcctcctgagtagctggaattaacaggcgtgtaccaacaagcctggctaatttctgtattttagtggagatggggtttcaccacattggccaggctggtctcgaactcctggcctcaggtgatccacccacctcggcctytcaaagtgctggtattagaggcatgagccacggcgcctggccagattcagtataatttataattatatttttagtaatatagaactcttgataattggttgtttatgctaccaaacagtagatgagggagataattaaataccatagtatatgattaataatgggtatatggtagcctagaacaggaagtatctagacagaaagtattggtaattgtaggaaaggatatgttgcaggaacaaacaaaaaaaacacatcagattagttctacaaaatcactaattttttctcacccagtatccaattcatgttttggttggttcagcttcacaaaattaaa

SEQ ID NO: 762419 - DNA, 590 bp, Homo sapiens
ttatttttttgagacatagtctcattctgttgcccaggctggagtgcaatggcacgatcttcgctaacagtaacctccgcctcccaggttcaagcaattatcctgcctcagcctcctgagtagctggaattaacaggcgtgtaccaacaagcctggctaatttctgtattttagtggagatggggtttcaccacattggccaggctggtctcgaactcctggcctcaggtgatccacccacctcggcctttcaaagtgctggtattagaggcatgagccacggcgcctggccarattcagtataatttataattatatttttagtaatatagaactcttgataattggttgtttatgctaccaaacagtagatgagggagataattaaataccatagtatatgattaataatgggtatatggtagcctagaacaggaagtatctagacagaaagtattggtaattgtaggaaaggatatgttgcaggaacaaacaaaaaaaacacatcagattagttctacaaaatcactaattttttctcacccagtatccaattcatgttttggttggttcagcttcacaaaattaaa

SEQ ID NO: 762420 - DNA, 613 bp, Homo sapiens
aattctagcccatgaaaccttaaaatatggaaagatcattggctttctgatgaagcagcctcacaaacatggtctcaggcagttaagggcagaggcaagcactgtaccaataacatacaaggtttaagaggttttgttttgttttgacttaaagtatttcaatatccctgtggctattaaatgatctattccaatcatcattcatataagcagtaagagctgttgaagaaaaaaaaggcaygggaaaatatttggggagtaacaagctaaatcaacaacaaaatggataaaacacaagaatagatcagtcagaataagtctgaaaggattaagggctcacagagaaaaagcatttgaaatgttacttcaatctttttaaagtcagtataaacagggtaggatgttctcttgggttttaaaggccaaaattttctaaggaattgatgaagtaatgtttgccaaaaaagcaattatgcaagcagctagactgaaaagtagaattttttttatataattaacctgagtcaaaaggaaggtatagtctcacacatttttcatgatgatgtatcagcaatgtgcgatatagttgtactttgatgagtttaaaatactg

SEQ ID NO: 762421 - DNA, 562 bp, Homo sapiens
atttcctctctgaaggcttcacgttgtatccccactcaaccagacaagttaggcctttttatccccatgttctacaagcatacacacacacacacgcacaccaatcattgcctataaggctgaaaaggttatgccaaaattgtctcattctagcaaaaatacatttatagtttagaaaggccataggtcgggtgcagtggctcacacctgtaatcccagcaccttgggaggctgagaggggcagatcacaaggtcaggagatcaagaccatcctggctaacacagtgaagccccgtccctactaaaaatacaaaaaattagctgggcgtgctggcgcacacttgtacttgggaggctgaagcaggagaattgcttgaacccaggaggcggaggttgcagcgagccaacatcacaccacsgcactccagcctggataacaaagtgagactccatctcaaacaaagagagacagagagaaagaaggagagagagagagagagagagagagagagagagagagagagagagagagagggcataggccccttctgaacttattatt

SEQ ID NO: 762422 - DNA, 615 bp, Homo sapiens
atgtacatggcttgtctacgtatctataaatgagaaatgggatgaattccacaaactgacacatctctttcaacattgcagttctggttctgagggaaccagagtagctgctttctatttatttgcccattagcaaacaaattgaacaaaatgccatatactaccaaaggcacttatccacacagatacctgacaaagaggacataaagattaagtaaaaggtgtacttaaatgtatatatatcagagacacggcaggaagataacttcgacaaatgttttctacrtgacagcacttgaggttaattaagagtgactaagaaaagagcatttttcaaagaaggtaggcaagtattagcatatctcagaaaccaatagttcaatagcatcatttatcctcctgaaaatagtatttggcagccttctaaaattttaaacaatgactattcaagaacgccttgtgagattaaacaaaaatacattgaaaaaggaaatgtaaggccatgagtaaaatatcaaaaagactaggaaagaataaattttcctgtggttgacgttcattcaaaaatgtatattgaacttccccaatgattgtactaatcattggcccacagaa

SEQ ID NO: 762423 - DNA, 605 bp, Homo sapiens
ccttcactgacactggccctgctgctaactcttcatttcccatacctctttcttcactgcaatgctcccaatgccctcaaactatgcaccactgtgttcgactgatttagacaccagcaacgctggtcaagtgaaatraaagttgttgagttctgttttaaaaaaagaacacatttgaaaagtagaagaatcatatgtgcataaaatgcactcattgtactgtttagaattctattctgagcaaactctgccaacaactatccaacaaacatgtctataggttaatgagattgataattgctgctaaggcagactatttttgtttcatttcgttctcatgctgctaataaagacaaacctaagactgggtaatttataaaggaaagagatttaattgactcacagttcagcatggttggggaggctcaggaaacttacaatcacggcggaaggggaagtaaatacatccttcttcacatggaggcagcaagaggaagtgctgagcaaaagggggaaaagccccttataaaaccatcagatctcatgagaacacactcactgtcatgagaacagcatggaggaaccgtccccatgattcaaatatc

SEQ ID NO: 762424 - DNA, 678 bp, Homo sapiens
gaatgcagtactgagaaaagggataatgttcttacattgttggtgcgcatataaattagtggccattatggaaaaaaagtatggaggtttctcaaaaaattaaaaatagaattatcatatgatctagcaatccctcttctaggtatatgcctaaggaaaatgaaatcagtacctcaaagagatatctgcaytcccatgttgattacagaattattcacaatagccaagatatggaaataacccaagtgttcattgatgggttaacggataaagacattgtagtatgtatatattatggaatattgttcagctttaaaaaaaaagaaagaagatttgggacaacctggatgaacattatgctaagtgcaataagccaaacagagaaagacaaatactgcatgatctcacatatatgtggaatcttataaaatacatagaggcagacagcagaaaattgattaccatggttgggaaggtgggagaaatggggagatgttgataagagggtagaaagttgaagttatctggaatgagtaagcctagagaccaaatgtaagcataatgactataaataatcgtattgtatactcaagatttgccaagagagtagatttcagttcttctcatcacacatataaaaaataactgggagaagatggatatattaattagcttgac

SEQ ID NO: 762425 - DNA, 678 bp, Homo sapiens
gaatgcagtactgagaaaagggataatgttcttacattgttggtgcgcatataaattagtggccattatggaaaaaaagtatggaggtttctcaaaaaattaaaaatagaattatcatatgatctagcaatccctcttctaggtatatgcctaaggaaaatgaaatcagtacctcaaagagatatctgcattcccatgttgattacagaattattcacaatagccaagatatggaaataacccaagtgttcattgatgggttaacggataaagacattgtagtatgtatatattatggaatattgttcagctttaaaaaaaaagaaagaagatttgggacaacctggatgaacattatgctaagtgcaataagccaaacagagaaagacaaatactgcatgatctcacatatatgtggaatcttataaaatacatagaggcagacagcagaaaattgattaccatggttgggaaggtgggagaaatggggagatgttgataagagggtagaragttgaagttatctggaatgagtaagcctagagaccaaatgtaagcataatgactataaataatcgtattgtatactcaagatttgccaagagagtagatttcagttcttctcatcacacatataaaaaataactgggagaagatggatatattaattagcttgac

SEQ ID NO: 762426 - DNA, 662 bp, Homo sapiens
aattctcttttcttcatactgtgaatgatttgtctcaatgagacactacaacttaactggcaccataaatattatttttaaatgttccattgcataacgcacaaaaaggtaagttattaacatccataaagtcaagagaaaggtggctttcatcataatttcacttcttattcataattttacccagtttgtttagagtagattcttcccttccatgagtcaaaagactgtctgatatgtcagtttcacttttttcagcatcctcagatatagacagatagtgcagttataggttgagaaggtaagccttcttttttttttcaagacggagtcttgttctgtagcccaggctggagtgcaatggcataatcttggctcgctgcaaactctgcctcccggattcaagtcattctcctgyctcagcctcccaagtagctgggattatgggcatgcaccaccacacccagctaatttttgtatttagtagagataggatttcaccatgttggccaggctggtgagaaggtaagccttctaatcccattttgacaattcatccctaaattggaaaaaagtattataaataaattttcttttagaacaagataaaatattattaaagtgtaaaatgagtttcaattaaaattaaaatttgtttttat

SEQ ID NO: 762427 - DNA, 637 bp, Homo sapiens
cccaaaaaaatacccttttaaaaatgtaaataagcattttaaaactaatcttttaaattattttttctagaattatattttggggattttgatctttcagcatgtctatgttcaggattatggtgtttgggactgtgtctttctggattacgattggctcttgccaaatatttacttttagctatcagaactctgtcactgctatcttcctccctagacagagaacagcttgaaggtcagagtgygtttcagtctcctttggatcctaccatggcgtggtatctagctccgtgatcagccagttgaaagttcttaaaaattactgtttattgaatatgtaattgatttttaagtgctatgtgttaaagcatctatagaagaaattttattcctgtgattataagttatgaaaaaccatgcaaaacagcaagatacaatttcaaatatgatcctttgagagaaaatttgaaagaactatgaaacacaatctgggaagtttagtggacatacgagtgctgcagctgcagctctttcaggccacatcttctatgtctatagatgcacctgcttggtcaccaggcactatgttgggtatagaatactagcattcaggtggttccaagtggccaaataggaa

SEQ ID NO: 762428 - DNA, 622 bp, Homo sapiens
aaccaaactggaataactctagttatgaacaagtcagttaaattctgtttaggaacaagcttttaggagcagcaatctcattatactatcatggatggggtcagtgggttgaaaagatatccccatccccccaaaaaatttgacatatttcttgacaagtttttgaattaagatttattatcctttgcaagttaaacgaaagtcttaaggaaaaaaacaacctgaaatgaagtgacagttgcataatagttaaattgtaaatatacttgaaccatgtctaagtttaaattccttctcaattgccctgatacttatttttcctctttaatttaaaacaagatcattacattggaatgtgctaaaaaatggataaagtaaatttgcrtcagttatttcttccattactgatgcaccattcaaaagtattttggatttcagctgaagagagaaaactggaacaataaagtgtgggcaggtggtggcggcaggcatacttcatcaaaggaaaaagtctatcgaggactttcattaagagcataccctcctcaaaatatttgcctgctgaacctgagatgacatgtggaaacaaaactcaagataagacaggctcttgcccacttac

SEQ ID NO: 762429 - DNA, 624 bp, Homo sapiens
aaggcttctctcctttgaaagctttttttaaaaaaacatttctttggtaagtagtctaaattattcactgcttacaatattaatttttgttaggcattcctgtggtgtattttatacaatgggatagaatcattttatgcagatttttaattaaggctagtcaaagccactatgctaataataataaatagacacataccacacatatacactgtgtagttctggctcattagctaaaatatgtagcaaatagcaatcaaagcatcatttcttcgaacatttatgttaattatactatatacgacatataatatttattccaggggtgtgtaaaggattttaagatgaaaargtataattacggtaattatgatttgggagcttttcttttttgaatatttcctttggaggtttgtgtgctataaaaaaaatattaagtaagaaaagactctgggaatgaacaaacactttgtttttaataatcctcatcgtattcaatgctgctgccatattagcatattgtcatttctgctttttacttttaaaaaaagatcgatttgcataattatgtagagtgcaatctccctttcaggttgttcttgggtatggagtacttagcattgc

SEQ ID NO: 762430 - DNA, 579 bp, Homo sapiens
ctgggatgatttttcatttttagagacaaccctagatctcatctaataattaatctagttaattctgatgattttttgtgtcatctaactttgaggaagtctatacactgtctgtgatccctcattttgattatcatttaacaatatttggcaagtgatcttaattgtttttcttaaaaatttgcttctttcccttgtgatagaatatcttcttctttatttagttgttttttgttgtggtgaaagttgaagaagcagagggaggaaaaatgttcttctgcctttttaaactagaaattccagtttgtttttatacccttaagtatwtttagaatcatgtataattgatcttgctctctgctcctgaatttaatttctgttctgacattaaactactaatgttttcagctgtgcagaaaaaaaaatcactaaaatttatttaaacttaatgatctgatattcttaggagtatcctttcaatttgaatacaagacttatgctaataaaagtgaacagcaaagtccttcgtaaatacaacatccattatttcttccacaaaaaaagttgacttttaaataa

SEQ ID NO: 762431 - DNA, 597 bp, Homo sapiens
ctttacttctgaagactcctatgtcacatgaaatttgtatgaaataaatttgtatgcttttctcttgttaatctgccttttattatgggtgtctcagccatgaaccataacataaccttgtcatgagagaggaaaaaatattaattctctcctacaaattcaaaaatgtataatattaaaaaaaaagattcacaacctgktcaagtggaatttattccaagtatataaggcagtccaaaaatccaaaaatcaatcactataatctacagcaataagctaaaaaagaaaaatcatgtgataatatcaactgacatagataaaacatttagaacaaccaacagtcatccgtgacaaaaactacaagttagtaacacagtgaaactacctcaacttgataaaagacttctacaaagagcctaactaacatcatgtctaatggtgaaagactaaatgctttttcctaagacatagacatggcaagaaaaataaatataaggcatacagattagaatggcaggactaaaactattcctacttgaagatgacagaattatctatgtagaaaacctcaagaaatctacaaaaaaaccccaaacc

SEQ ID NO: 762432 - DNA, 597 bp, Homo sapiens
ctttacttctgaagactcctatgtcacatgaaatttgtatgaaataaatttgtatgcttttctcttgttaatctgccttttattatgggtgtctcagccatgaaccataacataaccttgtcatgagagaggaaaaaatattaattctctcctacaaattcaaaaatgtataatattaaaaaaaaagattcacaacctgtkcaagtggaatttattccaagtatataaggcagtccaaaaatccaaaaatcaatcactataatctacagcaataagctaaaaaagaaaaatcatgtgataatatcaactgacatagataaaacatttagaacaaccaacagtcatccgtgacaaaaactacaagttagtaacacagtgaaactacctcaacttgataaaagacttctacaaagagcctaactaacatcatgtctaatggtgaaagactaaatgctttttcctaagacatagacatggcaagaaaaataaatataaggcatacagattagaatggcaggactaaaactattcctacttgaagatgacagaattatctatgtagaaaacctcaagaaatctacaaaaaaaccccaaacc

SEQ ID NO: 762433 - DNA, 503 bp, Homo sapiens
taagttctgggatacatgtgctgaacacgaaggtttgttacataggtatacaagtgacatggtggtttgctgcacctatcaacctgtcatctaggttttaagcacctcatgcattaggaatttgtcctaatactctccctcccctttccctccacccccagacaggccctggtgtgtgatgttcccctccctgtgtccatagttctcattgttcaactcccacttatgagtgagaacatgtggtgtttggttttctgttcccgtgttagtttactgagaatgatggtttccagcttcatccatgtccctccaaaggacatgaactcwtgcttttttatggctgcatagtattccatggtgtaaaacacacactgttgattctgtgatctcattttcaagggactgatttttagttaacgcttataacttcttatagataacttagcattattctcatttttcaaagtaaaaaaatcattgtaaaataatttaaaaacaaagta

SEQ ID NO: 762434 - DNA, 638 bp, Homo sapiens
acggcagtgattccagattgctaatgccactagttgtgtgctaaaaacaaatgtaaaaaattacatttgtccttaaatgattgatttttttcaaatgaagcttattgaggtacaatttacattcagttaaattccccctttttattggacagttctattaattttgacaaatgcatacactaatttaactgccactatgataaagatatggaacacgtctgtcatctcccaaagttccctcatgtccctttgtgatcaatctgcttcctccacaccttgtccatggcaattactgatttaatttttgtcactatggttttgtcctttctaggaagttgtattaatgaaatcctgcagttgttgccttttgaatctgtgtattttcacttaatattgtacatttgaaattcatgtctgtgtttgcacaaagcaatcatttgttmtactttgtcactaagtaatattccattgtatggatgtacaacagtttattattcattagcttgtggatatttaaatgctttccagtttttggtatttttaaacaaagctgataaatttgtttttgtacaggtttttgtgtgaacacatacttttatttctcctgggtaaattcctaggagtgggattattgaagc

SEQ ID NO: 762435 - DNA, 603 bp, Homo sapiens
tttgcattttaaaagaatatgttatgtaactagggaactgcaaagttaaaacaacaaagagattccactacatatttagtagaatggctaaaatcttaaaaacttacaatgccaaatgctggcaaaaatgtgaagcaacaggaagtctcattatttgtcagtgagagtgcaaaatcatacagccactttagaagacaggcagtttcttaccatttaacatatcatgcaattcagcaatcatactttcccacatgggataaaaaacttacatatagacaaaaaycttcatatgggtagttatagcatctttattcataattgcaaaaaaccggaagtaactaagaagtccttcaataggtgaatgggcaaacaaactgtagtacatccataaaagggatattatttagaaataagaagaaatgagctgtcaagccacaaaaagacctggaaaatctttaaatgcatattgctaaataaaaccagtctgtttgaaacacaagtgaaagaagtccgtttgaaacacctatatatgatataattcgaattttatggtacactggaaaaagcaaaactatagagtcattaaaaaatatccatggttgc

SEQ ID NO: 762436 - DNA, 602 bp, Homo sapiens
aaagtgagcaaatatttaggtataaagacctgattgtgaaaatggaatacttccaccactgagactgagatttatggtgaattttctcttccaagatgaaaccttcattttcccaaacatacttatcagaaattcatttggatggtctgttttctttttcttgtagatgcctgaatactacattatagtgtytctttccaattcacagaacagggaatagaacctgagataaaaatacaaagtcaattacaagaaaccaaaactgtgttcaaggaagaatactgagtgtgaccaactcattgtggtttatctagaattttcctggttttagctttgaaagtactgagttccaggaaccctcttagttcctggcaaatcattctctatcttttaactgtgcttggtgtgagatttgagacaaaaatcagaaatggatcacataaaccctgtattaatatttgatgatgttttagctactctggaggagtggctgtttaaaaccacacattaatttataatgccaaattttacactgggccttgggaattctaaaaagacaatgtccaagagcccattaaaatgagtaaatgttaaatactctc

SEQ ID NO: 762437 - DNA, 596 bp, Homo sapiens
ttatttttttgagacatagtctcattctgttgcccaggctggagtgcaatggcacgatcttcgctaacagtaacctccgcctcccaggttcaagcaattatcctgcctcagcctcctgagtagctggaattaacaggcgtgtaccaacaagcctggctaatttctgtattttagtggagatggggtttcaccacattggccaggctggtctcgaactcctggcctcaggtgatccacccacctcggcctctcaaagtgctggtattagaggcatgagccacggcgcctggccarattcagtataatttataattatatttttagtaatatagaactcttgataattggttgtttatgctaccaaacagtagatgagggagataattaaataccatagtatatgattaataatgggtatatggtagcctagaacaggaagtatctagacagaaagtattggtaattgtaggaaaggatatgttgcaggaacaaacaaaaaaaacacatcagattagttctacaaaatcactaattttttctcacccagtatccaattcatgttttggttggttcagcttcacaaaattaaaaggggc

SEQ ID NO: 762438 - DNA, 551 bp, Homo sapiens
aaataaaactactgtttgatccagcaaccccactactacccaagggaaatgaaatcattatttcaaagagatagctgcactcccatgctcactgcagcatagtcataattaccaagatatggaaacaacctaagcgtctactgatgaatgyatggataaagaaaaggtgatacacacacacacacacacacacacacacactagaatattattcagccttaaaaagaaggaaatcttgtcatttgtgtcaacatagatgaatctagaggagactattgtaagtggaatagagcagacataggatattactgcatgatctcattttgatgcagaatctaaaaaggtcaaattcatataaacaggaagaggaatggtggctgccagggttgccagagcttggagtgtagggaaatggagtgaagtggttcaaagagtgcaaaccttcagttacaaggagattaaattctgtaggtcaaatgtgaagcattgtgactacagttaataataatgtattataaattgaaattcagtaagagatgaagtcttaagta

SEQ ID NO: 762439 - DNA, 617 bp, Homo sapiens
aaggtcacatggtttataaatggtggatccaaggttctagcctattcaatctgattccaaagtctgcacccttaaccagatgacatgytgcctcatagtttttctttctgtgcccccatctccttattgaagctatactttggatagattttcaaaaaattatgaatgatcatcagaatttactttagccaggcaggccgggcatggtggctcatgtctgttatctcagcactttgggaggccaaggcgggaggatcacttaaggtcaggagttcgagaccagcctggccaatttggtgaaaccccatctctacacaaaaattagctgggcgtggtggcacaagcctgtaatcccggctactcaggaagctgaggcaggagaaatgcttgaacctgggaggcggacattgcagtgagcctagatcatgtcactgcactccagcctgggtgacagagtaagattctgtctcaaaaaaaagaatttactttagccaggcaaactggtgttggcccatgatcaaaaataagtcatcatctaaaaaagaaaattttttaaaaaatgaattataacattattctttctttttattgatttttttccttttattgattttcac

SEQ ID NO: 762440 - DNA, 617 bp, Homo sapiens
aaggtcacatggtttataaatggtggatccaaggttctagcctattcaatctgattccaaagtctgcacccttaaccagatgacatgttgcctcatagtttttctttctgtgcccccatctccttattgaagctatactttggatagattttcaaaaaattatgaatgatcatcagaatttactttagccaggcaggccgggcatggtggctcatgtctgttatctcagcactttgggaggccaaggcgggaggatcacttaaggtcaggagttcgagaccagcctggccaatttggtgaaaccccatctctacacaaaaattagctgggcgtggtggcacaagcctgtaatcccggctactcaggaagctgaggcaggagaaatgcttgaacctgggaggcggacattgcagtgagcctagatcatgtcactgcactccagcctgggtsacagagtaagattctgtctcaaaaaaaagaatttactttagccaggcaaactggtgttggcccatgatcaaaaataagtcatcatctaaaaaagaaaattttttaaaaaatgaattataacattattctttctttttattgatttttttccttttattgattttcac

SEQ ID NO: 762441 - DNA, 593 bp, Homo sapiens
tcagaattgtcttggctatccaggctcttttttggttccatatgaaatttaaaatagttttttctaattctgtgaagaatgtcaacagtagtttgatgggaatagcattgaatctataaattactttgggcactatggccattttcatggtattgattcttcccatccatgaggatggaatgtttttccatttgtttgtgtcctctcttatttccttgagcagtgstttgtagttggagaggtccttcacatctcttgttagctgtattcctaggtattttaatctctttgtagcaattgtgaatgggagttcattcatgatttggctctctgttagcctgttgttggtgtaaacgaatgcttgtgatttttgcacgttgatttttgtaccctgagactttgctgaagtttcttatcagttcaagaagttttggggctgagatgatgcagttttctaaacgtgaaatcatgtcacctgcaaacagagacaatctgacttcctctcttcctattgaataccctttatttctttctcttgcctgattgccctggccagaacttccaatacaatgttgaataagagtggtgagaga

SEQ ID NO: 762442 - DNA, 593 bp, Homo sapiens
tcagaattgtcttggctatccaggctcttttttggttccatatgaaatttaaaatagttttttctaattctgtgaagaatgtcaacagtagtttgatgggaatagcattgaatctataaattactttgggcactatggccattttcatggtattgattcttcccatccatgaggatggaatgtttttccatttgtttgtgtcctctcttatttccttgagcagtggtttgtagttggagaggtccttcacatctcttgttagctgtattcctaggtattttaatctctttgtagcaattgtgaatgggagttcattcatgatttggctctctgttagcctgttgttggtgtaaacgaatgcttgtgatttttgcacgttgayttttgtaccctgagactttgctgaagtttcttatcagttcaagaagttttggggctgagatgatgcagttttctaaacgtgaaatcatgtcacctgcaaacagagacaatctgacttcctctcttcctattgaataccctttatttctttctcttgcctgattgccctggccagaacttccaatacaatgttgaataagagtggtgagaga

SEQ ID NO: 762443 - DNA, 601 bp, Homo sapiens
cattatttacccaggagtcattcaggaacaggttgttcaatttccatgaaattgtgtggttttgagtgagtttcttaatcctgagttctagtttgattgcactgtggtctgagagactgtttgttatgatttcagttcttttgcatttactgaggagtgttttacttccaattatgtggccgattttagaataagtgccatgtggcactgagaagaatgtatattctgttartttggggtagagagttctgtagatgtctactagatccacttgatccagagctgcgttcaagtcctgaatatccttgttaatcttctgtcttgttgatctgtctaatactgatagtggagtgttgaagtctcccactattattgtgtgggagtctaagtctctttgtagatctctaaaaatttgttttatgaatctgggtgctcctgtattgggtgcatatacattcaggatagttagctcttcttgttgcattgatccctttaccattcccttctttgtcttttttggtctttgttggtttaaagtctcttttgtcagagcctaggattgcaacccctgctttttttttgctttccatttgcttggtaa

SEQ ID NO: 762444 - DNA, 568 bp, Homo sapiens
cgaaaaaccaaatgcaaaaaattttactcagttgcccaagactaacttgtctaaagcatctcttggaaaaatgttgatgatttataattatttttagatatttcaaccaggaaaagtttggcgtaaaaagaattccacagaggaaaaagctcttttctttttcattatctcagtaagtgtgaatgtgttaaagtcagcgtcgctgcagacggatctctacgtaggaattgaagaggactgtggaractcctttttactctcctcacacatatagttagtccaaaaagacctcgctcagtgtctgactacagtgcctgaaatcctcatcattagaacttctcccatttgcgataaacattgctgtttccatgtcatgtttttttttagaactccagtattctcgggagtgaaaaaaatggtaaacacagatatgttttacatattgctttctttccagacaagaagaaacctgggcagcctgacaacttagaggaattggtgaagaggaggaaaaaaatgtcagacacaccaaattaacatttgttgttgttgttgttgagacaggttc

SEQ ID NO: 762445 - DNA, 632 bp, Homo sapiens
gccctctcatggtgaaactctgcaggccctcctatctgcacagtttcttttctccatcagctgtctccaccttctccaagagcgcatttttaaatgatggcactggagctgtctgcatgcctcttggctttctgattattctgcacatgtgctcaggcaagccccctgaactcagctctggctgtgtgactcccctgccccaaatcctctagagacccccactgtctaagcagttgagtacacctgtccctatttggcacaaatawttccatcttgtgtgtgttcacaggcacgttcctgggaatttgccttcatgcttctctgtctctccaactcttgttcaactcgtaagacttgcttcaaatgcacccttctacattaagtctatgctgctccctttcccacccccagaatagtttctccttctttggattcttatcaacctgtgggatacctcccaaaggcttgtcatgctctgccatttgtcacggttgtttatgttcctgttcttcagccctatacatttctcaaagtcccaagcagaatgagtcttattcataatagtatccccagtgcttcattcattgcctggaacataatgagcactcaataatgttggcaaaattgaattt

SEQ ID NO: 762446 - DNA, 615 bp, Homo sapiens
ctcacacctgtaatcccagcactttgggaggccgaggcaggtgcattacctgaggtcagaagttcgagaccagcctgggcaacatggtgaaaccccatctctactaaaaataccaaaatcagccaggtgtggtggcacgtgcctgtaatcccagctactcaggaggctgaggaaggagaatcactttascccaggaggcagaggttgcagtgagctgaggttgcaccattgcactccagcctgggcaacagagcgagactccatctaaaaaaaaaagaaaaagaatagcttgtttttattgtaatattcgcctatccctaattggcttatgtggttgtattttcaaattgtgtgtaagacacacatcatatccacatgtgaattcttcagggccctcttcaggccaaagaaactgaggaagaaaatgcagaacccaaaagcgagtgggtggctgggagtcctccaagggcattttgcagtcttaggaaaagtctctgtattgttgcctacatctgcggtaacattggccatacactctgtggtttcaacatcacagatgattggcttacagctttggaggtcagtatctgaagtgggtctgcagggctgtgttcc

SEQ ID NO: 762447 - DNA, 625 bp, Homo sapiens
gatttatgcacgtgatgacggaaacctgaaaagcccagactgaagcagcagttgagctgcatttcaaagatctcttcgactccttgcgttgtttatgaagatcctgggtctggccacctgtagcattgactcattggccaactcttgattcattcatccactcatccattcatttgtttgacaatcattattgggtacctcttatatttcagaatgggtatatcacagtaaactaaaatcatggctcctgcttttaaaaaagtattatctcctgagagaagcagatattaaacacctgaaaagtcaataactatctaattacaaagtgtggcaaatatcatgaaggaaaggaaggtgttcatgacagagctgcaggaagcctatcttaaactgggcgatyataaggggactctctgaggaggttgctttttatctaaagccagaaggtaggaaagacaaaaatgttcaaggtctttcatttgtcaacataggacggactccccagaacaaacgaacagaaagacacagacttcatggtaaccttgggacttgtttttcctacacgagggagctaagagggtgctataagtaaaatacttgcactgaaaatcaaaatgctggtttt

SEQ ID NO: 762448 - DNA, 573 bp, Homo sapiens
ttgccttttatttatacccatttaaaataattttttttatcatttcacagaaacgtaagaaacttgtaataaatataattacatttaccattccatcatttctgctactgttgtcatatcttttacatctacatatgtgttaaaacccacaatatactgtcatctttctttctttttctttttttttttttttttttttgagacagagtctcactctgtcactcaggmtggagcgcagtggtgtgatctctgctcacttcaacctcgtctcctgggttcaagcgattctcctgcctcagcctcctgagcagctgggattacaggcgcctgccactacgcccagctaattttttgtatttttagtagagacggggtttcaccatgttggccaggctggtctcgaactcctgacctcaggtgatccatgtgccttggcctcccaaagtgctgggattatagccttgagccaccgattatctttcttttaaaaagcatcttaaagcaattcaaagaaaaagtagtgttttgtatttatcgacatatttatcatttacaatgcttttcatttcttct

SEQ ID NO: 762449 - DNA, 622 bp, Homo sapiens
tctctgggcctggttcatttcaagattagcccctggaatttctaagcaagcagttaattagataagctggcagagtgcaaggaatgtctagtggaaagggaggaaaaccaagagtttcaaagtgtattttaaggctaagactagacagaattttaaaaaaaggtttaagatgcattttgaagctaaactagtcagttacactatagcctttataggaaagtcaattctcaagtgggaaaagatgagtacatgtttaaaacccattatatatatttgtgtgtgtgtatatatattatatatattatattatatataatatatatacacatatataatatattttttaaaaacatatatgctttaaaaatatattgtatatatgcatatataatgcaacatgcttatatcatgtaagcacagaataatacgtttacagtgtagaagcagaagaccraaatcaaaatgcaagagcaagtccgaataaaaagcaactcttgcatcttgatttcagtcttgtgcttctaaattgtaaaggtattattccgtgcttacatgttataaccactcttagaaaatgccagcaacacatcatcatatctttttccatatcattacttcttaa

SEQ ID NO: 762450 - DNA, 504 bp, Homo sapiens
ctaaatcataactctatagtgtaaattgttagaatttgtactggtgctttaggagaccaaggagggcggatcacgaggtcaggagatcragaccatcctggctaacatggtgaaaccccgtctctactaaaaatacaaaaaattagccgggcgtggtggcaggcgcctgtagtcccagctacttgggaagctgaggcaggagaacagcgtgaaacctagaggcggagcttgcagtgagcccagatcacaccactgtactccagcctgggagacagagcgagaatccttctcaaaaaaaaaaaaaaaaaagaaagaaagaaagaaagaatttctattggtgaactaaagacacatttttaacatgcgacatcacttgcttaattttgaataagcatgaaaaacaaatattgttaacttgctaaaattgttttaaagtctcttcttcctggaacagagcttccaggaatagaagctcagtatgactggtttctctattctgaatac

SEQ ID NO: 762451 - DNA, 602 bp, Homo sapiens
gaaaactagggaaagagatagctaagaagagttcttctggaaccagaataagctgcaaatcctagctgcaaagtctacccatgcaaagaggctcagatcagatggaggcacaatttatgctccatgatattatttaaaaatctgtagaccaataatctaacaactagtgtataataattagtaataataattagtaaactaatagctaagtgtgataccaacagaggcagataacttaaaagagagttcaaagatgcagtcaaatgaagccctactagagccatcatcactctctagtgaatgtgcccatgccygaggttcggctctctggtgaaggacaacagagaatacacactgcatgagaaatgctgaaatatagtccagtaagtcactaaggcaagcaaacaacaacacgaaaaaaaccctggagttaggaatggattgtatctacagataccgcattttaaaaaaagcaaaataaaaaaaactaaaatgtttggttttcaataaaatattatgaaacatcaaaaaaaaaaaaaaaaggaaaatgtgacctatacaaagaaataaatcatgaaagagaaatggcatttaggagtgtc

SEQ ID NO: 762452 - DNA, 576 bp, Homo sapiens
cacagtgaaacgctttgggtcacaggtttatatttataccctgtatataaacaccaaaaagccaaaaaaaaaggttatttataaaagaaaaaaatgcaaatttttaaactctgttattttttaaaacatatataattgttttatattttatatctgataattatagtttttgcaggtaactttytattatctgtttttgttgctgtttctcattcatagtaccctgttcatgtgtgtgtattattttataatggattattgacatatttttcttggaatataattttgtgaaatatctgtcacctggattgaaattgagctcaccaatattgttttcaaaatactatttccttggggatactactgtcaaagtgcattttaaaaggaattatttacagaagaattttcagactgtaaatcataaattcagaaaacaaacctgcataagtgccagtttcagattacaaattccagctgggtgcagtggctcaggcctgtaatcctagcattttgggaggctgaggcattaagattgtttgaagccaggagttgagaccagcctgggcaacatagaga

SEQ ID NO: 762453 - DNA, 558 bp, Homo sapiens
attgtgagaacttgctgagtctccaggaggtaagatccacacaattatggaagccccttccaatactgccatcccaagattttattactctcacagtggtccatactcttgccttcagcagcgtgtcaaagttattgcttaaatgttcatgcttatattagaaatttcctgaagtcctaagtatctctcacagagtttgctatattttccatccttttgatttctatatcagcaacattatctctttattttcctttacattgttgatttggagctgttatttgttaatgcttgacttaatgatggacattgtttataaaaacaaaaattagaaactccagataatattacattcytccaaagatgattgacttctgacaagcagtttaaattggggcagatcacctttatctacccaggactaagatatttcaagtgacccctttctggggtcgcagttgagaatctgtgtgtctacctgagccctttctctttggtagcccagtccccaaactccatagtattcacctgtattatgagactctcaaaagctctatt

SEQ ID NO: 762454 - DNA, 579 bp, Homo sapiens
ttaggaaacctacaataagaaaagcttagcatagttttctgtgctccaattaaaaagaagaatcttttagaagagctttcacaagctggatagcagcttcctccaatctggaattgaagtatgagtctcactttcacacgtatcctcaggcaacagcatcattcccacaacataaagacgaatgtaagactctactgtgtgggacacactgcgggggatggttgggatctgtatggatgagggaacattccccagggaacaaagaaattcacttggattattatttctctacttacccaatcctccaattaarctgtattttgaaggaaataaatgattaatttccctctgccctgaatatcttgtgtgttttaatgctactttaaatatattcaaagagatgggaatgacccttggtaaacagacaaggacattgaacaactgttcatccattctgtcagccaactgactgaaaatgcaaagtcacaggattactgtcctaacttttggagatacagaaataaatatggggggtggggggctttcccttgtttatcagggaaggcatatattttagca

SEQ ID NO: 762455 - DNA, 514 bp, Homo sapiens
aggcccaccgacagacaagatttaaataaaatcctaagtctcaaaccataattccccgaatgtccacatgtcaataaaatattatttatcatactaagaaccaagaagatctcagattgaatgaaaaaagacaattattagacagcaaaaccatgatgacacagatattagaataatctgatcaggattttaaaacagcyattataaaaatgtttcaatgatcaaacacaaacacaattaaataaaaatatagaaagttatcaaataaatggaagataggaactaaattgaaattatagaattaaaagaaaatgctttagcattagccaaaaacgaagagaaaaacaaaactcactgtacaggctcatcagcaccctagggaagaaagcatcagtgaatttgaatgtagtacaacacaaattacccaacccaacaacagaaaaacacagtagagagagagcacctcagagatacgtgtgattataacagaagatcaaatattcatggagcaggt

SEQ ID NO: 762456 - DNA, 514 bp, Homo sapiens
aggcccaccgacagacaagatttaaataaaatcctaagtctcaaaccataattccccgaatgtccacatgtcaataaaatattatttatcatactaagaaccaagaagatctcagattgaatgaaaaaagacaattattagacagcaaaaccatgatgacacagatattagaataatctgatcaggattttaaaacagccattataaaaatgtttcaatgatcaaacacaaacacaattaaatraaaatatagaaagttatcaaataaatggaagataggaactaaattgaaattatagaattaaaagaaaatgctttagcattagccaaaaacgaagagaaaaacaaaactcactgtacaggctcatcagcaccctagggaagaaagcatcagtgaatttgaatgtagtacaacacaaattacccaacccaacaacagaaaaacacagtagagagagagcacctcagagatacgtgtgattataacagaagatcaaatattcatggagcaggt

SEQ ID NO: 762457 - DNA, 616 bp, Homo sapiens
gttgctatgggcctacaagaagacactgtttttgagcagctggggtctgtgtcccgggagttattccggtggctgtcctcagtgggatttccttgtgcattttcatcaagtggtgggaagtggctgtgttatttacccaggctttgtttctgggcacttccagcatataggaacatacataaacacacacacaagtacacactctgttctaatcctttatgttcagaaaatgtaagggaactaaaaataatttttttaatggaaaactaaaagtaaaatcctctaagcaatgccttggaaaataaaaggtgctggggaggccagcacataaacactcaggccatggagcccgtgcagtgaccaaaccaaaaataggttatatgttcattacattaatcagtttctgtctaatagtgctggctatttattgaatggacactataagctaggttctattctaagcayttctcgtgtcctaactcattcaatccttaaccatactctgtacaaaaagagactgttagcaatgccattatacaaatgaggaaactgaggcagagggagttaagtaatttgtttaagagcatgcaacacataaaagtttatgttggcaatt

SEQ ID NO: 762458 - DNA, 629 bp, Homo sapiens
tgactatatttttaggggacttttggtagttaatcttactgattatgtttgctgctttgatttacaaaataaaatatggcaattcaatgagctggtaccataaggtcaaaaatcacaacatcaccctgctaagctcatgacatcccgtaactccaagtgccttggtgggaagggggaatccagtatgtgctcaggtggatgtgacacacaggttaattccagaatackcatggtgctcaagctctttgcaggctcatcccttcagttactacaggaccctcaagggaccgtcacattccctgagtggtgcagttagatgaggtcagtagctcttccaggcatggcagactaaaggagaagtttgtgcggctgaacattgacccaaagccgtgttgcactgggttttgtttcacagtggggaacttgagttgaatggccttctgtggctctcccttctgatgctctgttccctcccacttggggctggccctatcaattaggttggtgcaatagcaattgctgctttcatcatacttttaatggcaaaaactgcagtgacctttgcaccaacctaacatacataaaggcaagttgctagtggaattgagctacctccagttggagtcaaa

SEQ ID NO: 762459 - DNA, 634 bp, Homo sapiens
ccttttatttccttttgttttctagagaaggagtttcgctcttgtcgcccaggctggagtgcagtcacgctcactacacttcgctcactacaacttccgcctcccaggttcaagcgattctcctgcctcagcctcccaagtagctgggattacaggtgcccgccaccatgcccagctaatttctgtatttttagtagggatgaggtttcgccatgttggccaagctggtcacaaactcctgacctcaggtgatccacccacctcggtctcttaaagtactgggattacaggcgtgagccaccgtgcccagccatttgcttttttttttttaaaagacaggttcttgctcagtcacacaggctggagtacagtggcactatcatagctcactgcagccttgaacttctgggctcaaacaatcctctcaccttagtctcctgagtagctgggaccacaggtgtgcgccaccataccyggctaatttttttcattttttgtagagatggggtcttactatgttgcccaggctggttttgaattcctggcctcaagcaatcctcccaccttggcctcccaaagtgctgggatcacaggcgcaagccaccatgttcggccacagctttcatttcttatt

SEQ ID NO: 762460 - DNA, 614 bp, Homo sapiens
tgctctctgccctgtaataagaaggcagcggccacagcgtgcccagtggtggcccgggtatctccctggatcatttcccgggccccttatcccatcgtaggcccctctactctggctgcctcctcctattccaaagcctacgctctcagtacaaagsggacttcacaagtgatgaggctgtactaaataaacggtttatgcagggaaatgggatcacattcatggttttagatgtgatctctgacggtgatgtgggagatggacttggggagccagggagaatggggagaggataaccgcaagagccgcgtgaagaaataatggcagaaatcaacgcagtacacgggggagagaagcaagaacgaagacagaagcaacagaacttggggactccctgactatgagatgaaaggaagagaatggcttgcaggtttccggcgtgggaggccaggccaggagatgagcaaggaagggagctgatgggacagcgcacacatgctcccctcacccagaaagagaggaagcaagagcagggtgaagggtgggcgtggggacagagaatgttcaccagagacatgctgaatttcatgttttttatgcaacatctggttggc

SEQ ID NO: 762461 - DNA, 529 bp, Homo sapiens
aatcccagctacttgggagactgacgccggagaattgcttgaacctgggatgcagaggttgcagtaagccgagatcacgccactgcactccaggctgggtgacagggtgagactccatctcaaaagaaaaaaaaaaaaaagaaagcaaaaaaatttttcataaaagaactccacagctattagcagtctaaaaatattttcttccatgctgtggattgtcttttcactttcttggttgcatcatttgcaacaaaaatgtttttaattttgatgaagtccagcrtatttcttttttctttttctttttgtacttttggtgtcatatctaagaaaactttacctagcccaaggtcataaagatttactcttgttttcttctaagagttttatagttttagctcttaaatttaagtctatgctccagtttgagttaatttttctatatagtgtgaggtaggggtgcaagtgattcttttgcatatggatatgtagttacctttgcagtagttgttgcaaagacaaattatgg

SEQ ID NO: 762462 - DNA, 686 bp, Homo sapiens
cttgaaatcagtgtttcttggctgggtgcagagcctcatgcctgtaatcccatcaatttgcgagactaaggtgggcagatcactcgaggtcaggagttcgagaccagcctggccaacatggcgaaaccccgtctttactaaaaatataaaaattagctgggtgtggtggtacacgcctgtaatcccagctactcaggaggctgaggcaggagaattgcttgaacccgggagatggagactgcagtgagcagagatcacgccactgcgctccagcctgtgtgacagtgcaagactccatctcaaaaaaaaaaaaaaaaaaaaaagrcagtgtttctggaggctagtcccccaactagcagcaccagcatcacctcagaagtcctgagaaatgtgatgtgaggccccactccagatggctgaatcagagactctgggggtgctccccagcaatttgtatttttcttagtaaattctccagtggctaggcctggtggcttatgcttgtaatcccagcactttgagaggctgaggcaggagaagcgcttgagcccaggagttcaaaaccagcctgagcaacatagcgagaccttgtctgtaaaattaaaaaaattaaattagccagtcgtgatggcgtgtacctgtggtcccagccacttaggagactgatgtgggaggatcccttgagc

SEQ ID NO: 762463 - DNA, 587 bp, Homo sapiens
cccccaactagcagcaccagcatcacctcagaagtcctgagaaatgtgatgtgaggccccactccagatggctgaatcagagactctgggggtgctccccagcaatttgtatttttcttagtaaattctccagtggctaggcctggtggctyatgcttgtaatcccagcactttgagaggctgaggcaggagaagcgcttgagcccaggagttcaaaaccagcctgagcaacatagcgagaccttgtctgtaaaattaaaaaaattaaattagccagtcgtgatggcgtgtacctgtggtcccagccacttaggagactgatgtgggaggatcccttgagcccaggagctcaaggatgcagagagccaggattgtgccattgcactccaacatgggcgaccctgtctcaaaaaagcccaaaacaacaacaaattagctaggcacggtggtgtgcatggctgtagtcccagctacttgggaggctgaggctggaagatcccttgagtccaggctgcagagggctataatggccactgcactccagcctggacaacagagcaagaccctgtctcctaaaacagaaaaca

SEQ ID NO: 762464 - DNA, 587 bp, Homo sapiens
cccccaactagcagcaccagcatcacctcagaagtcctgagaaatgtgatgtgaggccccactccagatggctgaatcagagactctgggggtgctccccagcaatttgtatttttcttagtaaattctccagtggctaggcctggtggcttatgcttgtaatcccagcactttgagargctgaggcaggagaagcgcttgagcccaggagttcaaaaccagcctgagcaacatagcgagaccttgtctgtaaaattaaaaaaattaaattagccagtcgtgatggcgtgtacctgtggtcccagccacttaggagactgatgtgggaggatcccttgagcccaggagctcaaggatgcagagagccaggattgtgccattgcactccaacatgggcgaccctgtctcaaaaaagcccaaaacaacaacaaattagctaggcacggtggtgtgcatggctgtagtcccagctacttgggaggctgaggctggaagatcccttgagtccaggctgcagagggctataatggccactgcactccagcctggacaacagagcaagaccctgtctcctaaaacagaaaaca

SEQ ID NO: 762465 - DNA, 578 bp, Homo sapiens
atgcatatatttttaccatcagtaggtacaactacaaattttctaaacaaattgagcaaatgtatttatttccaccagcattatatggaatttccagtggtgcctcattcttatcaacatttagctgtgtggacattttaaaatgtgtctcttctggtgagtatgtaaatgtatctcattatggttttaatttgcatcatcttgatgataagtgatgttgaacacattttatgtttatttgatatttgattgtttgaaaagtgtctttttgagtatattgtctgtttcattaaattgtctcacttgccttttttaaaaatgtgagaattattatttatgctgtatatcaatcctttgttaaatatctgtttggcaaatattcttccycccactctatgattctgacatctttgctttatcagaaacccatcaggagctttttgataccacactttttaagagccttgacaggtggctagtaattgatatggtaaactaatattggaaaagttttaatggtaggtagtgaagtttggtctgtcatacttcccagatagccatttctttataggaccttt

SEQ ID NO: 762466 - DNA, 588 bp, Homo sapiens; identical to SEQ ID NO: 748579

SEQ ID NO: 762467 - DNA, 668 bp, Homo sapiens
ttctatataaacacacacacacaagcatatacacacacaacaatttactatctctggaaattgtcctaaggatacataggatatgagaaaacatttgttaaggaaaatgtggttatcattttaggaacagcgacagcctgtggcatttgagccrtgatccacccctcactcttccccagctaggcatgatggaagccctattccaagtgggcgcaatcatgaagacagagtttccctttccctccacctcccagtctaaggcaatggcttcacttcaggagtggcaggctgctctcatatctccatctctgttcaaagaaacccagttccaggtaagtgctgttatctggggctctttatttccataatctagtccctaatcatatggcagaaactctaccctgtacaaggctggctgagaatacagtgctatgattgggttcaccctagcttgattacagggaaattttacattgaaagaggcaggtgaagaggattagaggctattgcccacctagcactctgcctgtagagcagatatgtttctttgagagaaatgggctgctgtccttgcctccagctctggagctgcaacatagagcttccaccctggggagaggtaggccatgaaaacatatggcactttagctctccctaaggggactcac

SEQ ID NO: 762468 - DNA, 668 bp, Homo sapiens
ttctatataaacacacacacacaagcatatacacacacaacaatttactatctctggaaattgtcctaaggatacataggatatgagaaaacatttgttaaggaaaatgtggttatcattttaggaacagcgacagcctgtggcatttgagccatgatccacccctcactcttccccagctaggcatgatggaagccctattccaagtgggcgcaatcatgaagacagagtttccctttccctccacctcccagtctaaggcaatggcttcacttcaggagtggcaggctgctctcatatctscatctctgttcaaagaaacccagttccaggtaagtgctgttatctggggctctttatttccataatctagtccctaatcatatggcagaaactctaccctgtacaaggctggctgagaatacagtgctatgattgggttcaccctagcttgattacagggaaattttacattgaaagaggcaggtgaagaggattagaggctattgcccacctagcactctgcctgtagagcagatatgtttctttgagagaaatgggctgctgtccttgcctccagctctggagctgcaacatagagcttccaccctggggagaggtaggccatgaaaacatatggcactttagctctccctaaggggactcac

SEQ ID NO: 762469 - DNA, 605 bp, Homo sapiens
ctgagaatacagtgctatgattgggttcaccctagcttgattacagggaaattttacattgaaagaggcaggtgaagaggattagaggctattgcccacctagcactctgcctgtagagcagatatgtttctttgagagaaatgggctgctgtccttgcctccagctctggagctgcaacatagagcttccaccctggggagaggtaggccatgaaaacatatggcactttagctctccctaaggggactcactttactgggacaaatatgtaaaaaagagtgctgccagttttagtcaaacaatacaattttaaataatggatattttggcaataaraaattaagaggaggctgatagcttcttgagaacaacagctaaatttcaaaccagctaataatttatcagagagaataagggaaagagtcagaaataagaagagccctgctggggtcagagcaagcctcaaagactggcctccatgacaatctatccaaaggggtctacattttattgtttgaaatgtggatcagtttataccttagtgtattgttaagaatagtagagaaataagattgcacttagtagatgctaagagctggatat

SEQ ID NO: 762470 - DNA, 616 bp, Homo sapiens
ggagctctggacccacattttccttctacactgccctagcagaggttctccatgagggcttcacccctgcagaaaacttttgcctgggcatttaggcatttccataatcttctgacctctaagcagaggttcccaaacctcaattcttgacttctgtacacctgcaggctcaataccatgtggaagctgccaagtctcagggcttccacactctgaagccacagcctgagctctatgttggctccttttagccatagctggtacagctgggacatagaaaaccaagtccctggactgcacacagcgtaggggcctgggcccagcccatgaaaccactttttccttctgggcttcagkcttgtaatgggaggggctgttgtgaagtcctctgacagggcctggagacattttcctcatggtcttggggattaactttaggcttcttgatacttatacgcaaatttctgcagctggcttgagtttcccctcgtaaatggggtttttcttttctactgcatcatcaggctgcaaattttctgaacttttatgcactgtttcccttttaaaactgaatgcctttaacaacaccaaagtcacttcttgaatgaatgctttg

SEQ ID NO: 762471 - DNA, 597 bp, Homo sapiens
aaggaaatcctctcatttgtgacaaaaacggatgaacttggaggacattatattcagtgaaatacggcaggttcagaaatataaataagatctcatttatttttgtaatcttaaaaagttgaactcatagaaacagaaagtctaatggtatttaccttatgctgaggatttagggcactggggcaaggagattttggtgaagggatatgaaatttttgttagaaaaaaacttcaagagatcyactgcacatgactatgttaataacaatatattgactacagttaattacaatgatgatgactatagttaataacaatatacttcatacttgaaaatgataagaaagtaaattttatattctcaccaaaaaatatgtgaggtaacatatatgttaattagcatgatttagccatttcacaatatatacatatatcaaattatacaccataaatatatacaatatttatttattagcttaagtgcataaatacacaaataaatgaagtaatatatcttgttttaaaaatatgacctttacaattttaggagagaagtctaaatatattcataaaggcaacaattgatttctaagaaat

SEQ ID NO: 762472 - DNA, 621 bp, Homo sapiens
aaacaattgcaacaatagcaaaaattgacatatgggatctaattaaactaaggagcttctgcacagcaaaagaaactattatcagagtcaacagacaacctacagaatgggagaaaatttttgtaatctatccatctgacaaaggtctaatatccaaaaactacaaggaacttaaacaaatttataataaaaaacaatcccattaaaaagtgggcagaggacatgaacaaacacttctcaaaagaagacattcatgtgaccaacaaacatatgaaaaaaagctcaacatcaccggccattagagaaatgaagatcaaaaccacaatgaggtaccatctcatgccagtcagaatgaagattattaaaaagtcaagaaacaacrgatactggtgaggctgtggagaaataggaacacttttacactgttggtgggaatgtaagttagtgcaaccattgtggaagacagtgtggtgattcctcaaagacctagaaccattaatagatttgacccagtaatcccattactgggtatatacccaaaggaatataaatcattctattataaagatacatgcaccagtatgtttactgcagcactattcacaatagcaaagacataga

SEQ ID NO: 762473 - DNA, 621 bp, Homo sapiens
aaacaattgcaacaatagcaaaaattgacatatgggatctaattaaactaaggagcttctgcacagcaaaagaaactattatcagagtcaacagacaacctacagaatgggagaaaatttttgtaatctatccatctgacaaaggtctaatatccaaaaactacaaggaacttaaacaaatttataataaaaaacaatcccattaaaaagtgggcagaggacatgaacaaacacttctcaaaagaagacattcatgtgaccaacaaacatatgaaaaaaagctcaacatcaccggccattagagaaatgaagatcaaaaccacaatgaggtaccatctcatgccagtcagaatgaagattattaaaaagtcaagaaacaacagatactggtgaggctgtggagaaataggaacacttttacactgttggtgggaatgtaagttagtkcaaccattgtggaagacagtgtggtgattcctcaaagacctagaaccattaatagatttgacccagtaatcccattactgggtatatacccaaaggaatataaatcattctattataaagatacatgcaccagtatgtttactgcagcactattcacaatagcaaagacataga

SEQ ID NO: 762474 - DNA, 543 bp, Homo sapiens
tactccctaatactatcctcacttaataaggccagaaactgaagctcagacattaactaacatgtccgaggtagaaacttagaaatgatatgagtcaggattatggacacaggactgtataactccaaacacttagcttttctataatactttgtgacctctaataaaaaacaagttgctaatttttctaggaaattattagaaaacatcgtagtgttttcacttacttgattgtcatatgttagcaatgtagctgtaatctcctgtgacactcaaattatcactctacttcacatacaatttaaagattgaaccccatcttcargtaaaaccaagtacaagcaatcacagaatatacatttcaatgtagtcatgatgataatcttcccagaccagttctcatgttggtgttggatattcctgtgtgcaggaatacatgcctctttaattgagattccccccaccccgcccccattttgttgtcatccttagaagggatttgtattcttggaacataaagtttctttaaaggcttctttcagt

SEQ ID NO: 762475 - DNA, 665 bp, Homo sapiens
ctaccactacaaacaccattattctatattaaaagattctttcaactgaaattttcgtctagaagcacgtttttacatgtgttttacatacacggttcttccttattttcttgtgtcatatttatattatttatattatttatatgagaataatgtttttctaagactgatattgtgtagctatagttatataatgctaatgatttcatttaataaattgcttgaggtttttcaataattataatttttagagctgcagctaaagcatataactatatttccttaaatgtcacatttgaagattggtttgctattagagaactactagaaactttagttatagaaatgattgataatgggaatagtaaatactattatataaatctgaagtttctgaatattccattctttcatttaatgccagacacacaatttaagatagggcaaaagagaactttatttttagttcttatagaacatggatgctaacttattttttcccactracatataagcagataacataaacttaactattttaacagtaacaacatatcactttgtgtaagggtgtgcaatatcaaacgctcctaagtgtgaaggttacctttctaaattacaaatatggataaagcaaaacatcattaacttattaataactcagg

SEQ ID NO: 762476 - DNA, 668 bp, Homo sapiens
tgtgtgtttgtgtgtgtgcataaacatttcctttatccatttttctacaatggacacatagattgtgtccatatcttggctactgtgaataatgctgcaatgaacatgaaggtgcagatatctctccaacatactgatttcgtttcctttggatctatacccagaagtgggactgctggatcgtatggtagttctatttttaattttttgggaaccttcacactgttttcagtgggtagcaaagctatcatcagaactccatgtttaaaagtatctgaaggtacttaaggaatgcacacataggaattcattgaagaaatcagagtagagttaatgtcctcaatacatgcattgaaaattctcaattaatttttcacaagttaggcacacaaacacaggcttgactgagcagatatgaaattgtttgatatwtattagaatttatgtaattgcctcacttcagactttagaagtgtgtccacgaactcagcagatatcctgtctttctaaaaaaattacaaaatattttgatagaaattttaattttaaaatgccattattaaagtgtttttgaagcggaggctgagaaagacactagctacaataactacaacagttaccattcaaataattgtagatagattgccatatctcttaaaacaactttg

SEQ ID NO: 762477 - DNA, 547 bp, Homo sapiens
aatattgagcaaagttagtaaatgaaaagttattagttaatacatatgacaagaatttgtgaaattacatgaacaagtcctaccacaatcagataaccatagcaacagcattgcttcttgacattttctcactaggagcgtccattgctaggaggaaaattgtctgttatatttactgctcaacactgaacttggaaaagttgttggaaatgtatgtagaaagaacacaagtatgtgactatcatatgtttatttttaacgtatgaaaaaattaggtgaataagtgacatatttgatatatctctctaataatatatattatagtaatattacatgtaattacatattaattgtatataaaataatatgttataatatatataattacatattaaragtatataatattatatatagtatatattatatatactttatataatattttatatatatataaaatcaagctttattctaaaaggattaaattgtaattggaaaatgatggaaaataatccattaataattttaaaaatgattaaagatg

SEQ ID NO: 762478 - DNA, 623 bp, Homo sapiens
catccccaaaggctttaccttccctcagttttccaatcaacaacgaacactgatttagaaaaaaatcaacatacttcatcctttacctcagaaaatcttaggaagtgctttagcctgggaagagcatctctgttgggaaaatgaatcatggacggtagtgtctctagccaggaaagtctctctagccaggtacaatgtggcccatcaccaaagggcttgcttagggtccttactcaaatctatatgtttgcatagaattgtaggatgccagaagcgaaaagaaacttagtgatcacctaatttaaaatgttctttttacaaaagaggaaactaaggtcaaagatggaaaaagatgtgtccaaagttacataggactggtagttttagcaaatgtagtacagatagtgtgcatatgctgctctttatctcctttctgttgggtttttgattgacgacagccagctcctayttaccaaagagtaggatacttatggtaattcagtaactcattagcccatttgtaaccatgcagcagttttaggtcacgctggaagggaatgagggccgcacagacagtgacatatacctgagcagacttttgtcagttctgaggcacatacctc

SEQ ID NO: 762479 - DNA, 672 bp, Homo sapiens
tgtttccatttaagacattattttgctcctcgtttgccttctgccatgactgtgaggcctcctcagcaatgtgaaactgagtcaattaagcctctttcatttataaagtacccagtcttgggtatgcatttattagcagtgtgagaacagactaatacaggaggaatggaagaaaattacttcaacatattatagaccatgtttgaaaacagctaccatcatattcaacattgaagaactgaaagctcttcttctaagagcagtaacaagataagaatgcccattcttgttgtttctrttcaacatactactgtaagtcctagctgaagcaattaagccaaaaaaataaaaaataaataaaagagagaaaacagaaaaaagaaaataaatgaaaggcatcataaaggaaaattaaattatttttgtttgcaaatgacatgattgtaaacacagaaaacattaaacacttttacagaaaaacctattagaattaataaataaatgcagcaaagttgcatgacactaaatcaatatacaaaaaaatttctatatactagcaataaaaagaattataaaggaaattaagaaaacaatcccatttatgatagcatcaaaatgaataaaatacttaggatttaactaaggagacaaaagattagttcagtaaaaact

SEQ ID NO: 762480 - DNA, 672 bp, Homo sapiens
tgtttccatttaagacattattttgctcctcgtttgccttctgccatgactgtgaggcctcctcagcaatgtgaaactgagtcaattaagcctctttcatttataaagtacccagtcttgggtatgcatttattagcagtgtgagaacagactaatacaggaggaatggaagaaaattacttcaacatattatagaccatgtttgaaaacagctaccatcatattcaacattgaagaactgaaagctcttcttctaagagcagtaacaagataagaatgcccattcttgttgtttctattcaacatactactgtaagtcctagctgaagcaattaagccaaaaaaatraaaaataaataaaagagagaaaacagaaaaaagaaaataaatgaaaggcatcataaaggaaaattaaattatttttgtttgcaaatgacatgattgtaaacacagaaaacattaaacacttttacagaaaaacctattagaattaataaataaatgcagcaaagttgcatgacactaaatcaatatacaaaaaaatttctatatactagcaataaaaagaattataaaggaaattaagaaaacaatcccatttatgatagcatcaaaatgaataaaatacttaggatttaactaaggagacaaaagattagttcagtaaaaact

SEQ ID NO: 762481 - DNA, 589 bp, Homo sapiens
gaagtaggcatggtccaagacaggaagggatatttaagctgtgttctaaaagtttggctcttatcttgcaggtaatggggaaccatcaaatgattttaagctaaggaatgatacgaccattgatatgatttggcactgtgtccccacccaaatctcatctgaattttcatccccacatgtcaagggaggaacctggtgrgaggtgattgaatcatggaggcagtttcccacatggtgttctcatgatagtgagttctcacaacatctgatggtttaaaagtgtaacacttttttcctcactctctttcacctgccaccacgtaaggcatgccttgcttccccttcaccttccgccatgattgtaagtttactgaggtctccccagccacgtggaactgtgagccaattaaacccctttgctttataaattacccagtcttgagtcttgagtagtatctttctagcagtgtgaaaatggacaaatacaaccacatatatatatatatatataaaatattacttattaaaacttatgtgacatttatatattttagaaaggtgattgcagatataatacagaagatgaacc

SEQ ID NO: 762482 - DNA, 656 bp, Homo sapiens
atcttacctcttgggctgccattttctattaattctttttgcctggcaggaaataaaaaagttgatataagctggatggctgtaaagatttttaacagacaaaaacaaacaaggcttactttaaaataagtaattatcccaagataaaagaataaaagaaagttttaaaaagacaaccccaagcgtaaaataaaagacacacacacamacacaacacaacacaacacaacacaacacacaaaaaaaaaccacgtagctatgactctctgaatgggaaagagcacggtctctatagctgggtcagcaagaataggaaagcccagacctgtcccctgactctgggcaccacccactgtggaggggcacaggggcggcctttccttggggagggggcagccagcaagtgggaattttacagggtcaggattgagtaaggaaaggagtagacacacttcttaaaaacacagctgctgagatcgcaccactgcactccagcttgggcgacagtgcgagactctgtctcacacaaaacaacacaacacaaaaaaacacaacacacagctgcccatgaggactcaggtggggagggggcatcaaacccacaatagaaaggtcagaggaatcaggagctgcgccctcctccctcatatcttgcc

SEQ ID NO: 762483 - DNA, 656 bp, Homo sapiens
atcttacctcttgggctgccattttctattaattctttttgcctggcaggaaataaaaaagttgatataagctggatggctgtaaagatttttaacagacaaaaacaaacaaggcttactttaaaataagtaattatcccaagataaaagaataaaagaaagttttaaaaagacaaccccaagcgtaaaataaaagacacacacacacacacaacacaacacaacacaacacaacamacaaaaaaaaaccacgtagctatgactctctgaatgggaaagagcacggtctctatagctgggtcagcaagaataggaaagcccagacctgtcccctgactctgggcaccacccactgtggaggggcacaggggcggcctttccttggggagggggcagccagcaagtgggaattttacagggtcaggattgagtaaggaaaggagtagacacacttcttaaaaacacagctgctgagatcgcaccactgcactccagcttgggcgacagtgcgagactctgtctcacacaaaacaacacaacacaaaaaaacacaacacacagctgcccatgaggactcaggtggggagggggcatcaaacccacaatagaaaggtcagaggaatcaggagctgcgccctcctccctcatatcttgcc

SEQ ID NO: 762484 - DNA, 656 bp, Homo sapiens
atcttacctcttgggctgccattttctattaattctttttgcctggcaggaaataaaaaagttgatataagctggatggctgtaaagatttttaacagacaaaaacaaacaaggcttactttaaaataagtaattatcccaagataaaagaataaaagaaagttttaaaaagacaaccccaagcgtaaaataaaagacacacacacacacacaacacaacacaacacaacacaacacacaaaaaaaaaccacgtagctatgactctctgaatgggaaagagcacggtctctatagctgggtcagcaagaataggaaagcccagacctgtcccctgactctgggcaccacccactgtggaggggcasaggggcggcctttccttggggagggggcagccagcaagtgggaattttacagggtcaggattgagtaaggaaaggagtagacacacttcttaaaaacacagctgctgagatcgcaccactgcactccagcttgggcgacagtgcgagactctgtctcacacaaaacaacacaacacaaaaaaacacaacacacagctgcccatgaggactcaggtggggagggggcatcaaacccacaatagaaaggtcagaggaatcaggagctgcgccctcctccctcatatcttgcc

SEQ ID NO: 762485 - DNA, 628 bp, Homo sapiens
gaaaaataagtcaagaaggaagttatcatcagggagcggtggctcacgcctgtaatcctatacttcgggaggccgaggtgggtggatcacgaggtcagaagttcaagaccagcctggccaagatggtgaaaccccatctctactaaaaatacaaaaaattagccaggcatggktgtgggcacctgtaatcccagctactcgggagactgaggcagagaattgcttgaacccacgaggcagaggttgcagtgagcacagatcacaccactgtactctagcctgggtgacagagtgagacattatctcaaaaaaaaaaaagaaggaagttatcactatttgcaaattatgaaatgaattcatggaaaagtcaagaaaccaactgaaaaattactaccgttaataaggaagtccaataaaggtggcaaggtacaaactacaatacagaaatcaaatttaaagcagtagcaaaaaccaataaaatacctacaagaaacttaagtgttgcaggaagtcagggaccccgaacagagggacgagctggagccaccgcagaggaacataaattatgtagatttcattttaatatggacatatatcagttcccaaaattaatacttttacaagttct

SEQ ID NO: 762486 - DNA, 628 bp, Homo sapiens
gaaaaataagtcaagaaggaagttatcatcagggagcggtggctcacgcctgtaatcctatacttcgggaggccgaggtgggtggatcacgaggtcagaagttcaagaccagcctggccaagatggtgaaaccccatctctactaaaaatacaaaaaattagccaggcatgggtgtgggcacctgtaatcccagctactcgggagactgaggcagagaattgcttgaacccasgaggcagaggttgcagtgagcacagatcacaccactgtactctagcctgggtgacagagtgagacattatctcaaaaaaaaaaaagaaggaagttatcactatttgcaaattatgaaatgaattcatggaaaagtcaagaaaccaactgaaaaattactaccgttaataaggaagtccaataaaggtggcaaggtacaaactacaatacagaaatcaaatttaaagcagtagcaaaaaccaataaaatacctacaagaaacttaagtgttgcaggaagtcagggaccccgaacagagggacgagctggagccaccgcagaggaacataaattatgtagatttcattttaatatggacatatatcagttcccaaaattaatacttttacaagttct

SEQ ID NO: 762487 - DNA, 635 bp, Homo sapiens
aacttccagtgcactaaaagtcccatctaattcactacctaaatattggaggtggcactagaatttacatcattagcaaatctacataaaacaaaaggcctttttttctgaggattatatggttaaattctttcttcttttttctttgagatggagtctcactctgtcacccaggctggagtgcagtggcatgatctcggctcattgctacttctgcttctcgggtagaagtgattctcctgcctcagcctcccaagtagctgggattacaggtgcccagcacgatgcccagctaatttttgtacatttagtagagacggggtttcaccatgttggccaggctrgtctcgaactcctgacctcaagtgatccacccatctcagcctcccaaagtgctgggataacaggcatgaaccaccaaccccagccaaactctttttaagagtcaaaaaaaggaaccatccatctccatacctcgtcaaaaaaactgcttgggtagtcaccttctatcaggcacactgaaaataagaaaaagtaaatgtctaaatttctaaaataaatgcagagcttagttctactgtcctcaccattttagttttgtgcctaactcactccaggtacttgttaacccatta

SEQ ID NO: 762488 - DNA, 590 bp, Homo sapiens
agtgtaaatggcttaaatgctccacttaaaagaaacagaatagcagaatggataagaagtatctgctgctttcaagagacttacctaacacataaggactcagataaacttaaggtaaaggggtgtaaaaagacagcccacgcaaatgaacaccaaaactgagcaggagtagctatttttataacagacaaaacaaactttaaagcaacagcagttaaaaaggacagaaaaaaatagcaaaaaccacaattacttttgcaccaacctaatataaaaggccttgtccaaaacgaaaatatcacaatcctaaatattctatgcacctaacacwggagctcctaaatttataaaacaattactactagacataagtaacgagatagacagcaacaaaaataatagtggaggacttcaacactccactgataggactagacaggtcatcaagacagaaagtcaacaaacaaacaatggatttaaactatgccctggaacaaatggacttaacatatttacaaaatattctacccaacaaacacagaatatacattctattcatcagtgtatggaactttctccaagatagacca

SEQ ID NO: 762489 - DNA, 625 bp, Homo sapiens
ggaaacacaaagaacagagtaacaatttaaactctctgcagggatgcaatcaacaaaatccaggctggagggaaactataggacaaacaatctggtctcttcaataactaaataacaaatggaaaaaagtaagtgagccttttaaaatattaaccaacacaatgtgtggtccttatttgaattctgatttaagcaaatttcaaaaaaaaaaaactatagcacttatgagacaactggaaattgaacactgcctgaatatttggtggtattaaagaaatattgctaattttccagggcatgtgataacagtattatatttagaacttttttaaaggtccttatcttttatagatagagactaaaacrtttatggaggaactgataggatatctgaaatctgcttcaaaatattagatgaggagctggtagttggggtttggatggtgtagaagtgaccacaggttgatggattaaggaaaggtgatggttatgggggctgagggggtcacagaaatagaaacactattctgtttatatttctccatgtccaaaattttccataaaatttttctagtacatgccaaaaaattaaactaaaatctgagcagtatagttataaatatct

SEQ ID NO: 762490 - DNA, 504 bp, Homo sapiens
tttttattgtaatatgcataaaaccttgctgattagagggaaagaatgccatattttttatcttcaagtttagctgtttcttgtttttgtagcagttaagaatcgagattaatttttgagtggatttcttaactccaacttcatttctatttcagcaccaccaaattatgcagatgtggtaycagaggaagaattctctagacacattcctccttaccctcaaccccctaactgtgagggagaagtgtgctgtcctgtgtttgcctgtatacaagaattccggtttcaacccccacctctttattcagaggtaagcaaagcaaaagaaaattagacttttactgtattattttcaaataatcattttttgtcatccgttcattagagtgtctgttgctgactcataattagtaagggatacatttaaatttgtttatacagtggtaatagattatcgctgattcatttgccagatttttttactattgtccttgtgatctatgg

SEQ ID NO: 762491 - DNA, 559 bp, Homo sapiens
tccggcctgggcgacagtacaagactctgtctcaaaaaaacaaaaacaaaaacaaaaaaaaaaacaaatagaacatggcagagaggcatttccattttccacttgctctcttaaattgcttgctttgtgggagttagcatcatgctgatatttaagcagcctgtagagagaggccctcagggagaataactgaggcctccagccaactaccaacttgccagtcacatgaacaaatcaccttgaaagtgaatcctacctcagattattacagcctggccaacatcttctctgaaacctcataagaggccccaagtcagaacctctcagctaaaattgcaatggatttctgatcttcaaaaactgtgtgagataagaaatgtttttyattagtttaagttactacattttttgcagtaatcggatgtgcaaaatgaatgatgggtacaatggctatgataacctcagctggaataactcatcactgctctacatggactctagtcttccatcatgctagtccagatctgttctcagggctttacaaatgttttggtcaggg

SEQ ID NO: 762492 - DNA, 480 bp, Homo sapiens
ctagaactgcatgcaaatgacagtgcactaaaatgaagaaaacctgtccttaagaatcacaatttcaaaaaatggcgcaggcatgtattacacaaaatctgtaaatgaatccactcaatcatgaagctcctcatatagayatgattaaaactcatgcagttcttacaaaaatggaaaataacttcatggagtgcaaaacaaatcaaattcatattgttttgtcaagatcccaatgtaaaaagtcttgtaatttagaatgcattggagatgttcagacacgacaaaaaaaaaatcagcgagtaattgttaagtgcaacagacttacttggtgtgactccaggacactaagtgcgatcatattccagaattgcagaagaaaaacaacttcccctgctcttttcacacattcttttacatgaaatgcgggagacaaaagttggctaatcatcaagaaacgatgatgcttcttaatgcgatttc

SEQ ID NO: 762493 - DNA, 480 bp, Homo sapiens
ctagaactgcatgcaaatgacagtgcactaaaatgaagaaaacctgtccttaagaatcacaatttcaaaaaatggcgcaggcatgtattacacaaaatctgtaaatgaatccactcaatcatgaagctcctcatatagacatgattaaaactcatgcagttcttacaaaaatggaaaataacttcatggagtgcaaaacaaatcaaattcatattgttttgtcaagatcccartgtaaaaagtcttgtaatttagaatgcattggagatgttcagacacgacaaaaaaaaaatcagcgagtaattgttaagtgcaacagacttacttggtgtgactccaggacactaagtgcgatcatattccagaattgcagaagaaaaacaacttcccctgctcttttcacacattcttttacatgaaatgcgggagacaaaagttggctaatcatcaagaaacgatgatgcttcttaatgcgatttc

SEQ ID NO: 762494 - DNA, 618 bp, Homo sapiens
tattgtttttctattatttaatcatttttattattataaatctttaatatcatatctcattgcccttctctgttagtgagggttaaaccaggaaattagacccctagaactggaacacacacacacacacacgcacacacatacatcatataatttataggaatttggtttatataattgtggcagctgattaaagartttctgtaaagctgttgtgctgttatcttcacatctgatactggagtttcaagcccacaaggcaggcaggcagaaagaaaaaatgggtgtaaagggcagaacagcaagatccagtaggattaaaggagacgtgtcacttcttagtgcctctgaatttgatggtgtcattgtcccccagaaactgagaccctttgttatgaagctaaatgcatgaacttgacccaggaattagagaagctgagggatactctaggggaaggtggagcggttgctggcccagttgctgcttcacacaaaggaggcaagtcagcagatcagcaacagtgtatgagctacaaaatgtcggtttcttccttgcaccctccaaacccacttaaaaatcttctttgtggtccattcaagccagaaacatacaagaaa

SEQ ID NO: 762495 - DNA, 618 bp, Homo sapiens
tattgtttttctattatttaatcatttttattattataaatctttaatatcatatctcattgcccttctctgttagtgagggttaaaccaggaaattagacccctagaactggaacacacacacacacacacgcacacacatacatcatataatttataggaatttggtttatataattgtggcagctgattaaagaatttctgtaaagctgttgtgctgttatcttcacatctgatactggagtttcaagcccacaaggcaggcaggcagaaagaaaaaatgggtgtaaagggcagaacagcaagatccagtaggattaaaggagacgtgtcacttcttagtgcctctgaatttgatggtrtcattgtcccccagaaactgagaccctttgttatgaagctaaatgcatgaacttgacccaggaattagagaagctgagggatactctaggggaaggtggagcggttgctggcccagttgctgcttcacacaaaggaggcaagtcagcagatcagcaacagtgtatgagctacaaaatgtcggtttcttccttgcaccctccaaacccacttaaaaatcttctttgtggtccattcaagccagaaacatacaagaaa

SEQ ID NO: 762496 - DNA, 632 bp, Homo sapiens
tacattttctccggaataccttccaactccaggcagctcatacctttcagtggcttctgggcacaggcacgtgctccatatttggggcagggactgtgtcttatatgatattttaatctcatatgatattttaatctcacttgaagtatcttgcaaasctgggaaactggtaggaactaattaaatgcttttacagagaaggaaatataattttatatgatttctattaaatacaagtagacaaaaataatgcctctgtgtaaaaccctactctccagcattttaatgtgtcattccttttctgcctgttatggcaatgtctgcccaaggacttttgcctgagatgtaatcatatgcaattatcattgtgtttttgtttaatccaaatacagataattcagtattaatattcttccaggaagactttttcttttgtatttttttctcttagagggagaaagcctcttacatgctgtgtagagtgggtggattctcactttgctgaatgtcagtttctcccttaaagtagggaaaatggtaatactcctttcatagagctgttgtgaggatgaagtaagctagaaaatagctcattttgattcaatggatatgacatcaaggcacaggcaaga

SEQ ID NO: 762497 - DNA, 632 bp, Homo sapiens
tacattttctccggaataccttccaactccaggcagctcatacctttcagtggcttctgggcacaggcacgtgctccatatttggggcagggactgtgtcttatatgatattttaatctcatatgatattttaatctcacttgaagtatcttgcaaagctgggaaactggtaggaactaattaaatgcttttacagagaaggaaatataattttatatgatttctattaaatacaagtagacaaaaataatgcctctgtgtaaaaccctactctccagcattttaatgtgtcattccttttctgcctgttatggcaatgtctgcccaaggactyttgcctgagatgtaatcatatgcaattatcattgtgtttttgtttaatccaaatacagataattcagtattaatattcttccaggaagactttttcttttgtatttttttctcttagagggagaaagcctcttacatgctgtgtagagtgggtggattctcactttgctgaatgtcagtttctcccttaaagtagggaaaatggtaatactcctttcatagagctgttgtgaggatgaagtaagctagaaaatagctcattttgattcaatggatatgacatcaaggcacaggcaaga

SEQ ID NO: 762498 - DNA, 621 bp, Homo sapiens
tctctgaggaggtaataaaacaacttatttcccagtcatcatctgaaggctgaagaagtgctttgggttgacctctggtaaagtcgttttatggcaggaggtttctgtgtggaagacaaagctttacagctgatggatgtctttccacygccggtgaatcaccacagtgaacctcagtgtcgctgacgaggaggctggcccccttagagctttgctccactctgtccctgtcgggctgtttactcagtgttgagcctctggatttgggcttcaataccaccacgcgatgcagaggacaccgagaagtcaatcagacctgtccacacccgagcagccttcagagccacctcctgtgattcgggggcatcctggggtgggacggtccatgtctctgcagctcctgtgacctcaccaggctgtaaacatttgacttgcattctttctgggctaaattgtttacctacagagaagtccaaggttcgggtcccaaacccaggtgagtgtaagaacaccctgaggaggcttactgagtatggcctgtctctccaggaggaaggaggacccaggacttcacccccggctcctgatcacgagaccagtgtcgtaaatccagctctgaga

SEQ ID NO: 762499 - DNA, 621 bp, Homo sapiens
tctctgaggaggtaataaaacaacttatttcccagtcatcatctgaaggctgaagaagtgctttgggttgacctctggtaaagtcgttttatggcaggaggtttctgtgtggaagacaaagctttacagctgatggatgtctttccaccgccggtgaatcaccacagtgaacctcagtgtcgctgacgaggaggctggcccccttagagctttgctccactctgtccctgtcgggctgtttactcagtgttgagcctctggatttgggcttcaataccaccacgcgatgcagaggacaccgagaagtcartcagacctgtccacacccgagcagccttcagagccacctcctgtgattcgggggcatcctggggtgggacggtccatgtctctgcagctcctgtgacctcaccaggctgtaaacatttgacttgcattctttctgggctaaattgtttacctacagagaagtccaaggttcgggtcccaaacccaggtgagtgtaagaacaccctgaggaggcttactgagtatggcctgtctctccaggaggaaggaggacccaggacttcacccccggctcctgatcacgagaccagtgtcgtaaatccagctctgaga

SEQ ID NO: 762500 - DNA, 621 bp, Homo sapiens
tctctgaggaggtaataaaacaacttatttcccagtcatcatctgaaggctgaagaagtgctttgggttgacctctggtaaagtcgttttatggcaggaggtttctgtgtggaagacaaagctttacagctgatggatgtctttccaccgccggtgaatcaccacagtgaacctcagtgtcgctgacgaggaggctggcccccttagagctttgctccactctgtccctgtcgggctgtttactcagtgttgagcctctggatttgggcttcaataccaccacgcgatgcagaggacaccgagaagtcaatcagacctgtccacacccgagcagccttcagagccacctcctgtgattcgggggcatcctggggtgggacggtccatgtctctgcagctcctgtgacctcaccaggctgtaaacatttgacttgcattctttctgggctaaattgtttacctacagagaagtccaaggttcggktcccaaacccaggtgagtgtaagaacaccctgaggaggcttactgagtatggcctgtctctccaggaggaaggaggacccaggacttcacccccggctcctgatcacgagaccagtgtcgtaaatccagctctgaga

SEQ ID NO: 762501 - DNA, 646 bp, Homo sapiens
aaaagagtggaagatctccggagctttccgacagaaagaaggaaaaacagctgccacggggtcacagcccggacccgtgggcacagggccggcaccttgaggccacatcccgagaccaggctgcctccagggtgggacagagaagccaccgaggtcttgtccttcccacctggaggaagccagctcccatctggaaccccagctcgggctcacccatgtacggcttggtgcctgctaatgccgtcgcccgctccccgtccttgatgatggtggcaatgttgaagtcggtcaggtgtgcatgtcctgtgcagagasgggtcaggtgtggctgtcccaggaccagagatgcatccttgcgtgcaggatcctcctcccctgacaggcccatccctgccaccacccacctgggctgcccacacccaaccccacacacctctctcatccaggagaatgttgtcaggcttgacatctctagaaagagcagaaagtgggaaggtgagttgggaatctgccctgtttctgccctggaatctctgtcacaatccctggagtccccaggacatcccaccaacccactcgaggcagaggcctgggagcttgacttggtccttggatgatgctaggacctcacacccctgcgtggggg

SEQ ID NO: 762502 - DNA, 646 bp, Homo sapiens
aaaagagtggaagatctccggagctttccgacagaaagaaggaaaaacagctgccacggggtcacagcccggacccgtgggcacagggccggcaccttgaggccacatcccgagaccaggctgcctccagggtgggacagagaagccaccgaggtcttgtccttcccacctggaggaagccagctcccatctggaaccccagctcgggctcacccatgtacggcttggtgcctgctaatgccgtcgcccgctccccgtccttgatgatggtggcaatgttgaagtcggtcaggtgtgcatgtcctgtgcagagaggggtcaggtgtggctgtcccaggaccagagatgcatccttgcgtgcaggatcctcctcccctgacaggcccatccctgccaccacccacctgggctgcccacacccaacyccacacacctctctcatccaggagaatgttgtcaggcttgacatctctagaaagagcagaaagtgggaaggtgagttgggaatctgccctgtttctgccctggaatctctgtcacaatccctggagtccccaggacatcccaccaacccactcgaggcagaggcctgggagcttgacttggtccttggatgatgctaggacctcacacccctgcgtggggg

SEQ ID NO: 762503 - DNA, 660 bp, Homo sapiens
gcctcctaaagtactggaattacaggcatgagccaccacgcctagccctcacatttttctagtatttaatacaaacaaatatccttaggttaagatgcaaaatgaaacagacatttggtttggggagaggctttgccctctgaggctccagcccccagaacactgtgtcccctcccggcaaggccgggtgcccctgcgtgctagtgggtgcttccccacrtggcctggagtccaccggggcctcaaaggctgtgccttgagtaactcgttcctcaggatgatgattctcacaggcggcagtgagtgcccagtggaagggcatgggtgtcaccgcctacgaggggcggggcagggctagggtggatgtgggatgacacacggcccgtctaaggcgactgctgtccagagggacccggtctctcctggcaattgcagagcatctgtgggctcctcctcaggccgggaccagcacatgccaaccacaggggcatcccaatgccagcctcctgttctctccggaaggatgaggcagaaggtggggccactgaccatttcattcagccctcggagggagcccgtcccttcagtgagctccaccgcatagcagatttagcaaaaagtctcactctgagctgggggtcgggagccgggcccccagga

SEQ ID NO: 762504 - DNA, 635 bp, Homo sapiens
tcactcttagattatcttgcaaagcttgtctttttggctttcttgtatctgtattctctcaaaaaaaaaatctttcctacagttgcaaagtaaaccatctgaatataccatagttgtctataactcaatggttcttaattgtcattctcgttacacctaaacccccactcttagttttagtctctccataacttagattcaaattctcttcaacactgttttccttacctcctggcaggaattgtcagttatacttttattatgctggctcttgtttctgtagctttatcctggtcccaaagtggaaaaaaattatcttcttctttctattcattaatttcaaggtggaatatgtctacactttctctaatacctatatcagagtctttcctctggcagggaggaccacaatctttcttcaggattctgtccattttcatcacttcccttaaatycttctgaagtcacattatggctcctttcccatggccactcttacatctctgcaacccatctttcccgtgatgacagcctaatcttttaaaatataaattgtattatattgcttcactcttcaaaaattttacttatggctatagtatagagttcaaactcttcattgtttccaaaagtct

SEQ ID NO: 762505 - DNA, 635 bp, Homo sapiens
tcactcttagattatcttgcaaagcttgtctttttggctttcttgtatctgtattctctcaaaaaaaaaatctttcctacagttgcaaagtaaaccatctgaatataccatagttgtctataactcaatggttcttaattgtcattctcgttacacctaaacccccactcttagttttagtctctccataacttagattcaaattctcttcaacactgttttccttacctcctggcaggaattgtcagttatacttttattatgctggctcttgtttctgtagctttatcctggtcccaaagtggaaaaaaattatcttcttctttctattcattaatttcaaggtggaatatgtctacactttctctaatacctatatcagagtctttcctctggcagggaggaccacaatctttcttcaggattctgtccattttcatcacttcccttaaatcyttctgaagtcacattatggctcctttcccatggccactcttacatctctgcaacccatctttcccgtgatgacagcctaatcttttaaaatataaattgtattatattgcttcactcttcaaaaattttacttatggctatagtatagagttcaaactcttcattgtttccaaaagtct

SEQ ID NO: 762506 - DNA, 618 bp, Homo sapiens
tctgaccaaggtctccagcatgctaaccacctcttgtttttttgcctgatcagcatgaatttatcaatgtcatagtgttttgagggaagtctggattgtgcagctctctttttcagaatattttatgacaaatgattaggatagttaacgtagcctggagcaaaactgtaatattgttgtccatcccattgattttctccaattttcatgtatgttgatctcaattttataactggggactacgaaaatgacctctatctggattcatgggcccagcagaccccccagtaaacggagcttcaaccaggactcwacttataagctcatgcacttacctattatttattcaattgttgactttatgtctccccaactagaatacaagctctttaagaactatgatttcgtcagctttagtccctactatacccccagcacctttaacaatgcctggcacacagtaggtgctcaataattgaatgaatctattgcattattattttaatttgcattacttcaattatgagtaagattgaatttcttattctgtaaactgtcttttccttaccatcattgttattaaaatatattaatagtaataataataatgatatattt

SEQ ID NO: 762507 - DNA, 597 bp, Homo sapiens
tgagtacgtggtctgcatgatgtctaacattgttagagcactgcattttctgattgcagatgaaaaccagatgcacaagaccccaaacctttttttttttaacttttaagttcaggagtacatgtgcaggtttgttatataggtaaatttgtgtcacaggggtttgttttacagattatttcgtcacccaggtattacgtctactacctatttatttttcctgatcttctccctcctctcaacttccaccctccaataggctcctgtgtctgttgttttcctctatgtgtccatgtgttctcatcatttagctcccacttataagtgagaacatgcaggatttgattttctgttcctatgttactttgctaaggataatggccttcagctccatccatgttcctgcaaaggacatgatcttgttcttttttatggctgcataatattcyttgtatatatgtaccacattttctttatccagattaccgttgatgggcatttaggttgattccatgtctttgctattgtgactagtgctgcacatgaacatatgtgtgcatgtgtctttatggtagaacgatttatattcctttgggt

SEQ ID NO: 762508 - DNA, 597 bp, Homo sapiens
tgagtacgtggtctgcatgatgtctaacattgttagagcactgcattttctgattgcagatgaaaaccagatgcacaagaccccaaacctttttttttttaacttttaagttcaggagtacatgtgcaggtttgttatataggtaaatttgtgtcacaggggtttgttttacagattatttcgtcacccaggtattacgtctactacctatttatttttcctgatcttctccctcctctcaacttccaccctccaataggctcctgtgtctgttgttttcctctatgtgtccatgtgttctcatcatttagctcccacttataagtgagaacatgcaggatttgattttctgttcctatgttactttgctaaggataatggccttcagctccatccatgttcctgcaaaggacatgatcttgttcttttttatggctgcataatattcctkgtatatatgtaccacattttctttatccagattaccgttgatgggcatttaggttgattccatgtctttgctattgtgactagtgctgcacatgaacatatgtgtgcatgtgtctttatggtagaacgatttatattcctttgggt

SEQ ID NO: 762509 - DNA, 536 bp, Homo sapiens
gcagagggagaaaagaagctttcttaactcagagggagtttccacttaatgccgacagctactcttaggtgtgagtggcggctcagaggctgcaggggaggcaatgctaagcatagttagagcaaaaaggctgggcctttctccaaagtccctaagagatggagagaagaggaattactggcctacccagccctaaagtacacacaygaggagcagatacattgttcaaaggctgaacctgtttttttaaaaaaatgatgtctggtgtgaatgactttgatagcagccaggaacaggaagtagagtggcagctgcacagatgaatccccgagaactgagtttttcctgtagcaggaaccagatctgggcagattaaatcttgctctctctgaaacaccttggggagacttgttcccagagtgaagaatggggcattctcttagctgacagaaggggcacatggccatcccgagaggtgagtgttggggaacaaatgaggttatcttggaactggcattccaggaagtctagaaagt

SEQ ID NO: 762510 - DNA, 536 bp, Homo sapiens
gcagagggagaaaagaagctttcttaactcagagggagtttccacttaatgccgacagctactcttaggtgtgagtggcggctcagaggctgcaggggaggcaatgctaagcatagttagagcaaaaaggctgggcctttctccaaagtccctaagagatggagagaagaggaattactggcctacccagccctaaagtacacacatgaggagcagatacattgttcaaaggctgaacctgtttttttaaaaaaaygatgtctggtgtgaatgactttgatagcagccaggaacaggaagtagagtggcagctgcacagatgaatccccgagaactgagtttttcctgtagcaggaaccagatctgggcagattaaatcttgctctctctgaaacaccttggggagacttgttcccagagtgaagaatggggcattctcttagctgacagaaggggcacatggccatcccgagaggtgagtgttggggaacaaatgaggttatcttggaactggcattccaggaagtctagaaagt

SEQ ID NO: 762511 - DNA, 623 bp, Homo sapiens
tggcaatagacactaaaatcctgcccaaagtcacagtcgtgggtagtgtgaagtaggggtgtgttggggctcagaaatcaatgcctcaaaatgaaggccttggaagcacccttagaagcaaaaccgtttctctgcccttccgccctatcagtgccatacttgccctaggctagtcatagaaactagaatccctctgyccccaaggcaggtcatagaaaccagaatcttttctccccaaagctagtcataaaactgaaaaatactactttaattttccctccacttttctgcataaaaacaggctataaagaaattatctgacccaccttgtttgactatgagtcgtataaccgccccccccattccagacagggtcctgccccatacccagaaggaaggaatggtgctcaggaggccaagaagaatccagacagacaggctttgctgggcgtccccattcagtctattagcattggatcatactcttttcatccagtcatatttctacatggctgtccatactgtggtgtacctaagcataaaaatggacaatttctcttttatctttgagtcttcattctgaaggcgcccatatatacatgttaaatagatgtgtatgcctt

SEQ ID NO: 762512 - DNA, 634 bp, Homo sapiens
  misc_feature 575: n = A,T,C or G
agctacagttgccattctactttttaactcttgcaactcaactatactttcaccaaaaaaaaacacctttcctgagatgtttctggatatgtgagcttccttacagttcaccttatcaatgattatttcttttttctgttttttccattctatatttgagaattaaattcaaatttatgttttaaaaggttacagaaataaaacagagaatattctgtatgctttacccagttagattcattgggattttgtcaatttgcttcatcaatttctctgtgggtagactaagtatatacatatatatatttcactgaaccagttgagagcaagttgcatacatcttgrcctttgttatctctaggtgttttttatctctagatatctccgtgttaatttctgaagaatagacattttctttacataaccacagtaatttttaatttcagtaaatttaacattggtatcatacgtttattcaattaatcaaccatattccaatttggtcaactaatacaatagtttttttatagaaacttttttgtctagtacagaatccaatccagaactctgtatgncatgtatttgacataacagtttaggctcctctaatttaatttctcagtgtcattactga

SEQ ID NO: 762513 - DNA, 634 bp, Homo sapiens
  misc_feature 575: n = A,T,C or G
agctacagttgccattctactttttaactcttgcaactcaactatactttcaccaaaaaaaaacacctttcctgagatgtttctggatatgtgagcttccttacagttcaccttatcaatgattatttcttttttctgttttttccattctatatttgagaattaaattcaaatttatgttttaaaaggttacagaaataaaacagagaatattctgtatgctttacccagttagattcattgggattttgtcaatttgcttcatcaatttctctgtgggtagactaagtatatacatatatatatttcactgaaccagttgagagcaagttgcatacatcttggcctttgttatctctaggtkttttttatctctagatatctccgtgttaatttctgaagaatagacattttctttacataaccacagtaatttttaatttcagtaaatttaacattggtatcatacgtttattcaattaatcaaccatattccaatttggtcaactaatacaatagtttttttatagaaacttttttgtctagtacagaatccaatccagaactctgtatgncatgtatttgacataacagtttaggctcctctaatttaatttctcagtgtcattactga

SEQ ID NO: 762514 - DNA, 634 bp, Homo sapiens
  misc_feature 575: n = A,T,C or G
agctacagttgccattctactttttaactcttgcaactcaactatactttcaccaaaaaaaaacacctttcctgagatgtttctggatatgtgagcttccttacagttcaccttatcaatgattatttcttttttctgttttttccattctatatttgagaattaaattcaaatttatgttttaaaaggttacagaaataaaacagagaatattctgtatgctttacccagttagattcattgggattttgtcaatttgcttcatcaatttctctgtgggtagactaagtatatacatatatatatttcactgaaccagttgagagcaagttgcatacatcttggcctttgttatctctaggtgttttttatctctagatatctccgtgttaatttcygaagaatagacattttctttacataaccacagtaatttttaatttcagtaaatttaacattggtatcatacgtttattcaattaatcaaccatattccaatttggtcaactaatacaatagtttttttatagaaacttttttgtctagtacagaatccaatccagaactctgtatgncatgtatttgacataacagtttaggctcctctaatttaatttctcagtgtcattactga

SEQ ID NO: 762515 - DNA, 642 bp, Homo sapiens
tctcctaaacttcgtgtagtctgaggctaaaaaataaataatactaaataaggtcaaatgtcatctgcttaagcttaattgacaactctgtcttcccagatataaaaatacactgtcagcactttttaaataattaatcctcgggtcatctaagccatgagtgggagagaattgcaaaattaaccagaagggagggctaaaaactacaagacagatcatatttccaattcttgacagaaaacattgagttattttataagcaattccctgtatagaggtgatgcttgaatgaagaggagcaaakagtgcagtctactacttcaattatctgactaagggaggacaattcaatacataagacctaagtaccaattaggtaaatgaaaaactcaagcatgctacacaatttcagggcagaaagacactcagaaaggcaacagagctctgcaattgcaggctgatcttcagccacactgacacagagaacctgggaaagatttgaccctttggagatgctgctgaaggttattagggccctattagagagcctgagagaacaacaatagcatttaaagggactctataaataaggttccattttcagtatagatgagattatttttaaaaataccatactgaaag

SEQ ID NO: 762516 - DNA, 593 bp, Homo sapiens
aacacagtatcaaaaaacactggcaacacagtacactgtagagtatctgttgtttaccttcgtgactgcatggctggctggcaactgtggcttactgccactgcccagcattgcaagagactatcacactgcatattgctagccaaggaaaagatcaaaatttaaaatccaaagtatgatttctactgaatgtgtattgctttcctaccatcataaagtcaaaccatggtaagcctgtagctataagagttttacattacatattaagtagcataatattagttgaacatgtataatgagttagaaatgtgtattataaaaagtaggaaaattatgaaaaataaaataagttttatatataaaacatatatgtgtgtttgtgtatatacatatatatatccagcaatagagataaaatgaaatattaaaaarcactaattaaatcaaaagaagcagaaaaaaagaaacaaacaatagcaaggagagatgagtctaatagaaaaccaatagcaaataatagatttaaattcagccatactgataattatgttaaatgtaagtggtctaaacactcgaattaaaagtcagagatt

SEQ ID NO: 762517 - DNA, 609 bp, Homo sapiens
tagagtggaaaataagacaaaattgtaaatggcaaggctattatattctaggaaaatctgggaagctctcagacaagagccaagtggacaaatagacagaatctggacatatggaaattgggagagaagagagagagcaagtatacttcactcagaatacactttcacccactcacactcatgactccaatcccaataataatttctattattttctaaagttacaaataatagcttctaggggccgggcatggtkgctcacacctgtaatcccagcactttgggaagccaaagggagcagatcatctgaggtcaggagttcgagaccagcctagccaacatggcaaaaccccgtctctactaaaaatacaaaaattagccgggtgtggtggcacatgcctataatcccagctactatggaggctgaggcaggagaatcacttgaacccacgaggaggaggttgcagtgagctgagatcacaccactgcactccagcctgggcaacagagtaagactccgtcccaaaaataaataaataaataaaataatagttcctttgtagatgaagacagtgttctgtttttcatctacagtgatgtatcttttaa

SEQ ID NO: 762518 - DNA, 531 bp, Homo sapiens
aaaagaaacctcactccataatgattccataatttaaagtttttgtattgttccattaacaattttaaaaaggcaaaatctcttaaacagtcacaaagtaaggatgcaattttacccacaaatcctcataatgatctgaacttctgagcaaacaataccaactaaayataaaagcaacatactaaactgtctcttaaaacattttcttacctgaaacacaccattatttaaatcagcctatttacactgaatactcagaagtctttccttcaagagtgaatgtctcttccaagttgcttgtactatccaatatcctaaggcttccaagagttattaatattgtatccattaaatataagtcagcatcaactgtaagactgcattgtttaaaaaaaaaaaaaaaaaagaaatgcggcaagctgcaattctaggtcgctattgatgtttcaaagactttccaatttcagagatattaaaatgtggagaaaaacataatgatgatatttattgacgttcttaaacttggtagca

SEQ ID NO: 762519 - DNA, 532 bp, Homo sapiens
ccaccttgtcctacctggccacgctgcatctgagaccgggatccccctcccgcagcccatcacctatttgatggcaggtttcattccactttgctcttgccctctaatcccaaattttctttcctcaggatctacggccccaagtttttcaacattcctcccatcctggcaccagactgatggcataccagttcgctggttaatattcctcttaacacaggtgccccgagctggacacacccctaagctatagtgagatcactgcagaaatgaagaggccatcacmacagaccaggagctggccgattacagccctgtgagctaagaatgggttcacattttttaaacaattggggggaaaatcaagtgaagaatgcttcaagacatgtgaaacttacatgaaattaaagtttcagcatcttcaataaagttttcttggcacgtggccacacccattcctttacttactgtccatggctgcttttgaatttcaaagacattgctgagggtggtggggattgagctcttacta

SEQ ID NO: 762520 - DNA, 539 bp, Homo sapiens
ggctttctgttaatttcaatttttaagtttattaaagagagtatcacatcaagccatattaccactagacaagaccaggtggggaatagtaaggagggatggttacaaagtcatgctaattctcaagtaattattctaagagaaagaaaggggataaagaaaaaacaagtaagtaggggtgggtgggtgtgggtttgtgtatgtgagagagacagaaatctgccacaaataagtacattttaactaatatactcaacaaacactgacacaaataattaacagcacaaaaacctattttccccaggcaactggggagcacaaaaatcaggaagcaataaagtgratcaacagtgtcagagaacaaagtaataaacggctaaggacccattctctcagtccctgaatcatctggagctaaccgtaaagcaaacaacacacaaactgaaaatcaaatgtgggttgttttattctacaatccagactttggagtataaaagtctcatatataactttaaaagatcatgagcagtactctcagc

SEQ ID NO: 762521 - DNA, 432 bp, Homo sapiens
actcagatgttctccccatcctgagtttcttgaggaataacgaccattgggtgcttactaggtgtcagccattttgctaagcactttgcttacactaatgttaacccttacagcaacagaactaaatattattatccctgtttcacagatgggggaaacagagaggctagggttatctgccttaggccctacaaatgagaaagtgwttgaaatacctggtcaggcttccagactccagagcaccacctgactctttttaaattgattttttttattatttagtttttacttttattaaagttatatgcacacacattagtgaatttattaatacgataaaggtcacaaaaaagtctgtgtactttcttttatttctttttctcctgagagacacccactttaaattttctttgttttttattttttgagcta

SEQ ID NO: 762522 - DNA, 525 bp, Homo sapiens
tacctacgtactcttacaccattgctctgatttagagcatcacttacatgccaatcagtgagtagccactgcttcaaccaaacatgattcaaaaattacttctgacgagatggtcctacactgatgaatggcatttgaatgaaaaaaaattacttaatattggtttactcactttagatatgtttttatatttcattgtttaagggagacttataatttaattcaaagggattttaaagggtagtgataatgatagtaatgatggataataattttgaactagtttccagacactttgctaagtgctttacgtgaactatctctttcaatgcaacaacaatttgaagtaragcaatgtattaatttttgatagatcacatagatctgggatctaattcatattttagaatagttgagttttcagcctccaataagaaatcagatctgggtttattaatgttactttattagagagatctctgtaactttcacagcttatcttttgacacatggtaggcacaggct

SEQ ID NO: 762523 - DNA, 633 bp, Homo sapiens
tattttcttcctggagaattatttccaatagaaggaatctagactttactcagatttcttttgcgattattaatggatgtacattttgcagatgagtgaatttactcctaacaatcaagcccagattgatccatttatagttaattacaaaaccttaagtagaataatggttaattatttcattgtattttgtttgtatactctaacaattaaaaaattggcagctattagatatttgctaaaagttaatattaatccaaacaagttaattaattaaaattaatattaatgcaaacaagttatttttctatagttgtaggagaaattgaaagttatatgggtttttctgttcctcaatgaggtgaaatgacattttaaaggacagggataaaagtatcccaatataatgttcttaacatagagttaggtaaaatgaacgatgtgcgctcyaaatattcaccggacaactagcattttctaagcaattttccagcttgaagaaaactacttttcattaaaattgtggctcatgagaaaagtgtagtcagggaataaagtgtgtgtgcatgtgtgtagatgtgtgtatgtgtgtgtgtgtgtttggagagagagaaagatatgctttttgaaaac

SEQ ID NO: 762524 - DNA, 621 bp, Homo sapiens
tttctgttcctcaatgaggtgaaatgacattttaaaggacagggataaaagtatcccaatataatgttcttaacatagagttaggtaaaatgaacgatgtgcgctctaaatattcaccggacaactagcattttctaagcaattttccagcttgaagaaaactacttttcattaaaattgtggctcatgagaaaagtgtagtcagggaataaagtgtgtgtgcatgtgtgtagatgtgtgtatgtgtgtgtstgtgtttggagagagagaaagatatgctttttgaaaactgtaaacaatttaacacagcaatgtgttgtgttagacattaaaggccaataaatgctattagaatatggtgttttgaggcatatttctttagaggtaaggggttcagaatcaagacaaatacacatttatttttactgaaaactaaatttgttttaaagtcgttgagtaatgtaattaaagtcattcaattcaatcatttagagtcttcaccgatacaccaagaaagatgagaagaggaaagcaactcataaagatcatctaaatatcatttacagattgattgtaatcaattaccaatgtcttcagggacttcatgctcatatacttgtg

SEQ ID NO: 762525 - DNA, 627 bp, Homo sapiens
acctgacatagtgcatgacacatcaataattaacaaatagttaccattcattcctctcaaaaagtgttataactcaagggcagcctttaataagtcacatctagaattcagggaggatagagggcttaatgaagttagggggaagcatatggtgtcaagaatgtggacaacggctgaaccttgaaagttcwgtcacataatagttatttgtccacaggtgacatactttactggcctcagtgttctgattattgctgcaaggactgaaaaaggataccaggatctttgcctaaattaggaaacatttatttaccccagtttcccctacaattcctgtcagaaatgcgatatctcatccccagggcaaagtgtagatcattgtaacatttttaatccaacaaagaaaattttccttttattgcatgaatcagttatgatatacattcagagaaatgacttaccacccagcatttccttatctgtaatctcttgtcagaagagcaaaccattggcttcatgctctgtgtgtaactatagggagatgctctttccttcagtattactggtgttcagaaaagtgaaatcatcaagatgtaataccataatttgcttaaagtacaagacagt

SEQ ID NO: 762526 - DNA, 627 bp, Homo sapiens
acctgacatagtgcatgacacatcaataattaacaaatagttaccattcattcctctcaaaaagtgttataactcaagggcagcctttaataagtcacatctagaattcagggaggatagagggcttaatgaagttagggggaagcatatggtgtcaagaatgtggacaacggctgaaccttgaaagttctgtcacataatagttatttgtccacaggtgacatactttactggcctcagtgttctgattattgctgcaaggactgaaaaaggataccaggatctttgcctaaattaggaaacatttatttaccccagtttcccctacaattcctgtcagaaatgcgatatctcatccccagggcaaagtgtagatcattgtaacatttttaatccaacaaagaaaattttccttttattgcatgaatcagttatgatatacattcagagaaatgacttaccacccagmatttccttatctgtaatctcttgtcagaagagcaaaccattggcttcatgctctgtgtgtaactatagggagatgctctttccttcagtattactggtgttcagaaaagtgaaatcatcaagatgtaataccataatttgcttaaagtacaagacagt

SEQ ID NO: 762527 - DNA, 601 bp, Homo sapiens
aacatacttcttgtggaaggatttcatatgggggcgagtctcaggggatcattatgccatcatcttaagtgactcaaggctgtttcaacaatcttctaaacagattacttttttggagattaatgaattgagggatcctgtggaagagagtcgtgttaatgagatcatcatctaattcttctttttttttttttttttttttttagacagagttttattcttgttgcccaggctggagtgcaatggcgcaatgtcagctcactgcaacctccgcctccygggttcaagcgcttctcctgcctcagcctccagagtagctgagattacaggcacgcgccaccatgcctggctaatttttgtatttttagtagagacagggttttgccatgttggtcaggctggtcttgaactcctgacctcaggtaatacacctccctcgacccctgacctcaggtaaaccacttgccttggcctccaaaagtgctgggattacaggcatgagccaccgcgcccggcccatcatctaattctatagcccataccctccccacatttgacaatgaggggggaaaatccctaaaatgattgtgataattactct

SEQ ID NO: 762528 - DNA, 639 bp, Homo sapiens
ttatctcagcaatcacgataggcattataaaagtacacagtcatgaattcatgaaataggaacatccagcatctcactcattcatacttactattttaattgcgaattacacaatctccgatatttgaatagagtcgctttgttgcctcagtcttaacctttagtaatatccgtagattaccggggaggcygacaatcccctcctgatggacatgactgtcccccaccccctggttgtacagctgatgggtcggtggggaccagcagatgccatctcagaattgcacactgcagtctggacgcttacggcccgaactagaaataaggcacgacggaaaaatcatagctgtttctatctgtaattgcaaacctcagatgtgagggtgatatacttccatttcataattcttttttcccttgagattagagaaagctattgtgtatgagtgaacatttaatacattcctgctgaatactgacatgtagaacaggtggatgaaataggaagtttgactcatctttcccaaattaccacattaagttttgtttactcttttgtcataacagccgtaggactgacaaggatattgctggcgctgaagatgagatttgtggtattcacactccagctctgccatt

SEQ ID NO: 762529 - DNA, 578 bp, Homo sapiens
tttcttccatgtttctagaagcagtattataccccctttctgaaggttcagtatgaaataatgaagcaataacaaatcattgtaatgcttctgaatggcaataaagattcattttatgataatttcacattttatttagctaagttttctattttcaagttgtragtccttttgggagtattagatataattatcattcattcaaaaaatgagtttttctgatattaacctcgaataagttaatatttaatttcgtgtgatcaaaattacgaattgcaacagtgtatttttctcaaccaaatgtttcattgctgagcataggtaaaattggtaattggttatttttctcacagtagtttgcgtttaacgggaaacttcagtgattctagagcttcagcatttccagagtccagcctgtaccgtggtgtagaagaacactgaaagtatctttagtcccgagtgatcaatccatgagaaaaagtgcagtgatatgtttttggtagacaaagggcgagattgcaccattgaataaaaaggtgggacttgccaaagagaaatggatatttctacttcttatc

SEQ ID NO: 762530 - DNA, 578 bp, Homo sapiens
tttcttccatgtttctagaagcagtattataccccctttctgaaggttcagtatgaaataatgaagcaataacaaatcattgtaatgcttctgaatggcaataaagattcattttatgataatttcacattttatttagctaagttttctattttcaagttgtgagtccttttgggagtattagatataattatcattcattcaaaaaatgagtttttctgatattaacctcgaataagttaatatttaatttcgtgtgatcaaaattacgaattgcaacagtgtatttttctcaaccaaatgtttcattgctgagcataggtaaaattggtaattggttatttttctcacagtagtttgcgtttaacgggaaacttcagtgattctagagcttcagcatttccagagtccagcctgtaccrtggtgtagaagaacactgaaagtatctttagtcccgagtgatcaatccatgagaaaaagtgcagtgatatgtttttggtagacaaagggcgagattgcaccattgaataaaaaggtgggacttgccaaagagaaatggatatttctacttcttatc

SEQ ID NO: 762531 - DNA, 562 bp, Homo sapiens
taataatactaggggatagagttaaggaatgaagaaccaagggttgttgagatttagtaacttaccaagcttgctcagacagacaactttggagctgggactcagaaacaaatcttccaactacaaaatcccatgctcttgctactataccacactgtttctcaggatatagccatcagaatatacaaataatgcttgacaggatgcttcagaggcattattatgtaaaatgctttaccatctgacgtaatctctccttcttccatgctatcagacgttacaacttcctcctcagtatcttcttcaaaagatgaaaggtcactggtatgaacagagctaactgtgatgtctgtaagtccatccacatcagaatctatcaaagagaaatcttcaagmggaaaataaaacacagaaaaaaaaatcatcttattataagaacatactcagagctcaattactaaattacacttaaaattttctgctttaaatacgtgtcaaactatcaaacaaggcagagtggtttccagaaaatacaaaggcaaagtagacttctgtaaaaata

SEQ ID NO: 762532 - DNA, 595 bp, Homo sapiens
ccatctttctaaatctgggtagaggcggccatacacccatggctcatgcactttgttattggcagatatggtaccttgtggatgctgccaagatttattatttatgccttccggaaggacagccacagtgacctgcaccacacyttgttggaggcttaaagagtgagggtcgtgatcaactcagtataccactggagactatatgagtaagcagcaaactgttgctcataaatgcagaattttggcaaactgacaaactgcatctgccacccagaaggactgctgaaggcagtcatgacccaggcacaagtgtttcttatgattaggcataattgaagcctgttagtaacaatatgaacctgtgatcaattaagcagctgaccagtcattacctcctccttcctgctcattctacccaataaataagaagggctgtggaagcttgcgcagctgcctttgctctctagaagcagggagcccttatcctcttctcttcttctctcttcctcttccccatgctagcctttccttaaaatagttacttttgttttttgttatcatttctacgttcgtcccttcgtgaagtcataatgac

SEQ ID NO: 762533 - DNA, 595 bp, Homo sapiens
ccatctttctaaatctgggtagaggcggccatacacccatggctcatgcactttgttattggcagatatggtaccttgtggatgctgccaagatttattatttatgccttccggaaggacagccacagtgacctgcaccacaccttgttggaggcttaaagagtgagggtcgtgatcaactcagtataccactggagactatatgagtaagcagcaaactgttgytcataaatgcagaattttggcaaactgacaaactgcatctgccacccagaaggactgctgaaggcagtcatgacccaggcacaagtgtttcttatgattaggcataattgaagcctgttagtaacaatatgaacctgtgatcaattaagcagctgaccagtcattacctcctccttcctgctcattctacccaataaataagaagggctgtggaagcttgcgcagctgcctttgctctctagaagcagggagcccttatcctcttctcttcttctctcttcctcttccccatgctagcctttccttaaaatagttacttttgttttttgttatcatttctacgttcgtcccttcgtgaagtcataatgac

SEQ ID NO: 762534 - DNA, 578 bp, Homo sapiens
ctcgcaacagttctacatgtgagtaatgatatcatcttaccaatgaagaaactacagtttagtgggttccatcacttgtggtgctgtgaggtatagttttgtttagtgtgccacctcctggcttggggccaaccaacttaagccattasagcaatttatataaaacaataacccacttcaacaaaggagaaaacaatagctaattccatggcctataacatcctggctaaccagagatcctgggtctgtccacatgacaacttcactgctagcacaaccagcatccaaaaaaaccagtgcactaaacaaaactacaaccaaggacacttacagagtccactttgtgcccctgatacttccgccagagtacgtgctggtagccacggctgagaaacctgaagacacatcacatcacaagactctttgcagatactcccaagcaccagcctagagctgggtagctccactgagtgattagacccaaaagagcaatagcagttgctgcagtctggctctcaggaagccccatctctaggggaaagggaaaagcaccacattaagagagcaccctgtgggac

SEQ ID NO: 762535 - DNA, 623 bp, Homo sapiens
cttctctctaagcactgcattagctgcgtatcatgagttttggtatgttgcatttttgtttacattcatctctaaatattcacttagagaatatgtcttgtaatttcttctttgatcaattggttatttaggaatgtattaattaatttccatatatttgtgaatttcccaggttttattctgtgttttatttctaattttattttattgtggtcagggcacatgttttgtataacttcaatcttttaaaatttattgtttttatargcagacatatggtctaccctggagaggtttcattgtgcacttgagaagaatatgtattctgctgttgttgggtggatcattctatagaggtctgttaaaacaaaaactttagataaattaaatttagcagagttttttgagcaaagaacaattcatgaattaggcagcactcacaacaagaagaggttcagaaagctctacctaacagcctgagcagtgagattttataggctaaatgtggaaccaaagtagaaagatcacttaattggttacatgtagacatacgccttatttgggcacggtgtgatcagttaactgatttgctgaagcttggctgcttgtgatggctgaaactc

SEQ ID NO: 762536 - DNA, 577 bp, Homo sapiens
tcatgaagtaaagtttagaatactaagaaagttcttacttccgtaatagggaaagttgaccttagaaaaaagccctgctctaatcctacctaaagatgaataaaaacaagtctgaaatggaccaaacgatttcctaacagttctaagtaacttagccatgtcccaaaacaaatctcaaggatatttttaggaaaacaataatatccagcactcaaaaaggtaaaattcacaatgtgactatcaaatggaaaattaacaggcacacaaagaagtagaaaagtatgtacaataaraggaataaaagttgatcaatttaaagataatcagaaataacacaaataatagaattagtagataagaatataaaaacatttatcataactctattccatattttcaagaagttaaagagaaaattttcaaaaggaaaacctagcaaactctatcagaatcaattgtttcaaaactctatatattaacaaaagacttgcagaaacctggggatgacttactcaatgaaagtggctaaatattagtaagaatagtgagttttgtggtgttttagcataccctaggc

SEQ ID NO: 762537 - DNA, 605 bp, Homo sapiens
aaggaaaccaaatggaaatcaaaagaaacttgaatgtcatatttacgtaatgaaaattaacataatagactcctgcattaagcagttttctaaattccatgtattctgctatttcccattctattctaccttattgctttctgactttcaaaatcctgagcttcccttctcattaattccagatcttcaaaaaggaaaatytgaggtggaagagattcttttcaatgccactggcctgtggacattctgttatttccacatagggtcaaacctggtataatgtattgtaaaaggaaataaaatagatttggaagacattcacttgctatttcacttaatgtctttgaagtattaacaattgtctataaaggacccagatactatactccagaaaatcaaaagaaatgattatttgcaacaaaatttaaattttaagatatatagacatattacataggattcaattctgatatctgtccctagaccaaaattagtttatggcacttatctggttaacagacaatagcaattaaaaagataggaaaaaaaaaagagagaaagtagactggcttcaaggaggttacaggctactgagtcaggctgac

SEQ ID NO: 762538 - DNA, 605 bp, Homo sapiens
aaggaaaccaaatggaaatcaaaagaaacttgaatgtcatatttacgtaatgaaaattaacataatagactcctgcattaagcagttttctaaattccatgtattctgctatttcccattctattctaccttattgctttctgactttcaaaatcctgagcttcccttctcattaattccagatcttcaaaaaggaaaatctgaggtggaagagattcttttcaatgccactggcctgtggacattytgttatttccacatagggtcaaacctggtataatgtattgtaaaaggaaataaaatagatttggaagacattcacttgctatttcacttaatgtctttgaagtattaacaattgtctataaaggacccagatactatactccagaaaatcaaaagaaatgattatttgcaacaaaatttaaattttaagatatatagacatattacataggattcaattctgatatctgtccctagaccaaaattagtttatggcacttatctggttaacagacaatagcaattaaaaagataggaaaaaaaaaagagagaaagtagactggcttcaaggaggttacaggctactgagtcaggctgac

SEQ ID NO: 762539 - DNA, 605 bp, Homo sapiens
aaggaaaccaaatggaaatcaaaagaaacttgaatgtcatatttacgtaatgaaaattaacataatagactcctgcattaagcagttttctaaattccatgtattctgctatttcccattctattctaccttattgctttctgactttcaaaatcctgagcttcccttctcattaattccagatcttcaaaaaggaaaatctgaggtggaagagattcttttcaatgccactggcctgtggacattctgttatttccacatagggtcaaacctggtataatgtattgtaaaaggaaataaaatagatttggaagacattcacttgctatttcayttaatgtctttgaagtattaacaattgtctataaaggacccagatactatactccagaaaatcaaaagaaatgattatttgcaacaaaatttaaattttaagatatatagacatattacataggattcaattctgatatctgtccctagaccaaaattagtttatggcacttatctggttaacagacaatagcaattaaaaagataggaaaaaaaaaagagagaaagtagactggcttcaaggaggttacaggctactgagtcaggctgac

SEQ ID NO: 762540 - DNA, 646 bp, Homo sapiens
tattggtgtggggtctaaaataaatgaaatgtaaacagatgattatatgtgctagatcctgatgctcaattgctgagcccttccaatggaatagatacacacacaaaaatgtttcatgcttacactttttaggttttatggaaaaagtaaattatacagtcacagctcccttaagatatctttgagatcaaccaatcccactctctttatattttacagaggcaaatactaaaagtcttgactatatgatagatgtttgtcctgaagtcaactaacttacacatctctkccttctctgctattagatcctgttgtctgcctctcaattcagatttgtttctactattccaaactgcctctggaattctaaggcatcttgtccgtaccatatagcaaatcatgaatcttcaaccagcaattcacacatacctactgagtttctgccgaagatgtaacttcaataagcacttgggagatggatagtaaacaaacttgtgattctttccctcaagaagcaaacaggccctgtaatttgatttatctatttctctatacattttttctgtattattgctatagactctgggccatctagtgtatgcatgtcattttttggcagagtaattataaaataccaaaaagttta

SEQ ID NO: 762541 - DNA, 584 bp, Homo sapiens
ggccatctagtgtatgcatgtcattttttggcagagtaattataaaataccaaaaagtttagaaacttcccaaggccatatagctaattagtagctgagacagaattataacagaaacttctgaattcccatctcaaaatcacagcctaggattcccataagaacatgcagaatctaggattcccataagaacatgcagaaggtataagaaagagagagaaaaatgaatcaaaagatcttggccctcaaccaagggaattttcagctcttttcccagacagctaggtagaccagaattcatagttctttgatgtagcaagcttgccttgaggttagcagttggcatttgtcatttagattctatatgaagtttttggattacmtgtaaagggatttataaggtagagaagcagtcaaacataggggtaaagaacaaagactctggagttacactgtccgagtaaatatcctgatgctgctacttactgactcatgtaatgaggatgccatgatgtcatttagcctatgtatctcagttcctattcagagatgactctgacctttttgactaaagcattcagaag

SEQ ID NO: 762542 - DNA, 584 bp, Homo sapiens
ggccatctagtgtatgcatgtcattttttggcagagtaattataaaataccaaaaagtttagaaacttcccaaggccatatagctaattagtagctgagacagaattataacagaaacttctgaattcccatctcaaaatcacagcctaggattcccataagaacatgcagaatctaggattcccataagaacatgcagaaggtataagaaagagagagaaaaatgaatcaaaagatcttggccctcaaccaagggaattttcagctcttttcccagacagctaggtagaccagaattcatagttctttgatgtagcaagcttgccttgaggttagcagttggcatttgtcatttagattctatatgaagtttttggattacctgtaaagggatttataaggtagagaagcagtcaaacataggggtaaaraacaaagactctggagttacactgtccgagtaaatatcctgatgctgctacttactgactcatgtaatgaggatgccatgatgtcatttagcctatgtatctcagttcctattcagagatgactctgacctttttgactaaagcattcagaag

SEQ ID NO: 762543 - DNA, 632 bp, Homo sapiens
tttagatacattgctgtgatttttttctttcattgcacacacatgcacaccatctcacaaaacataacatcatcagcaacctggaagaccataatctagaaaaatgccagagccctaatcctacatgatattgaagctgcaggcacttttattgccactatttgtcaaagattgttggttattagagtcattgcttttctcctttcaggttggaatcaaaattgccaatttatyagatatttgctgaaaatatagtcatttgtacactgtagataggtaaaatgtaactttcaaatggatctctgtattcacgtagagaagtagaaaattgtcatgtctcgttagcactcttctgcaccagcgtctgataaagccatgcccccaaataaatgttcacagaggatgcaatgcaattttcaactaactgtgagggaaaaggatgttttgagaggaaaaaaaatagaaaatactaaaaaaatgatcagaatcactttaaatactaatgggattgtatagtactggctgatactgaacctacgctagacttagctcgtgatttgtggaccccataagactcctgccttctcctcttcctttttcgccttctcctccagggttggaaaggtgaatgg

SEQ ID NO: 762544 - DNA, 518 bp, Homo sapiens
gctgaaaatacatatttaagggtcaccagcatatatgtaacatttaaggccatgggaattgatgattactaacaattgtaagaaaaataacatgcattgaatgcatataatgaaccagctctgcccaaaatactttaggtatgattaaccctctttattctcttagcagccctacgaaataggtttttttaaaataataataataataaaagaaatgggcaaggaattgttaagtgacctctccgaggtcacagctaggaagtggcaaggctgggaattgaaccaaggtaccctagcacctaagtgcatacctttttgaccactaagaatgacttaaaagagacaaaaggatttagtcctggtcrggagggactctagcatttagaggatcagtaaagctggaagagatagcaaaggacactgaaaagaagcaaccagagagatggaaagaaaaccaggaggatgtggtatcacataaacccaaagacaatagtccttcaaaaaacaggcattgaatg

SEQ ID NO: 762545 - DNA, 613 bp, Homo sapiens
taccatggtcactttgttcatgggcctatttggaatgataggggtggctggggaaagaggctgagtggtgtccacagaacaagtcatcctatccacttgattattaaaatcctcctctactaaggtcacccattggtgaatattcacatgggatacaaatgtcttcccagtttttgaccactcagagaggtcaattcacatacctcttccccaaatttctttgtcaccagttatccaactatgcttcttccaagtccctgaccacccagccaaaccattggctacagctcatgaattagtatataattgcacatctggccatttctccttccatgaaaagtgcacaaccagttacactgctcaaagttctgcccagtgggaagatttccctttgacacagtcctccagaccccagaatggtagatccactgatagcttgcaccgtgtacctggaaaagtcacagacactcaacaycagcccttgaaggcaaccaggatgggggctgtgccacaggggaggagctgcccaaggctgtgggaacccacctcttgcatcagcatgacctggatgtgagacatggagtcaaaggagataattttggtgctttaagat

SEQ ID NO: 762546 - DNA, 645 bp, Homo sapiens
gcattgcactatgaccatacaatagctatgacatcactaagcaataggaatttttcagctccattataatatgtatgggacaactgtgtatatgtagttcatcatagactgaactatggtacatgactacctacacacacacacacacacacacacacacacacacacacacacacaygctgagaagtatcaggatctgctgtctgcaagcgggagacccaggaaagccaaagagataatttagtctgagtccccaggcttcagaaccagtgaatccatgcaataaactcagcccaaggcatggagaagatgaaatgtgatgtaccagttcaagtggtctggcaagaaaaaaggggtaatttcctccttcctttgccttttgttcttttcaggcctttagtgagctggatgaatgaccactcacattgagaaaggccatctgctttactgaatccaccatttcagatcctgtctcattcaaaaacattcttacagacatacccagaaataatatttaaactggaaaccctggggctagtcaaattgatacataaaattaatgacaagcacagaaactaactttgcaagaagctggttgcttttgtggcaagatgaatgaaaaaccagagtgagtaatcacatatg

SEQ ID NO: 762547 - DNA, 529 bp, Homo sapiens
ggagacaacaggctcctctttcttgataaacagattgttgggtaaggtatgcacatggatgtgacaattcatttggccatagaaatagcagaaatgagacgtttttagacagatatttggaaggcatgagcaaatatccccaggcttcatccatttgagctcagatgagtcttttgcgctaggttttgagcttctctaagtccctaggatcagcagaaatctctagaccccccaggggtgwacccttaaaacaatacgcagaatcagtacgatcatggccaactcctgggaaagctggctctgtgcccgagtcctttgcagcccccgccttcctgacccaacttcccatgtgactaaggaatcaaaaacttggcctagttgatatgtaatccaggcaatcagaaattagaaccgtgcggctaggaaagatgagcaaaagatgcttagaaacaagacaagcagaaaacaacctccccagagctatcctgtgtggggaaacctccaaaagctagggaaagacagcgtatgt

SEQ ID NO: 762548 - DNA, 529 bp, Homo sapiens
ggagacaacaggctcctctttcttgataaacagattgttgggtaaggtatgcacatggatgtgacaattcatttggccatagaaatagcagaaatgagacgtttttagacagatatttggaaggcatgagcaaatatccccaggcttcatccatttgagctcagatgagtcttttgcgctaggttttgagcttctctaagtccctaggatcagcagaaatctctagaccccccaggggtgaacccttaaaacaatacgcagaatcagtacgatcatggccaactcctgggaaagctggctctrtgcccgagtcctttgcagcccccgccttcctgacccaacttcccatgtgactaaggaatcaaaaacttggcctagttgatatgtaatccaggcaatcagaaattagaaccgtgcggctaggaaagatgagcaaaagatgcttagaaacaagacaagcagaaaacaacctccccagagctatcctgtgtggggaaacctccaaaagctagggaaagacagcgtatgt

SEQ ID NO: 762549 - DNA, 529 bp, Homo sapiens
ggagacaacaggctcctctttcttgataaacagattgttgggtaaggtatgcacatggatgtgacaattcatttggccatagaaatagcagaaatgagacgtttttagacagatatttggaaggcatgagcaaatatccccaggcttcatccatttgagctcagatgagtcttttgcgctaggttttgagcttctctaagtccctaggatcagcagaaatctctagaccccccaggggtgaacccttaaaacaatacgcagaatcagtacgatcatggccaactcctgggaaagctggctctgtgcccgagtcctttgcagcccccgcyttcctgacccaacttcccatgtgactaaggaatcaaaaacttggcctagttgatatgtaatccaggcaatcagaaattagaaccgtgcggctaggaaagatgagcaaaagatgcttagaaacaagacaagcagaaaacaacctccccagagctatcctgtgtggggaaacctccaaaagctagggaaagacagcgtatgt

SEQ ID NO: 762550 - DNA, 622 bp, Homo sapiens
cactgccacctccacctcccaagttcaagcacttctctgccttagcctctcaagtagctgggattacaggtgcccaccaccatgcccggctaatttttgtatttttagtagagatggagtttcaccatcttggccaggctggtcttgaactcctgacttcatgatccacctgcctcagcctcccaaagtgctggaattacaggcatgagccacggtgccaggccttcaaactcttttaaatcagtattttctagctttaatgcatctgagcattcacatgtggttcttttaataggcagggctttaataycacatcaatgttgacaataagaaattataaatatttaagctcaaaattaaaataaagacaaaaaattatcctgtgcactacaaaacacaatatagagaggaatttattcccaacattcaaaaacattgatcctctgactttatgcctaccagtttgatgttacagatgaaaaatttctaaagatgtatatgatgctttatcagttgttcagatttctaacattcgtatattacagctctttttagtcagaaaggggatatttaacatgcctttatttacatcttcctttttatgcttcttttttgttttgag

SEQ ID NO: 762551 - DNA, 622 bp, Homo sapiens
cactgccacctccacctcccaagttcaagcacttctctgccttagcctctcaagtagctgggattacaggtgcccaccaccatgcccggctaatttttgtatttttagtagagatggagtttcaccatcttggccaggctggtcttgaactcctgacttcatgatccacctgcctcagcctcccaaagtgctggaattacaggcatgagccacggtgccaggccttcaaactcttttaaatcagtattttctagctttaatgcatctgagcattcacatgtggttcttttaataggcagggctttaataccacatcaatgttgacaataagaaattataaatatttaagctcaaaattaaaataaagacaaaaaattatcctgtgcactacaaaacacaatatagaraggaatttattcccaacattcaaaaacattgatcctctgactttatgcctaccagtttgatgttacagatgaaaaatttctaaagatgtatatgatgctttatcagttgttcagatttctaacattcgtatattacagctctttttagtcagaaaggggatatttaacatgcctttatttacatcttcctttttatgcttcttttttgttttgag

SEQ ID NO: 762552 - DNA, 622 bp, Homo sapiens
cactgccacctccacctcccaagttcaagcacttctctgccttagcctctcaagtagctgggattacaggtgcccaccaccatgcccggctaatttttgtatttttagtagagatggagtttcaccatcttggccaggctggtcttgaactcctgacttcatgatccacctgcctcagcctcccaaagtgctggaattacaggcatgagccacggtgccaggccttcaaactcttttaaatcagtattttctagctttaatgcatctgagcattcacatgtggttcttttaataggcagggctttaataccacatcaatgttgacaataagaaattataaatatttaagctcaaaattaaaataaagacaaaaaattatcctgtgcactacaaaacacaatatagagaggaatttattcccaacaytcaaaaacattgatcctctgactttatgcctaccagtttgatgttacagatgaaaaatttctaaagatgtatatgatgctttatcagttgttcagatttctaacattcgtatattacagctctttttagtcagaaaggggatatttaacatgcctttatttacatcttcctttttatgcttcttttttgttttgag

SEQ ID NO: 762553 - DNA, 622 bp, Homo sapiens
cattagccttgaagtttgaagactaaaaattgtttgtaaaactatctagaaaaaatttattatgattacagccactattagatttcaaaagggttcatcagaaatctctgaggtatataatggggaaagaatattttgactaccactttaacaggtctgctgtttaataatattagtttatttttaattgatgtttcatggacatccagaatactagctataaaatcatatatgctgcataatgcaagsaaaacaaaagcacctataaatattacagaagactatacatgtatgtatatcactgccataaaatacctatatacatattatgtatatacacacataattgttttcacaaccatgatattattacttacaaaagcatgcaaatttagggagatggctaaataagttatggctttttcataaattgtaagcctattcattataaaatattactgaggtcaactttcatttgttccccaacaaattattgagcatctactatgtatattctaggcccatttctagggactggggaaaaaatagtgaaaataacattcagaatgtcttggcttcataaagctgttgttccagtgttgggagaaaaacagtaattaat

SEQ ID NO: 762554 - DNA, 622 bp, Homo sapiens
cattagccttgaagtttgaagactaaaaattgtttgtaaaactatctagaaaaaatttattatgattacagccactattagatttcaaaagggttcatcagaaatctctgaggtatataatggggaaagaatattttgactaccactttaacaggtctgctgtttaataatattagtttatttttaattgatgtttcatggacatccagaatactagctataaaatcatatatgctgcataatgcaagcaaaacaaaagcacctataaatattacagaagactatacatgtatgtatatcaytgccataaaatacctatatacatattatgtatatacacacataattgttttcacaaccatgatattattacttacaaaagcatgcaaatttagggagatggctaaataagttatggctttttcataaattgtaagcctattcattataaaatattactgaggtcaactttcatttgttccccaacaaattattgagcatctactatgtatattctaggcccatttctagggactggggaaaaaatagtgaaaataacattcagaatgtcttggcttcataaagctgttgttccagtgttgggagaaaaacagtaattaat

SEQ ID NO: 762555 - DNA, 630 bp, Homo sapiens
tacattttctgtttgttttgtctgaaatatttttgactccctaaagatgcaatattttgcctccctaagatgcaggattgttctcttatatgctttatagtattagtttttatatttatgtttcatatttatgtttatgagcatctcaaattggattcatcacaaatttgtaaatgatatgggataaacattgacgttaggctaagcatgatgactcacacttgcaaccccagtgcattaggagactgaagaaggaggatttcttgagcccaggagtttgaggctgcagtgagctatgattgcaccactccagcctgggcaacagraaaagttagaaataaaaaaatcatttgattttcataaatttatctagttgtttcagatttgttgtaaaaatatgtattttctattgtcctttgtcttcatagaaaatcagttcatcatctatattaaacacgaacatatttatggatgctccattttttaacatgcagctttaaaaatcttaaaataatttaatgttacttctttgattatattattttccaagattggttaagttacctatgttcctttgtatttctgcatatttatatacatcttgacatcacattgtttatttttattttg

SEQ ID NO: 762556 - DNA, 607 bp, Homo sapiens
gaagaatcagagagattattgaaaatgccatcaactaagcataattcaaacagaagacaacatatatatatatatatatatttttcacctaggattagtaaatcaagaaaattgtattacaattttattggatggtgagttctataatatactaagtataaaaaaataagtaaaagacttgacatataccataataaaatatttaataagmacatatctagtaagtacatagaaatatataaataaaaacagctttattcaataagtatttgtgactattatatatcttatctcatttatcttcacattatttttgtaggataaatatcactaatttgatgtgttggttgcaaaaagggtaatgtcactaaaagaagtcagatagcctgattaaggttttacattcattcattaagtgacagatatataatgagaacacaatttctcttattatatcaaactacctgctaaacaacaaaaggagtttgatgatttaattacatatactttatcttaattcccaaagtgtattaatatggaagggcattctttgttggtatttgatgaggttagaattaagaatttaaaacttattggtataaacgta

SEQ ID NO: 762557 - DNA, 470 bp, Homo sapiens
agacatggagaagagattcatgatttctagcaaaaattagatgcatattaagaaaaaatataaattaaatggtgatacgtaaaatatgaagagacaataactgaaagttttatcaaaacgattagatatgaattttcatattatggaagtgaaaattattccagcaggacaatggagaaaaactacagctagactgcgtaatactaaaccgcgtatgcagtctagcctagactgatagtatttcttgtaaaatacttatatatgtgatagtttttaatgttagaaattaacagtcaaagcttacagactgactaggctagwctgcataatgctaatgacaaagacatctcaaaagctgctacagaggagagcagcttttattattttaaaagaataaaaataatgaataacagctatatacagtttataagagtcaagtataaaccaaaggatatttagaagcataaaag

SEQ ID NO: 762558 - DNA, 645 bp, Homo sapiens
tttattattgccacaagaataacagtcacttagaatatttactctacagtttttggacatatattataggaaaatcctaaaaacagactttgcatcctttcttttaaaagcaaatcgtggccaggtgcagtggctcatgcctctaattccagtgctttggcaggccaaggtaggaggattgtttgagtccaggagctggagaccagcctgtacaacatagtgagaccccattaggcggctgacacaggaggatcgcttaagcccagaagttcaacgttgcggggagctgtgattgtgctgctgcactccagcctaggcaacagagcaagaccctgtctctaaatataaataaataaataaataaataaataaataaataaataaatraatgtaaattttgacattacttaagaaaacaggtatttttttgaaaggcctgcaaaatggtatcatggtatgcagttgataccatgggagtaaataaaattactcacaaagagagcaatggaagagctccagaatggagctgtgagggacatggttatttaaagcaaagatatagtaaaacaaatataaaaagaagtctaggaaggcattattagagagtgacatcagcaaaaataatacagtaagaaacacatagta

SEQ ID NO: 762559 - DNA, 557 bp, Homo sapiens
attttaacacctccatttattaacacccttaacaaatttaggcagcccttttctatactgtgtgattatttcaactacagagtttgtctaagtattgaaatttttatttacattcttgtttcttcattagactgagaacacatttttttaagggcaatgtcttgttttagtttacatcacaaccttaaaacttactgaagtgcctgacacagatataggataaaattaatatttagagtcaatgaataaataaaatgtatgtttccattaacaatcgrtggggtgtcttttttggtaagttggaatttctctccagtgtgatcgatttgccttcatgtaatagttaacagaactgataaatggccaacataacaattcagccttttttcatattaaacagataccattgaaacagatgttcctgcattaggttctcaaaacaaatgaagcatggctttgattccacacatacaaaaacaagtgattcacaatggcagtttcaaatttgtggtcacaatgattagtgttctacttgttacaaaggatttgattagtca

SEQ ID NO: 762560 - DNA, 585 bp, Homo sapiens
ttgttatattctccacaggtttgccttttccagatgtcatacagttggaaccataaagcatgtagccttttcagataggtttcttttacttagtaataagcatttaagtttcctccattctttttatgacttcatagttcatttcttattagtgctgaacaatgttctactattctgtgtagagcacactctatccatttgcctacttytgcaaatcttgattatttccaaatattggaaattatgaataatgcttccataaacatatttgtgtaggtcattttgtggacataaattttcctttaagtaaatatgaatgagcatggttgctaaatcatatggtaagaatatatttagtttttaaagaaactgccttctaaagtgtctgtcccatttcacattcccaccagcaatgaatgagagtttctgttgctctacatcctcccaactttggtgttgtcagtattctggattttggcttttctcatgggtgtgtagtgttaccctattgtcattttaattcccatttccctgatgacatgtgatgtgcagcatcttttcatatgttcactttttatctgtata

SEQ ID NO: 762561 - DNA, 585 bp, Homo sapiens
ttgttatattctccacaggtttgccttttccagatgtcatacagttggaaccataaagcatgtagccttttcagataggtttcttttacttagtaataagcatttaagtttcctccattctttttatgacttcatagttcatttcttattagtgctgaacaatgttctactattctgtgtagagcacactctatccatttgcctacttctgcaaatcttgattatttccaaatattggaaattatgaataatgcttccataaacatatttgtgtaggtcattttgtggacataaattttcctttaagtaaatatgaatgarcatggttgctaaatcatatggtaagaatatatttagtttttaaagaaactgccttctaaagtgtctgtcccatttcacattcccaccagcaatgaatgagagtttctgttgctctacatcctcccaactttggtgttgtcagtattctggattttggcttttctcatgggtgtgtagtgttaccctattgtcattttaattcccatttccctgatgacatgtgatgtgcagcatcttttcatatgttcactttttatctgtata

SEQ ID NO: 762562 - DNA, 544 bp, Homo sapiens
tttagttctgcctactgggtggcatgaccacctgtgcttttggttctgtatagtcagtgcagagcttgaacagccacagaatcccaatgaatacccttagtgatccaggaccaggcattgaagaaactctctgtgcattgtaggccccattgagctagcagttttgctttaagcagtggaatgcttcccccaaaagaacagctgccattttttcatctaaacaaagattccaatgggacaaggctggctgcattcttgaatataccatttatatttaacaagtgagacttgttaggtcattctcacattgttagtcattgagtccgagttgaactaccctaaaatggaartatcaggttgtagtcacaatgactccataaatgaggtgtctagtttccacaagagcccagttgcaagctaatagctgcttttcctgagagtcatgtcagagaagtcatgaatataaaactccaagtggcaattgtatgtggaaatcagaggctctgtcccaatttcatagccaaaacgaccaagaattctgtat

SEQ ID NO: 762563 - DNA, 616 bp, Homo sapiens
catttgaaataataataaccaagattttccccaaatcaagtcagacaccaaaccacatgatgatggagaaaaaacatctgccaaaatatacgaatagatgttaatctgagctaatatgagtaaccgcagcccaggttacacaatctcaacaagtcytgagagaaagtgtacccaaggtgattgggttacacattggttttatacatttcagggagacagacattgcaggtaaaatcataaatcaatatgcagaaggtatacatgggtttgtcctgaaaatgtgggacatcccaaaatgagggcttacaagtcataggtgagttttagggattctttagttcacaattggttgagagaattaagaaactatctaaagacttaaagccagtacaaaagaatgactgagttaagattaatgggattgtggagaccaggcttcttattgtgtaaatagaccctcaaaggtggaaactgtcagagggaatagatggtaaatgtgtgtcttctcactttcaaaggtgtcagactctcaatttctcctagatccaggacagggatagaaaggggaaatgtggctgcattaatctccattctctacagatacaaatttctccta

SEQ ID NO: 762564 - DNA, 618 bp, Homo sapiens
tatcagcatccattgggttaaggcttttaaacatatattttaatatgaaaaggttctttcttttccttttccctactcttcagtactaaatatagagacctttgtcagacacattttcataagttatgatcaactctcatgttgcaaatgcaggataagagaaactgttctcttttggtctgatgttagatacctgccaatgaagagtcccctamgtttcctctgctgtgaataacatataagaaggtgtcaaaagcagtgaaaattttctaatggagtcttccagacaatcacaatggtgattatttacatcgcaaaaaaaatgtgtgctgtttcttgagatcgaataagcagaatagatttatttttgcaattacctacaatttgataaacacagataaatattgcttagaaaacacattaatattcttaatcttcattcttctataaatacatctaataatgccttgtattgcatactcttctgaaataaaatgtctgtctcttaattaggatgtgtataatggcagctctgaagacattatcctgacatagaacattacagaaggatttgaaatataatgtagactgtatatatttcataaacaatgcatattc

SEQ ID NO: 762565 - DNA, 608 bp, Homo sapiens
ccttttacacctttatgaatttccagctactggaatgtcagtcttaataatactaatcatatagatgtatgcatctttcacgtatgttctttatcatctgaagtttccatgtaaccttttaaaaataaaagtgatcagaatgtactttgatagttgtataatattttataacccttctgtctttcttcctcattgtgataaacatctcttttgtataagcaaatccatcttaacagttttttatcaaactattgatgcttgtattgatgcatgcattaatgctttttcagccactttttatcttttatatgctgttatttttgagtgacagcaattcgcacttattaagttctgctacatataacagaaaattaaaaaattactgcggtttwaaaaaaaaaaacagatgttgattttctctcatttaaaaatagttcagtgatatgatccagggatggcagcatcatggtgtcatcgaatgctctaggtcctcctaacttcctgtcccatcatcctcagtgtttagtgttcagtgtttagtcccagctgtaggctatagtaaggaagactgatgaagaggagctcctacttgtttattttagctcctt

SEQ ID NO: 762566 - DNA, 585 bp, Homo sapiens
agttcgagaccagcctcaccaacgtggagaaactctgtccctactaaaaatagaaaattagccaggcatggtggcacatgcctgtaatcccagctactcaggaggctgaggcaggagaatcacctgaaccaaggaggtggaggttgcagtgagccaagatggcaccattgcactccagcctgggcaataagagcaaaactccatctccaaaaaaaaaagaaaaaaaaaaggcaacatacaagtgaccaaagtttattaaaaaatgcttaccatcactaatcaccagggacaagcaaattaaagttgcaaaacaaggtatcacttcacacctgttagaatggctcctagcaaaaagatgaaagttaacaagtgttggtgaggatgtgaagaaaagggaaccctgatacactgttggtgagaatgcaaytgtaaaattgttatggtgaacattgtgcaggtttctcaaaaaactaaaaatacaattagccagtaatctagcagtaccacttctggatatttatccaaaagaattaaaatcagtatgtcaaagagatacctgcactcccatgttcattgtggcattat

SEQ ID NO: 762567 - DNA, 546 bp, Homo sapiens
taggtgggagtgtagacttggattgcttggtctgtttttgaaaagttcaccgtcaggagaaggactattctcaagtaggaggaatgaagaaggaggcaggaagctaaaatgaatctggtactatcaggttgtccagagcaagatgtatctagcatatgtatgcaggggagacactaaaaatcaaatatacagaaacttgaagaaatatgatgaatataaagttgtcactgataggtggtatttgaatccatgattatgaatgagatcyttaaggcaggcataaaaagcaaagtatttagaatgaattggtcaacaggtagaataaaatgcattaggagtatcctaggactctagtaaaaaaaattttttttcaaagaaaaggtaatgatttatttgtcaaatgttgtctgagaagaaaaaaggaggtaaggactgagaccagatcattttatttaaaatgttgttaataaattacataactaaaaacagcttcagagataagcagcagagtagatatcaaaatttttcaggatttcaaaagtgaac

SEQ ID NO: 762568 - DNA, 454 bp, Homo sapiens
gtagtgaaataagcatctcagtcttttgccttcatatatacttatagcaaaaacaagatgtgaagtaaggcttgtgtaaaagagatgtgcacaaggaaaatgacagaacattttttagcttttttttccaaattcaatcatattattaaatttaattccggcttttgtaagccttaattactttatctaaatcagaattctcaacagactaattaaaccagaattcatgcaatagtttttttctcaacactcagtttcytctacacaaaaaactagaacaattatatcagaatctctgggtaagcttaggcattgggatttgtggggaaaagttctccaggtgattctattgtataggtaagcattaagaatcacttatctatgagaacacatggacacaggaaggggaacatcacacacctggacctgtcgtggggtgggggtagggggtagg

SEQ ID NO: 762569 - DNA, 582 bp, Homo sapiens
atgtttaattatacttcagaaaattagataccaaattgaagtattgcataagcatcatgaatattgaacagttcttttgacctcagcttgtatttactttctttcaatgtcttttgttctcattcaaagtaatatttaaggaatcataaaatattagaaccaaaagtgtccttaatgcatagataaattttctgtgcacggaatgtaccaattctttaccagttcttgaaaatagtcattttatgtctacttgaattatcaatttattgtttttttcaggccttacctttgagtgcagggtatttctaacgtctaatagtcagaagctgattacatcctaagggtgtgttgtaggcaaaccaataccttcccacccctcaaagatgtcctcattytcattccaggaatcttggaatacattagcttacatggcaaagggaaattaagattgcagatggaattaaatttgcttatcaccaacgttgagattattcaggtggacccaatgtaatcacaagagtcctcatacgtggaagagaaagacagagggttcagagtgatgtaatataagaagactcaagt

SEQ ID NO: 762570 - DNA, 626 bp, Homo sapiens
ttatgttgtgaactcatgaaaataattatgttgtagattgcctctttaaattaaggtatgtggtccagaaaaggtacctgtcatttgttaatgtatcaggaatatagaaaatgcctgtgaagggacgtgggaaatgtaaccgtgtggacaatgatcaggctctcagcaaaccactatgatgctttttctgaggattctcaatgccattttaatgcaaatatagctgaaataacatgtgtgtacttatcttgcatgcaccacctcccgcctgctcttccttctctctcacgtcgttcagtgcatcacccagggcaatttaggcttgggtcacactgcacctttactggaatgaacgcttggctgctcctatcgcagcaaatctrctgcacagtgaagtggctcaaaataaacagtgaaatgtattccatcacaagagcactctagcctttgcatataaaagcagcacgcttacacccaaaatgtgatcacatttgccctgttatttcttttagcctcaataaaattcatgtaattcatcattcagccagcatcatttggaaacaacatagcattcataccagactatggtttgaccaaatgcatccttagaaacatacctgaaatct

SEQ ID NO: 762571 - DNA, 626 bp, Homo sapiens
ttatgttgtgaactcatgaaaataattatgttgtagattgcctctttaaattaaggtatgtggtccagaaaaggtacctgtcatttgttaatgtatcaggaatatagaaaatgcctgtgaagggacgtgggaaatgtaaccgtgtggacaatgatcaggctctcagcaaaccactatgatgctttttctgaggattctcaatgccattttaatgcaaatatagctgaaataacatgtgtgtacttatcttgcatgcaccacctcccgcctgctcttccttctctctcacgtcgttcagtgcatcacccagggcaatttaggcttgggtcacactgcacctttactggaatgaacgcttggctgctcctatcgcagcaaatctactgcacagtgaagtggctcaaaataaacagtgaaatgtattccatcacaagagcactctagcctttgcatataaaagcagcacgcttacacccaaaatgtgaycacatttgccctgttatttcttttagcctcaataaaattcatgtaattcatcattcagccagcatcatttggaaacaacatagcattcataccagactatggtttgaccaaatgcatccttagaaacatacctgaaatct

SEQ ID NO: 762572 - DNA, 589 bp, Homo sapiens
tagtgacagagagtggctcggagagtggcgctccactgcaggacataaggcccacccctcaagcttccttaacatgcgaccactctgtagtaccaagggttctgtggcctctctggtataaacggcttgaaaatcccatgcaggataagtgsgtagacaggcttcccatgacacggcaggtccattccaacactgcgaggagaatccacttcagccccatcctgcacccgcttttccccgcaacggggcaagcttccaggagccctcctcctcacggtgatctcttacatcattcacggtagcaagtctagtgctttatatgtgtgaaaatttaagagctaactcattttaccagaagcccaagaggctgtccggtccacccaggtggggaccggagcccaccccgatctcaggtccaatatttgctcacgttcaggcagcaaaaaacatccttccactatgttccggtgagccagcagttcaccactgaagaaataaaaacaacaacaacaacagatccagccagttgaaacacttgttgatgctaagtgccactttagtgtgtgccgttcccggaaggctcagaaca

SEQ ID NO: 762573 - DNA, 589 bp, Homo sapiens
tagtgacagagagtggctcggagagtggcgctccactgcaggacataaggcccacccctcaagcttccttaacatgcgaccactctgtagtaccaagggttctgtggcctctctggtataaacggcttgaaaatcccatgcaggataagtgggtagacaggcttcccatgacacggcaggtccattccaacactgcgaggagaatccacttcagccccatcctgcacccgcttttccccgcracggggcaagcttccaggagccctcctcctcacggtgatctcttacatcattcacggtagcaagtctagtgctttatatgtgtgaaaatttaagagctaactcattttaccagaagcccaagaggctgtccggtccacccaggtggggaccggagcccaccccgatctcaggtccaatatttgctcacgttcaggcagcaaaaaacatccttccactatgttccggtgagccagcagttcaccactgaagaaataaaaacaacaacaacaacagatccagccagttgaaacacttgttgatgctaagtgccactttagtgtgtgccgttcccggaaggctcagaaca

SEQ ID NO: 762574 - DNA, 589 bp, Homo sapiens
tcacctgtgtaggggtggctcaggaaggaatgactgaagggtatacaaattactctgtggcttcagggggttgagtctctaattcaaggtcttgctgctaattctaaagtcatgcttggcaaagcacatcactctagagtttctacttttgcttcctgcattcccttgacatttcacatgccgctgcaacagaggggtggctggtctcctttttgcttgaatagctggagtccatacgctgggctggctttgacgctgcgcctggctctctcggctgcctacgccaccatgtggagaccatgtaaacacacaaaatgccatgcggccagcccgtgcctggaacacccaccaggcagcagagctcctccaagacagtcttcagcaggtggctgaacagcaacaaacagaaaagggacgtcctaggctgtatcagggragggatctgatgtgaccatccacccaatgtctccaccagatcaaatccaaactgctgatatgcggggtagaatttggcccgcatcacacaaagtagagtcagcttacctggacccagggggctggcctcggaggtactgaagagcacagagct

SEQ ID NO: 762575 - DNA, 624 bp, Homo sapiens
acaaggttttctcaatttccttgaaaaacaacgtaaaacttgctgttttacttgttgcactttgctaccttttcagtgatttaaaatattcaaatggtcatgaaaataaagtatctgtttcataggactggctactccatagtgttttttcatagatgttgattgctatggctctattttaaaattcccaggtcattctttcccacagagtaaagaagatcaggatgaygagtgcaaggaaagcatagaagttgacagaaaattgtgaaaatggtccagactttctaattgtgagtaatcacaacaatctcatattcaatattcaacttgattaccagaatgtccagattatcaagaacataaacttacctgggggcctcacaacaagcagaggattatctgtagaatgaaaaagaaataatggactctgtgccatatttcacaatcatgcaattctttaaatggttagtgtaactgaaatagctaaccaaattagaataaagaaaaagataaggtttgatagatgccaacgttttccttggttttattttctaaacatttccttttgagaaatactgttttctagttagagtgtgttgctatttacctagaagctgtggatcc

SEQ ID NO: 762576 - DNA, 590 bp, Homo sapiens
gataaacatacatgtgcatgtgtttttatagtagcttgacttataatcctttggatatatactcagtaatgggattgctgggttgaatggtatttctagttctagatctttgaggaatcgccacactgtcttccacaatggtggaactaatttacactcccaccaacagtgtaaaagcattcctatttctccacatcctctccagcatktgttgtttcctgactttttaatgatcgccattttaattggcatgagatggtatctcattgtggttttgatttgcatttctctgatgaccagtgatgatgagcattttttcatgtgtctgttggctgtataaatgtcttcttttgagaagtgtctgttcatatcctttacccactttttgatggggttgtttgttttattcttgtaaatttctttgagttctttgtagatactggatattagccccttgtcagatgggtagattgcaaaaaatttcttccattctgtaagttgcctgttcacttttatttaattagctgaggtatgtctatcccttttcgttaaatacttaaaactgttaatatatacatttaaataagtgg

SEQ ID NO: 762577 - DNA, 563 bp, Homo sapiens
taacagtatatatatttatttattttacaatctttgtaggtaaatattctgttctaaaatctgtccttttctttcctttgagattataccataaacatttatctgtgtggttatatagtgttcataataattacctttataattggattatatttcttcaaatgagctcaccataatttactttgactgtttatatgaatgagacagagtcaaaaatatcaaatacaagcatccaaaagctttcccttttttttttyttttttttttggtttcttcgggccattttgttttgtttgactatttctgaactctttctgtgtggtcccagtgcatggtgaccaggaaactgggacgggtgagaaagtagagttaggaaaagaaagggaaaggaaagccaaacaggagaactcactaaagttggctaaagttttatcaaggagagagagacaagaaatactagagttagctgcctgtgatgtgggacttgcaaagagaagtagaacaaatactgaagatatttgttgtttgttgcgtagggtaaattctttctttgtcctccctta

SEQ ID NO: 762578 - DNA, 619 bp, Homo sapiens
cctgcatctctgacagcttcagccctcccaggctccctttacttcctggtttttggagctcattatcctatctcctgtcagttttctgttcatgtagcctgacccccacccaccatgatataggcagaaaggactttctgatatctgcttttgtctctacagggaggtgattcatttcactgtgggcaggaccattcttcctggactggtgagcaraaaaatcaaaattgcgattcccataggtggtggtgttggaagcttcatttaaggtccctgaacagaacagaaagttaccgaaaaaacaagactagctctatcagagaccatggcatcagaatgacctggttgcagaaacgaccaaagtcatagtaagcaccaggaccagagaacagaaaaggatttatcttatcattgtaaagaatctttaatatttgtatatccttacaacataaggatagatgttatcctttatgctaatatacataaataaatttatgcatttaaatacaaattatgtttttcttgatgttttgacatatatttatatattttatataaaatatttcaagtatttaatatcactacttagaaatgtgtcctaactaattaaaaagaaatc

SEQ ID NO: 762579 - DNA, 619 bp, Homo sapiens
cctgcatctctgacagcttcagccctcccaggctccctttacttcctggtttttggagctcattatcctatctcctgtcagttttctgttcatgtagcctgacccccacccaccatgatataggcagaaaggactttctgatatctgcttttgtctctacagggaggtgattcatttcactgtgggcaggaccattcttcctggactggtgagcagaaaaatcaaaattgcgattcccataggtggtggtgttggaagcttcatttaaggtccctgaacagaacagaaagttaccgaaaaaacaagactagctctatcagagaccatggcatcagaatgacctggttgcagaaacgaccaaagtcatagtaagcaccaggaccagagaacagaaaaggrtttatcttatcattgtaaagaatctttaatatttgtatatccttacaacataaggatagatgttatcctttatgctaatatacataaataaatttatgcatttaaatacaaattatgtttttcttgatgttttgacatatatttatatattttatataaaatatttcaagtatttaatatcactacttagaaatgtgtcctaactaattaaaaagaaatc

SEQ ID NO: 762580 - DNA, 507 bp, Homo sapiens
tttaaatctaaagatagaaatgattaagcttagtgagaaaggcatgacaaaagccaagataaacttgaaaactaggcctcctgcataaaaaaattaaccaaattgtgaatgcaaaggcaaaagtcttgaagaaaatcaaaattgctactccaataggcaagtagaacacatgatgataagaagcaaaacagccttattgctgatatcgagaaagttttagtggccaggacagaagagcaaatcagccacaacwtttttttaagccaaagcctaatccagggcaaggccctaactcttttaaactctatgaaggctaacacaggtgaggaagctgcaaaagttttaagctagcagagataagttcatgaagtttgaggaaagactcaatctccataataggaaagtgcaaagtgaagcagtaagtgcttaggtagaagctgcagcaagttgtccagaacatctagttaagataattgatgaaggtggctactctaaacaacaaatttt

SEQ ID NO: 762581 - DNA, 570 bp, Homo sapiens
ctctccctcccctcaccccctaacccccaactggccctggtgtgtgttgttcccctccctgtgtccatgtattctcattgttcaactcccacttacaagtgagaacatgtggtgattggttttctgttcttgtgttagtttgctgaagatgatggcttctagcttcatccatgtccctgcaaaggacatgaactcattcctttttatggctgtacagtattcyatggtatatatgtaccacgttttctttatccagcctatcattgatgggcatttgggttggttccatgtctttgctatggtaaaatagtgctgcaataaacatatgtgtgcatgtgtttttatagtagaatgatttgtattcctttgggtatatacccagtaatgggattgctaggtcaaatagtatttctggttctagatccttgaggaatcaccacactgtcttccacaatgattgaactaatttacattcccaccaacagtgtaaaagtgttcctatttctccacagcctcgccagcatctatcgtttcttgattttttaataataatcacccttcttactggtg

SEQ ID NO: 762582 - DNA, 590 bp, Homo sapiens
aactctgctaaacttaattattagatcaaataactgtgacataaactccatgagattatctactaaaaaaatgaggccacctgcaagtaaagacaggtttacttcaccattttccatctggatgcatttttttctttttcttgcctaattgcactagttagaacatccaacacagcatakaatagaagtgatgagagcagataatcctttcttggtcctgattttaaagaaaaataatttttccatttttaagtacaatgttagctataggttttcacaaatgccctttaataagttgagtgcatttcttttttattctggtttgctgacagtttttatcaagagttgatattgcctttttccttgtccttgtgtagttttctacatgtgtgcaactgattagtactcagatgaagactagagggacaactctgcagtttttcagagtcctctctgtgtactactctctcttctctggtactttaccctgtaaactctagaaacttcagcttccttagattcccaagtcaatttccccaatgcacagagaccaccaggctcaatctggatccctcccaccaacaatacaa

SEQ ID NO: 762583 - DNA, 671 bp, Homo sapiens
gaataaaagcccttgagtgggttatatcagtttggattgttacatctttaacaattcacttcgaagtgacttcaattaacagtagcattatgtgtggctgtatgtatatgagggaaataagtcaacccagttggaagtatattgtaatattaaggatagtatataaaaatcaattgtactgtccctaaattgtccctaatgttattggctttgattaaaccattctaaggaagatccaatcgtattaattcaaactgaagtaattggctcttttattgttgcctgctttttatgatcaatttacagattcaaaggctgcaaactttccttcattctgttctcaactatttaaaccatgtgcaaagggagcacatgaaacaatttttatctctacytcttctgccccaatattttataattcagaggagcttgttaacaaattgtggggtagaaaagtactttttaatgtgacttcctagataaaaagaaggaaacaagcacacatggaaaatgagaaattgacttaaagtagaattctggagtaaccatttttgtttttttgtctgtttttattttttttttaaatggaaattgtaagattggagtggtaagaaccaccttgtaagcagtggcagtagaagcctccagggaggatgccatattgaggagag

SEQ ID NO: 762584 - DNA, 515 bp, Homo sapiens
aactgtcttccaaagtagctgtaccattttgcattcccactggcaatggatcagaattcctgatgttccacatcctcactaacacttggtgttgtcaatgttctggattttggacactctgataggtatgaggtggtatcttttttttttttaattatttcacagtccattccttgtctgtatttgttcttatattcggtttggtttaktcttcatgtctgaaatgatttttactttttttaaaaagataaaatttttattttagaacaatttgagatgtacagagaaattaagaagatagtacagagagttcttataagccccataccaattttcccctattattaatgtattatgttaatttatacacttactatagctaatgggccaataatgatatggtattattatcaactaaagtccataatctatattctaatgtgctttttctgttccagaatccattccaggataccatattacaattaatttgcatttccttgataacatatgat

SEQ ID NO: 762585 - DNA, 515 bp, Homo sapiens
aactgtcttccaaagtagctgtaccattttgcattcccactggcaatggatcagaattcctgatgttccacatcctcactaacacttggtgttgtcaatgttctggattttggacactctgataggtatgaggtggtatcttttttttttttaattatttcacagtccattccttgtctgtatttgttcttatattcggtttggtttagtcttcatgtctgaaatgatttttactttttttaaaaagataaaatttttattttagaacaatttgagatgtacakagaaattaagaagatagtacagagagttcttataagccccataccaattttcccctattattaatgtattatgttaatttatacacttactatagctaatgggccaataatgatatggtattattatcaactaaagtccataatctatattctaatgtgctttttctgttccagaatccattccaggataccatattacaattaatttgcatttccttgataacatatgat

SEQ ID NO: 762586 - DNA, 515 bp, Homo sapiens
aactgtcttccaaagtagctgtaccattttgcattcccactggcaatggatcagaattcctgatgttccacatcctcactaacacttggtgttgtcaatgttctggattttggacactctgataggtatgaggtggtatcttttttttttttaattatttcacagtccattccttgtctgtatttgttcttatattcggtttggtttagtcttcatgtctgaaatgatttttactttttttaaaaagataaaatttttattttagaacaatttgagatgtacagasaaattaagaagatagtacagagagttcttataagccccataccaattttcccctattattaatgtattatgttaatttatacacttactatagctaatgggccaataatgatatggtattattatcaactaaagtccataatctatattctaatgtgctttttctgttccagaatccattccaggataccatattacaattaatttgcatttccttgataacatatgat

SEQ ID NO: 762587 - DNA, 515 bp, Homo sapiens
aactgtcttccaaagtagctgtaccattttgcattcccactggcaatggatcagaattcctgatgttccacatcctcactaacacttggtgttgtcaatgttctggattttggacactctgataggtatgaggtggtatcttttttttttttaattatttcacagtccattccttgtctgtatttgttcttatattcggtttggtttagtcttcatgtctgaaatgatttttactttttttaaaaagataaaatttttattttagaacaatttgagatgtacagagaaattaagaagatagtacagagagttcttataasccccataccaattttcccctattattaatgtattatgttaatttatacacttactatagctaatgggccaataatgatatggtattattatcaactaaagtccataatctatattctaatgtgctttttctgttccagaatccattccaggataccatattacaattaatttgcatttccttgataacatatgat

SEQ ID NO: 762588 - DNA, 504 bp, Homo sapiens
gttttaccactttcaaatgtagtctactaatagttgtatttttttgttgttagaaataaaaccagagtcaacttacccattgggcagagtgcttaggacccacaaatcttttaggagctattgaaaatgttttaattttttttaaaccaaaaggaaaaataatataatccagagtggattatattcatctttattccagtgcacttgtgaaatacagttcttaatattgttttcatggtggaaagagccatgaaagcaaaagtgcagaaggccgataagagatacaacatggccctgaattaaaccatyttgactcttattcctttgtttctacctacaaactatattccaaatattttgcattcactccgtttccattttgtcagacaaaagctaaccaccataatttcttatatctattaaagtgtgaactcttaaccagttccttaattttgcttttgtcccccacaatccattttctatgcaatggcccagtgaactgtg

SEQ ID NO: 762589 - DNA, 542 bp, Homo sapiens
gaagaagttgatttttggttaagtaactatctcaaaaaaaccacagttattacaaaggagaactaagacttaaagttagacctctgtttttcaataggccacaatttttaaccactcaccttggagcttttaatttggagatacatatacaaaaagtatgaaaacaatattttaaaaatccatcgacttaccactaaacataagaaataaaacattacagataaaagccatgtctcctaagtttcttacattcccttttctcagtggcacagctaactacttaccagaggttatttgatcatttccatagctgtgtttatatttttactgcacatgtatgtactcctaaataatacaygtcattgttagtatgttatataaatgttatcctactatcttctctgtaattttctttatgatattcattcttatgaatatatgtagctttttttttcatttatgctaggagtaattacactataaaattagttttataccaagaaaaccaactagtctttcaaggggggatgatttctctactg

SEQ ID NO: 762590 - DNA, 583 bp, Homo sapiens
aaaagccatcttttttggaaaattgtcttaaatactaaaaggcatttccagttcaaaatataaaggtaaacactctcacagagactcaattatttgggcagagacatgtggttaacatttcctagggaagaagcaaatgagaaaaggtcaaaggcaaaagtcaactgagaagagctgcaacatctcakcaatttacaaatttaaaggacagcaacagtttgagggtgagggatacacataccacttccattcattataagctgaggtttaagggaaaatctcttgcttctctggggtgaacaccacaacatctgttctttggtcataacagcaactaagttgatttaagaaaatattctctctctcttttttagagctgttcattcataattacttgatttctcttgagacttggttcccttaagatgtgtttattctgcacatctgctctccccatacctgattacacaaaggtatcagaaagagcaaaccaacaggtataaagagaccagccctcaaaacagatcaaagcaaacagcccgtggagtcctttggaaatcttggctggcagctcttgtaaata

SEQ ID NO: 762591 - DNA, 624 bp, Homo sapiens
aatggctccccattttactcagagtaaaagccaaagttcttacacaatgtcttaggctgtctagtcctcacaacttctctgatctcatctacaactctttcctatgctcacactactccagtcataattggtttacctgatgttccttaaatacctaccctaagcccaagcctctcakgactttttcacctgacattctctctgccgtgaatactcttcctccaggtatttacatcgtggttgtacaactgctaattttagtattcactataccttctagtacatgcaaatatttcacactaatgtttaaaaattgggtaaaataagggggtagaagagacggaagctaaataatttgctcaaggttacatagcaagtacgtggcagagggagaattaaaatgtatattgacaccaaagcccttgcctaataaaaaggcattatttcaatgtgcctgccctaaatgctcagatctggctcatgatgaaaatactatcaactctctaatatttgttttagtgaatttcactattttattttttaaagagatctatcaggtagctagtggttgctttgcactatgctatgtcctaaaaatagaaccgcagaataaaaattccaaag

SEQ ID NO: 762592 - DNA, 635 bp, Homo sapiens
gagattagtgacttaccagatctggactcagtttggagggtgctcagacctcaggaagaaataagcaggaactccaggcttgaagactttgggtctcttctgtgggtctttagaagcttttattgacctttctaatcacaactcccacccacacccctccacgtatccactgctagcttccaatcaacaagtgatatctgattgcatttctgaagctccacccagttaatcctgattggggttttggctctccccagattaatggattgaatcagatatccattcatatcagatatccatattaagttcatgaatcaagaaattgacagtgttagggatagggtgggaatcaagaatgcattcattcaagaccgggcaaggtggctcactcctgtaatcccagcactttgggargacaagttgggtgggtcacctgagttcagacattcaagacgagccaggccaacaaggtgaaaccccgtctctacaaaaatacaagaattaggcagggacgatggcacatgcctgtaatccagctactcaggaggctgaggtgggagaatcgcttgaacccaagaggcaatggttgcagtgaaccaagattgcaccattgcactccactctgggtgacagag

SEQ ID NO: 762593 - DNA, 652 bp, Homo sapiens
aagatttagggatagggtgaaagtccaggactcattcactgattcccttcacaaacatggagttttactaatatgtgtccttcaaagtcctgagtgtgagacagggaagggttgaatctcttcctgatattagacagaaagaaagaaaacttgaaattatccttgttgagggatccttggccacatcaaatttatcaaaatatttcagagttaaaacagttttcaaagacagagatgacagtccctaagaaaacacaatagaaatcttcatgtawcccatgatcacctgggtcatataattttttttggtgctgagggagctgagtctcacatcgtcgcccaagctggaatgcagtggcaccatcttggctcactgttacctcggcctccaagattcaagcaattctcatgcttcagccttccacatagctgggactacaggcatgcaccccccacagccatgtctccatttgggtggaagaggatgtgattggtttaaaattacggtcaaagatcctttttgattgattttgtttttgtttttggacagagtgtctctcttttgcccaggctggagtacagcagtggtatgagcatggctcactgcagcctcaatcttctgtgctcaagtgattctcccacaccagccacc

SEQ ID NO: 762594 - DNA, 652 bp, Homo sapiens
aagatttagggatagggtgaaagtccaggactcattcactgattcccttcacaaacatggagttttactaatatgtgtccttcaaagtcctgagtgtgagacagggaagggttgaatctcttcctgatattagacagaaagaaagaaaacttgaaattatccttgttgagggatccttggccacatcaaatttatcaaaatatttcagagttaaaacagttttcaaagacagagatgacagtccctaagaaaacacaatagaaatcttcatgtaaccsatgatcacctgggtcatataattttttttggtgctgagggagctgagtctcacatcgtcgcccaagctggaatgcagtggcaccatcttggctcactgttacctcggcctccaagattcaagcaattctcatgcttcagccttccacatagctgggactacaggcatgcaccccccacagccatgtctccatttgggtggaagaggatgtgattggtttaaaattacggtcaaagatcctttttgattgattttgtttttgtttttggacagagtgtctctcttttgcccaggctggagtacagcagtggtatgagcatggctcactgcagcctcaatcttctgtgctcaagtgattctcccacaccagccacc

SEQ ID NO: 762595 - DNA, 612 bp, Homo sapiens
aagtggatcattcccacatttttcatgaccccactctagcgcggactcctaaaggatcaacgtcctgccccagcgtggtccatttgctccaatgcatgaaccacacgaaccatccttatcacccaaagttcataattaacattaagggttcacatctggtgctgtatattctatgrgttctgatgaattgatgatgacatgtattcacccttatagcatcatgcagagtagcttcagtgccctaaaaaaatcacctgttctctttctatccatcccactctaccctgactccttgcaacccctgggctttctactgtgtccatagatttgccttttccagaatgtcatgtggccttttcatgttggcttctttcacttggttatgtgcatttaagttttttttatgtcttttagggcttaataatttacactgtcaggatgtgctacagtttattcatccatttatctgctgaagaatatattggtccctattaagttttgtctattatgaatgtagtggttaaaaacatccaggttttaggttttctcatttgggtaaatgccaaggagcgtggctgctggaccatgtgcctaggttgtgtttgataatga

SEQ ID NO: 762596 - DNA, 595 bp, Homo sapiens
acacagagagagggcataactgaggctacatacactttgaacctgatgggatcctgggacaagagggagtcctggccctcccgagttggcaggacagtagctccaaaggcacaactgaagctgcccaggtcgcagttccaaccaaggtcccccagtgctcttgagggctcaggaggtctccccttctcctgcagcatgggggtgtctgctcccactgtgtggtccctcctggcacctgctgtaattttggagyggagttggggtcaagcatgtatgctgtggcagcccagatgagcgtgtgcatgctcaggttcgtgctgatgcaccgtctgcctgctgtcttgaacactctgggctttgggccctgatgagcatgggagggaggctgaggacagatcagtgctggcctttggatgctccttgatgcaagtgacctgggcgccatgggtggtggtgggaggcagacagactcctggatgggaagacgagggtacctggtgaggctctaccttgtgaccaaggggggcctgaagcccgtgggctggtccaccagtgctatggaccagagtgggaatatgtggtgccttttctgtgc

SEQ ID NO: 762597 - DNA, 595 bp, Homo sapiens
acacagagagagggcataactgaggctacatacactttgaacctgatgggatcctgggacaagagggagtcctggccctcccgagttggcaggacagtagctccaaaggcacaactgaagctgcccaggtcgcagttccaaccaaggtcccccagtgctcttgagggctcaggaggtctccccttctcctgcagcatgggggtgtctgctcccactgtgtggtccctcctggcacctgctgtaattttggagtggagttggggtcaagcatgtatgctgtggcagcccagatgagcgtgtgcatgctcaggttcgtgctgatgcaccgtcygcctgctgtcttgaacactctgggctttgggccctgatgagcatgggagggaggctgaggacagatcagtgctggcctttggatgctccttgatgcaagtgacctgggcgccatgggtggtggtgggaggcagacagactcctggatgggaagacgagggtacctggtgaggctctaccttgtgaccaaggggggcctgaagcccgtgggctggtccaccagtgctatggaccagagtgggaatatgtggtgccttttctgtgc

SEQ ID NO: 762598 - DNA, 540 bp, Homo sapiens
tgatgggatcctgggacaagagggagtcctggccctcccgagttggcaggacagtagctccaaaggcacaactgaagctgcccaggtcgcagttccaaccaaggtcccccagtgctcttgagggctcaggaggtctccccttctcctgcagcatgggggtgtctgctcccactgtgtggtccctcctggcacctgctgtaattttggagtggagttggggtcaagcatgtatgctgtggcagcccagatgagcgtgtgcatgctcaggttcgtgctgatgcaccgtctgcctgctgtcttgaacaytctgggctttgggccctgatgagcatgggagggaggctgaggacagatcagtgctggcctttggatgctccttgatgcaagtgacctgggcgccatgggtggtggtgggaggcagacagactcctggatgggaagacgagggtacctggtgaggctctaccttgtgaccaaggggggcctgaagcccgtgggctggtccaccagtgctatggaccagagtgggaatatgtggtg

SEQ ID NO: 762599 - DNA, 595 bp, Homo sapiens
acacagagagagggcataactgaggctacatacactttgaacctgatgggatcctgggacaagagggagtcctggccctcccgagttggcaggacagtagctccaaaggcacaactgaagctgcccaggtcgcagttccaaccaaggtcccccagtgctcttgagggctcaggaggtctccccttctcctgcagcatgggggtgtctgctcccactgtgtggtccctcctggcacctgctgtaattttggagtggagttggggtcaagcatgtatgctgtggcagcccagatgagcgtgtgcatgctcaggttcgtgctgatgcaccgtctgcctgctgtcttgaacactctgggctttgggccctgatgagcatgggagggaggctgaggacagatcagtgctggcctttggatgctccttgatgcaartgacctgggcgccatgggtggtggtgggaggcagacagactcctggatgggaagacgagggtacctggtgaggctctaccttgtgaccaaggggggcctgaagcccgtgggctggtccaccagtgctatggaccagagtgggaatatgtggtgccttttctgtgc

SEQ ID NO: 762600 - DNA, 495 bp, Homo sapiens
acacctgtaatcccagcactttgggaggctgagactggtggattccttgagatcaggagtttgagaccagcctgctgaacatggyaaaacctcctctctactaaaaatccaaaaagtagccaggtgtggtggcgggagcctgcaattccagctactctggagaagcctggaggacagcaagcaatgcgctctgtaatcccagcgaggtagtagtgttgcatgtgagcatgagatcatgccactacactccagcctgggtgacagagagagactctgtcttaaaaaaaaaaaaaggagaaaaaataattccatttgaggctgagtcacttcaccatcatttataggaatggatcaagttcacagaatccctaaagctccctttcctcatctgtcaggcagaaaaccacatccctgggccgcaggagcccagtggagattcaggcataaaggacaaacccagacaggatcctgcaacatcagctggggtgggcgggc

SEQ ID NO: 762601 - DNA, 495 bp, Homo sapiens
acacctgtaatcccagcactttgggaggctgagactggtggattccttgagatcaggagtttgagaccagcctgctgaacatggtaaaacctcctctctactaaaaatccaaaaaktagccaggtgtggtggcgggagcctgcaattccagctactctggagaagcctggaggacagcaagcaatgcgctctgtaatcccagcgaggtagtagtgttgcatgtgagcatgagatcatgccactacactccagcctgggtgacagagagagactctgtcttaaaaaaaaaaaaaggagaaaaaataattccatttgaggctgagtcacttcaccatcatttataggaatggatcaagttcacagaatccctaaagctccctttcctcatctgtcaggcagaaaaccacatccctgggccgcaggagcccagtggagattcaggcataaaggacaaacccagacaggatcctgcaacatcagctggggtgggcgggc

SEQ ID NO: 762602 - DNA, 519 bp, Homo sapiens
actttagacccggcccagtaactcacacctgtaatcccagcactttgggaggctgagactggtggattccttgagatcaggagtttgagaccagcctgctgaacatggtaaaacctcctctctactaaaaatccaaaaagtagccaggtgtggtggsgggagcctgcaattccagctactctggagaagcctggaggacagcaagcaatgcgctctgtaatcccagcgaggtagtagtgttgcatgtgagcatgagatcatgccactacactccagcctgggtgacagagagagactctgtcttaaaaaaaaaaaaaggagaaaaaataattccatttgaggctgagtcacttcaccatcatttataggaatggatcaagttcacagaatccctaaagctccctttcctcatctgtcaggcagaaaaccacatccctgggccgcaggagcccagtggagattcaggcataaaggacaaacccagacaggatcctgcaacatcagctggggtgggcgggc

SEQ ID NO: 762603 - DNA, 438 bp, Homo sapiens
cctccctgcttgttgtccctctctctgacttttcttcactctgttttccccttggatcctgcccacttccacattgttttgttttgttttttttttgagaccaagtctccctgtgtcgcccaggctagagtgcagtggtgtgatrtcacctcactgcaacctctgcttcccgggttcaaatgattctcctgcctcaacctcacaagtagctgggattacaggaacccaccaccatgcccagctaatttttgtatttgtagtagagttggggtttaccatgttggacaggctggcctccaactcttgacctcagcctcccaatgtgctgggattacattgtgagccaccgtgcccggcccagttctcacttttcatggtgcctttcagtgccattagaggagaggttcctgttacctccatggaccttgcgtggtgagc

SEQ ID NO: 762604 - DNA, 606 bp, Homo sapiens
cggatcatgaggtcgggagttcgagaccagcccggccgacacggtgaaataccgtctctgctaatacaaaatattagccaggtatggttgtccatgcctgtaatcccagctacttgggaagctgaggcaggagaatctcttaacccaagggccagagtttgcagtgagccaaaatctagccactrcactccagcctgggtggcagagtaagactctgtctcaaaaaaaaaaaaaaaaaattgtaaagcgaagccaagcatggcggcttacagccgtaatcccaacactttgggaagccaaggcagaacaatcacttgagcccaggagttccagaccagccagggcaacatagtgatagcccatgtctactagactctactagaatgttaagtaattatctgagcattgtggcacatgcctatagtctcagctactctgcagacagaggtgggaggatggcttgagcctgggaagcagaggtttcagttatctgagattttgccaccacactccagcctgggcaacagagaaagaccctgtctcaaataataataacaataataacacactttgggattgagtctaggggaagaaatggatcctaca

SEQ ID NO: 762605 - DNA, 428 bp, Homo sapiens
ttgggattgagtctaggggaagaaatggatcctacattcaaaacaaagactctactcttgaaaatagtgtatggggccagacatggtggctcatgcctgtaatcccaagactttaggagacaaggtggggggtttgcttgagtccaggtgttccagaccagcctggctaacaaagcsagaacccaacattataaaaaaatttaatagagcatggtagaaggaatatctttataattttagtaaaaaacaaaacctatctttcaaaatcacaatagcattcttgggtggggtgactcttgcctgtaatcccagcactttgggaggctaagggctggcagattacatggagtccaggggttccagaccagcctgggcaatatggtacaaccccatctctactaaaaatacaattagccaggcctcatggt

SEQ ID NO: 762606 - DNA, 428 bp, Homo sapiens
ttgggattgagtctaggggaagaaatggatcctacattcaaaacaaagactctactcttgaaaatagtgtatggggccagacatggtggctcatgcctgtaatcccaagactttaggagacaaggtggggggtttgcttgagtccaggtgttccagaccagcctggctaacaaagccagaacccawcattataaaaaaatttaatagagcatggtagaaggaatatctttataattttagtaaaaaacaaaacctatctttcaaaatcacaatagcattcttgggtggggtgactcttgcctgtaatcccagcactttgggaggctaagggctggcagattacatggagtccaggggttccagaccagcctgggcaatatggtacaaccccatctctactaaaaatacaattagccaggcctcatggt

SEQ ID NO: 762607 - DNA, 508 bp, Homo sapiens
gggaagaaatggatcctacattcaaaacaaagactctactcttgaaaatagtgtatggggccagacatggtggctcatgcctgtaatcccaagactttaggagacaaggtggggggtttgcttgagtccaggtgttccagaccagcctggctaacaaagccagaacccaacattataaaaaaatttaatagarcatggtagaaggaatatctttataattttagtaaaaaacaaaacctatctttcaaaatcacaatagcattcttgggtggggtgactcttgcctgtaatcccagcactttgggaggctaagggctggcagattacatggagtccaggggttccagaccagcctgggcaatatggtacaaccccatctctactaaaaatacaattagccaggcctcatggtgtgggtctgtagtcccagctactgggaaggctgaggtgagaagatcccttgaatacaggagacagaggttgcactgaggcaattatcacaccactg

SEQ ID NO: 762608 - DNA, 508 bp, Homo sapiens
gggaagaaatggatcctacattcaaaacaaagactctactcttgaaaatagtgtatggggccagacatggtggctcatgcctgtaatcccaagactttaggagacaaggtggggggtttgcttgagtccaggtgttccagaccagcctggctaacaaagccagaacccaacattataaaaaaatttaatagagcatggtrgaaggaatatctttataattttagtaaaaaacaaaacctatctttcaaaatcacaatagcattcttgggtggggtgactcttgcctgtaatcccagcactttgggaggctaagggctggcagattacatggagtccaggggttccagaccagcctgggcaatatggtacaaccccatctctactaaaaatacaattagccaggcctcatggtgtgggtctgtagtcccagctactgggaaggctgaggtgagaagatcccttgaatacaggagacagaggttgcactgaggcaattatcacaccactg

SEQ ID NO: 762609 - DNA, 508 bp, Homo sapiens
gggaagaaatggatcctacattcaaaacaaagactctactcttgaaaatagtgtatggggccagacatggtggctcatgcctgtaatcccaagactttaggagacaaggtggggggtttgcttgagtccaggtgttccagaccagcctggctaacaaagccagaacccaacattataaaaaaatttaatagagcatggtagaaggaatatctttataattttagtaaaaaacaaarcctatctttcaaaatcacaatagcattcttgggtggggtgactcttgcctgtaatcccagcactttgggaggctaagggctggcagattacatggagtccaggggttccagaccagcctgggcaatatggtacaaccccatctctactaaaaatacaattagccaggcctcatggtgtgggtctgtagtcccagctactgggaaggctgaggtgagaagatcccttgaatacaggagacagaggttgcactgaggcaattatcacaccactg

SEQ ID NO: 762610 - DNA, 565 bp, Homo sapiens
ataaattgaggaaattttcttaattactgctgggtctctctgcattgtggccatgttccgaagtccaggagagatgggctgatggccttgggatgcataaagtgacgccggccccatcagctcaggctgagggagaaaacagaggctcaggaatattctagagagcctaagcaagggcctcataggagctttggaatcccagtgtggattctgggagtggagaataggtcaggtcgtttcctgagatgggtttcgaaggttgctctgagcttggcagcagatgagcacctcgagaagaactggcgacagaacatggtagaaaagaccccaagtgcaggattctcactggggtsctgggggtgctactgcaccccttgaaatgggcaggaagagggagtcagtcagccagttctttccaatatttagcttattgaacaccttgggggttccactgagcccctcacctgaggggtttgccaatcatttgctaccagaacatgggaaggcttttcctctggccaaatctcaggtttatcgtgttagaaatggggaaaatagcaacgtg

SEQ ID NO: 762611 - DNA, 565 bp, Homo sapiens
ataaattgaggaaattttcttaattactgctgggtctctctgcattgtggccatgttccgaagtccaggagagatgggctgatggccttgggatgcataaagtgacgccggccccatcagctcaggctgagggagaaaacagaggctcaggaatattctagagagcctaagcaagggcctcataggagctttggaatcccagtgtggattctgggagtggagaataggtcaggtcgtttcctgagatgggtttcgaaggttgctctgagcttggcagcagatgagcacctcgagaagaactggcgacagaacatggtagaaaagaccccaagtgcaggattctcactggggtgctgggggtgctactgcaccccttgaaatgggcaggaagagggagtcagtyagccagttctttccaatatttagcttattgaacaccttgggggttccactgagcccctcacctgaggggtttgccaatcatttgctaccagaacatgggaaggcttttcctctggccaaatctcaggtttatcgtgttagaaatggggaaaatagcaacgtg

SEQ ID NO: 762612 - DNA, 431 bp, Homo sapiens
tgggtaattgtgagtatgtggaagtgatgtctataggaaccttcatctcagagttacagtgctctagaatagcatggtagcacttttacagtttttgagatggagtttccctattgttgcccaggctgcagtgccatggtgtgrtttggctcactgaaatttctgcctcctagttacatgcgattctcctgcttcagcctcctgagtagcttggattacaggcactcaccaccatgcccagctaatttttgtatttttagtagacacagggttttgccatgttggccatgctggcctcaaactcctgacctcaggagatctgcccacctcagactcccaaagtgctgggattacaggagtgagccaccgcgcccagctacagttagcatttctatacataccttccaaatgctgtggaataccatcacacc

SEQ ID NO: 762613 - DNA, 431 bp, Homo sapiens
tgggtaattgtgagtatgtggaagtgatgtctataggaaccttcatctcagagttacagtgctctagaatagcatggtagcacttttacagtttttgagatggagtttccctattgttgcccaggctgcagtgccatggtgtgatttggytcactgaaatttctgcctcctagttacatgcgattctcctgcttcagcctcctgagtagcttggattacaggcactcaccaccatgcccagctaatttttgtatttttagtagacacagggttttgccatgttggccatgctggcctcaaactcctgacctcaggagatctgcccacctcagactcccaaagtgctgggattacaggagtgagccaccgcgcccagctacagttagcatttctatacataccttccaaatgctgtggaataccatcacacc

SEQ ID NO: 762614 - DNA, 581 bp, Homo sapiens
aaaaagtgggtaattgtgagtatgtggaagtgatgtctataggaaccttcatctcagagttacagtgctctagaatagcatggtagcacttttacagtttttgagatggagtttccctattgttgcccaggctgcagtgccatggtgtgatttggctcactgaaatttctgcctcctagttacatgygattctcctgcttcagcctcctgagtagcttggattacaggcactcaccaccatgcccagctaatttttgtatttttagtagacacagggttttgccatgttggccatgctggcctcaaactcctgacctcaggagatctgcccacctcagactcccaaagtgctgggattacaggagtgagccaccgcgcccagctacagttagcatttctatacataccttccaaatgctgtggaataccatcacaccacttttacagttccagtgaattattttgttttttttctgcgatgtactctgagtgtgtcacccagactggagtgcagggccctgagctgggctccctggaaactctgcctctgggcttcaagtgattctccttcctctgcctcc

SEQ ID NO: 762615 - DNA, 581 bp, Homo sapiens
aaaaagtgggtaattgtgagtatgtggaagtgatgtctataggaaccttcatctcagagttacagtgctctagaatagcatggtagcacttttacagtttttgagatggagtttccctattgttgcccaggctgcagtgccatggtgtgatttggctcactgaaatttctgcctcctagttacatgcgattctcctgcttcagcctcctgagtagcttggattacaggcactcaccaccatgcccagctaatttttgtatttttagtagacacagggttttgccatgttggccatgctgkcctcaaactcctgacctcaggagatctgcccacctcagactcccaaagtgctgggattacaggagtgagccaccgcgcccagctacagttagcatttctatacataccttccaaatgctgtggaataccatcacaccacttttacagttccagtgaattattttgttttttttctgcgatgtactctgagtgtgtcacccagactggagtgcagggccctgagctgggctccctggaaactctgcctctgggcttcaagtgattctccttcctctgcctcc

SEQ ID NO: 762616 - DNA, 581 bp, Homo sapiens
aaaaagtgggtaattgtgagtatgtggaagtgatgtctataggaaccttcatctcagagttacagtgctctagaatagcatggtagcacttttacagtttttgagatggagtttccctattgttgcccaggctgcagtgccatggtgtgatttggctcactgaaatttctgcctcctagttacatgcgattctcctgcttcagcctcctgagtagcttggattacaggcactcaccaccatgcccagctaatttttgtatttttagtagacacagggttttgccatgttggccatgctggcctcaaactcctgacctcaggagatctgcccacctcagactcccaaagtgctgggattacakgagtgagccaccgcgcccagctacagttagcatttctatacataccttccaaatgctgtggaataccatcacaccacttttacagttccagtgaattattttgttttttttctgcgatgtactctgagtgtgtcacccagactggagtgcagggccctgagctgggctccctggaaactctgcctctgggcttcaagtgattctccttcctctgcctcc

SEQ ID NO: 762617 - DNA, 438 bp, Homo sapiens
agcagggtcaggcagagaagtagcccaagtgtggcccagagtcttctgatggtgttggcgaggaagatcagggagactttggccattgtccagatcctcagagaaaggagtgctcaccatacagggtccactgtgggaacagaaacctgcctttactcagtggaaggtaaagggaatagaagtggggaatcaaaagtcagaatcaaaagggaatcaaaagggaamagggattgagaaaagacaaagagaacagggagcactgaggacaggagcagctgatttatgggatgagaatgaaagcaaaggtcagggatgagtccttctaaattctgagtctctcccttactttacccacaggaggtggaaacttcaagtgctggatttgcgggatgttgatgagaatttctgggccagatggcctggagcctgggccctgtc

SEQ ID NO: 762618 - DNA, 600 bp, Homo sapiens
tcctcctgcctcagcttcctaaagtgctgggattactggcatgagtgactgtgtccaggccacatgcaacttaaaggaagcacagggaagtgctcagtgtgagggaaaaaaacataacagcagggggcaaggctggaggaaaatgttgaggtgacatcaatgagaacttcagggacccgtgtcctacagagtcggaaagagaagctaaagttctacagtgatgagaatgttatccctgcaaggatggttaccaaggaatatcagaaataaagagcacctgaatgaaaacttttaacctgttgtagcaatttatccaccagaaatatctagttattgagttactgatggaaaaataatgaaatactactttgtctgtgattgagtttcagctgtagaacatcaaagcaaccaaatagaatttgatcattttaagtatttcccacccgttcttgttctttgttttgttttggagacaaaatctcagtttgtcatttaggctggagtgcagtggtgcaatctgggctcattgyaatcctttccttcagggctcaagtgattcttgtgcctcaaccactcaaatagctgggactgcaggcacgt

SEQ ID NO: 762619 - DNA, 550 bp, Homo sapiens
caacacgatgaactcctgtctctactaaaaatacaaaaattaacttggtgtggtggctcatgcctctaatcgcagctacttgagaggctgaagttgtagtgagcccggatagcctgagtgagagagcaaaactctgcctcaaaaataaataaataaataaataaattaaattaaataaataaataaataaaataaattaaattaaaggcagcacagaatgaccaattaaaagccactaaggtggtcacagccaggtataaaggacaccagagaaaaagtctctagtgttaggataatcttgtcatgggtgggcaaaaattaccactgggacataagcaagtctcaagtcaattttcatgcaactcggaaagtcttggtcactggtggaacaatgagggcacrggccatcaccaaggataaagagagaattctgtacacggaacacttgtcaaaccaaatcactttgcccaaactcttcaaattccaacagaatttataggatttcctttgctctagagatattattaagaaatggaatgtggttctcaaa

SEQ ID NO: 762620 - DNA, 639 bp, Homo sapiens
cagggaagtgggtggccatctccaagtccatggacaattatgctggctatattctaacaggtcacagtcacttgtttcgagccaggttagaaatagctctggcatttaagatggagagtgagttagtaaagcagattcatatcactcttgtccataattccatgattagttcacctttgggctgagatgtcccagcacaggtcatctgctagtagtgtgggcaagtttctaattcagtgagacccccaaattgcggtgttgtgatgatcattctcctagtgaactagatatggtgaagtaatagcatctatgctctatcattctagggtgatctgaccaagatttcttggtatacgatttagagaatattgctactctaatccacastgttcaaagaaagaactcatctcctcatacatccagtgtgcctctctttgatttcttatagggaacacccagacagcatgtaggttagttagttattttccttgtcgtacaggagatcagaaatgacagtggctcaacttgccagagaaacaagtatcctggaccacaaaaacatcgttaacctagaccttatagcctgttggtgttagtaccttcagcaggaggacgtactagacaatggaagaggttgtg

SEQ ID NO: 762621 - DNA, 639 bp, Homo sapiens
cagggaagtgggtggccatctccaagtccatggacaattatgctggctatattctaacaggtcacagtcacttgtttcgagccaggttagaaatagctctggcatttaagatggagagtgagttagtaaagcagattcatatcactcttgtccataattccatgattagttcacctttgggctgagatgtcccagcacaggtcatctgctagtagtgtgggcaagtttctaattcagtgagacccccaaattgcggtgttgtgatgatcattctcctagtgaactagatatggtgaagtaatagcatctatgctctatcattctagggtgatctgaccaagatttcttggtatacgatttagagaatattgctactctaatccacactgttsaaagaaagaactcatctcctcatacatccagtgtgcctctctttgatttcttatagggaacacccagacagcatgtaggttagttagttattttccttgtcgtacaggagatcagaaatgacagtggctcaacttgccagagaaacaagtatcctggaccacaaaaacatcgttaacctagaccttatagcctgttggtgttagtaccttcagcaggaggacgtactagacaatggaagaggttgtg

SEQ ID NO: 762622 - DNA, 597 bp, Homo sapiens
ctcttgtccataattccatgattagttcacctttgggctgagatgtcccagcacaggtcatctgctagtagtgtgggcaagtttctaattcagtgagacccccaaattgcggtgttgtgatgatcattctcctagtgaactagatatggtgaagtaatagcatctatgctctatcattctagggtgatctgaccaagatttcttggtatacgatttagagaatattgctactctaatccacactgttcaaagaaagaactcatctcctcatacatccagtgtgcctctctttgatttcttatagggaacacccagacagcatgtaggttagttagttaytttccttgtcgtacaggagatcagaaatgacagtggctcaacttgccagagaaacaagtatcctggaccacaaaaacatcgttaacctagaccttatagcctgttggtgttagtaccttcagcaggaggacgtactagacaatggaagaggttgtgaatatgcccagtacaaacctcgagggcagttcacattttgtgatagaagtgtctaattccttacccaatttcaattcctttttcttccttacccacgaacct

SEQ ID NO: 762623 - DNA, 614 bp, Homo sapiens
aagtattttaaatataacagtaaagctttgaaggcattaatttaatgaacaggagagtacttggaactatacacatctactgagtcatggcaaggcccatggtaaaacaaatggagaggtcaatctaaaactagagagcagccgagctgagggttcagtgtgcataacctgtgccactagtctgggtaacagtggggtagcatggcgcctgaaaacaggccaaggctcagggtcacttctccagaggtatgtaaagtagaaagagtaccttttttttttttttttttgagacagagtctcactctgtcgcccaggctggagtgcagtggcgygatctccgctcactgcaaactccgcctcctggattcctgccattctcctgcctcagcctcccgagtagctggaactacaggtgcacgccaccatgcctggctaattttttgtgtttttagtagagacggggtttcaccgtgttagccaggatggtctcgatctcctgacctcgtgatccgcctgtcttggcctcccaaagtgctaggattacaggcgtgagccaccgcgcccggccagaagagtaccttttttaacaataagtaaaggtgaatatattaaag

SEQ ID NO: 762624 - DNA, 512 bp, Homo sapiens
tagaaaaaaattatatttctttgggtatctacccagtaatgggatttctggatgaaatggtagttctgttttgcactctttaacgaattgccacactgcttccacaatagttgaacaaatttacattctcaccaatgtataagtgttcttttttctccacaacttagccagtacctattacaatttagactttttagtaatagccattctgaatggtgtgagatgttatctcatcctggttttgatttgcattgcgctaattatcagyaatattgagcttttcttttttttcaagtgcttattggccacatatatgtcttcttttgaaaagtttctgttcatgtactttgcccactttttaaggaattgctttttccttgtaaatttctttcagctccttatagatgctggatattagccctttgtcagctgcatagtttgcaaatattttctcccattctgtaggttgcctgtttactctattgatagtttattttgctatgtgaaagttt

SEQ ID NO: 762625 - DNA, 611 bp, Homo sapiens
tacttcattttaattacgaaaacaatagtgatttagaaatcattcttttcttttaacaaataaacttaggcaaagccatattaagcaagtttctcggtgtcatactactaataaatactagaggcaagatttgaatcccaaaatctctgactccaaagacttcattcttaactayagtagtaattgtttaaacagatgtttgacaattaattcaatatattctgtagaaagccctttgtagaggtgcataaaaattcttataagacagaggattaaaatctgtactacgtgaagaactgttccaaataaataagaaaaaattttaaacatgaatatcctgagcaaaaacaatttgcaaaggagaatatagactgtcaattgatgtgtggaactaaagttagtcaaatacttagtattgatccaaatacataattattcaaatatatggaaaaaaataacaaaaacctattttataaggctcacaaagattaataatattgataaatgcccagtattttaaaaagtgaaaatgaattttcatacattgttaataaagatgattttgggtggtccttttggaaagacaccttggtaatatgtacacctaaaaa

SEQ ID NO: 762626 - DNA, 620 bp, Homo sapiens
agatggaaaagattaaatcacaccttgaagaaaatgattgcaaaaatctgtcaagaaaccagtttaaccttgaataaggtgttatgcccttccctgatgtgtatctgggtagtggcccaaagtaagctccaactgagctgctttaaaacaatgtatggaaaaccattcctggccttgctaaaggaaaagtgcctggtataacaaaaacagatagcaattaaacagtatttaaagatcttaaatggagttctaacctttgtttataaacttgcttctaacagcctactgattccaacagacgtgcccctccatcactttaaagtgggtgaccaggtccttctcaagttgtggacagagtgcaggccaggggaccacctcatccccccaataaactgctccctaaggagtactaccgactccccacttgtcagccatgctagccagaatagaattttggatccatcaccctcgaayaaaacttgtccctacaaacttgaacaggaaaagaaaagccttggctacgggagcgtcttgggttgctgtttcaagccaggtctactgacagaaaagcaaaatgaattgggtctttatagtttgggtcatgaatgccttgatttctt

SEQ ID NO: 762627 - DNA, 585 bp, Homo sapiens
ttaaaaacacagtacatcgcctggatccattatgctgagggtatcatgctaaatggaactagtaaactaaacattactaaacgttttaatacaacacatatgtggcacagagtggaaaacaaatcctataaaaatgtagatagctgtctgtcctatggtctagggtatgttcagtcatcccttccaaggtaaaggatgaattcctgcatctcgcattcttacaactaagacacagacacagtgtctggtgatgctctttggaagaatacacttgttgtcggattgtgctatcaaaaactatttgccaaatattccaaaagttttccagtttttaatggaacccagaaaagaaaatgctttgtaacaggtccaggatgctgtgcaggctgctctgctatttggcttacgtagctamgcagatcaaaaggtgctcaaagaatgtgtggcagatagaatgctgtatggatcagtgatagacacttataaatgaatcacagcacaatcctttagaactttggagtaaagccacaccgtcctcagcatttaactatgttccctttgagaaagtttctggcttgatatagt

SEQ ID NO: 762628 - DNA, 626 bp, Homo sapiens
caagcatcagcttaatgaatagaactaaaattctaagactgttgcaaatttaaaattcccctctgtgggcacataaactatgacaatatccttgttgttgactggaccatcggtgccatgtacaaatgcccacaaaaagggctcattctctggtgggactatgtaaaattgagctcctagtcaactctatatttctgacactgcttgtatttctatttctgatctggactagaatctggaagttggtagaaagggaatcttcaatcccctttacagggaatcttgacctcctgagggatgcctcacaaactgttgttgacttgcgtttagctttctggatcagttgtagattgcaatgatgaactgatagcttcagtctattttctgtatctttctcytggtacacacacatcagtaaggaaatttgactactaaatacaaccgtcgccagaaaagtgtgattgtttatagaatgctcactaggtaaatggttataataaaaggtagggaaagttatgtaaactaattttattttttttttaacttcaggattttatcctaaccagttcctaaacatgatgcatctttctgattaagttgtaccgaaatatttttttctaagaaaa

SEQ ID NO: 762629 - DNA, 626 bp, Homo sapiens
caagcatcagcttaatgaatagaactaaaattctaagactgttgcaaatttaaaattcccctctgtgggcacataaactatgacaatatccttgttgttgactggaccatcggtgccatgtacaaatgcccacaaaaagggctcattctctggtgggactatgtaaaattgagctcctagtcaactctatatttctgacactgcttgtatttctatttctgatctggactagaatctggaagttggtagaaagggaatcttcaatcccctttacagggaatcttgacctcctgagggatgcctcacaaactgttgttgacttgcgtttagctttctggatcagttgtagattgcaatgatgaactgatagcttcagtctattttctgtatctttctcctggtacacacacatcagtaaggaaatttkactactaaatacaaccgtcgccagaaaagtgtgattgtttatagaatgctcactaggtaaatggttataataaaaggtagggaaagttatgtaaactaattttattttttttttaacttcaggattttatcctaaccagttcctaaacatgatgcatctttctgattaagttgtaccgaaatatttttttctaagaaaa

SEQ ID NO: 762630 - DNA, 593 bp, Homo sapiens
ctcatttggttaatttttttttctgcttgttaataattatgtgtgaaagtacacttatttttcatggataaatagtctaacaattatttatatattttattctaaaccagactttaaacattgtttatattctcgatgattcctctaggtaagtattatccaagtgatatattcaaaattttcagtgtttcttaaaaagaggtttgaatggtcaaatattatattaaatactgtgtgtcttactgtctacataargatactaaaggctctgagcaattctgcaattaagaaataagctaactttaaactcaatatagcagaactatttaggaatgagacactgtttctcttttttattattaatcctacagaattagtattaacattctgtggagtcctctttgaaaatacctatttcagcttagaaaagaattgttttctttgcctatatgaataaaagaaagtgaaccaagtatgttaggaaatccaaaccacaggaataggaacttttacagactgattatgctgagtagagatcacataatgcatgatccatttatctagctacttagtcaaggccctgccccttatca

SEQ ID NO: 762631 - DNA, 630 bp, Homo sapiens
aatgagacaagttcagtaagcaattgtttatcttcctcttagttatgattaatgactcttggaattggagcatatttatccagtaagcaatacaaagcaagttaaagaagaacctcaggcccaaaatcagtatactgattctccatgatacactcacttcagcttttaaacatcatagaatgtcttagtgactaagaaaattgcatctgacaaaatagttaaatctccaatatattaaactggaaataccaatgaaaatgccagataagcacagcaattttttttcaacactgatactatttttttttcctgagattttgctttccagtgggttctctattgaaaaaatggctatcctccttggaaggtgattggtgaaggaaaaactttaacagggactcagaacatattatyattgctaggatgctgattctgtcaaacatgtctggaatgggttcagtaatattaaccaaaaaacctcacaaaagaactacattaaaagaacttacactgtctaaattgttacaatttaaaattaataatgacataaacaactcataattaatacaaataaaaataaatccagttctcagaaggtcatgatttcataaaatctgaaagtgaaaaatt

SEQ ID NO: 762632 - DNA, 622 bp, Homo sapiens
tgtgacaaacattgagagaaacctccgcattttcactgttttcaacatagtctaccaacacttaataaactaggtcttccctattactatcatttattttatttataggtagccagtgctcattttttgatatatttttcagagttacatgaagatattatatcagaaatcaaattattttgcttcagacacaaattaaatattaattagttataaaattctccataaactagaggttaaagaaaactcacaaacgcctacacggtacaagctggaaatgtaaattgtgaaatatgcctaatgtaagatcataggtaaagtctatagcatgatgcaaaggcgcagacctattctgaaggcattcatattcaactatgtatttttaagcttggatagaaaaaagaaatgacaacagkccatttagggtcacagatagctagcgttcctgtagacattgcttgcgtgatctttatcatttagtggtgaagagaagtctgaggcaagtgtgattcctggtgcacatgacctgcttttctctacctgacttttttcattatcctcaaagaactagaaaaaaatccctgaaataggcctaactgttgatggtttttaattaagttga

SEQ ID NO: 762633 - DNA, 567 bp, Homo sapiens
tttatagatcttaaaggagtacagtttttttcttttttttttttgagcttgagagaaaccaaagctaagatgtttccagatttggcatatgtccttaggataaaagcaattttttctcactcaattcctgcccgcatttatattttggcctagatgattattctcttgtttgcacttctatatgtttggatgcttttacattttatctcttcttttrgttttttgtttttgtttttgttttttgtttgtttgtttgttttttagtggaagaagcagtcaagaaacttggtccaccctattagtggaaatgagagtgcagtttaaatattatttgttgttttatatgctatcatctttagggatttaaaaagtttcgctaggcttattccagataaaatttattatcaaagctgatatcaaaaatatctccaagcatactatcatagtaatatgaatgctagaaagtactacatttttactcacaaacacttggatgcatagtttaataaatattgacctcaccatatgtgactgaagttgtacaatcagtcaagggaacataaacca

SEQ ID NO: 762634 - DNA, 567 bp, Homo sapiens
tttatagatcttaaaggagtacagtttttttcttttttttttttgagcttgagagaaaccaaagctaagatgtttccagatttggcatatgtccttaggataaaagcaattttttctcactcaattcctgcccgcatttatattttggcctagatgattattctcttgtttgcacttctatatgtttggatgcttttacattttatctcttcttttggttttttgtttttgtttttgttttttgtttgtttgtttgttttttagtggaagaagcagtcaagaaacttggtccaccctattagtggaaatgagagtgcagtttaaatattatttgttgttttatatgctatcatctttagggatttaaaaagtttcgctaggyttattccagataaaatttattatcaaagctgatatcaaaaatatctccaagcatactatcatagtaatatgaatgctagaaagtactacatttttactcacaaacacttggatgcatagtttaataaatattgacctcaccatatgtgactgaagttgtacaatcagtcaagggaacataaacca

SEQ ID NO: 762635 - DNA, 597 bp, Homo sapiens
ttttcatggtgacactacttttctattgggttgcaactaaatttgggaggttgacacagtatcataaaagcaaagaaagatatccagccctatagtctttttttttttcttttatgatgtaccttcctaggtcaactgagttttgcatattcctcattgctgggactgtagtcacctctctttttattctcactacaatgggaaataactgtcttcagatatcaasagtgtggattccttttaggctagatttcccacacttaaatatcctagtgttatatcagggacgaggagacaagacaaagagacatgccattttcatatttatatttttcccctctccaattctttattttccctccaattccagaaaactcctagcacttctcaaatgggaacatattaaaatcctagcaagtattttaaaaattctattgatagtctcaaggcttcagctttcggaaattaaaataattttgcttctctatttggttcttctttctttttcagtaaaagcacctacttgaagacatagagatcttttcccctactaagttgcccaacaggagatgatcagtttaaagaaaatgtggaaat

SEQ ID NO: 762636 - DNA, 601 bp, Homo sapiens
acataaaatttcttatttatatattttaaatatattttccatctatcttatcctgtcaaaaaagtgacatgtcttttttttatatttggatttttacatcaaaggaagtcatagctcttgcagagtgagaaatggggcagccagaggacttcttcagggtgtaggaatgttctccgtcagggggaagccgagtgattctgggttatttcatggggaaatctgacttagtaagattaatatgagggaayattagaagggagaccaattataggaaaccttagtagtctaagtaagagttaataaaggttaataatgaattaagttaataaggatataatcacaccacttttatattaaacttttctcacctttttttgcattttctgcaggttcagttctaatccctttaattgtcaaacaaggcacatcttggtatgccttgtacctatcctggtactctttttcagagtgttaaaacactttctctttacatactaaataactgtacatccatgattacatcaagctcacaattctagtactcacatattttatgagaaaataacttgtatattcatttttttctgactaaaatgcctaa

SEQ ID NO: 762637 - DNA, 601 bp, Homo sapiens
acataaaatttcttatttatatattttaaatatattttccatctatcttatcctgtcaaaaaagtgacatgtcttttttttatatttggatttttacatcaaaggaagtcatagctcttgcagagtgagaaatggggcagccagaggacttcttcagggtgtaggaatgttctccgtcagggggaagccgagtgattctgggttatttcatggggaaatctgacttagtaagattaatatgagggaacattagaagggagaccaattataggaaaccttagtagtctaagtaagagttaataaaggttaataaygaattaagttaataaggatataatcacaccacttttatattaaacttttctcacctttttttgcattttctgcaggttcagttctaatccctttaattgtcaaacaaggcacatcttggtatgccttgtacctatcctggtactctttttcagagtgttaaaacactttctctttacatactaaataactgtacatccatgattacatcaagctcacaattctagtactcacatattttatgagaaaataacttgtatattcatttttttctgactaaaatgcctaa

SEQ ID NO: 762638 - DNA, 645 bp, Homo sapiens
ttttggtatcagggtggtactggctttgtagaatgagttaggaggagtcctcctctacaatttttttgaatagtttcagtaggatggttaccatctcttctttgtacttctggcagaattttgtggtgaattcctcttgtccagggcttttattggttagtagggtttttattattaattcaattwtggaacttagtatttgtctattcagggcttctatttctttctgattcaataattggaggttgtgtgtttccaagaatgtatccatttcctctagattttctatttggtatgcatagaggcattcttagtagtctctgaggatcttttgtattctgtggggtcggtggtaatgtcaactttgctatttctgattatgcttgtttaaatattccgtcatttttttcttgttaatttagttaatggtttattaatcttgtatattctttcaaagagacaacttttggttttattgattcattgtgtggatttttgaactcaacttcattgagttatgctctcattttctttctttattttttttctgctagctttggggatactctgttcttctttctctacttcctctgggtgtaatctagatcattaatttgagatctttttaacttgtttaggtaggca

SEQ ID NO: 762639 - DNA, 645 bp, Homo sapiens
ttttggtatcagggtggtactggctttgtagaatgagttaggaggagtcctcctctacaatttttttgaatagtttcagtaggatggttaccatctcttctttgtacttctggcagaattttgtggtgaattcctcttgtccagggcttttattggttagtagggtttttattattaattcaattatggaacttagtatttgtctattcagggcttctatttctttctgattcaataattggaggttgtgtgtttccaagaatktatccatttcctctagattttctatttggtatgcatagaggcattcttagtagtctctgaggatcttttgtattctgtggggtcggtggtaatgtcaactttgctatttctgattatgcttgtttaaatattccgtcatttttttcttgttaatttagttaatggtttattaatcttgtatattctttcaaagagacaacttttggttttattgattcattgtgtggatttttgaactcaacttcattgagttatgctctcattttctttctttattttttttctgctagctttggggatactctgttcttctttctctacttcctctgggtgtaatctagatcattaatttgagatctttttaacttgtttaggtaggca

SEQ ID NO: 762640 - DNA, 619 bp, Homo sapiens
aatgataaattaagaagattaaaaacctcttgaaacaaatgaaaataaaatcacaatatatcaaaacctatgtaatatagcaaaagcagtactaagagggaagtttatagctataagtaactgcatcaaaaattaggaaacttcaagtaaacaacctaataaagcactttaaggaactagaaaagcaagaacaagccaaaccccaaattagcatatgaaaaaacatcagagcagaaataaataaaatttaaatgaagaaaacaatgcacaagatcaatgaaataaaagttggtttagaaaagacaaaattttaaaaaagatctttagtcagactaagaaaaaaaaagagaagacccaagtaaattaaatcagaaatgaaaaagaagacattgtagctgatactgcagggatttaayggatcattagaggttattatgagcaactatatgccaatcaactggaaaacctagaggaaatggataaatttctagacagatatgacctacaaagattgaaccatgaagaaatccaaaaccttgaatagaccaataacaagtaaaaattgaagccaacaagtattgaatagaccaatagcaacaaataagatcgaagccatagt

SEQ ID NO: 762641 - DNA, 584 bp, Homo sapiens
agatatttttactacatatatccaaagtttttaacttaatttattcctttcagcagttttaatcacttcttttgaaggatgtgatacactaattaatatggtttataaagctgtattttaagtatttgttcattttgaaaaatcttagcacagctatataagttagttgaaaatattttggacaccaaaacacattactagaccattataattgcatgaggcttataaataaacacacatrcatacactatttacatggaaatgaagaaaatattcaaagaaaaaaggtattcatgtataagggacatatttatgtctaagaaatatcacttagaaagctttaactattctgagaattataagcacacatgtttaagtaatatactatacaactttaccctacgcccataaaatattttttaaccacaactttaatattaataatttaaataatttaaaattaataatttaataagtaaatattttaaatgaataatgttgttaaggatgtttaaatgttctaatacattattatatttgatattataataatacttaaatcacattgttccatttatttccct

SEQ ID NO: 762642 - DNA, 621 bp, Homo sapiens
cacagggcaagctcctcctgcagctctgctggtggaattcttggcacctttcatcctgtctggaggtgggtatgaagaccaccttcctcaactcagtaaaaccccagactcttagtcctatggggtcagggaggttgggggggacccccagggaaagctcaagtcagagttgcaggaacccagcccgactggatacagtgtccctttctcccagaatctacctgggtgacagaggtgagccgtccacccattgccacgtgccttcctgatttaggtctgaaagtcccatccaggagaagcggttactcctggaagtctgcagctgtaggaagttctggagggtagaggaggagtcaggagggagctctgcttcccattttccaggttccacctccccgtctcttggcagaaagttctgctttcaagttaacctgcagttttctgatatascaggtcctgagcctcctcatgtctgagcccctctcacatctgtatccccatggcatgtgtgtcctgacatgcaggcacgcatgcacagctggcctctcctcacgtgctcctgtgaatgctgcatgtttatctattttgcatgtccacatgaatttactcctgactgggttt

SEQ ID NO: 762643 - DNA, 543 bp, Homo sapiens
ccaatggttttaatccatttcagaggattcaggtcagagaacccatcaatggttccattaaagacatcagcaccaggtaagaaagttaagtgggcttgagatgcctcaaaaacttgttcctttaattttgctatatccagtgtgggttcacgccattctcctgcctcagcctcccaactagctgggactacaggcgcccgccaccacacctggctaattttttgtatttttagtasagactgggtttcaccatgttagccaggatggtctcaatctcctgacctagtgatccgcccgcctcggcctcccaaagtgctgggattacaggcgtgagccacctttccctctaaatggtgtttaaccttatcccaatgaggcacagaggcattataagattgaggagtaatgcaaaaatcagaagtattccaatcaccctgcatttgtattctatgctccaagttcataattcgatcccccatccaccgtactgtttgacaaagatcgttaatttgattagttaatttttgatcaatttgcgtctgt

SEQ ID NO: 762644 - DNA, 563 bp, Homo sapiens
agactctgggtttcaccatgttggcctcactggtctcgaactcctaacctcaagtgatccacctgcctcagcttcccatagtgctgggattacaggcatgagccaccgcgcccagccccagttacagattatctatctggacaaggacaggaggctcccaggagtgggggaacttggatgttggcrgaagtgggctggtctaaggttccccaccttccttgttccacctccagcctctggggaagtaggtacctgcctgggagagtgacatctcagctcatgccccacgccccagtgtgatttgtggctggcctgtctgtatctgtaataatgatagcttgatctaaaaggagaccctgggaacagacagagtgggccggccaggagcctgacagcacagccctagcctggtcgcagatgtcacctgacaactttccatttgcaaatcctccttcctcctcggacatccggacaccccattgccccctctcagagcccaggtctctggtttctgcctgtgattctgggctgtagccctttagaaactcaggtgtcctggtcac

SEQ ID NO: 762645 - DNA, 563 bp, Homo sapiens
agactctgggtttcaccatgttggcctcactggtctcgaactcctaacctcaagtgatccacctgcctcagcttcccatagtgctgggattacaggcatgagccaccgcgcccagccccagttacagattatctatctggacaaggacaggaggctcccaggagtgggggaacttggatgttggcggaagtgggctggtctaaggttccccaccttccttgttccacctccagcctctggggaagtaggtacctgcctgggagagtgacatctcagctcatgccccacgccccagtgtgatttgtggctggcctgtctgtatctgtaatartgatagcttgatctaaaaggagaccctgggaacagacagagtgggccggccaggagcctgacagcacagccctagcctggtcgcagatgtcacctgacaactttccatttgcaaatcctccttcctcctcggacatccggacaccccattgccccctctcagagcccaggtctctggtttctgcctgtgattctgggctgtagccctttagaaactcaggtgtcctggtcac

SEQ ID NO: 762646 - DNA, 601 bp, Homo sapiens
ttgctacatgcatactgtaatggtcaagccagggtatttagggtatctatcgcctttgtatttatcatttccatgtgttgggaacatttcaggtcattctcttctagctattttgaaacatacaatacattgttgttaattatagtcaccctactctgttatcgaacattaaaacttattctatctaactgtatgtttgcactcattagctaacctttcttcatcccctcaccccgcaacacacccttcccagcatctagtaactgtcattctgttctgcctccatgagatcagttgttttagctcccaaatatragtgagaatatatgatgtttttctttgtgcctgacttattttacttgacataatgacctccatttccaaccatgttgctgcaaataacaggattttattcttttttatggttgaatagtattccattgtgtatatattccacactttctttatccatttatttgttgatgaacacatgattctgtgtctttgccattgttaatggtgttgcagtaaacatgggagtgcatgtatctctttgatatactgatttcttttcctttgaataaataccaaatagtgggat

SEQ ID NO: 762647 - DNA, 438 bp, Homo sapiens
cgcagtgcggttctccgctcaccgcaagctctgtctcccggcttcacgccattctcctgcctcagcctcccgagtagctgggactagaggcgcccgcacccaggcccagctaattttttttgtatttttactagagacagggtttcaccatgtcagccagatggtctcgatctcctgacctcgtgatctgcccgccctggcctcccaaagtgctgggattacaggcgtgagccaccgcaccgtaccaaggtccggtattttcaatgctgkctcagattctgcttcctgggagacccagctggagattctcatgtgttgagatacatggtggctctctgcaggatctcttgtctctatctagattgatagacttggacagcttggactcatcaaagatcacctcttttctttagtttttcccccatgagtttggaggta

SEQ ID NO: 762648 - DNA, 646 bp, Homo sapiens
aacatatcaattcagtgcttaactccataaatgtatttataaaggaaactttaaaacactaccataaatttaagactagtatggtaaacaggcattaaaattactatgctaaaaacaaaactatgttattttttgcagaaggcactaaacctgaggttactctctttttctttttttttttctgagatggagtctcgctctgtcgcayaggctggagtgcagtggcatgatctaggctcactgcaagctccacctcccgggttcaggccattctcctgcctcagcctcccgagcagctgggactacaggtactctctttttcttaaaaaagggggtcactaaatgagacattttccttgatgtattcaaaaggatgacagcattggggaaagggtgtttgcaatttgctgtgtgttacactgttcttcatgcagtgtgcacacctaaaatcatcttgttgcttaaagtccattgataaggacttctctgggagcctcagacctcaatgaatacattagcctacttgacacttccacttggctatttggcagggaccttatgtcagcaagtctagccagaactcatgacttatttttcaatccaggtccattgctccttatattagtgaatgatgcctccaccttca

SEQ ID NO: 762649 - DNA, 608 bp, Homo sapiens
gctggataactggcttagaaaatggacagagatcaagggagatttttgtagggggtggggaatgtgccaatgaaagatagagaggggctattcacagaggaaggatcattctgctgtaacattctcttcttcctttaaaacaaatattttttgggtggtgctgggaatgaaaatcattttattttcagcattacttcgtttctgcgtgtgattacatttttttcaataggttgctgggaaacaggcatgtttggttacatgartaagttcttcagtggggagttttgagattttagtgcacccatcacacaagcagtgtacactgtacccgctgtgtagtcttttatccctcattcctcctcccaccctttccccctgagtccccaaagtccattgtatcattcttatgcctttgagtccttacagcttagctcccacttatgagtgatatatatatatatgtatatcacattttctttatcccctcattgattgatgggcttttgggctggcttcatatttttgcaattgtgaattgtgctgctataaacatgcgtgtgcaagtatctttttcatataatgacttcttttcctctggatagataccc

SEQ ID NO: 762650 - DNA, 521 bp, Homo sapiens
aatcactgcactatccctcctccatgctcattgattcattgattctctccctgtgccacatggctgctgctgggggatgggggaggggtgacataggtaattcaaaaccgtcttttctaccctattcaatgccgctttcagtgatatgaagttaaaaccaggtactgtgatgctcacctgatttttggttctttttttttttttttgagacggagtttggctgttgtcgcccaggctggagtgcaatagcatgatctcggctcactgcaacctccgcctcccgagttcaagcgattctcctgcctcagcctcccgagtagctgggattacaggcatgygccaccacgcccagctaattttgtatttttagtagagacgggttttctccatgttggtcagactggtctcgcactcccgacctcaggtgatccgcccgcctcggcctcccaatgtgctggtgagtcactgcacccgcccttgatgtttggttcttatgaaggtatttttttttttacatagat

SEQ ID NO: 762651 - DNA, 529 bp, Homo sapiens; identical to SEQ ID NO: 748985

SEQ ID NO: 762652 - DNA, 657 bp, Homo sapiens
aagatttctgtttaagggtttggtgctgaatcatgagtatttctgagccacttagatggttaatgggggcaacaggatggcattcttgaaactggctcccaggaaggagggcagttacattctggcgggtgccctgcgtcagtgtctgcactgtgggactgtaagccgtggagsgaggaggtcctctcttaggcttttctcaagtcctcccttgtcctccccttcaaggcctgagcctgaatcttacacaaaacaaagatttaaaagacatgggcttgagaagcaggagggaaacgaatgcctggaagcctctggacttctgccctctttccccaaacaaccaggtacactgccctcctgctgccttcttccatcacaaacagcaccatctcccaggccctctgtataatctgaggactcccagctttcaggtaacctttgacccacccttgccccccaccactccatccatcctgcccagcagaggcctgggcagccccagggacttactcagcaagctggagttggggaagcgccaggcctcgctgtaggaggagtagggggtgtggccataggcattgccagagtattcacttcctgttggaggcacacaggggagaggcctgtgaggtgaagggcatcaatgcagggctgggg

SEQ ID NO: 762653 - DNA, 657 bp, Homo sapiens
aagatttctgtttaagggtttggtgctgaatcatgagtatttctgagccacttagatggttaatgggggcaacaggatggcattcttgaaactggctcccaggaaggagggcagttacattctggcgggtgccctgcgtcagtgtctgcactgtgggactgtaagccgtggagcsaggaggtcctctcttaggcttttctcaagtcctcccttgtcctccccttcaaggcctgagcctgaatcttacacaaaacaaagatttaaaagacatgggcttgagaagcaggagggaaacgaatgcctggaagcctctggacttctgccctctttccccaaacaaccaggtacactgccctcctgctgccttcttccatcacaaacagcaccatctcccaggccctctgtataatctgaggactcccagctttcaggtaacctttgacccacccttgccccccaccactccatccatcctgcccagcagaggcctgggcagccccagggacttactcagcaagctggagttggggaagcgccaggcctcgctgtaggaggagtagggggtgtggccataggcattgccagagtattcacttcctgttggaggcacacaggggagaggcctgtgaggtgaagggcatcaatgcagggctgggg

SEQ ID NO: 762654 - DNA, 518 bp, Homo sapiens; identical to SEQ ID NO: 748988

SEQ ID NO: 762655 - DNA, 602 bp, Homo sapiens
ggttccttcctaaggccaagccagtcctttctgcaaattataatttggccaaaccctttgtgcaaagggctataaggcattttttccccagagtctgagtgtcaaagcattcccagtgattcaggatacactccagaggagtagactgaagatggttgatagcccatctgaaagagagagaaaaagacatcccttagatcctttatctctttcacctcttctcaggggtatgtaagggagaggaaaaaagggtgtccctgtttttttcttccatctttttatccctgagttctggagacctaggtgggtgctgcccatgggtaccagtgtgaccctcccccaagaagcagggagtctagarggtaggaattatttgcactcacctcacactgcctatcctccctgctgttggcaacctttgagttccctagacctcatctatgccatggatacaagcacggcctccttccttgaagtggaggctgaattgaaaggaattagtcctgcccatctacactgtgccccttgacttccattgttatctgcctttggatccctcagatctagttttcctttatagggcttcaacctgaagcttggaa

SEQ ID NO: 762656 - DNA, 612 bp, Homo sapiens
ctactgctatatgataccaagaattgcttgaagatacataactcccagggatgtgctaaaccatggttattctgaccctgtataattcaaatgtatttgttttcttttaacaaaattgtaggtcatctatttctagccccataatctcctcctcatttgcttccattaacagaaattctgaagataaatgacatacaagtgccaaatttacagttccaaaatgaagagttctrcattcaaaaaaaggatgagaaaggatgttatttgagctagaccttcaagcacaagaggaattccgataagtacgaggcactggaaaattattatagtcaaggataatggcaaaagcagagaataaaggcaggaaggggcatgtagtgatcagaagccaaaacaaaaatcagtgggcagatacattctttagaacaactcattattatcgtcattatatacacaagaaaacagagttcatcagataggttcagcagattgttcaaggtcacatagcaaaagatggagactcttggattttatcccagccagaccaactctaaccaccatcctgtgcagcctgagaccaattgttaaagttacatgtattggtatgaccat

SEQ ID NO: 762657 - DNA, 612 bp, Homo sapiens
ctactgctatatgataccaagaattgcttgaagatacataactcccagggatgtgctaaaccatggttattctgaccctgtataattcaaatgtatttgttttcttttaacaaaattgtaggtcatctatttctagccccataatctcctcctcatttgcttccattaacagaaattctgaagataaatgacatacaagtgccaaatttacagttccaaaatgaagagttctgcattcaaaaaaaggatgagaaaggatgttatttgagctagaccttcaagcacaagaggaattccgataagtacgaggcactggaaaattattatagycaaggataatggcaaaagcagagaataaaggcaggaaggggcatgtagtgatcagaagccaaaacaaaaatcagtgggcagatacattctttagaacaactcattattatcgtcattatatacacaagaaaacagagttcatcagataggttcagcagattgttcaaggtcacatagcaaaagatggagactcttggattttatcccagccagaccaactctaaccaccatcctgtgcagcctgagaccaattgttaaagttacatgtattggtatgaccat

SEQ ID NO: 762658 - DNA, 474 bp, Homo sapiens
atttttatttcctagaaatggtgctcagaaacattgagtaactcaatcaagttttcagagttacatagtagtagaaatgaaactggaacctggatttagtaaattatcagctggtaaattcggtacaattctactwatagggataactaaaaccagatgccattatttaattattttatttctatttacatcaaactttaagacagaatacttccagccaccaatttacttcagaaacctgataatgcaagtaatattcaacaacaacacgcttctcctaatcactgtgagagtagtggagctcctgataattggaaggggagccctttatctactggcttgtattcccctgaagtcatggagaaataacagccatcccagagtcataaggaacaatgtgtatagagagatagtactaaactaatagtgcagagttgcaggtcagagttgttctggttattgccataatatagg

SEQ ID NO: 762659 - DNA, 558 bp, Homo sapiens
gttattcattgaagttgtcagttgtaatggtaaaggcctagaaacaaccaaggtggctctctcaaagttgaaataaactgtgatactcatacaacatagagcactggccgggcgcagtggctcacgcctgtaatcccggcactttgggaggccgaggcaggcggctcacgaggtcaggagattgagaccatcctggctaacaaggtgaaaccccgtctctactaaaaaatataaaaaaattagccgggcgtgggggtgggcgcctgtagtcccagctactcgggaggctgaggcaggagaatggcgtgaacccgggaggcggagcttgcagtgagccgaggtcgcgccactgcactccagcctgggcaacagagtkagactccatcccaaaaaaaaaaaaaacaaaaaaaacaaaaaaaacaaaatagagcactaagcctattttgaaacaagatagaaatgtatatagtaataatgttccgtgttccacaaacattgctaagcgaaagcaaggtgcagaaaagcatatgtagtatgtcaccattatgaggaaaataa

SEQ ID NO: 762660 - DNA, 558 bp, Homo sapiens
gttattcattgaagttgtcagttgtaatggtaaaggcctagaaacaaccaaggtggctctctcaaagttgaaataaactgtgatactcatacaacatagagcactggccgggcgcagtggctcacgcctgtaatcccggcactttgggaggccgaggcaggcggctcacgaggtcaggagattgagaccatcctggctaacaaggtgaaaccccgtctctactaaaaaatataaaaaaattagccgggcgtgggggtgggcgcctgtagtcccagctactcgggaggctgaggcaggagaatggcgtgaacccgggaggcggagcttgcagtgagccgaggtcgcgccactgcactccagcctgggcaacagagttagactccatcycaaaaaaaaaaaaaacaaaaaaaacaaaaaaaacaaaatagagcactaagcctattttgaaacaagatagaaatgtatatagtaataatgttccgtgttccacaaacattgctaagcgaaagcaaggtgcagaaaagcatatgtagtatgtcaccattatgaggaaaataa

SEQ ID NO: 762661 - DNA, 614 bp, Homo sapiens
gggataccaatattatgagtaggatccatttatgcatagaatttttttgtttaaagaaatagtaatcattaaagaataacttttgaaattgtggcaaaagtttacaaacaaagacattattggattgatatttaattttagtgattgttttataatagaaataaatgtatgcagcttaataaaatmctttataaaccttctgacaaatacatcacaaatatttttataatctaaccagaggcattcaatgcattatccaaacttgggatatcagcgtcacacttacaacaaaaatttagtatggattacagcaaatcttttactttctttacatactgctttcatgtttctcacaaaaactctatgaggcgtaaatggtcaaatattaatcctattttaacatgagaacaaattcagaaaagtcgtgttttaagttacatatatatgaagccaggcgatttatatatatatatatgtatatatatataaatataaaatttatcatttacatacacacacagtcaaattaatgccagtactgtaactttaatgagttctggggtaaccctgtttttatatactgctttcttcttatcttcttattgacttttccc

SEQ ID NO: 762662 - DNA, 610 bp, Homo sapiens
  misc_feature 607, 608, 609, 610: n = A,T,C or G
ctaaatactaatgtcagtattattttactctggctgctgcactgacaattgatgtttgacagccacccaaattcagcatctctctaccacaagctctgggaccctaggggctcctgaagccacatatcatcatgtccctaaagcattatcccctatttttcacagccttctraaatacttgatggtttcttagagacgtgggagaatgcctctctcctctaccttgtgttgtacttcatcattaaggcactaatacaactgatacaaagcttgcagttctttctcacacagagagcctcatacaaaacagctccttccaacagtcattctcttaaaagaactcaactgtaagattcttaaatcagactggaaaccaatgtccaatagacacaaatgggcttctacatcttgctttctctaatccactagttgcctgggaacaatacaaagctgtgaaactctcaggaatataaatttaaaccagcagatgcctttaggctggttcattagatgagttaagtctcaccagtagggataaacagactcaagctaggaccctccaccccaccccagtagatacagatgattcttctttttctcccttttnnnn

SEQ ID NO: 762663 - DNA, 593 bp, Homo sapiens
taatagaaataaagtgcacaataaatataacccacttgaatcatctccactgccccggtctgtggaaaaattgtcttccacaaaaccagtccctggtgccaaaaaggttggggaccgctgacatagattagttaaaattttcgctcatagtagccttaatttctagtaaaactgaggaagcaaataattctaatttttagactttatgtaaaacaatttttcagtgtggaacagtacatatttactaacaagcccagatatataaacttaaacttctgtagaatatgtttcagtattttaacttacttggaaatgactcagacatttcrtgattgtctatcacttaatttacacgactttaagattgtataacactgaaaagatttttttaaataatagaaattacaatgattatttgatttgtattccattatgtaataataatttggggttcaatcaagtactttcttataaagttttctactctaggttaatctcaaaattggggaaaaaacttatcttattaaaagtgcatgaataatgttcatttcagaacaaagtacttagtgataacagtcctaaagaaagggata

SEQ ID NO: 762664 - DNA, 631 bp, Homo sapiens
acgactttaagattgtataacactgaaaagatttttttaaataatagaaattacaatgattattwgatttgtattccattatgtaataataatttggggttcaatcaagtactttcttataaagttttctactctaggttaatctcaaaattggggaaaaaacttatcttattaaaagtgcatgaataatgttcatttcagaacaaagtacttagtgataacagtcctaaagaaagggatatataatcaaacctagttaaccattcttccaaataagtttgagataacaatccaaataaattatgtgtttttttatattttcataaatgtttcaaaatcatgctatttattaatttgctacccatttgaaccatggtttatttgtatagattcttattctcttcatttatttcccaaggagttttattgccacattttagcttatgctttcactattacactaagattattaacgtcttaatcatatttatcacctgtaatccacttttttcttgaagagctgctttcaagaatcttccaacttcctgcttaaatctatagatattattaattctgcttactgtacagctatatcttgatttttttttgcattcctggattaacttcactg

SEQ ID NO: 762665 - DNA, 631 bp, Homo sapiens
acgactttaagattgtataacactgaaaagatttttttaaataatagaaattacaatgattatttgatttgtattccattatgtaataataatttggggttcaatcaagtactttcttataaagttttctactctaggttaatctcaaaattggggaaaaaacttatcttattaaaagtgcawgaataatgttcatttcagaacaaagtacttagtgataacagtcctaaagaaagggatatataatcaaacctagttaaccattcttccaaataagtttgagataacaatccaaataaattatgtgtttttttatattttcataaatgtttcaaaatcatgctatttattaatttgctacccatttgaaccatggtttatttgtatagattcttattctcttcatttatttcccaaggagttttattgccacattttagcttatgctttcactattacactaagattattaacgtcttaatcatatttatcacctgtaatccacttttttcttgaagagctgctttcaagaatcttccaacttcctgcttaaatctatagatattattaattctgcttactgtacagctatatcttgatttttttttgcattcctggattaacttcactg

SEQ ID NO: 762666 - DNA, 631 bp, Homo sapiens
acgactttaagattgtataacactgaaaagatttttttaaataatagaaattacaatgattatttgatttgtattccattatgtaataataatttggggttcaatcaagtactttcttataaagttttctactctaggttaatctcaaaattggggaaaaaacttatcttattaaaagtgcatgaataatgttcatttcagaacaaagtacttagtgataacagtcctaaagaaagggatatataatcaaacctagttaaccattcttccaaataagtttgagataacaatccaaataaattatgtgtttttttatattttcataaatgtttcaaaatcatgctatttattaatttgctacccatttgaaccatggtttatttgtatagattcttattctcttcatttatttcccaaggagttttattgccacattttagcttatgctttcactattacactaagattattaacrtcttaatcatatttatcacctgtaatccacttttttcttgaagagctgctttcaagaatcttccaacttcctgcttaaatctatagatattattaattctgcttactgtacagctatatcttgatttttttttgcattcctggattaacttcactg

SEQ ID NO: 762667 - DNA, 636 bp, Homo sapiens
actgatctccagttccatccatgttgctgaagaagacatgatttcattgtattgtatggttgaataatattccattgtgtatatatgtaacattttctttattcatttatctgttaatggatacttaggttgattccatatctttgctattgtggatagtgctgtgataaacttatgggtacaggcatctttttgatataaggatctgttttcctttgggtagatacctagtagggggattgctggatcaaatgatagttctatttttaattctttgagaaattttcatattttttccatagaggttatactyatttaaattcccatcaatagtgtataagagtttccttttctctatgtccttgccaacatttgttattatttttttctttttaataatagccattcttgactggtgtaaggtgatatcttattgttgttttaatttgcatttctctgatgattagcaatgttgagcgttttttttttttttccacatgcctgctggccatttgtatgtcttcttttgaaaaatgtctattcatgctttttggtcactttttaatgggattattgggatttttttgttggattgtttgagttccttgtaaattctggatattagtcccctgtcag

SEQ ID NO: 762668 - DNA, 650 bp, Homo sapiens
cagactttttttatttttaatgaccttgacagttttgaggagtactggtcaggtattttgtagaatgtccaagagttggaatttatctcatgcttttctcatgattagactgagagtatgtgtttttgggaggaaaaccatggagttacagggtcattttcattacattacatcatattattaacataacattgctattaatgttaactctgttcacctggctgaggaaatatttgtaagatttttccactgtaagttaccatatttcmccatcctttgccacactctactctttggaaagagattgctatttgcagcccctgcttaaggagtggtgctgggaaaacttgctaaccataggaagagagataaaactggatctctaacttaccatgtacagaaatcaactcaagatggactaaggatttaaatatataaaaattctagaagaaaacctaggaaatactcttctggttattggcctaggcaaagattttatgactaaattctcaaaaacaatagcaacaaaaacaaaaattgacaatgggaacctcattaaactaaatatactaatcgttatttagaaaatgatgatgactttcttttcttctccagaattttgtacaagtcctatattttaaaaatgaata

SEQ ID NO: 762669 - DNA, 600 bp, Homo sapiens
aagcaatttcaatcaaaacctcaaccggatttttcagaacttaaaaaactgatctaaagcacatataggccagacgcagtggctcatgcctgtaatcccagcactttgggaggccaaggcatgtggatcgcctgaggtcaggagttcaagactagcctggccaatatggtgaaaccccatatctactaaaaatagaaaaattaggtgtgcctattggtgtgtgcctgtagccccggctattcgggaggctgacaggagaatcacttgaacccaggaggcagaggttgtagtgagccaagatcacaccattgcattccagcctgggcaaaagagcaagactcaaaaaaaaaaaaaaatacatacagargagcaaaaagccaaggatagttaagacagtcctgaaaacaaacaatatggaagagccactatcagatatcagtaattattacaaagctgtaagagttaacacaccatatagtaatgatgcaggactagatgaaacaaaactatattttgtacaaagtcacttatagctagggttctggacgtacgttaggataatccaattagatgaacctgcacaagatttagaaagcagat

SEQ ID NO: 762670 - DNA, 632 bp, Homo sapiens
ttaggcactgccttacgtggaccaatatttggaaagtttctgcatattgtaatttccaaaaaataagcctagcagacatgggaatctctctatatccaaaatttccaactctatgtaataagctaaactgtccattgaattatactatgattaaacacaccttgtataaggaccacctaactagcagttttccaagtttgtatttgactttatgtatcagaaatccaactacaatggcttaattgataaaggttgtttttctcatgtaacccacattccagaagagggctggggcagctgctcaaagaagtcattatggcaaggacctagacttctaatttcctccctgccattcttcccacatggtttgtgttctcatagttgcaagatggttattctaaccctaggtgttgtatccaggcagaatgtatccttaggtgttgtataccaggcagaagggggaaagggtcaaggccaaggsgaaaagacatgccccagcttttcatttttaccaggaaaaatagcatttcagagctccacccagtaaacttccactcacaacccgctggtcagacctggtgacacagccacccccactctgcacaagagtctggaaggtatttttatctggg

SEQ ID NO: 762671 - DNA, 632 bp, Homo sapiens
ttaggcactgccttacgtggaccaatatttggaaagtttctgcatattgtaatttccaaaaaataagcctagcagacatgggaatctctctatatccaaaatttccaactctatgtaataagctaaactgtccattgaattatactatgattaaacacaccttgtataaggaccacctaactagcagttttccaagtttgtatttgactttatgtatcagaaatccaactacaatggcttaattgataaaggttgtttttctcatgtaacccacattccagaagagggctggggcagctgctcaaagaagtcattatggcaaggacctagacttctaatttcctccctgccattcttcccacatggtttgtgttctcatagttgcaagatggttattctaaccctaggtgttgtatccaggcagaatgtatccttaggtgttgtataccaggcagaagggggaaagggtcaaggccaaggcsaaaagacatgccccagcttttcatttttaccaggaaaaatagcatttcagagctccacccagtaaacttccactcacaacccgctggtcagacctggtgacacagccacccccactctgcacaagagtctggaaggtatttttatctggg

SEQ ID NO: 762672 - DNA, 515 bp, Homo sapiens
ttaaaagatccatccaacccatttctctctcttacctctcaaatatatgaaatgttcaaatcatcctttatgcttaagatatcttcttttaaaaaaaagtaccttcaaagatcactattttaaaatactttaatacactaacatctgttaacatctgcatttaacatgatttatttagccaccatgaaggaatrgaatacagatactgctaactttggaagagaggggacaagtcagcaactcagaagaaggtcattgggcatccaaaatgaacaagaaaacgaggtttatgagaagacatgcaataaaaactgaaaatgagagttgatttttttaagataaagttttcttattttttagttttgactagggtaaatccttactacaaattttgcctagagccactcctaccttccaggctaggcaaaaatgcctctgtttttgcgctatatgactaacaacaatcttccacccagctaatgtggaaactctctgacaataaaacttttcatggc

SEQ ID NO: 762673 - DNA, 496 bp, Homo sapiens
ctggaatacaagattcaagagcaattctccacctggaattgtgaatggagacctatccttggtgtaaataaatacacacatctttaatttcttgcaaatctctccctttcacacacatgcatatatttgacctgtttaagactagtcacacccatgctgaagaaaaataaaataccttctcattatgaatttttaaaactccatcatgaattgatayagcagtcttcttatgaggacctgtgggataaataactttcatacctcagaaactgaaacagcttcgcctttccaggacgagtttgtttttatcttaaaggttatatgagttgcaaaactgatcatatttttatcttttttgctagggagctcatttttggtccaccttttggtataggaatttaaataatgcattttgggttattaatcttaccaactacttttccccttttcccttccatccttacttttttccatgtctcctcattttttatcagat

SEQ ID NO: 762674 - DNA, 617 bp, Homo sapiens
taaggcatctcttccaccccagcctcagcagacagagaacctccccatcagcaaatcctctctaactctcctatatctcaagaaagacccttaggccaggtgcagtggctcacgcctataatcctagcactctgggagaccaaggcgggcagatcacctgaggtcaggagttcgagaccagcctgaccaacatagtgaaaccccgtctctactcaaaatacaaaaattagctaggtatggtgacatgcacctggagtcccagctacttgggagaccaaggcaggagaatcacttgaacccgggaggcagaggttgcagtgagccatgatcatgccactgcactccagcctgggtgacagagcgagactccgtctcaaaacaaaacaaaacaaaacaaaacaamacaacaaaacaacgcaacaacaacaaaaaaccctttcttggggtctctatcatggtcacattactgagacttttgtattgtattatactggtgtgcccttctttaccatgaacagattggagaaggggcccccgctgagctgaaactcaacctatgaggagagggatgatgatgattcctgacatcagacaaggggccccacaggactaagacc

SEQ ID NO: 762675 - DNA, 665 bp, Homo sapiens
ctgatgggaggtgattggagtatggagatggttttctcatgaatggtttagcaccatccacttggtgctgtccatgcattagtgcatgagatctgattgtttaaaagtatttggcacaccaccgcaccccttgctcctgctttcaccatatgacatgcctgctccctgttcaccttttgtcttgattgtaagcttcctgaagtctctttagaagcagacgttgctatgcttcctgtacagcctgcagaaccaggaaccaactaaacctcttttctttataaattacccaacctcgggtatttctttatagcaatgcaagaatggcctaatgcaactgtgaagatgaaagtaaacaaaagagaatttctacatcttcctattctgtgtcagacatgaagatgtgcccactcagctctcccttcaataaaaggctagttgtctatttgcaaggattgtgcttagctgctagcttccagcaattaatcccttcagggttcccttctgctttcaaactgaygccataggcttcttttgtggccttcagccaacaactgagcaaggcaatgtgcaagggtctgttcatttccatccaaggatccaaggtgggactcctctaacaggcaatcttgactttggagctggaccggcagagactgttaggacag

SEQ ID NO: 762676 - DNA, 646 bp, Homo sapiens
gcccggcctaggctttcaatgaatatcacattggcattatctattgcctgcctactatttcctaaggtgcaggggtaggggtaaacactgatgtaaaaatgaatatcatctgaccctggcctgaaggacctcagagaataatggtgagtcaaatatgaaacaaatctttataagtaggggacaggggctcatgtctataatcccagtactttgggaggctgaggcaggaggtttactagaggccartaattcaggaccagcctgggcaatatattgagtcccatctctacaaaaaatttaaaaatcacccaagtgtggtggtggtggcatatacctgcagtccttagctacttgggagactgaagcatgaagattgtttgaacccaggaggtcaagccattgcacccctgcacttcagcctgcgtaacagagtgagatctgtttccaaaagaaaaaaggaaaacaaacaaatccccaaatcattgtagttcaacataaatgttagcatgaagaagtaagggaaagggttctgtgtagggactacagaaacacagagaggttttaattaattgcttgcagggtgtggaaaggtttcacaaagaggttaataaaattacgtcttagaaatgagtagcagttcacaggc

SEQ ID NO: 762677 - DNA, 515 bp, Homo sapiens
ataatgaagataatgatttggaggtattgtgtgtttgatatggtataatatggagataataaacatggacatcatcctctaatatacttgaaaatattctgcttgctcatgtagccagaaagctgctcccctttcttaaattgatgttttaaaccgattttactggaatgttttatttttgagtatctttaagttacatgatctcaaatattaaatgttatcacattgtcagcatttttctcccagttgttttatttgtcaaaagtataggcatcttcartccctcaattcatttgttgttaagtggtcatatttatctcagtcaccactaggtggcataaataattttttggtcaaaccttttaaatttcaggatcttttttacaactgaaatatttgtatggttatccagtgtataaacaaaagctggtatgttgatggtataaatgtgtttttatgagttcagatttatagcactcattgaaaactgagttttgatgaacaatagatttgtt

SEQ ID NO: 762678 - DNA, 511 bp, Homo sapiens
ttggaaaagcttgaaattcagattatggataatcttacaaattttcacttcgagtttatttctaattttagttttatagtcttttaaaacatctgatttacatacataataaatggtattaacttttttaacttttaattttaaaataattttataaagatttatagaaccgttccaaaggtagcacaagagtcctgtatactcctcagctttctgtatgttaatattttactaaaaaattaacactgattctatcaactacagattttattcacatttcctcagttttcccactatttttttttytatttcataatctaaactacgatactatattgcatttagttgtcatatctctttgtctcttctaatctgtgacagtttctctgtgtaaagtctttcatgactttgatacttttgaagagtaatggtcagaaattgtgtacagtgctcctgaacttacatttgtttgttcgttgtttcctcattattagcctgaggttatgaattt

SEQ ID NO: 762679 - DNA, 554 bp, Homo sapiens
gtgcccaagccacttaccctggattctttatccccctctctaaattgtctctttccccctttccctcctatctctatttctcctatctgttctctccctgttctctctgtctcctccctgatctctcttacttatctcccttctcctgtttcttctctcttctcattgaatggtgggacacatggagttcaaattttgggtcacctgtgtgggtccttggaaaaatcaggacacttctctcagctaagtctcctttcctagaaaccacgactcagagaggacaaaccagatggtacatttaccctgcccagcctgcaaagaacaggcgctcttttcctcatgcccatccagttccttccttttytccctccctccttgttcatattctttcccttgcccttctttagacagcatagacaaatgctgaatcacacgcttaatttttaaattctaattctcacctacaaaagcaacacctccaagctcaatcacactgaaaacacagatctctggaatccagcagggatttgctgccttggttctttcctagctcc

SEQ ID NO: 762680 - DNA, 581 bp, Homo sapiens
acagggggtgtgaccggagaccaaacttggtcctgtctgtcrctgaagcctggctcctaactgctacacaatactgttttctcatgcttcatactaatacactaatacactaacaccaacactaacacatggctattgataatataatagcatattaatataaacacatttatattgatttacaaatataatcaaatttaatcctcataacaagcccattttacaactaagaaaacagagatttagtgagcttctatggagtcaagatttttcaatgttccatgactgtacaatgactgttcagatggtcggctcacagaattgtcccaggggtagggttctcggaggtccagggctctaacctgccatctggttagagaacctcagagaacttcagtctcaacagagctggggcagagaccttgctgcctggggtggagggtggaggaagagacctattctttggagtctataacccttagggagatcttcaccctgttcttgtgggcattatcctggagggctcacagaacaagtccagcccttcttggtgctgggacagaacttcaatgtcaaatgtt

SEQ ID NO: 762681 - DNA, 582 bp, Homo sapiens
gatctacgcttagtaaaacagaatcaagttctatacagttgagtatccatatccaaagtgcttggaccagaagtatttcagattttgatttttttttcagattttgaaatatttgcattttacttactggttgagcatcccagatctgaaaatccaaaatctaaagtgcttcaaagagcattcactttgagcatcatgttggtgatcaasaagtttcagattttggagcattttggattttgggtttttggatttagaatgctcaacctgcatataaaaggatccctatctaaaaaaaccaatctacaagaaaatacatcagaatgctaatagtgacaacatctgaatagttggatattactagcagcttccaattctaacaaacatataaaattgttattaaaaaaacagatattattacaaaaaacacacctcccatagccttgattgaaaaatattcctctctggtttcaagcaaacagttcttgaagaaataatatgcagactggtgcctaccagatttgcaagtttcaaaagcttttgtgcaacatcaatgtatttgttcatacaggtttctctaca

SEQ ID NO: 762682 - DNA, 582 bp, Homo sapiens
gatctacgcttagtaaaacagaatcaagttctatacagttgagtatccatatccaaagtgcttggaccagaagtatttcagattttgatttttttttcagattttgaaatatttgcattttacttactggttgagcatcccagatctgaaaatccaaaatctaaagtgcttcaaagagcattcactttgagcatcatgttggtgatcaagaagtttcagattttggagcattttggattttgggtttttggatttagaatgctcaacctgcatataaaaggatccstatctaaaaaaaccaatctacaagaaaatacatcagaatgctaatagtgacaacatctgaatagttggatattactagcagcttccaattctaacaaacatataaaattgttattaaaaaaacagatattattacaaaaaacacacctcccatagccttgattgaaaaatattcctctctggtttcaagcaaacagttcttgaagaaataatatgcagactggtgcctaccagatttgcaagtttcaaaagcttttgtgcaacatcaatgtatttgttcatacaggtttctctaca

SEQ ID NO: 762683 - DNA, 584 bp, Homo sapiens
tcatttaccagttaaaccccaccattttgcctcttagtacacaggcttgagctcactcacccaactcctgatatcttaccgagaagctgctaatcaccaatttcagatgtttctatctattgggagactgccttttcctggcactggctgtggccaattatgattttagagagacagtttagcaactgcctgaccatcacmtggtggtcgcctgacagtcctactggagcggaaggggacctctcttgcccagcttatgtctgagtagctgcctactgtaacagcctcttaccccatacctcaccttacgtgtctcttcatatgtatcctttgcaatatcctttataataaaccaagtaacataagtaagtgtctccctgagttctgtgagctgcttcaacaaattaattgaatcaaaaaggggggtcatgaggaccccaatttgaagacagtcagtcagaaattccagaagcccagatttgtgactagtgtgtgtgttgggggcgtgctgtcttggggaacccttaacctgtgggatccgacactatctcagggtagatagcaacagaactgaaagatagtat

SEQ ID NO: 762684 - DNA, 617 bp, Homo sapiens
acaatggactttggggactcagtgtaaatggtgggatagtggtaagggataaaatactacacactgagtacagtgtacattacttgggtgataggtgcaccaaaatctcagaaatcaccactaaagaacttattcatgtaaccaaacaccacttgttccccaaaaacctattgaaataaaagacaaacttacaaaaaaaaaataaagaaaaaagatacatcaggcataaaaaagtaaaaataaataaaaatggggctccctaaagtcagactttctctctgtaacacaaccccattgcatgtgcaggcatcatctggccctcctagctttgccttgtgggaagtggagctcaagtgaccagcataatttctgatcctctggctaccactgtggttgtgaataataaagtcatttgtctctgacccaggagtcttgtgtcttttggcagcayccatggacatgtagcaggctaacttgttagcttacaagtagggtaaaacctcagatccttcttagttcttgacactgctaggaattttacatatgtgatttccctgaattttctcagcaacctgttcatattatttctattttataataaagattctcaagcttag

SEQ ID NO: 762685 - DNA, 467 bp, Homo sapiens
cttggaattgtgatgcagagttatcagataaacagagttgtttacagcttatgttagttatgtttccataactaagtgcttggtgcatttaggttatctccacaactgaacttcttaaagaaaggactgtgttttatagttctttakgtgcagtacagaatcttctcttgcaagcagtttttcaataaataattaatgattttatatgattaaatataggtataaataagattgagatgaaggcatactagactgacatcttagaaaaagttgggcaaaatttcaaacttgcaagtcaatatttagaattttaatggtttaggattttttcaatgacccttccccttcccattcctcagtaaactaatttacctattttgaatcaagttgatgacttccattctaagtatttatcaccatttttggacgggcaacttcaggtcaactaagccatcacagcacttcct

SEQ ID NO: 762686 - DNA, 607 bp, Homo sapiens
tattttcctttgctgagatgtactcaggctccaagtgcctgaacataatgtggagagttaaaatagagagctgcctcaattcccaaagcgccttgcatcttgtcattttaaaagtaaactgtggtgttgctttaatgttttgtgtgtgtgtgtgtttgtgggtgtgctcacactcatttttattaaacatatgctcccagccacattccatttggcaagatcacaagcgcataatagctacaagctgttaacaaaacaaaacaaaacgaaacaaaaggacttaactagttgtttattttaaagataaataagaccttctaagccackttaaacattcatttacacatttttcgatgtgcatgctatcttttctgctgtctttgagtctctatttactcactcctgtgtaaagatgaatattgtaattgtacttgatgcaaacattgaaaaatctgtgtttacatttgtgtttccaactgaatatgctaatagtgtttaatcagcagtgatgttgctttatatcaatgttttgtgcagcatacagtcttagtgataatgttgtgataaccaaattttcccacatcaaaacttggaaactatcccggtt

SEQ ID NO: 762687 - DNA, 617 bp, Homo sapiens
cttgccaaataattgttaacatacgggttctttgcctcaggctctgtttttttgtagaactcagagaacagtgtctgttttccatgagttttgttgacttcattcagatgcaaagaaatagcatatgagttgtctctgctgttagagtgcacaaatattcttcttttcttcccttttcccccagacactgtctctacatatttcttcccactccactgtctgggacctatgcctttgctcaaaagacagaatttcggtataccagttgattcaatgagcaactgctagaataaagaaaaagaaaaggaaggaaaataatgtttactatatcaacttttttccctactacaaatatgtgcaaacaagtagagactcataaagaaaaaatatgattaaaatattctttttttgtttttttaaatragcactgattacattacttaagtaacaaatcactgattttgccacattgttttgctatgttacgagaaaggaaatgatagggaaaggaaataagtcatagattcttaattatgaagaaaattacaatgaaatgaaaacagcacatgagattatacacaaaataaaaaaagggagattgggaggtgggagaaaca

SEQ ID NO: 762688 - DNA, 521 bp, Homo sapiens
gaaggagaggtaaataaaggagcataagacgggaaaacaaaaattgtgagagaaaggttattgggttaagtttttcaaatttttaatttgttttggttaaaatgtcttttaagaaaacaaatgtaaaatatgcattttctttggaaccttcttcataccaagacaaatagaagacaatgggatgttttgcttccttttggtcgccaaatgcctttcaaatggcaaaagaaaagattatgtaaaaaaaaaaaaaaatcccraagatatcaccaggagcttaaattacctggaaaaactatgacatatagaaagaggcatagagaaatgtggcttataatgtgattatgcatcatgagcacaagtgtaacccacaggacatgcatacttagactgaatcaaacctctgaaagtttggtaatagttggctctaagttttgtttctgcttgttatgtttggagcttgtaaactaaggtctgcttgtcttaaatcctaaacacagcaacctgtgagtcccaggaga

SEQ ID NO: 762689 - DNA, 583 bp, Homo sapiens
tgtatttgtaattttttgtagggtcatgttgcccaggctggtctggacctcctggcctcaagtgatcctcatgcctcagcctcccaaactcctgggattacaggcataagtcaccacacactgggccaacatacatttctttttatttctttttaattttagtttttttgagacagaatctyactctgtcacccaggctggagtgtggtggtaagatctcggctcactgcaacctctgcctcccgggttcaagcgattctcgtgccttagcttcccaagtagctgggactatagatgcatgctaccacacctggctaatttttgtattttttttgtagagtttcatcatgtttgtcagactggtctcaaactcctggcctcaagtgatccatccacctaggcctcccaaagtgctgggattacgagtgtgagccacgatgctcagccaacatacatttctttaacactttctatgtttaaggccttttgctggtgctgggggtggtgaagggaagggaagaaagtagatatctggaaagacctgaccctagggagacaggcaacaagcaacatggcagagagg

SEQ ID NO: 762690 - DNA, 583 bp, Homo sapiens
tgtatttgtaattttttgtagggtcatgttgcccaggctggtctggacctcctggcctcaagtgatcctcatgcctcagcctcccaaactcctgggattacaggcataagtcaccacacactgggccaacatacatttctttttatttctttttaattttagtttttttgagacagaatcttactcygtcacccaggctggagtgtggtggtaagatctcggctcactgcaacctctgcctcccgggttcaagcgattctcgtgccttagcttcccaagtagctgggactatagatgcatgctaccacacctggctaatttttgtattttttttgtagagtttcatcatgtttgtcagactggtctcaaactcctggcctcaagtgatccatccacctaggcctcccaaagtgctgggattacgagtgtgagccacgatgctcagccaacatacatttctttaacactttctatgtttaaggccttttgctggtgctgggggtggtgaagggaagggaagaaagtagatatctggaaagacctgaccctagggagacaggcaacaagcaacatggcagagagg

SEQ ID NO: 762691 - DNA, 465 bp, Homo sapiens
atgcttttctagaaatgagtaaagctgcggcagagaagtaaagagagaaaacattcccctcgttctgccagattccagactcattctctgaagatagccaccatttgaagagtactaccaaggtactttgtagaacgtccctctgtttgggctggtgctggggatggcagtgacaacaagaactgttgaatcagaaagtatttttctattgtccctttaccctccatgctctctatagtgccattttttttccttttttgtcttccccatatgctattgtggtcgttcaagtygggcgtgatcgtggcttgaactagggtggttgaggaggagggaacgaacagtagaggtaagattcagaggtgtatttgagcttattgttgacaggatttcctgatagattggttgagggggtgtgagtaaaagagataagtcaatgataattccagggcttttttgtttgtt

SEQ ID NO: 762692 - DNA, 570 bp, Homo sapiens
aacacaaaatgctccattcactggcagaagctggattgtcataacatgtcttgtgtaacactactaaataccttttcttatcacagcagtgcaagtttgcacctgttcagccacattgcatgcagtgctgtctgggtaacaccagtagaaggacacaaaacaaaacaggaacgaatcaacttagagtctcagttgacttttccctttctttctgaatttttggtgccattttcacaaaactcatggtttactttattcctatgaatcatataatttcctttcttcactttacttgtagaaatacattacaatattattttcttttttaaaaaaatatggaatgcttcaagaattygcatgtcatccttgcacagggaccacactaatcttctctgtgtcattccaattttagtatatgtggtgctgaagcaagcactacaatattatttttaaattgaaaaatcataggctatgaagacatatgttttccctttgtctcagaatcacacagccctcatatcaatttatgcattttcctaaagtgaaaggacattgatcaattttttgcca

SEQ ID NO: 762693 - DNA, 577 bp, Homo sapiens
gccgtttcattgtattgactaagacatcactgatatagaatccattttgctgttgttttgagatcagaataccaggaatccaagtgctgcttcgacgcttccccacccccaactcccgatcccaacacactcctttggggaagggggcagagctttcttgccattttaattagatgctgcctgcctggaagggggtgaggggtggggatggtggcagcagcgggtgtctgagaaggattggacaccaatttaaggactgcttcttcctctcccgaaccaaaaataaaattaaaaagaaagcgagtgcatatacttgatgtatggagggtggatgaraaggaattcatggtggctctctacagggagacaccaggatggatgaagcatggaagttcacacgccctcctgaggaatacattgttagattgatgctgaatcttggggccatttacctggattcctagtacttctgacattgccgctatctgcactgatatattaaagtgctacctttgtgatcaaagtggtactttctctttggtctccttaattaaaccttttcctccacatctctttg

SEQ ID NO: 762694 - DNA, 562 bp, Homo sapiens
attattatcaagattttattcaacttggggccctcagcttccagaggctctgctttttgacaatgatatgcttatttaagtcattctgtggatgccctgtttagaataatagtcactgtctgttgttcatggacaaaacaaaacaaaagaccagatctgaggcttaactcgggttacatttggtaaggggaatatgccaagtagcatcatttttaatgagaccttcagaaaacattgcacrtgactaaaataaggtaagaaatgccagccttccctagtataaaattggaagagctctcagggctgcattgctctgactcattgaaatttcttcatctgtcatcatatctgcttctttactcccaattcacctgtgctactatagaaaataacatatttaaaaacccttctgccacttgcccaagtctccctcagacattcaaggttagatatatgcacgattgttaaataagttacaaaagacttcttgggatatttcatcactttaagatgttttcctcctctgcaattccttaatcataataataattatcattactaa

SEQ ID NO: 762695 - DNA, 656 bp, Homo sapiens
tgtacactgacaaagcaacggatgggacaataggggtctcagaggatgctagcatgattactgacaaagaggacccaatgggttccatcctaatatgttgttaaaaaataaacttcctggccaggcgcggtggctcatgcctgtaatcccagcactttgggaggctgaggtgggcggatcacgaggtcaggagatagagaccatcctggctaacacggtgaaaccccgtctctactaaaaaatacacaaaattagccgggcgtggtggtgggcgcctgtggtcccagctactcgggaggctgcggcaggaaaacggtgtgaacctgggaggcggagcttgcagtgagcygagatcgcgccactgcactctggcttgggcagcagagcgagactccgtctcaaaaataaataaataaataaataaataaataaataaataaataaataataaataaacttcctgaaatgtaatgagattcggggaaaatgttagagtgtgatccacagattgactgcaattagtttttcatcagcccctaacggaaataagaaattttcaagttatagaaaaaaattaagttgtatttttcacactttctggatccagagatatatccacgatgtgatttccttccatgctgtccaatgtgtctcag

SEQ ID NO: 762696 - DNA, 579 bp, Homo sapiens
gcattatttcaaaagattgtgctggctttctatagcttattaactactgagaaaaaaataagtaataagtacttaacatagccaacattaaattcatatggttggtattatgtggtgggttactgaataaccttcactctccatagtcactatggkgcttttatttaaggaagtcataattataagactgtacattcagtctactgtttagtagactaaacccaggagttgagattcagctgcccataagagggttcttttcaccacaatactttcccttattaaacccaaagcaacaccaactgacaatcgtcataagcagtgtgtagtcattcagatgcgagagctgattatctagcaggatagtgagacttccaaaaaagatattcaggtttttcttttctaggtcactaccatctgtccacagggttgtgaaattccagaaaaggcagactgataggggaataacttgtagaatggcacgttctatgagacaaagttgttttaaaataataataacagtgagcaacaacagtccttttaaatttataaatctttttacatatatttgctttcagg

SEQ ID NO: 762697 - DNA, 548 bp, Homo sapiens
aatttctaaatctattttgtgctgctataacaaaatactgaagactaggtaatttataaagaacaaatccttatttcttgcagttctggaggatggaagtctgtgatcaagaggccaacatccagtgagagccttcttgctgcatcatcacatggcagaagacagaagggtaagagagagcaagagacagcaggagggaagagggctgaatatatccttttattagacacccactcccataataactaacccagtcttgagatatgacattaatccattaagaggacctaatcacctcttacatgtcccagctgtcaacactgttgcattsggaattaagtttcccacattaactctgggagatacatttaaaccatagtactgactgatgtgtcaattatctttgtacacttcactgaaggtggcatggtgctttgcctacagtagaccctcaatatgttttagttctactgaaactgaggtggagcttacattgcagtgaaggaggaagtggaaaatggatttttagggagccagttctattggtt

SEQ ID NO: 762698 - DNA, 548 bp, Homo sapiens
aatttctaaatctattttgtgctgctataacaaaatactgaagactaggtaatttataaagaacaaatccttatttcttgcagttctggaggatggaagtctgtgatcaagaggccaacatccagtgagagccttcttgctgcatcatcacatggcagaagacagaagggtaagagagagcaagagacagcaggagggaagagggctgaatatatccttttattagacacccactcccataataactaacccagtcttgagatatgacattaatccattaagaggacctaatcacctcttacatgtcccagctgtcaacactgttgcattgggaattaagtttcccacattaactctgggrgatacatttaaaccatagtactgactgatgtgtcaattatctttgtacacttcactgaaggtggcatggtgctttgcctacagtagaccctcaatatgttttagttctactgaaactgaggtggagcttacattgcagtgaaggaggaagtggaaaatggatttttagggagccagttctattggtt

SEQ ID NO: 762699 - DNA, 599 bp, Homo sapiens
agtgagaagctggcatctatgaaaaagctggctctcaccagacactgaatctgctggtgctttgatcttggacttcctagcctccagagccatgagaaataaacttctgatgtttataaactacctgatctatggtgttttgttacagcaggccacaaagaataaagcaaaaattggtacygagagtgggtttgctgttataataaatacctaaaaatgtggtagtgcttttggaactgggtaatgggtaggggccaaaaagtttggaggttcatgctagaaaaagcctatattgatattcatggaccattaatggccatttttgtgcggactcagaaaaggagagctgtagggaaaatttcaatcttcttaaagaatatctaagtggttgtaaacagattgtagaaatatagatggtaaatgccattctgatgccatatcagctggaaataaagaacatgttattggaaactggaggaaaagcagttcttgttataaaagtagcaaagaacttgactgaattgtgttcatgtcctagtattttctggaaagtagaacttgtgaacaggatatttggtggaataaatttctaacaaagt

SEQ ID NO: 762700 - DNA, 531 bp, Homo sapiens
tttttataaagtgagagatggggatctagttttattcttctaaatgtgacttgccagttttcccagcaccattggtttctatattagttagggacctttgctgtagagctggtgttatcctttgctcatgtcactacattcagattctttatggtgccagaattcttgtgctagttcttcctcatctagagaccctagcatttgtgggttgtgtatttmttttcattcatgtctaaatttttatttttatttttctttctctatttttttctttcccttcccatttgcgctcctccctgggggctgtgactctagagaattctgggtagggtctcttgggttttcttctgtagccccatgcacttctggagatgggttttatactgggctgtgcaattcaacctacaagccagtagatggtgcttatgggtaagagccagttttgaccaatgtggctgcatatatacttgatcactgtttaccaggagaagttctctgttgcctcagagaatgaactgattcatgatgtgg

SEQ ID NO: 762701 - DNA, 552 bp, Homo sapiens
tatgcatcttaaaatggcaagttttccatatttttacaactcactggtggttttccgcattctttgtacacccatgaaagaaaacttttatgcaaggtcttgcatttaaaagacagctttgcgaatattttgtaaattacagtctcactcagaactgtttttggacacatttaaggtgtagtattaataggttaaaaccaggctttctagaaagaataaacttacatatttatttttaggacatgaaaatagcaatattcttggagaytgataaccatagcattaatacgcccattatggtcatttaaattggggtttatttcagcaaacttgttgaatttatttttaagaaagaaatactgtattgggaagttactgttacttgataacaatgttttaacaagaagcaatgttataaagttagtttcagtgcattatctacttgtgtagtcctatgcaataacagtagtgttacatgtatcaagcctagatgttttatacagatgccatatagtgttatgagccaggctgttgaatggaatttctcagtag

SEQ ID NO: 762702 - DNA, 332 bp, Homo sapiens
gctctcctctgtgttggcttcatttttaggcaaactctccctgtgaggtggcaaaatggctaatggccccaaacacaaccttgcagtttatcaaccagcccggaaagagcatttctctcctcccagagtctcattggcccaaaytggccagtatgtttaatcctggaccagtcattatttccaggggcatggaatacattgacaggctattcctaatcatatttttacccattgggctgggattgactcagcctttttggaggggaaggaggcaaccctgaaaactgagaagccctcatccaagttgtcctttctgactatgtccacttgct

SEQ ID NO: 762703 - DNA, 548 bp, Homo sapiens
gacttacagtcaattcatggtgttatttactcctctcaccaaccaatgaaagaggtacggaggctgtacaatggtagcacattgcctggcttgcagcctgcctctgccacttactctgtgtaatcttaagcaagttcctgaatctttgcttgcctcggtttytttatctgtcaaatgggtatcctactttatatagggttgttgggagaatcatgcatctgtagctctcacagcagtgctcagcattttgttcaattttccagataaataaatcaaggcatagacagattaaataatttgtcccaatccattcagctaataaaaagtgggaaccaaaattccaaccccagtctctgactgtaccacgtgtgcccttacccacgattcagctttgttcttccagcaaggtctcttcgcctcttggaagatcagtttctccacctgcaatctgggcataaattgcctccctcccacctagtctgttgtgagaatgaaccatgataaggtattttaaagtgctttgaaaactgtaaagcaccacagaaaat

SEQ ID NO: 762704 - DNA, 636 bp, Homo sapiens
ctttggcacctggacctgtctccttcgagcccactaggtcatatctcctgcctgctgcatccttgggagagccttggaagaaaacagagcctcatgggggtggtggaactggccccaagccacacaaccagcaggacagagaagcagaactcttgaccccaagacacctttatccaagattgcctaggctgatcttgaactcctggactcaagtgatcctcccttctcctcggcctgccaaagtgctgggattacaggtgtgagctaccatgcccagcctgcagccctttgtattaagcccagattaagccctgggtcactgcagctaaggaaaaagcrgttggctctaccagagctcaggagaggcccagtgtaatggtgggtcttgtggagagaagtggaccctctcgctccttgtgcacctgttgccaacagcccaggccctcacagacgttgcctgcttcctcttcagaggagggaggcacctcatattgtaccagtcaggctggacagggagcagaattcaccctggatggttcaaataaaggatttaatgaagaggatacttccagaggagtgggcagggttaaggggacagatggggatgttgaagcatccagagaccagcaccatcag

SEQ ID NO: 762705 - DNA, 607 bp, Homo sapiens
ttgagctagatacagagtgctgattggtgtgtttacaatccattagctagacataaagattctccaagtccccaccagactcaggagcccagctggcttcacccagtggatcccacactgggccgcaagtggagctgcctgccagtcccgcgccatgcgcctgcactcctcagcccttgggtggtcratgggactgggtgccctggagcaggtggcggcgctcattggggaggctcgggcagggcaggagcccacggcgggggcggggaggctcagacatagcaggctgcaggtccggagccctgccccgcagggaggcagctaaggccgggcgagaaattgagcacagcagctgctggcccaggtgctaagcctctcactgcccgtgccggcggggcggcggggccggggggctggcgggcagctccgagtgcggggccgcccgtgcccacacccacccggaacttgccctggcccgcaagcaccacgcgcagccccggttccgcctgcgcatccccctccatacctcccccgccacacctcccgcaagctgagggagctggcttcagccttggccagcccagaaaggggctcccacagtgcagcg

SEQ ID NO: 762706 - DNA, 607 bp, Homo sapiens
ttgagctagatacagagtgctgattggtgtgtttacaatccattagctagacataaagattctccaagtccccaccagactcaggagcccagctggcttcacccagtggatcccacactgggccgcaagtggagctgcctgccagtcccgcgccatgcgcctgcactcctcagcccttgggtggtcgatgggactgggtgccctggagcaggtggcggcgctcattggggaggctcgggcagggcaggagcccacggcgggggcggggaggctcagacatagcaggctgcaggtccggagccctgccccgcagggaggcagctaaggccgggcgagaaattgagcacagcagctgctggcccaggtgctaagcctctcactgcccgtgccggcggggyggcggggccggggggctggcgggcagctccgagtgcggggccgcccgtgcccacacccacccggaacttgccctggcccgcaagcaccacgcgcagccccggttccgcctgcgcatccccctccatacctcccccgccacacctcccgcaagctgagggagctggcttcagccttggccagcccagaaaggggctcccacagtgcagcg

SEQ ID NO: 762707 - DNA, 548 bp, Homo sapiens
gaaagaaccacaggacaggatgctcagcccattatctttcaggaaatgcaagttgcagccataataagacatcatcatgcctcaatcagaatgtctgacaaccctaagtgtaggtgagaatgtgaaccagcggaaactcatgcactggtgagtctctgaattggagcaatcactttggaagacaattcggcattatcttgtaaagctgaattttcaccatgccaagatctaacaattctgcatctaagtctatacccagaaaaacttacacargtacatcaggtgacatgtccaagaatgtccaccacggcaacgttcaaaaccatttcaaaaacaggaaaaaatatccgcagacaggaaaaactgatacataattatggcacattcacacaatggaatattatatagcagtgaaaatgaatgaaataaagctacatgccagaacatggatggatgagtctttgaaacagtgagtttgaagaaagcaagttaggagaccacatagagtagatgccattttctcaaagcttgaaaccagaacaaaacaa

SEQ ID NO: 762708 - DNA, 578 bp, Homo sapiens
ctatcaggtctgcttggtgcaaagctgagttcaagtcctgaatatctttgttaatcttctgtctcattgatctatctaatattgacagtggcatgttaaagtctcccattattattgtgtgggagtcaaagtctctttgtaggtctctaaagacttgctttgtgaatttcagtgcccctgtattgggtgcatacatatttagcatagttagctcttcttattgagttaatacctttaccattatgtaatggccttgtttgtctctttgatctttattggtttaaaatctgttttatcagagactccgattgcaacccctgctttttttgctttccatttgcttggtagatcttcctccatccctttattttgagccaatgtgtgtctctgcatgtgaaatgcgyctcctgaatacagcacactgatgggtcttgactctttatccaatttgccagtctgtaccttttaattggggcatttagcccatttacatttaaggttaatattgttatgtgtgaatttgatcctgttattatgatgttagctagttattgtgcctgttaattgatacagtttct

SEQ ID NO: 762709 - DNA, 604 bp, Homo sapiens
taccaaacattaaaggaaggaatattaccaatattacacagacctttctagaaagtggaaaaggagggaggacttacctaactcattttggaagccagcattatgctgatactaaaaccagaaaaaaaagacattacagaaaaatatctctcatgaatatggatgcaaaaacatttaacaaagtattaccaaattgaatccaaaattcacaacaagggtaatatatctgaccaagtggggtttatctcagtaatgcaaggtttaccattataatttcaatacgtaacattccttattaacagaatagaaaaggaaatatatagacaaaagatttcttagcttcttcattaaagaaaagatggatcaagtggaacctatcaaaatgtaaaayatctgtttttagaaagatgctgttaagggagtgaaaagacaggccacaaactaggagaaaagattaaaaataatatatatgaaaaataacttttattcagaatatatttttttaaaagaaaaacctctcaaatctcagtaataagtaactaaacaatcctctacaacaatgggcaaacgatttgaatagacatttcaccaaagaagacagaga

SEQ ID NO: 762710 - DNA, 624 bp, Homo sapiens
aacagtagatctctcagcagaaaccctataagccagaagagagtgggggccaatattcaacattctcaaagaaaacaattttcaacccagaatttcatatccagccaaactaagcttcataagtgaaggagaaataaaatccttttcagacaagaaaatgctaagggatttcatcaccaccaggcctgccttacaagatctcctaaaagaagctcaaaatatgraaaagaaaaactggtaccagccactgcaaaaacacgccaaaatataaaaaccaatgacactatgaagaacctgcatcaactagtgtgcaaaataaccaactagcatcatgatgacaggatcaaattcacacataacaatattaaccttaaatctaaatgggctaaattctccaattaaaagacacacactggcaaattggataaagagtcaagacccaacagtgtactgtattcaggagacccatctcacatgcaaagacacaaataggctcaaataaagggatggaggaaaatttaccaagcaaatggaaagaaaaaaaacaaacagaggttgcaatcttagtctctgataagacagacttttttttttttttgagatggagtctcactctgttgccca

SEQ ID NO: 762711 - DNA, 624 bp, Homo sapiens
aacagtagatctctcagcagaaaccctataagccagaagagagtgggggccaatattcaacattctcaaagaaaacaattttcaacccagaatttcatatccagccaaactaagcttcataagtgaaggagaaataaaatccttttcagacaagaaaatgctaagggatttcatcaccaccaggcctgccttacaagatctcctaaaagaagctcaaaatatggaaaagaaaaactggtaccagccactgmaaaaacacgccaaaatataaaaaccaatgacactatgaagaacctgcatcaactagtgtgcaaaataaccaactagcatcatgatgacaggatcaaattcacacataacaatattaaccttaaatctaaatgggctaaattctccaattaaaagacacacactggcaaattggataaagagtcaagacccaacagtgtactgtattcaggagacccatctcacatgcaaagacacaaataggctcaaataaagggatggaggaaaatttaccaagcaaatggaaagaaaaaaaacaaacagaggttgcaatcttagtctctgataagacagacttttttttttttttgagatggagtctcactctgttgccca

SEQ ID NO: 762712 - DNA, 624 bp, Homo sapiens
aacagtagatctctcagcagaaaccctataagccagaagagagtgggggccaatattcaacattctcaaagaaaacaattttcaacccagaatttcatatccagccaaactaagcttcataagtgaaggagaaataaaatccttttcagacaagaaaatgctaagggatttcatcaccaccaggcctgccttacaagatctcctaaaagaagctcaaaatatggaaaagaaaaactggtaccagccactgcaaaaacacrccaaaatataaaaaccaatgacactatgaagaacctgcatcaactagtgtgcaaaataaccaactagcatcatgatgacaggatcaaattcacacataacaatattaaccttaaatctaaatgggctaaattctccaattaaaagacacacactggcaaattggataaagagtcaagacccaacagtgtactgtattcaggagacccatctcacatgcaaagacacaaataggctcaaataaagggatggaggaaaatttaccaagcaaatggaaagaaaaaaaacaaacagaggttgcaatcttagtctctgataagacagacttttttttttttttgagatggagtctcactctgttgccca

SEQ ID NO: 762713 - DNA, 567 bp, Homo sapiens
ggctactagaggctgcagggagaagaggagggagggaatgaggagctgctgggaaaatagtgcaaaatttcagttagacaggaggaatgttttgagatctattttgcgtcagggtgactatagttaatcatgtattttatatttcaaaataacttgagtaaatttcaaatgcctcagaaaaaatgataagcagtgagatggtagaggagttcattgatgattttatcattccccattatatatagatatcaaactattccattgtgccccagaaatgtatataattataatttgccaattaaaaaacagtacattttaaaccagaaaacactgtacatgggtgattttctttcactgtttcctaacaaaatacacgtcttaatgactactgaagttatmctgtataaaccgaaatcaaattatgcaatctaatggagaggatatattggatgtgtatcattatttatgtctctatcatcacacatgtttttgtcaaacagatccccgagccatttaaatgcatttgaagtccaacagattgcattatcttgtataggaaaatttcta

SEQ ID NO: 762714 - DNA, 570 bp, Homo sapiens
ctgagattgtgctactgcactccagcctgggcaacagaaagagacccacttaaaaaaaaaaaaaagataaacagacccagggctgtggctcatgctataatcccagcactttgggaggccgagacgggtggatcacctgaggtcaggagtctgagaccagcctggccaacatgatgaaaccctgtctttgctaaaaatacaaaaattatccgggcttggtggcatgcacctgtaatcccagctactcaggaggctgaggcaggagaatcacttgcacctgggaggtggaggttacggtgagccgagatcacgtcattgattgcattccagcctgggtgacaagagcgaaactccgtctcaaaaaaaaaaraagattaattaattaattaaacaaaagaaaagccagacttttagagatcactagagattctcttggtagtagttttgttttgtttttgagatggggcctcactctgtcaccccggctgcagtgcagtggcacaatcacagctcactgcagccttaatcacccggactcaagcaatcctcccacctcagactcccaagtaa

SEQ ID NO: 762715 - DNA, 593 bp, Homo sapiens
cttgagattctgaggagcttcagaataaatgaagacaggttcctgcactcactccccatataattcatttgttaaactgcatcccctctcattccctccctctttctcacatgcatacatgtccagttgaagccacctgaatgtcygatgttgaaagctcagtttcccgctgttgtcctgacttccttagggagttttgatgagtcattctggctccgagccccgccacttcctcctcctgcagaggaagctcattttcagcactcacacccacaaaccacacaggaaagcgagaagtgggattaagtgaaaatgttgagctccttccatcgcctctggtccactattatacatgatcttgccaactgttccttgactgtgtctgcagcttgtctgagaactggagtggcccctggagcacacatccctgcctgtgcattgcctggaaagtcgagctctatagccaaggaaaaacctcctgattggaaggcagaaagcactgggttttgatccagctgaactggatacaaagatcttagtttcttcatcagcaacctaggcataaatagttaggcatacttcatagtgttatg

SEQ ID NO: 762716 - DNA, 652 bp, Homo sapiens
ttttgtgaaagccttttctgcatctattgagataatgtggtttttgtcttttgttttgtttatgcgatgaatcacatttatttttttgtgtctgttgaacaaactttgcattccaggggtgaagcctacttgatcgggtggagaagctcttacgatgtgctgctggattcagtttgctggtgttttgttaaggatttttgcgttgatgttcatcaaggatattggcctgaagtttttttgttgttgttgtatctccaccaggttttggaatcagaatgatgcttaccacatagaatgaggtagggaggagtccctcttcaatttttgaaatagtttcatcaggaatggtatcagctcttctttttatatctggtagtattcagctgtgaaaccwtctggtcctgggctgtttttggttggtaggccattaattactgatttaattcagagctcattattggtctattcagggattcaacttcttcctggttcagtcttgggaggatgtatatgtccaggaatttattcatttcttctagattttctagtttatgtgcatagaggtattcataatattttctgatggttgtttgtatttctctggggtcagtggtaatatatttgctttttcatttctgattgtatttatttg

SEQ ID NO: 762717 - DNA, 555 bp, Homo sapiens
tcatcatcactggccatcagagaaatccaaatcaaaaccacaatgagataccatctcacaccagttagaatggcaatcattaaaaagtcaggaaaaaacaggtgctggagaggatgtggagaattaggaacactttgacactgttggtgggactgtaaactagttcaacccttgtggaagtcagtgtggcgattcctcagggatctagaactagaaataccatttgacccagccatcccattactgggtatatacccaaaggattataaatcatgctgctataaagatacatrcacatgtatgtttattgcggcactattcacaatagcaaagtcttggaaccaacccaaatgtccaacaacaatagactggattaagaaaatgtggcacatatacaccatggaatactatgcagccataaaaaaatgatgagttcatgtcctttgtaggggcatagatgaaactggagaccatcattctcagcaaactatcacaaggacaaaaaaccaaacaccacatgttcttgctcataggtgggaattgaacaatgagaac

SEQ ID NO: 762718 - DNA, 549 bp, Homo sapiens
ctaggaggaaaaagtggttctggtgggctgggcccaggatccccgtgctgtgtgcagcctagggacttgatgccgtgcatcacagctgctccagccatggctgaaaggggtcaacgtagaactcaggtcatggcttcagagggtggaagctgcaagccttggcagcttccacayggtgttgagcctgtcagggcacagaagtcaataactggggtttgggaacctccatctacatttcagatgtatggaaatgcctggatgcctaggcagaagtttgctgcaggggcattcccctcatggagaacctctgctagggtagtgtggaagggaaatgtagggtcacagctccacacagagtccctagtggggcactcctagtggagctgtgagaagagggccaccgtcctccagaccccagaatggcagatccaccaacagcttgcaccctgcacctgaaaaacccacagacactcaacaacagtttctgaaagcagccagaagggaggctgtattctgtgaagccacagggatgaagctgcccaagaccat

SEQ ID NO: 762719 - DNA, 513 bp, Homo sapiens
ctaggaggaaaaagtggttctggtgggctgggcccaggatccccgtgctgtgtgcagcctagggacttgatgccgtgcatcacagctgctccagccatggctgaaaggggtcaacgtagaactcaggtcatggcttcagagggtggaagctgcaagccttggcagcttccacatggtgttgagcctgtcagggcacagaagtcaataactggggtttgggaacctccatctacatttcagatgtatggaaatgcctggatgcctaggcagaagtttgctgcaggggcatkcccctcatggagaacctctgctagggtagtgtggaagggaaatgtagggtcacagctccacacagagtccctagtggggcactcctagtggagctgtgagaagagggccaccgtcctccagaccccagaatggcagatccaccaacagcttgcaccctgcacctgaaaaacccacagacactcaacaacagtttctgaaagcagccagaagggaggctgtatt

SEQ ID NO: 762720 - DNA, 564 bp, Homo sapiens
tatggatccccagatacagcaagatagccaggtccctctatactctaatcaaggaaacccagaaggcaaatactcatctagtagaatgggaaccagaggcagaaacatccttcaaaaccttaaagcaggccctagcacaagctccagctttaagccttccaacaggacaaaatttctctttatacgtcacagagcagggatagctcttggagtccttactcagactcgtgggacaaccccacaaccagtggcatacctaagtaaggaaattgatgtagtagcaaaaggctggcctcactgtttaacggtagttgcagcagtggccatcttagtgtcagaggccatcaaaataatacaaggaaaagatctcactgtmtggactactcatgatgtaaatggcatactatgtgccaaaggaagtttatggctatcagacaactgcctacttagataccaggagctactccttgagggactggtgcttcaaatatgcacatgcgtggccctcaaccctgccacttttctcccagaggatggggaaccaatcgagcatgacttttatgg

SEQ ID NO: 762721 - DNA, 668 bp, Homo sapiens
caggcctctgccacccgcctggtgttgcccacactctccccaacagggtgtcgatgaggccacccgtgcagtgcccacgggagacatggaagacctcccttgtgggctggtgctcagcagcattgggtataagagccgccctgtcgacccaagcgtgccctttgactccaagcttggggtcatccccaatgtggagggccgggttatggatgtgccaggtgagagggtgtgaggaggctgggtgctgaattatggtgagaggccgagaagctggtatctcctggggccatgcgttcattcatctagcaacatgtactgagaagcttctgcagggcaggccctctctaggacccagtgccgccctcctcttggccctgagagaagttccagtctggctaggacatatgtgacatacgtcgggtcattaagtcattcaacaaacgtttactgaggtcttttctgggttaggccctgtgcttagtgctgggattggagattaataaggcagcctgtgtcctcagggagcktccagttttactaagtgcccacatacctatctagtgattaattcacttggtaaacatttaccaagggcctactgaaactgcaggggagcaagcctcagctcctaagcttagggatcccctcatctacagggaaactgaggt

SEQ ID NO: 762722 - DNA, 640 bp, Homo sapiens
tcagcaggctgaggcaggaggattgcttgagtcccagcattcgaggctgcaatgagctatgattgcaccactgcactccagcatgggcaacagagtgaaacctcgtctgcaaaatgcatgcatgcatgcatgaatgaatgaatgaataaataaataaataatagggctgggcatggtggctcacacctgtaatcccagcactttgggaggctgaggcaggcggatcatttgaggtcaggagttcaagaccagcctggacaacatggtgaaactctatctctactaaaaacaaaaaaaaattagctgggggtggtggcgggcccctgtagwcccagctactcgggcggctgaggcaagagaattgcttgaacccaggaggtggagtttgcagtgagctgagattgtgccactgcactccagcctgggtgggcgacagagcgaaactccatctcaaaaaataaaaaataaaaaagcatccaagatttccagaagcttccagacatagcttgcaaaatgatgttgtggaaaaagcgcagcctcatttggatgagctccttactacctgtgtggctttgggcaagtaattgctttaagcctcattttccccaagtgtaaaatggggataaaataatacctcaga

SEQ ID NO: 762723 - DNA, 588 bp, Homo sapiens
gcagtagaaaattcacatggtaattttcctatcccttcttcctatggcctggagggtcaccacactttcctctcctaagatcatcatgaaaatgcaaggatttctttatatgttgtcataagggcatcaagaattcatatgtaattccttaatactgttttgtttctagattcagtggcaagtatggggttccctctcagaaacatactgacctggaggtgagggtctcattccaggatttcagggaactagcaatggccttttggttctggggtatgatctctgcaaaagctacccagtcaatggtttttagagcaagttttcgcccagccatyttgggatcctgaaaaataagtcaaataaaaacaaggcttttttatgaggtgaattttcagttgggaaaaatgataaataacaaaataagagctcttagagagaatcctttaaatcttagaaacatgcaagtcttcacaagaatcacttgaacccaggaggtggaggttgcagtgagtcgagactgcatcactgcactccagcctgggagacacagcaagactccaactcaaaaaaaaagaaaaaaagacagtg

SEQ ID NO: 762724 - DNA, 589 bp, Homo sapiens
aaggcaactaattgccctcagtataaagtccaaattactgacacagcctgcatggcctctcaaaatgagaggtgtatgattagtatgggcctggacaaggttccaggttctctgcccaaggcagagtagctgctgctgcttcctggtctggcttcaacttacccctctagcattgtcttygaccctactcccctctccttgggctataccatcttgctgcacttcctggaacgcccccagtctttgcccacaccctattctttgcctttaatgcctaccccttttgccccttgggtaactctagcttgtccttcaggactcggcagagaccctgcctcctctctgcggccttccctcgtcagcattcccacctcaccccacgctgaccacccatcgtcctctgcttccattagctgtgctttgctctgtctctcccttgagaccccaggcttcaggagcttcagacgtgccctctatgcaacaccagaagactctcaccatatctggcttgaaaatgcaacctctccgggctcccattctccccttgtcatattctcccattctccacctgctccatatttataccttc

SEQ ID NO: 762725 - DNA, 589 bp, Homo sapiens
aaggcaactaattgccctcagtataaagtccaaattactgacacagcctgcatggcctctcaaaatgagaggtgtatgattagtatgggcctggacaaggttccaggttctctgcccaaggcagagtagctgctgctgcttcctggtctggcttcaacttacccctctagcattgtctttgaccctactcccctctccttgggctataccatcttgctgcacttcctggaacgcccccagtctttgcccacaccctattctttgcctttaatgcctaccccttttgccccttgggtaactctagcttgtccttcaggactcggcagagacccygcctcctctctgcggccttccctcgtcagcattcccacctcaccccacgctgaccacccatcgtcctctgcttccattagctgtgctttgctctgtctctcccttgagaccccaggcttcaggagcttcagacgtgccctctatgcaacaccagaagactctcaccatatctggcttgaaaatgcaacctctccgggctcccattctccccttgtcatattctcccattctccacctgctccatatttataccttc

SEQ ID NO: 762726 - DNA, 589 bp, Homo sapiens
aaggcaactaattgccctcagtataaagtccaaattactgacacagcctgcatggcctctcaaaatgagaggtgtatgattagtatgggcctggacaaggttccaggttctctgcccaaggcagagtagctgctgctgcttcctggtctggcttcaacttacccctctagcattgtctttgaccctactcccctctccttgggctataccatcttgctgcacttcctggaacgcccccagtctttgcccacaccctattctttgcctttaatgcctaccccttttgccccttgggtaactctagcttgtccttcaggactcggcagagaccctgcctcctctctgcggccttccctcgtcagcattcccacctcaccccacgctgaccacccatcgtcctctgcttccattagctgtgctttgctctgtctctcccttgagaccccaggcytcaggagcttcagacgtgccctctatgcaacaccagaagactctcaccatatctggcttgaaaatgcaacctctccgggctcccattctccccttgtcatattctcccattctccacctgctccatatttataccttc

SEQ ID NO: 762727 - DNA, 552 bp, Homo sapiens
aagtcagtcaaagttggattttgttgcttgaaattaaggatcctgatcattatggagcttactatcaagagtgcttataggccatggacccacagggaagtggtagcagtggttctcaattttggctgcacattcgagtaccctagaaggtttgaaaactgccaatgcctcaagccaacccatatcaatcacattgaatggccatagctaggaaaccaggtacagatacctaaaaagttatttaggtgattctaatgtgagaattaatacagagaaagaaatacaatgctttctgaagatggggatgttgacgtggattaataatatgtaacctgctcacccattcccaagttatgttccctgagagggyccagaatgtacttttttcaccaaggtttgggtgattccaataatcctggaaaatcacttctgtgtctgttctctttaagccagagacagtgaaacattgcccttaaaactggcttctcagatgccaatggagacaacaggatctcaggtagcagtggccaaccagccacacctaaattctag

SEQ ID NO: 762728 - DNA, 612 bp, Homo sapiens
ctctatttcaagctttaacttctctaggcatttccaaatgccgctagggaagtgtcacgtgtatagcatgctgtcaactccaattctcagtttccagcaaaatttcatcatcctcctttaaaaacctaagcaaatccaatcatcttctgtgttgcccatttctaatgataatactatgtctcagacactaagatttggacactcagaatgtcttttctctactgctgttcattccattcatttcactccagtgtgtggagtggcacatttyttcttttttcacgtttgagaaggttatgaaaatggtcttcctaattttactccccattgttagtatttatatattttatttaattttatatacttctactaaattatttataaagctcagcaatgatcatgcaaacttcctgcatataaaccttcagtaagtttagcctttacttgccaaataaagctcaagggtccccatgattactccaagtccacctttctgggtttatctccattacttttcttttcttcactttgatcttttcctttttatgcttgatgcatttatctacattatgcttttgtctttgtctaaaatatcctcaacttcaagttgga

SEQ ID NO: 762729 - DNA, 551 bp, Homo sapiens
cccattttctggctctatttttttccagctttctggtacctgggacttttcagattctggaacagacagtgagccattatagaaaagtttaattaaattaatattcatttttcatgcttcctagttttccttccccttatgtggaataggtctataagggtttttcatatgaatttatgagatatagttaaaaggaaatatgggtaaggcactggtgactcaaactgtaaacagtggtccattagacctgttataggtttgtcttatataaaattacatcatatagaaagggcagcagtcctaagtttaccactgtcctctctgtataatgttatacatttttaaattttagggaytatcaagtttgcctcccattttgtaagaaagctgttgacatttaaagaggttaagtaaattgtccaaaggtcaaggagcaaattatccacgttttcaaattcttcaattcctgtgtaagctttccatttattcgcagctcagggagtggactccaaaaagatgttctcttcctagaaatctagccatttttatta

SEQ ID NO: 762730 - DNA, 551 bp, Homo sapiens
gatagaactgggggtcattatgttaaatgaaataaactacacacagacaaatatcaaacgttctcactcacagatgggagcttaaacagttgatctcataaagggagagagttagacaatggttacttgagcctcggaaaaaaggtggaaggtgaagagaggttatttattaggtccaaacatatcattagatagaaggaataagttctagtattcaatagcacagtagggtgactttaattaataataatttgttgtatatttcaaaatagctggaagagtcattttaaattgtaaccaacacaaataataaatgttttaggtaacagatatcctaattactgatttgattattatacatygtatgtatatatcaaaatattacatgtatcctataaatatgtacaattattttgtattaataaaacataaaaatattttacacatggaaaaaatgttattccttcaagaacacgaacatttaacattgttagttttaatgctcaactttgtatttaattgatatttctaacatgcttaaattcagcact

SEQ ID NO: 762731 - DNA, 688 bp, Homo sapiens
cctaggctgttcactctattcatgaatgaccttgcgtggcatgtgacgttctgttcctctggactgtaagtatttgtgactaataaatgattgtcaatatcgtaagtccagtttcagttattgtatgtctggtcatcccattaccctaaagtgggaatcrctccctcatcagtgggtgaataggaggtgattaaaacagaccctcccctgccactcccacccaccatgtgcttggccctacaccagtatattgctactcaatgtcttcggacattctgatatgtcactgctgaccttgtgcttagaaatatgtcttcttgtatctgtgctctgagggtaagacatggcattcagaaaatagcataaatcatctggttccatatgctcaaatatattttaactgtgacaatctatttgactatctatagaaaagataactaccttagttctaagacaatagtaggttaaaattttaagatttaaaaaattttcgtggtgagaatgttatactatcaaacaagtcattgacagaagtctggatcatgtgaaacacataaatggcctgctttgcacataaataaacctctgaagaagtttaggacgtttgaactggtagaagaaaggtagaaaaaagaaagtgaatagtgttctgaataaataacaatagctggtatttactaagcactta

SEQ ID NO: 762732 - DNA, 593 bp, Homo sapiens
gctcacatccctgatagggaacaggacatgaggagactcacatctggccacacgtgcccaggtcctcttgggaaggacaggaagagatgctgaaatgcattggaattcatgtgtcctgggtgaggaacctgcttcgttcttaccttgtctcctggcagggcctaagacgctccctctactgacctgagtgcagacccctcgacaaagacctccccatccctgacaccaatgatcccagggtaagtsggggggactgcagcagacagccctgcccatgctctctggagtgacagcaggggcagggcagatttccgtgaggtcctcatctgtgttctggcccaagggtgccctcaatcgtccctcatgttcctcaccggaactactgacagatcctgggaccactctgtctatccaccagatgggggcccctgtgttgacctgagtcatcctcggagaacaagttcctcacctccccgagatctgaaaacaggaatgagatggagctacatcctgtcacccccacatggggtgtccaggtatgacccctttggttctggggtgagtgtttctatggcctcctgtgggttactctt

SEQ ID NO: 762733 - DNA, 634 bp, Homo sapiens
catgagttcaattgttttaatttttagctcccacaaataataagaacatgcaaagtttgtcataatgacctccagtgccatccatgttgttgcaaatgacaggatctcattctttttatggctgaatagtactccattgtgtttatgtaccacatatcttttatccattcatctgttgatggataattaggttgattacaaatcttggatattgtgaacagtgctgcatgaaagtgcagatatctctttgatatactgatttcctttcttttggrtatatacctggcagtgggattgctacatcctatggtagttctatttttagttttttgaagaacctccaagctattctccatagtggttgtactaaattacattccaccaatagtgtatgagggttcccttctctccacatcattgccagcatttgttattgcctgtgttttcgatataagccattttacctgggatgagatgatatctaattgtagttttgatttgcatttccctgatgatcaataacgttgagcacctttcaatacatctgtttgccttttgtatgtcctcttttgagaaatatctattcagatattttgccactttaaaatcagattattagatgttttcgtatggg

SEQ ID NO: 762734 - DNA, 621 bp, Homo sapiens
ttcctaaaatcaacagcaaacatacttaaatgtgaaacgttcaaagaattatcattaatgtcaggagcaagaagtagatgtaggctattatctctatgttttaaatcatcattgagacacaaagtcagagctataagtatcaaaataaataagggttgtgaatattggaaaaatacataatgtttagtgataatgtcattatcggtcttgaaaattcaaaggaataggcaaatggaatattcaggtgaatgggctttcagaaagaggtgtgtaacattactatagcaaagtcaaaatctttgacatgcgaaagcaatacctaattagaacaaacaatagaaaatatgccatttgcartagtaacaaaatccaagaattaacctgaaaagaaccctaacaaaaatgtataaggtctttctagaggcaactatcaaagtatactgatagattcaggttaagagggtctgaaataaagaggagcataacctgttcattgatggggaacagaacattgtaaaaatgtcaattatacttaaattatttacaatttagtgccttacctgtagccgccaaaattacaatcaaatttgggcggctattctctgcttcccaaatcaaccc

SEQ ID NO: 762735 - DNA, 654 bp, Homo sapiens
aaatagtatctcttttttggtaatgtcctcatatagatggatcacaatctatttaaacaatcatccactattatattctgtgttttaatgctataaacaacactgtaaagacccttcttttccctatagcattttgctcctgtttaagtatccscctaagatacagacaggatattgagattgctatttcagaaagtagacacattaaaaaaaattgatacatattgacaaactgctgttctgaaaggttaaacaattcacactcctattatcagtgatgagcaagccaatttcccctcactcttgccaacacaggtatcatgggttgaattgtgtcccctgaaaagatatgtttaagtcctaatccccagtactgcaaaatgtgaccttatttggaaacagggtcactgcagatgtaattagttaagataaggtcatactgcagtggagtgggccctaatccaatttgactggtgtccttataaaaaggggaaatttgaacatagagacacacacacacgcgtgcgtgcacatggagaacaccatgtgaatatgaaggcagagattggggcgatgcttctataagttgagaaacagcaaagattgtgagaaaacaatttgaaactaagaagaggcaaggaaggatttccctac

SEQ ID NO: 762736 - DNA, 654 bp, Homo sapiens
aaatagtatctcttttttggtaatgtcctcatatagatggatcacaatctatttaaacaatcatccactattatattctgtgttttaatgctataaacaacactgtaaagacccttcttttccctatagcattttgctcctgtttaagtatccgcctaagatacagacaggatattgagattgctatttcagaaagtagacacattaaaaaaaawtgatacatattgacaaactgctgttctgaaaggttaaacaattcacactcctattatcagtgatgagcaagccaatttcccctcactcttgccaacacaggtatcatgggttgaattgtgtcccctgaaaagatatgtttaagtcctaatccccagtactgcaaaatgtgaccttatttggaaacagggtcactgcagatgtaattagttaagataaggtcatactgcagtggagtgggccctaatccaatttgactggtgtccttataaaaaggggaaatttgaacatagagacacacacacacgcgtgcgtgcacatggagaacaccatgtgaatatgaaggcagagattggggcgatgcttctataagttgagaaacagcaaagattgtgagaaaacaatttgaaactaagaagaggcaaggaaggatttccctac

SEQ ID NO: 762737 - DNA, 657 bp, Homo sapiens
agccataaaaagaacagactgttaaaaccacagtaactttaatggatttcaagggaattctgctgagtaaaaaaataaaaataaaaatatttaaagagctacacatgatcacatgctatctatttatataacatacatgaaatgaaaaattrtaaagtagaatagattactgggtgccagggattatggatgggggagggaaaagataagtagtgagtatagctataaaagtgtagcacagaggatctttactgagaagagactattctttatcttgactgtggtgatggttacataaatacacacatgtaataaaatttcatagaactaaatacacacttgaatgtatataagtctaataaagtctgaataagatcagtggattgtaaaaataccaattttctggttgtgatatcatcttgctgttgttcaagatgttagcgttgggagaaattagatgaagagtatatgaggtcactctatattatttcttacaatagtatgtgaaactacattttcatacaaaaaacagtttaattgaaaaaaatttcccaaactggattttttgatcctgccatagattattccaaagataacaaaagtttttctatttctgagcatgattaaagagaagataaagagtgcctctatttcctc

SEQ ID NO: 762738 - DNA, 602 bp, Homo sapiens
ttacccggtacatttattgttgcaattaacatctctgttatttttactttttagtataaagccttttctgttttgtctttgacatatggcctgtgagcttttattttttctttctccatttatgttactttcaaagtatctgggcccatagttcatttttttgttggactaaattatactacttcaggactattccaccagtcatatttaagagctctctcttggctggtggctcaaaagtggagctaatgaggccagatcaggagggtcgtggatgtcaacagttgtggcgggttttcagtctgttgtattgayggtgggccttggcagctgcgaatgaggagaaagatggtcttttgttatgagtttggggagatgtcaaggagtactccagagggattcattacaggaagcacttgtttcagggcaactggaagcaattttctatcccgcgagacccaggaatagcccatgaaaggcaccattacccttttcctcccctggccatgacaacctagatgggatctttcaagccagaaggcacctgcctctgtggctttccacttgctgtgggaaatcctctggggagcttgcattcacag

SEQ ID NO: 762739 - DNA, 602 bp, Homo sapiens
ttacccggtacatttattgttgcaattaacatctctgttatttttactttttagtataaagccttttctgttttgtctttgacatatggcctgtgagcttttattttttctttctccatttatgttactttcaaagtatctgggcccatagttcatttttttgttggactaaattatactacttcaggactattccaccagtcatatttaagagctctctcttggctggtggctcaaaagtggagctaatgaggccagatcaggagggtcgtggatgtcaacagttgtggcgggttttcagtctgttgtattgacggtgggccttggcagctgcgaatgaggagaaagatggtcttttgttatgagtttggggagatgtcaaggagtactccagagggattcattacaggaagcrcttgtttcagggcaactggaagcaattttctatcccgcgagacccaggaatagcccatgaaaggcaccattacccttttcctcccctggccatgacaacctagatgggatctttcaagccagaaggcacctgcctctgtggctttccacttgctgtgggaaatcctctggggagcttgcattcacag

SEQ ID NO: 762740 - DNA, 569 bp, Homo sapiens
tagtatcaatcctactgaaaccattccaaaaaattgaggaggggggctcctctataactcattctctaaaggcagcatcaccctgagaccaaaactggcaaagacacaatgagaaaagaaaacttcagaccaatgtccctgatgaacatagacacaccaattctcaacaaaatactaacaaaccaaatccagcagcacaccaaaaagataattcacsatgatgaagtaggctttattcctggaatgcaagattgattcaacaaatgcaagtcaataaatgtgattcatcacaaaaacataattaaaaggaaaaaaactaatctcaatatttacataaaaagcttttgataacgtccaatgtcccttcatgataaaaagccccaacacaatagacacctaaggagcatacctcaaaataattagagccatctatgacaaacccacagccaacattgtactaaacaggcaaaatctagaaccattccccatgaaaactagaacaagacaaagatggccacgctcaccactcctattcaccttagtagtggaagtcctagctgaaacaatca

SEQ ID NO: 762741 - DNA, 569 bp, Homo sapiens
tagtatcaatcctactgaaaccattccaaaaaattgaggaggggggctcctctataactcattctctaaaggcagcatcaccctgagaccaaaactggcaaagacacaatgagaaaagaaaacttcagaccaatgtccctgatgaacatagacacaccaattctcaacaaaatactaacaaaccaaatccagcagcacaccaaaaagataattcacgatgatgaagtaggctttattcctggaatgcaagattgattcaacaaatgcaagtcaataaatgtgattcatcacaaaaacataattaaaaggaaaaaaactaatctcaatatttacataaaaagcttttgataacgtccaatgtcccttcatgataaaaagccccaacacaatagacacctaaggagcatacctcaaaataatwagagccatctatgacaaacccacagccaacattgtactaaacaggcaaaatctagaaccattccccatgaaaactagaacaagacaaagatggccacgctcaccactcctattcaccttagtagtggaagtcctagctgaaacaatca

SEQ ID NO: 762742 - DNA, 644 bp, Homo sapiens
tgagccaccgcgcctggcgatgacattcttataattctttatctcagaacaccaagaacagcatgaattatacactagacttgagtgactgaatgaatgaatgagtaaatgttgggaaaagacactgggttggggcagggtcaagtctgcacgctcgaaaatttcacaggcaagcgaggaacgttttctgtccagtcatccatccatcctcattgccacctccaccacccatggagaatgcagggacattttgtaaatgagaaaagacaatcatcctcacttgggatcagactatgagggaaacagtgtacattccttcctcctttgtgttcctcttctggggaagggtagagtgctsagacggctgagctgaggaggaaggcagactgaaaacctgggtatggctttaaattcccaaattcattaaatttcccatatactaactgggtatgacgcacacatctcctagcaagaggtccaaaagaagcctatgaatgctcttgtttcctttcaacgaccagaaaggagagctatgaacactggcaccttgaaatttatttccaaccctctagaaacttcaaaagatacaactcacttatttattgagattattattactactaacaataataggaaagcaccag

SEQ ID NO: 762743 - DNA, 616 bp, Homo sapiens
tttataaatatgataaaagtgctgctaggtgcctaaagctctgatttgttagatgacttgggatcacaaaggcaaataagacaagctttgtaccttgtatttagagcagaaggtatattttaaatgttaaaagccatcgctttatttttatttgattatgctgggggctgaatctgtaacaccttgtatagcacccaggaagtattagttaagtgaatgcatgcagacgcacmccacatggttccagaaaggattctgggcaactcagtgcaaacatcagatagcaatatcccaaatcccaacaactgcaacagaaagaaaataggagaaaagatgagatttgtgcccgcagtgcatgttgatttaataggaatttcaaaagaaaaaaggacgtctgtggccaggtatatatccaaagcctgctttctccttctcgcctcacctctgctggcttctggagctcacactcgttcacctcgtccttccctcgttccacccattccctattctggtgggataccgcaccgggtgttatgagtacatcagctcatttgatattcacaaccattcctgctggctggtggtatctccattttacatatgaggaaactgaagg

SEQ ID NO: 762744 - DNA, 628 bp, Homo sapiens
tttgcattttttgactgtatttcctcattccctacccacccccatcgctgaaattttatacctgttcattaataactcctcatttccctcctcccagtgcctggcaaccacaattctattctctccttccatgagtctgactactttagatacctcctatgagtggaatcacacagtatttgtccctccgtgactggcttatttgacttagcattacattttccagattcatccatgttgtcacaagtggcaggatctccttctctcttctagctgttgttgcccaggctggagtgcagtggctccatctcggctgactacaacctccgcctcttgggttcaagcaattctctgcctcagcatcccgagtagctgggattacaggtgcccgccaccacgccmagctaatttttgtgcttttagtagagacagggtttcaccattttggccaggctagtctcaaactcctgacctcaggtggtccgcctgcctcagcctcccaaagtgttgggattacaggcaaaagccaccgtgccggccttctccttctcttgtaaggctgaataatattccattgtatgtacataacacattttctttacccaaccatccgtcaaaggcatttaca

SEQ ID NO: 762745 - DNA, 613 bp, Homo sapiens
aggagttatcatagaaaaacattgtggccatagataaaacagtatgtaactgttttatccgttctcatgatcatagtagatgcctatttgtgcaggcaaaaaagttttaattctcagtaaatacatacacaagcattagaccttaagatgaaaaaaagtagatattataatataaaacctttttccacaggtacaacaaatgtgggcaaattataatccaggcttaaactattaccccaaaatctaaatgagaaaaggacgatctgtaccctgataccaaactagataaagatatcacaaggaaacaayatgccaataccccttatgaaaatagatataaaactcttcaacaaaatagtagcaaactgaatctaactacatgtagaaagattatacaccatgaccaaataggatatattccaggaaaaacaaattggcttgtatgaaaatcaatcaatgtattatacctacattaatagaataaagggcaaaaagcacatgatcatctgaacagacacagaataagcatgtgacaaaatccaaaaaccatttcctgacaaaagactcaacaagctaggaacaggaagaaacatcttcaacttgacaagtatct

SEQ ID NO: 762746 - DNA, 578 bp, Homo sapiens
cattaggagtggaacccaccaattgatgttttaagacgctctccaggaaattctgatgcatgctcaaggttgagaaccactgcattaaaacaaacacgtaaaatattattaggcttgttgtacagataagaaagttacattttagaaaggtaacatagttcagatagaaagaactaacatttattgccaaatatcacattataagcaccctataaatagtattaataatagtatttgtaattgtattgttacctactatgccagatgctgtatttaatcttcataataattctgttcagtatcattgcttctattgtttatatacatttattgaggcacagacatttaagtaatttatccaaaatcatctagcaaaaaagagacagaaagatctgtttgcatctttccttttttcraagagatctaactaaggacagatcactgatgtgccagcagatatgcaaggaaaacacatttggcattttctgaaacaaatgccaagtttccacatttggaaatgatgaatggtgggtcttgacatcaagggtaccctcaaaaggggaagtagatgctctttc

SEQ ID NO: 762747 - DNA, 600 bp, Homo sapiens
tctttacagatgtgcatttatgcatggaggatatctcaaggatccaaggtgttaatattaccgttgaagttttgcttttaggtggctattggccatgggacaattggacttatagaaagcaaagacaataggctttgagttgtcagagaaaggggacactgtctgaatcatgtgtgtctccagccctaatgtgcaatacctagcacatagtagagacctaaaaaatctctatggagtgaatatttagaagttgaacatacaatgggaactcaacaaatagtttttgattggataaaagaaggaaccagggaaagactctcactatatctgctataagataagcattcaacaaacatttcttgattaagaaagtactactgagatcctcagtgaatactaagtgaaggtttgaacaaatgcttggcacatggcaggtggtcgaaaaacgacacmagaatgaacaatcagtcatattttctgccacaaaaatgctgtcctcagagtataatggaaagacactgggctacttctcgagagcagaatccttatgcttggaacatatctttctaagtaagtctctgtgtattccataggattaac

SEQ ID NO: 762748 - DNA, 683 bp, Homo sapiens
gtcctgacttacctctcaaaattgattgttctcaccctatggctataacacagaccccattagatagacctaagggagacataagtcagctctcattttccagttgaaatgaagcttgtatcttttcaataacttgtctgaggctatgcagtttgaaagttgcttgaactgtaatgtgggttcattttattcatcattcatcactatttatagaacatccacatttcagtcacttttggcactatttctatgtacgctctagaaccctctgcttagaatagggctgccaccataggcacgaaaattcccataatgctaaaagatcactttccaaggtcatgttctctttcattcctcttaaggagccaaaaagggcttcagaaacctttaagccttccagaaaaaaatacctcataacctgagttgtgaggaggccagaatcaatcttcaactggtacctttgctttcttggtgtgacttttcttatttataaaatggatatgaaaatgctcttctcmcaatgttgatggaatagtcggatgaaataatgctcaccccaggcctgtggtccatccttgcagaagaaattcagccaattagatataccctctcctttcccagggagtatgtgcccctctgttttcccaggttccttttagggatccaccccacttgggtgtact

SEQ ID NO: 762749 - DNA, 683 bp, Homo sapiens
gtcctgacttacctctcaaaattgattgttctcaccctatggctataacacagaccccattagatagacctaagggagacataagtcagctctcattttccagttgaaatgaagcttgtatcttttcaataacttgtctgaggctatgcagtttgaaagttgcttgaactgtaatgtgggttcattttattcatcattcatcactatttatagaacatccacatttcagtcacttttggcactatttctatgtacgctctagaaccctctgcttagaatagggctgccaccataggcacgaaaattcccataatgctaaaagatcactttccaaggtcatgttctctttcattcctcttaaggagccaaaaagggcttcagaaacctttaagccttccagaaaaaaatacctcataacctgagttgtgaggaggccagaatcaatcttcaactggtacctttgctttcttggtgtgacttttcttatttataaaatggatatgaaaatgctcttctcacaatgttgatggaatagtcggatgmaataatgctcaccccaggcctgtggtccatccttgcagaagaaattcagccaattagatataccctctcctttcccagggagtatgtgcccctctgttttcccaggttccttttagggatccaccccacttgggtgtact

SEQ ID NO: 762750 - DNA, 623 bp, Homo sapiens
gacagaaagaaagcatgctggccagatccccagacacaaaagatgcccagcacagacccagataatgttccagagcttagaccttcagagacagaatttggcaatgaaggattatgtttttctgagttctgcttccatcctaccaggcaccctttgcttggctcctccacctctcttttcatgacataactaggctacaaagcgacatcagcacattygatacctcaaggaaattccccacctgcccatgagtaaggctcacttgaggctctggacagccagggaggaagggaggcagtaaaaatagcacacatgccaatctatttcctgagtgctctcctctggagcttgcgttacctgtgaattagtcataactctgtcacacttaactttctgatcataagaataaagccatttccatttcccatctctctgttggacttctaatttaaaatacatgcacacacatccccccacacaaaaaaagtctactcttgaatcagatgttcttatgtctcccatgcttcaaacacaggccctcccttgcccccaccactcatgcatttgctcaagggagaggctaagaaaataggcagcttttagtgctgatcagcatgtataac

SEQ ID NO: 762751 - DNA, 616 bp, Homo sapiens
taaactcaataacataagaaaatacccaaatgtatggtataattttgttgacagtagaatataagtttgccagggagattaatgagttgtcaataatgtagacctgggcagttctgaagacaaacagctttactggcaagtctgttaggttctttgatccttggctatgttattttcaaaacagaggtaataagactttgtaagactgttgattgggattcaacaaatgatgtatatgaagtacttggaacagttgatgctagttcccttctcatttcttttgcatttttgatggcaaatcttaactcacaggtatcaaatggaaaataagagttaaggaaagtattaaatcgtgttgcatttgcacaataaaacacattgtgcatatttcttactgagactttgaaggaaaccagaatattttaccccaaaatatatttctttggcatattttaagatgctattcagaggkgctacagactacaggaacagctttgaaaagctgtctttttgtgggagggtttacatctgtatagaaaatctacattagtaaagtaaacagcagatgcaaacaggctttctctgaagccccccttatctgccttacccaaaacta

SEQ ID NO: 762752 - DNA, 562 bp, Homo sapiens
tgctttcagctagttctactctactttggatctaaaacagcttacataaaacttaagaaaggtttgccccagaaaaatttctgaagacctgagttagagaatgattgttcttatgtatatctggtgaaaagttatgccaagaaaaaaagtaggcaccctacaagttattaaaaagtcatatgacaaatatatgttaagtacctgccatgtgctagcactcgtttagccacttaggatatttgtacatcacatcacacaataccctagttctctgtgaagtttgagaagagasagataatgtaggctagactgactatgacttttttttattattatacttttaagtttcagggtttaagtgcacaatgtgcaggtttgttacatatgtatacatgtgccgtgttggtgtgctgtagccattaactcgtcatttaacattaggtatatctccaaatgctatctctcccctctccccaaaccccacaacagtccctggtgtgtgatgttccccttcctgtgcccatgtgttctcactgttcaattcccacctatgagtgagaac

SEQ ID NO: 762753 - DNA, 630 bp, Homo sapiens
gtaaataattgtatcccttatttggctttgtcaccagtaagccaaattgtagtatctcagacttatcttacatatctgtatcttttaaaatacatattatagacatgtgctaaaatgtagtctaagtgctcatatagtttctcaatattttacttgtgggttacctcgggggccaactttcagaaacgatcagaaataagagaggacaaaattaatgatgacttttttcactttcatatatattactaacttatttcctagatatatagcatgcttttatgctataactaggatcattatytaactcacaaattttaaaaagccaaggaaagagagaaagagagaaaaaaaagagaaaataggcaaaacaaggaaaagaatcattttacagagtaacaatatatttccctggactaaaggtaaacaagaatctgcataaacaggatatgacactaactggaattagatccaagtttcctaaaagcaaatttgtgtttggtcttattgatagctttatctgtagaacctgtaactaatacacatacacacacatcagctgcacagtaaactagtaacatgaataatgagcagcagacattagtcctttttttggaaattaaagcagatata

SEQ ID NO: 762754 - DNA, 537 bp, Homo sapiens
ttccctgcccctttttcttatccatatcaaaagcaggttctagcttgaatatgccagttgatgtcaaaaaagaaatctccatataatcagactgtggcctgtgtcagctataatcacatagacagatcaagatttgccaagattgcagaaagaagaccaaacacttgccaaaggttwctctttaccctctttcagattctaacatccaaatgcacagatttcaaaaaaactacatggccctgtaggaaaaacaagttaaaatattgcaacaaaaatctttagaatttccgttttctagtggttggcactatcagtaaaatttgttgcttttgtttgtccctttgtttattaaattagaaacaaaacagttgaaaatatttattgaatgttactagagaaactttataactatagtaaagcaagggatcagtgatccgattctagagcagagactgatgaccacaggagtgagagagatatctgtaatacagggcactgttgccttaatcttataaaagttaatagtacaactaggga

SEQ ID NO: 762755 - DNA, 537 bp, Homo sapiens
ttccctgcccctttttcttatccatatcaaaagcaggttctagcttgaatatgccagttgatgtcaaaaaagaaatctccatataatcagactgtggcctgtgtcagctataatcacatagacagatcaagatttgccaagattgcagaaagaagaccaaacacttgccaaaggtttctctttaccctctttcagattctaacatccaaatgcacagatttcaaaaaaactacatggccctgtaggaaaaacaagttaaaatattgcaacaaaaatctttagaatttccgttttctagtggttggcactatcagtaaaatttgttgcttttgwttgtccctttgtttattaaattagaaacaaaacagttgaaaatatttattgaatgttactagagaaactttataactatagtaaagcaagggatcagtgatccgattctagagcagagactgatgaccacaggagtgagagagatatctgtaatacagggcactgttgccttaatcttataaaagttaatagtacaactaggga

SEQ ID NO: 762756 - DNA, 423 bp, Homo sapiens
ccaaattcattcaacaaacataccaaaaatcattattgagcatattctatgtgtcaagcacccttcaaggtacaggtaggtattggaggcacagtgatgagcaaggtaaagaaggcctccatccctaaggagcttgctctgcttaaattggaagacaggatgtgctatacagaatggcaaagagctggacaacatgaagatcgagatgccctgtaaaactcagattgtataatcaatgtctccataggtttgtgctgccgtttawagtgctgtctttgttattaagatcatccagattgtgtattgggtacagtaactttcatgagtaaaagaagactgacaatggttaacttagttaatcaaaatagcaaatacttaagaagggcttactatgtggcagacactatacacatgttaacttat

SEQ ID NO: 762757 - DNA, 592 bp, Homo sapiens
actacttaaatttgattgaaatgtttttgattaattgttataaattctctgaatggtaaggtaaactaagcagttttattttcaaaattctgtctcaagaaatgttccttttatttacattagtcctgcttagaagtggtcttgctgcaccgtatctggtgcatgcaaatcatatttccttcagaacataacacttaatatgagagaaaagtatgcctcaggcataattctgtgagttaacaactctcttctcccaagcagcattcctttggtaacaaggaaagaaattaaacaagaaaaagataggaatatccttttctctagccctttggctaaaataagttttctaccttttctcaatcacctggacwcacatttttggtctcaccttctatgtcccaactccttcccttccccacctcccacaaggcattttgtagatcaaatatttccattagttggtaggcatagagatatatctggtggctggttaaagaagaaaacatatttatcaagttccttcaaagtactgtgtgctatttcatattatatcttatttcattgtacaatagccttgtaaaataaaaatatg

SEQ ID NO: 762758 - DNA, 554 bp, Homo sapiens
ccatctcatgtcaattagaatgatgattattaaaaagtcaggaaacaacagatgctggcaaggatgtggagaaataggaacgcttttatactggtgatgggagtgtaaattagtttaaccattgtggaagacattgtgatgattcctcaaagatctagataccatttgacccagcaatcccattactgggtatataaccaaaggatyataaatcattctattataaagacacatgcacaggtatgtttattgcagtactatttacaataggaaagacttggaaccaacccaaatgcccatcaataatagattggataaaaaaaattggcacatatacaccatagaatactatgcagccataaaaaagaatgagttcatgtcctttgcagggacatagaggaagctggaagccatcattctcagcaaactaacacaggaacagaaaatcaaactccacatgttctcactcataaatgcgagttgaacaatgagaacacatgggcacagggaggggagcatcacacactggggcctgttggagggtgagggacaag

SEQ ID NO: 762759 - DNA, 610 bp, Homo sapiens
tctcttaatactcttctcgtaaattattccgccctagacacactgactttctcccacatcttcaaacatgctaggcatgcccctgcctctgagcccttgtaattgctgtgtcttctgcctagaatgttctgcccacaagatttgtgcaggacaattctccagatggccttggactgaccaggtttttctccctttcttgcttgtagttctcaacagtaactgtatgatggtctgataatgtaacttactgagatagagactggctagaagagcctaggctctgtttcagtctcaccagaacagcatgtccttcaatgatttagcacagtaagtcatgtgaccccaggatataacacccagggcaggctgctttccagggtcccttatctgctatgcaagtgggttacatgcaattgagactccatccaccctaggcagatttctgagcyttgggggagcagctcacaatgagtcctaggcttctgatgttttttgctgcctatctgtaagtaataaacccatttcccataacttgcatatgagtatgttctgtcacacaagttggtaaccagtgcatggtgagcttgcttcacaagttgcagggcatgtt

SEQ ID NO: 762760 - DNA, 479 bp, Homo sapiens
ttctcaaattatgcaggggtgaaagaagaaaaaataactgagaggttcaagaaccctcaggaatgaaccaagatatataagaatacctatgagaatatctatatctatgagaatatctatgagactattggagcttcaattcagacttaattctgagcaggaagggaagaagaatgaaaccacatagagtagaagggtatgcaggyggagccattgtgacattagaagtctggtgcagtcacaaaagttcatttataaactctcgtgcagaatgagggtcaagccatctcagatgttaagtaggaattcagaaactggaaggccaggcaaggcacaattgaatgggctggaccaaactgaccagaggaggaagtctgcctttaagcaaactctcacatgcccctgtttaccacacagtcactaaacaagccaagtggtccattacttgtcttgtctaggaggtagcctcacaccataga

SEQ ID NO: 762761 - DNA, 613 bp, Homo sapiens
tagataaataaaatcatcttcatggctgcaaaaaaaaaaaaaaaaaagaaaccccttaaacaaagcacgactactctatgggaccagattctttgtttgcaagtcacacaaacccaaaccaggataggcttaggggagaaagggagtcactgtccccaaaccatcagcctggacagaggagaccacaagtggcagccagcaccccgtgggttctctgtgctccggaagaatatgaaattctatttggaagcggggacgcacccacaccacacgcatcccgtgacccagagmaacacctgggttttccatcagtccagcgtgacacagatcgtcggaccacagcgtcggccacggaacaatggccacaggctgccagcagggctactgcattgaaaccctctctccccttccctttgtccacttccgtcaccctgagaaatcacaaagtggagaactgatttttgcctgtatctgtcgcattccttccagtgaagatcgggtagttttatgaaagggctttttcttccctttgtgttcaggggtattcactccatggggaaaatctctctagtccctggcctgaaagctgttcctgttgtttcctttcattggc

SEQ ID NO: 762762 - DNA, 650 bp, Homo sapiens
atgaagctcattgttaaaattaggatcctaatggctgcaccacaggtgtcttgggatggccaagggagtgagtgtggaagctacaagcccagcacaccaggtgctcagtccatctcagcctcactgtttgccatgctctcttcctgttatggaatcgtacctcttcccctgtaccacacacacaggcttatttggaaacaggctcatgggagttgtaattatttaagaagaggttacactggagttgggtgggacctaatccaagatgactggtgtcttaaaaaagggagaaatttggacacagacatgcacacaggcagaacgtcgcatgaagaaggcagagggcgtgatgcatctacaaaccaaggaacwtcgaagattgccagcaaccaccagaagcaaagggagacgcacaggacaggttctccctcacagctctcagaatggggagaccttgctaacaccttcatattggacttccaggctccagaacttcaagggaataaatttctgtggttaaagccactcaattggtggtactttgttacggcagccccaagaggccaatccacttgccttcatcttttttggtccacctccctggaacatagaactatggctgaactatttatagtcaagtggctggcatg

SEQ ID NO: 762763 - DNA, 492 bp, Homo sapiens
ataagacctgaagctatacaatcctagaagaaaaagggatggaagccccttggtattggctctgacaagaaattgttggatatttaaccaaaagcataagcagcaaaataaaaaataaacaattgggactacatcaaacyaaaaagcttcagtacaacaaagggagcaattaacaaaatgcaaagatagcaatgaactgtaaaaatcatgtgtgaaccacattatcagataaaggggtaatgtccaaactatataatgaactcatgcaactcgacagcaaaaaaacaaataatctgaccctgcaaaaataagcaaaagacaatagatatttctttaaagaagaagtaaaactggtcaacaggtagatgaaaaggtgttcaatatcactaaccatcatgaaaatgaaaatcaaaaccaaaattaaatatcatcttacatctgttggcatgactattataaaaaaaagatgagataacaagtgttggcaagggt

SEQ ID NO: 762764 - DNA, 675 bp, Homo sapiens
gtgataatataaatttaacagtgaaactttcaaatactcatattaacttaccctgatagattttatagctttaatataaaacttctcataaatgtaaaatttgacaaagcacaatattctccaggaagtcagaaaagtaatataattttctgtctctcagaatgtgttttctaacctctaaatataaattgatggactaatcttttaaaattcagaatcaaatataattgctttggtttaatcattgagaattctttttccattccatcattttatagtttttgcctaaataaaatacttaaggaagttattgttatgttgtatttgaaagatgcctgatggagaaacattcatagytcttttctatccttatgaaaggttatatgaaaacatatatatatatatatatttatatatataaatgtggataaagtacagaaaatcctatcattgcctctgactcaaatggtaatctttaatataaagatttgaaactttcatggaacagtatatcagaactttatttccaatttgtttatgtatacttaacgtatatcctaagtatcaagaaatcacattcaattaacatatacattataaaacaattcctatatgataattctaataagtaaacatgattttagtggtagtaattattcaatcaaatattcatat

SEQ ID NO: 762765 - DNA, 439 bp, Homo sapiens
tagccaggagacaacctagcaggtatactgcctgagcaccaagaagttatcatataatttatgtttcattgacctctcttaccttgtcaaattacccacaataattttggtaaagttgcatctaacttggtatggactaaaaatacttgcgtcgcccccaaaatttgtatgttaaaaccctaattccactgagatgatatttggaaacagggcctttgggaaataattaggtcatgagtctctctctytctttctctctctctctctctctctctctgtctggtctctctctctgtctctttatgaggacatgacaaggattggaggttttacctgtaaccattgactggcacctttatcttggactctcagcctccagaactccgagaagtaaatttctattgtttaaaccagtcagtgtatattgtttttgttgttg

SEQ ID NO: 762766 - DNA, 659 bp, Homo sapiens
agaagtgcaaatagccagctgtaagaaggaagcagttataatggtttaaacgaaggctaagctaatgtaggaaaaaataacgtattccttctttatttccacttaattgatcatacatgtgtggacactttttctgcttaattatgtatttgacttatgactattccattgattagtactggtcagagaaggaaaagggagtcagacaaaaataatcgcccatatttaagtatataatggaaaataacaaataagatattccgtagaagtacttataggactaagacacatatgagcatggggaggtaagagggtgagaaggagagatagagaragggagaaggacagatagagaaacagacagagacagaggcagagagacagatggacttactcattgcagccttttttatctctatgcagtgtaagaattctttggtatcaacaccttctagaatagaaaagttagaaaagaaaaactatttaaagcatttttaacctgtatcatcaatttcatgaatgtactttttatttaccttatgatccatgtcaataatgaggtcatgttacattttcatgtttaagataaattaagttggaacaagagtaggctttatcattcaaatgttctgaaatcagtagcatttttttgcttattt

SEQ ID NO: 762767 - DNA, 591 bp, Homo sapiens
gtgacagagccaagatggagtctgtctggctgtcttagctaagggagagtcaattcaggtggaaacaaggctaggtgattaaaggaaaagggagagtctaaaaacagggttagtaaaaacaaggttgggcattacacttayctcttaccaatgtcatgttctatatacaacgtctgaaccatcctttctaacggcccctcccagtgttttcctatttctcttggagtaaaattcaaagtcttagttcaatatgtcatcaaatatacctcccaacctggaatattctcccaccagatatttgcatggcttccttcaggcatctgcctaaacatatctgatatgattaggcctactggccctgcacaaatctcatcttgaattatcatccccctaatccccatgatccccacgtgtcaagggagagaccaggtggagataattggatcatgggggcggtttcccccatgctgttctcatgatagggactgagttctcatgaggtctgacggttttgtaagtgtttggtagttcttcctgcattcattctccttcctgccgccttgtgaagaaggtgccttgcttccccttttc

SEQ ID NO: 762768 - DNA, 591 bp, Homo sapiens
gtgacagagccaagatggagtctgtctggctgtcttagctaagggagagtcaattcaggtggaaacaaggctaggtgattaaaggaaaagggagagtctaaaaacagggttagtaaaaacaaggttgggcattacacttatctcttaccaatgtcatgttctatatacaacgtctgaaccatcctttctaacggcccctcccagtgttttcctatttctcttggagtaaaattcaaagtcttagttcaatatgtcatcaaatatacctcccaacctggaatattctcccaccagatatttgcatggcttccttcaggcatctgcctaaacatatctgatatgattaggcctactggccctgcacaaatctcatcttgaattatcatccccctaatccccatgatccccacgtgtcaagggagaraccaggtggagataattggatcatgggggcggtttcccccatgctgttctcatgatagggactgagttctcatgaggtctgacggttttgtaagtgtttggtagttcttcctgcattcattctccttcctgccgccttgtgaagaaggtgccttgcttccccttttc

SEQ ID NO: 762769 - DNA, 624 bp, Homo sapiens
ccctcccagtgttttcctatttctcttggagtaaaattcaaagtcttagttcaatatgtcatcaaatatacctcccaacctggaatattctcccaccagatatttgcatggcttccttcaggcatctgcctaaacatatctgatatgattaggcctactggccctgcacaaatctcatcttgaattatcatccccctaatccccatgatccccacgtgtcaagggagagaccaggtggagataattggatcatgggkgcggtttcccccatgctgttctcatgatagggactgagttctcatgaggtctgacggttttgtaagtgtttggtagttcttcctgcattcattctccttcctgccgccttgtgaagaaggtgccttgcttccccttttccttccccaatgattgtaagtttcctgaggcctctgcagccatgctgagctgtgagtcaattaaacctctttcctttataaattacctagtctcaggcagttctttatagcagtgtgaaaatggactaatacaatatttgtgtcagagagtttaccactgatcaccctatataaaatgacggatcctcctactcactgatagcatttgccattcccttccttatttttt

SEQ ID NO: 762770 - DNA, 624 bp, Homo sapiens
ccctcccagtgttttcctatttctcttggagtaaaattcaaagtcttagttcaatatgtcatcaaatatacctcccaacctggaatattctcccaccagatatttgcatggcttccttcaggcatctgcctaaacatatctgatatgattaggcctactggccctgcacaaatctcatcttgaattatcatccccctaatccccatgatccccacgtgtcaagggagagaccaggtggagataattggatcatgggggcggtttcccccatgctgttctcatgatagggactgagttctcatgaggtctgacggttttgtaagtgtttggtagttcttcctgcattcattctccttcctgccgccttgtgaagaaggtgccttgcttccccttttccttccccartgattgtaagtttcctgaggcctctgcagccatgctgagctgtgagtcaattaaacctctttcctttataaattacctagtctcaggcagttctttatagcagtgtgaaaatggactaatacaatatttgtgtcagagagtttaccactgatcaccctatataaaatgacggatcctcctactcactgatagcatttgccattcccttccttatttttt

SEQ ID NO: 762771 - DNA, 524 bp, Homo sapiens
tatgcattagcaggcattatttactcataaatcccatatttattgggagcattttgcaattccagaaggtgatcataaagttatcttggctatgtgttggatcagtagcaaacaggaattgctattatgaaatcattacactgaagtgtgtctgatgcctgaaatagatcctcatattcaaaagaatatcaasgactaaggcacttaccaaactacttgatacaaatatggaaaatggctaactactctgtcaaaaatttatattgattttataggtacatttcacatgaatacttgattcttttagctgcttcagaatagcttgagctaattctacatcaatctcatatcatcagtgtagcatcctgtgttattccagtgacacttggtaagaaccagtgtatctcctctagagccatctgctattaattttgaagctaagcctcccagaatttcactcatctggaacctaggggcaacacacacacacacacacacacacacacacacacacacacacagac

SEQ ID NO: 762772 - DNA, 524 bp, Homo sapiens
tatgcattagcaggcattatttactcataaatcccatatttattgggagcattttgcaattccagaaggtgatcataaagttatcttggctatgtgttggatcagtagcaaacaggaattgctattatgaaatcattacactgaagtgtgtctgatgcctgaaatagatcctcatattcaaaagaatatcaacgactaaggcacttaccaaactacttgatacaaatatggaaaatggctaastactctgtcaaaaatttatattgattttataggtacatttcacatgaatacttgattcttttagctgcttcagaatagcttgagctaattctacatcaatctcatatcatcagtgtagcatcctgtgttattccagtgacacttggtaagaaccagtgtatctcctctagagccatctgctattaattttgaagctaagcctcccagaatttcactcatctggaacctaggggcaacacacacacacacacacacacacacacacacacacacacacagac

SEQ ID NO: 762773 - DNA, 427 bp, Homo sapiens
gggtatcaggcatttgccataataattaagaatcctatgaaaggcacactgtaaaccatgcccacattccctggagccgcataaggacagggtgagagtttgttgccactgtcctgaaagacctcaagaccaaattattagaaaaaaaaatacaacacttgagcttaggaacactagacggcacatcagcgctgcacttcgggaccattttaaacagtgaaatcaacatcaaagagcatataaatgtgaaaaatgtgacactcaacaggcctcaawagcgacacttctttgcagtgcaaaagttaaaacaagaaagtaaattgtcaccttgctcagcctcacctggaaagatgcacatcagacaattcaaagttttcactgctctaagcatgtccacaaaagaccataaaagtgatgtgagcattgg

SEQ ID NO: 762774 - DNA, 564 bp, Homo sapiens
caatcctgttcatgatggaggctttctgcttaaagatgataaaaatactaagatttggctgggcatggtagctcacgcctgtaatcccagcactttgggaagtcgaggagggaggatcacgaggtcaggagatcgagaccatcacggtgaaaccccgtctctaccaaaaatagaaaaattagcctggtgtgctgctgcatgcctgtaatctcagctacgtgggaggctgaggcagaagaatcacttgaatctgggaggcggaggttgcagtgagccgagaccgcaccactgcactccagcctggtgacagggcaagactctgtctcaaaaaaaaaaaaaaaaaagaaaagaaaaaaaagaaaaactaagattttacacacatcactaaagyatagtgatgattctttgatcccctcccacaaattcgtactgagaaatatattgtcccagtttaaaagtttccatcagattcttggaatattctgctttggcatgattaatggggcaaaagaaactttgatgatactaggaaatgtcaggtccagatgctaggaccagtcatct

SEQ ID NO: 762775 - DNA, 516 bp, Homo sapiens
atgaacaagtaaattgcttggattccgaactcacagaagttgtgataacaattgtctactgttttgagttgctgaattttccaaaatgtattatgcagcagtggataacctatacatatttctgaacatagtttcttctctctgttctgacaaattgtwtatcagtacttgatttcatgcctatcattttcacatgaacctccctaattcttttactcaggctcaactcaagcctttgcagtatttcatatgtgtggtccttaagacagaaatcatcgtaaactcttcttccttctaaatatataattcttgtaacaaagaaagcactcttaaatgtttaacgagtaatggggctctcggatgcttaaaagtgtagaacagacacttctgacattatgagccagaaacatccttattgttgggggctgtcctatgtgctacaggatttagcagaatccctagtctccactcactagatctcagtagcacacccacattggtgaaaaggaatcatgt

SEQ ID NO: 762776 - DNA, 576 bp, Homo sapiens
ataagatcacatatccagaggacagtacagaataacttcacagccctaaaatctctctctgcttcacctgtttattcctctcctttcccctgaacccatagcaatcactgaccttttccttttctagaatacatacagttgggatcatatagtttgtaacctttgcagactggcttatttcacttaggaaatttaggaatatgtatttaaggttcctccatgtctttttgtggcttgataatttctctytctctctctctctctctcacctcttcttttttttttttttttttttttttttgagatagagtttcactctttcacccaggttggagtgcagtggctcgatctcagctcactgcaacctccactttccagtttcaagtgattctcctgcctcagcctcccaagtagctgggattacaggtgcccaccatcatgcctggctaatttttgtatttttagtagagacagggtttcatcatgttggccaggctggtctcaaactcctgacctcgtgatccatccacttcagtctcccaaagtgctgggattacaggcgtgagccatcaagcc

SEQ ID NO: 762777 - DNA, 600 bp, Homo sapiens
gcataactgattgcctcctttggaaagactaatcagaaactcaaaagaatgcaaccatttttgtatctcacccacctgtgacctggaagccccctccctgctccaagttgcttagggaaaaaaaataaaaattaaaaaaaaaattaaaattcagattattacatctgtgtatctctttgtatgcactttcaaagtacttatgacattgagttacagggctttgactcttgggtccacaaagggacaccaagtcctgctaaattttaaacactgacagcaattaaagccccatcttcaggcccagtacaagatgtcaatcaaaataaactgcattcctgaaacatagagccagaaattaaagctattcaacwcctcaaggcccagggactatcatggaaaaggtgggtgtgtgagaatgtaagagtcaatcctgagttcagtttctctataaattaatcattaatgtcaaaggcacactgatgcaagaccagcatatgggcccgtgtcagattaacaaggttttcttgaagcattagctgactcttaaataaagtttataaaaggtttatgaaagttatatctcatggtcaagattaaaat

SEQ ID NO: 762778 - DNA, 600 bp, Homo sapiens
gcataactgattgcctcctttggaaagactaatcagaaactcaaaagaatgcaaccatttttgtatctcacccacctgtgacctggaagccccctccctgctccaagttgcttagggaaaaaaaataaaaattaaaaaaaaaattaaaattcagattattacatctgtgtatctctttgtatgcactttcaaagtacttatgacattgagttacagggctttgactcttgggtccacaaagggacaccaagtcctgctaaattttaaacactgacagcaattaaagccccatcttcaggcccagtacaagatgtcaatcaaaataaactgcattcctgaaacatagagccagaaattaaagctattcaactyctcaaggcccagggactatcatggaaaaggtgggtgtgtgagaatgtaagagtcaatcctgagttcagtttctctataaattaatcattaatgtcaaaggcacactgatgcaagaccagcatatgggcccgtgtcagattaacaaggttttcttgaagcattagctgactcttaaataaagtttataaaaggtttatgaaagttatatctcatggtcaagattaaaat

SEQ ID NO: 762779 - DNA, 603 bp, Homo sapiens
ctcatccaggaaacacatataagggctgatcacccggcattttgagccctctcagaggtctcaaaagagagagaaactgagacacataaggggtggaaacaattcagtggtgacacactatggagtcctgcctacaagcagcatgcatcaatccaccacacaaaaacccsaggccacagctcatttcctccttttaagaccaaaaaaaaaaaaaaagaaaagcaggaaacagataatctaagaattaggagaaaacaaggagaatgacctgctttcaagcactatgtaggttttatggcacttctacttgccagaataaaatgaaagtaatatggtctttgtgtacatttacattaatgaaaaagtgccctgaggtcaacctgcaaactatagagttcctaggttccctttatctccattttcatttctgcctgctttaaatctgctgttacttttctactgagataaaaacagctgtttggatctaacaggtattctttttttaatttttttatttttgcaagctggctaatgtgtatgtatcaaaaggctagagtactgaggtaaaagctatagaatcttcgtgtgtgtatgtgtatatgc

SEQ ID NO: 762780 - DNA, 592 bp, Homo sapiens
tcataccttggtctacatagctcctgatctgcggtaggtaaagaatgtcactttctgacaggttcaggagccctaggtttatcttggaaagtcaagaggagaagatcacccaacttgtaggtatttaatgacacaaatccatggctgggcttggctttaaaaaaaagtcttacctgagattccttctatggaatasagttccatcaaagccaatttaaaaacctatgcaaaaaaaataattattcttgctgcactgtatacaaataatcaggccaagtgtaataaaacaaatcagttctgccaggatttgcctttagtaaaaatgggaaactggagagagaaaaactatgtttcaaaaactatagtatacctgttgttagattctagtcttgcctaacatttttcaatttttatttttttctagtttaaacctaattctaatttttcttaactacaagtcttcaaaataatgttttcaatttttttctgctctttttccccattattcctaatttggagtcactgaaaactaaactgcttttgtaaagccctatgaactgaagctagacaacttaaacttcagaagaaaata

SEQ ID NO: 762781 - DNA, 592 bp, Homo sapiens
tcataccttggtctacatagctcctgatctgcggtaggtaaagaatgtcactttctgacaggttcaggagccctaggtttatcttggaaagtcaagaggagaagatcacccaacttgtaggtatttaatgacacaaatccatggctgggcttggctttaaaaaaaagtcttacctgagattccttctatggaatacagttccatcaaagccaatttaaaaacctatgcaaaaaaaataattattcttgctgcactgtatacaaataatcaggccaagtgtaataaaacaaatcagttctgccaggatttgcctttagtaaaaatgggaaactggagagagaaaaactatgtttcaaaaactatagtatacctgttkttagattctagtcttgcctaacatttttcaatttttatttttttctagtttaaacctaattctaatttttcttaactacaagtcttcaaaataatgttttcaatttttttctgctctttttccccattattcctaatttggagtcactgaaaactaaactgcttttgtaaagccctatgaactgaagctagacaacttaaacttcagaagaaaata

SEQ ID NO: 762782 - DNA, 514 bp, Homo sapiens
cagactgtcctgaattaagttttcctggcacatgtgtaattaaaacctctgtaggactgtaatttgcatattaggtagtatgagtacaaatgagttagttacctcatttcacctttatagtttctggttaaggagagaaagacattttgaaattttcgtagttcataatttgaaccttgaaatttaggattgtacaaaaagaaagggaatttaatgcatcaaatatatgacatgccattattytttgttgccagtagttggccaatttcaactttaattgaagtacaggcttttataatagtttgcaaaaacacagcaaaaaagtctagcaataagcttttaattttagatttcctccttatcctgtagaataaagttttaacaatagtgtcaacataagtaaattataaagaatctaatgacattcaagtgaatgaggatactctatttttgacctactgtacaaattacagtgcataaagtggaattcaaggatcttattttacacaacata

SEQ ID NO: 762783 - DNA, 571 bp, Homo sapiens
ttgttgaaaagatgcattatttgtgtagctgaattaaaatgcagaatttcagatataaagcaaacgcaacaaaaatcctattggacactaaggatgtaacaaaagagatcataaaataatacactagtcacaattctataccacagttgtctaaaagaaatcgatttggatttacctgggaatattttcttgagatggggtctcgctatgttgtccaggctggtcattaactccttgcagtcttttcatctcggcctaccaaagtgatgaggattacaggcatgagccmccatgactagccacctgaaaaattatgattcctttgatggcaattatacaaaagtgggtctaatggtaacattttaaaaatacttttaaactctcaaaacttatttatcccagtcctttgatgaaattaacaacaataacaaaaagtaatatgggtaaaatatctagtacaatgtctaaaaatatgcttaaaatgttttttgttatttattatgcctggtataattccaagaaaaactaatgtttatatacctgtgtcacttgactaagctatataattctt

SEQ ID NO: 762784 - DNA, 571 bp, Homo sapiens
ttgttgaaaagatgcattatttgtgtagctgaattaaaatgcagaatttcagatataaagcaaacgcaacaaaaatcctattggacactaaggatgtaacaaaagagatcataaaataatacactagtcacaattctataccacagttgtctaaaagaaatcgatttggatttacctgggaatattttcttgagatggggtctcgctatgttgtccaggctggtcattaactccttgcagtcttttcatctcggcctaccaaagtgatgaggattacaggcatgagccaccrtgactagccacctgaaaaattatgattcctttgatggcaattatacaaaagtgggtctaatggtaacattttaaaaatacttttaaactctcaaaacttatttatcccagtcctttgatgaaattaacaacaataacaaaaagtaatatgggtaaaatatctagtacaatgtctaaaaatatgcttaaaatgttttttgttatttattatgcctggtataattccaagaaaaactaatgtttatatacctgtgtcacttgactaagctatataattctt

SEQ ID NO: 762785 - DNA, 571 bp, Homo sapiens
ttgttgaaaagatgcattatttgtgtagctgaattaaaatgcagaatttcagatataaagcaaacgcaacaaaaatcctattggacactaaggatgtaacaaaagagatcataaaataatacactagtcacaattctataccacagttgtctaaaagaaatcgatttggatttacctgggaatattttcttgagatggggtctcgctatgttgtccaggctggtcattaactccttgcagtcttttcatctcggcctaccaaagtgatgaggattacaggcatgagccaccatgactagccacctgaaaaattatgattcctttgatggcaattatacaaaagtgggtytaatggtaacattttaaaaatacttttaaactctcaaaacttatttatcccagtcctttgatgaaattaacaacaataacaaaaagtaatatgggtaaaatatctagtacaatgtctaaaaatatgcttaaaatgttttttgttatttattatgcctggtataattccaagaaaaactaatgtttatatacctgtgtcacttgactaagctatataattctt

SEQ ID NO: 762786 - DNA, 599 bp, Homo sapiens
tgattgcaccattgcattccagcctgggtgacacagcaagaccctgtctctaaaagcaggcaacaaaaacacatgagcttcactacagggaattaaatacaatgagagtaataaaaaataggtgagcaaaaaaaatgcaaataagcaaacttttgagtatgatatttcattcttatcttgatttctgtttttaactccagattgattcttaaaatgctaacagttcataatgccagtgtaaacttgtcagtgattggactgaagaccttagatctcctcctaacttcaggtaatatgtgtatatgttttttgtgttgattcaaattwaaaaaaaagttgataccattaagtaaatgtgtgtgtgtgtgtttttttttttttttttttttgaagatcaggattagggtagcttgatttaaatgtcctaaaattgcatctgtttttagacctagtgatgggacagccataatataatctaaatatcagttatttccaaaattctttctgtttccatctcttctccttatctcttttctctatactttgcctctcaaaaatctctttcaatacattggttttaaacattaccttatatatta

SEQ ID NO: 762787 - DNA, 515 bp, Homo sapiens
tgcagtgagctgggattgtgccactgcactctaggctgggtgacagagcgagactctgtctcaaaaaaaaaaagaagatgggagtagcagaaggaatgcgggacgtgaaattggaaatcctgggtcctgctttcaaatcttttatgtaaatatgtgattttasataagtcacttaatgcttgagcttgctttctcttctgtaaagtacaagttatatgtaaagttccttctaacatagccatttcattggccagataagaaagaaaaaggagtactgtcatgatctgccacctacttaggccccttctgcaatgtgaaatggacactgtgagtataaaaacatactcaaaagtatattttttaattctctcactcaacagtcaacacaaaagacttctgtgaccaaatgtgggggatttctccccactaacaagcaatcagttttgcagcagacaccagctggatgtcctctaattcagttctcacactgtcaccctagaaatagcgtctgattc

SEQ ID NO: 762788 - DNA, 515 bp, Homo sapiens
tgcagtgagctgggattgtgccactgcactctaggctgggtgacagagcgagactctgtctcaaaaaaaaaaagaagatgggagtagcagaaggaatgcgggacgtgaaattggaaatcctgggtcctgctttcaaatcttttatgtaaatatgtgattttagataagtcacttaatgcttgagcttgctttctcttctgtaaagyacaagttatatgtaaagttccttctaacatagccatttcattggccagataagaaagaaaaaggagtactgtcatgatctgccacctacttaggccccttctgcaatgtgaaatggacactgtgagtataaaaacatactcaaaagtatattttttaattctctcactcaacagtcaacacaaaagacttctgtgaccaaatgtgggggatttctccccactaacaagcaatcagttttgcagcagacaccagctggatgtcctctaattcagttctcacactgtcaccctagaaatagcgtctgattc

SEQ ID NO: 762789 - DNA, 498 bp, Homo sapiens
acagcaaacatcaaatagattaaaaagttaaataaaaataacttcaaaaataaaatataaattaatagttatataatcttgaaaaaggaaacataaaaacaaaaaagaaatcacataagggtagtatatgtgactccatcaaatttaaattttctgcagtcaaagaaaaaatacccaataatgaaactagaagtcaaacggcaaacaggaagaaaaaatttgaaatacatatgatgaaatacaatttgccttcmactttcaaaagttcttacaaatcactgggaggagggtattacgccacagatagaccagaaaaaaaaataataaactaaggttttgaaaaggaaattcattttgaatgaccaataagtattttttaatgtcatcattataaaaaaaatgtgttcctaaacatgagtgatgcacaagcataaagtgcaattgtgtgtgtgtgtgtgtatgatgacaatgaaagggaaaccttgaaaataaattaac

SEQ ID NO: 762790 - DNA, 628 bp, Homo sapiens
tagccattcatctaatcttttttcaaggtttttagcttctttgcgatgggttcgaacatcctcctttagctcggagaagtttattattaccgatcgtctgaagccttcttctctcaactcgtgaaagtcattctctgtccagctttgttccattgatggccatgaactgcgttccttggaggagaagaggcgctctgatttttagaattttcagcttctctgctttggtttctccccatctttgtcgttttgtctacctttggtctttgatgatggtgacatacaggtggagttttggtgtggatgtcctttctgtttgttagttttccttctaacagtcaggatcctcagctgcaggtctgttggagtttgctggaggtmcactccagacgctgtttgcctgggtatcaccagtggaggctgtagaaccacaaatattgcagaacggcaaatgttgctgcctgatccttcctctggaagcttcgtctcacaggggtacccggacgtatgtggtgtcagtcagcccctactgggaggtgcctcccaattaggctactccggggtcagggacccacttgagaaggcagtctttccgttctcagatctcaaacactgtgctgggagaacc

SEQ ID NO: 762791 - DNA, 626 bp, Homo sapiens
agtctctaagaacaaattgccatttgtaaaaaaaagaagttaaatatttaggagacctgattagtgaagggaagtagaaaataaacccaaagaaaatatcgaggatagtggctctgcctttgccttagacaaagagaaacctccaaaaatttttaggtttaactggctattgtaggttatggatgaactcatatgctcaaaagacagagattctgtatctcaagttactaaagaggaacccaatcccttgcaatggtccccaaaggaaattcaggcagtaaaaragctaaagcaggccctcatcacagccccggccctggcccttctgtctttaaagaaactattccatctgttcgtcacagtagatcagggcatggcccttggagtgctcactcaaatctggggagggaagaggcaacctgttgcttttgtctccaagcttctcaatcctgtctctcaggggtggcctgaatgtgtgcaagcagtagctgccacagccctgctggtagaaaagagttgaaaactaacctttggtggggccctaatagtaagcattccataccaggtcaggaatgtatcaaattgaaaagccgggagatagttaacggattctcagtttctaaaat

SEQ ID NO: 762792 - DNA, 593 bp, Homo sapiens
tgaccattattgaattcattataaatgaggttatgtagcatgcagtagcaatagtttggtcttttatattactatatatagtattctctcatatgactaatttatctgttttactactgataagaattttggactatcagtttgagactattatgaataaagttactaacaacattcttgaacacatcttttgggtttatgtgcacttctcttgggtatttacctggaagtagaattgctgggtcacagggaaagcacatgtttagctttacatacwgctaaacaatttttcaagtggttgtaccaatttatacttgcaccagcatggtgtgagagttctcattgcctcataacctttttaatacttggtattgtctattgtcagggtttgttttttgttgttgatggctttttttttttttttttttttgacagagtcttgctctgttgcccaggctggagtgcagtggcatgatctcggctcactgcaacctccgtctcccaggctcaagcaattctgctgcctcagtctcccaagtagctgggattacaggtgtgtgccacgatgcctggctaatttttgtatttttagt

SEQ ID NO: 762793 - DNA, 593 bp, Homo sapiens
tgaccattattgaattcattataaatgaggttatgtagcatgcagtagcaatagtttggtcttttatattactatatatagtattctctcatatgactaatttatctgttttactactgataagaattttggactatcagtttgagactattatgaataaagttactaacaacattcttgaacacatcttttgggtttatgtgcacttctcttgggtatttacctggaagtagaattgctgggtcacagggaaagcacatgtttagctttacatactgctaaacaatttttcaagtggttgtaccaatttatacttgcaccagcatggtgtgagagttctcattgcctcataacctttttaatacttggtattgtctattgtcagggtttgttttttgttgttgatggctttttttttttttttttttttgacagagtcttgctytgttgcccaggctggagtgcagtggcatgatctcggctcactgcaacctccgtctcccaggctcaagcaattctgctgcctcagtctcccaagtagctgggattacaggtgtgtgccacgatgcctggctaatttttgtatttttagt

SEQ ID NO: 762794 - DNA, 603 bp, Homo sapiens
gggagagggaggaagggagaaagtgagaagggaaatcggaaagagaaaagggaggaaacggcagagccagagagaaagaggaagagactgagtgtgaaggagagaggacacaggggatgactgagagacagagagagagagagaatgagacagagacttaaggaagagaccctgtgagtctgacaataaaagatttggacagaaacagaaagattggagagagagagagagggagagaatgagtgagagagagactggaagagacagagatcagagggagacacagaaagtgagagtggggagagaggtagtgtaaaaggaagagagagagagagagaccgtaagagacrggagacaaagagacaaaaagtgtgagtgagcaggtgaggagagagattgagaactatgagagacagcagctaagagacaaaggaggcgggagactgcctaggtgccgcagcacccacaccgtcctcttgcccccccgtcactgggaccccagagctgggtaagttccctggctgggctgggaggggctctctgggttcacattcctggtgccgcagggcttggcttggggagttggcaggggtggtttggggg

SEQ ID NO: 762795 - DNA, 632 bp, Homo sapiens
gcaatcttggctcactgcaacctccacctcctgggttcaagtggttctcctgcctcagcctccgaagtagctgtgattacaggtgcccacaaccaagcctggctaagttttgtatttttagtagaaacggagtttcaccttgttggccaggctggtcatgtactcctggccttgagtaatccgcctgcctcggcctcccaaagtgttgggattacaggcgtgagccacctcgcccaaccaggatttttttttwaagatgggatctcattctgtcgcccaggctggactgcagtggtgtgatcatggctcactgcagcctcgaattcttgggctcaagcaatcctcctgcttcagcttcctgagtagctgggaccgcaggctcgtgccatcatgcctggctaatttttggttgtttgtttattgtgagatggaacctcactttgctgccaagtctggtcttaaactcctggcttaaaatgatcctccagtctcagtattccaaaacgccaggattacaggagtgaggcaccgcacccagccctaatatgattatatatataatgcacttagacaccaggcactgttctaagtgccacatatatatggactcaatcctaatatcaaaaagtaaa

SEQ ID NO: 762796 - DNA, 642 bp, Homo sapiens
ccagagattcttgggaaagagatcttggcccagaagatgggaatacccccagagatttatgggattaaacagtctggtgccagagaggggccaaggtccagaggctcatgggaggaagctttctccggccaaagggatagcccagggctccagggaatcttgggaggccaacctctgagatggccagagggctggctaaggtctcagtgattcatggaaagggcctttctcccaccagggcacccggggcagcagaggatcacagggagggagtttctcccaccagggcacccaggggcctcagaggcccacggagagggggtttctcctaccagggcacccaggagccgcagaggatcacaggaaggggtttccaaagctgaagacatatccagggctccgggagctcccaggaaagggtgatttagccccaaggggttttccaggccacagagcagcacrgaaagcccactctccagggcctcaataagaaaggccattatctgttcctggtactactgaaggaggctggctgttagtccaggggctcatgggacaccaacttctccagggaacaagctcccagcccattccccagctccctgcagctcacctggatctccttcagctccttctggaagc

SEQ ID NO: 762797 - DNA, 546 bp, Homo sapiens
attgaataaataaataaataaataaatcctggggatgtaaaggtgaatcaggtatgatccttgctatcaaataactcacaatccaatgggaaaaagaacaaatgtactgtagtatcacaggatttttttttttttytttttgaggcagagtctcactctgttgcccaggctagagtgccgtggcaaagcaataaaggctcaccctcctgggttcaagcaattctcctgcctcagcctcccaagtaggtgggactacaggtgcctaccaccacaccgggctaatttttgtatttttagtagagacagggttttgccatgttggccaggctggtcttgaactcctgacctcaggtgatccgcctgcctcagcctcccaaagtgctggggttacaggcgtgagccaccatacccagcagattccacaggattaaggctgcatcaggggcatgaacaaatcacagctgcaaaagtgattatttttacttcaggggttgaaagaatgacaaggactgcttctctgacaaggtgacaattgagcagactctt

SEQ ID NO: 762798 - DNA, 546 bp, Homo sapiens
attgaataaataaataaataaataaatcctggggatgtaaaggtgaatcaggtatgatccttgctatcaaataactcacaatccaatgggaaaaagaacaaatgtactgtagtatcacaggatttttttttttttctttttgaggcagagtctcactctgttgcccaggctagagtgccgtggcaaagcaataaaggctcaccctcctgggttcaagcaattctcctgcctcagcctcccaagtaggtgggactacaggtgcctaccaccacaccgggctaatttttgtatttttagtagagacagggttttgccatgttggccaggctggtcttgaactcctgacctcaggtgatccgcctgcctcagcctcccaaagtgctggggttacaggcgtgagccaccrtacccagcagattccacaggattaaggctgcatcaggggcatgaacaaatcacagctgcaaaagtgattatttttacttcaggggttgaaagaatgacaaggactgcttctctgacaaggtgacaattgagcagactctt

SEQ ID NO: 762799 - DNA, 638 bp, Homo sapiens
ccctgccaagtcacccttggctccccctcagcccctctcccatgcttgtcagtgtacaaagtttagagggggccaaggtggcagggggctggtgtgtcagcaccgccaggagggtgtgcacacatggccaggtcacaacagtgctgggcttggcctcaactttgctctaaaaacagagtgggaagaggctaggcagtgggagcatgcacttctgagyctgcgggggcagtgaggcttcgtaggcccctaagagcatagggatgcctggatccacagctgtggctgtgctgctgtagctgcacccaggagggtggggacccgccaacttgaaagggggcggggctcctgcctgttcctggctctccctggttctgtggagcatgcagccctcaccacacctccccagccgcagctggcgtctttgcagtgaccactccagatgggctgccactgccaggagtaggttcccactcctggcaaaaactggaacacattgtgctcaggatattcctgcccctgctcacagtactcagtgggaaagacacatctggcttttcctgggtctgattgaagcccgtcttaacacctgcagaacagaggccatggtatcacctggcatgctcctccttatgccactg

SEQ ID NO: 762800 - DNA, 638 bp, Homo sapiens
ccctgccaagtcacccttggctccccctcagcccctctcccatgcttgtcagtgtacaaagtttagagggggccaaggtggcagggggctggtgtgtcagcaccgccaggagggtgtgcacacatggccaggtcacaacagtgctgggcttggcctcaactttgctctaaaaacagagtgggaagaggctaggcagtgggagcatgcacttctgagtctgcgggggcagtgaggcttcgtaggcccctaagagcatagggatgcctggatccacagctgtggctgtgctgctgtagctgcacccaggagggtggggacccgccaacttgaaagggggcggggctcctgcctgttcctggctctccctggttctgtggagcatgcagccctcaccacacctccccrgccgcagctggcgtctttgcagtgaccactccagatgggctgccactgccaggagtaggttcccactcctggcaaaaactggaacacattgtgctcaggatattcctgcccctgctcacagtactcagtgggaaagacacatctggcttttcctgggtctgattgaagcccgtcttaacacctgcagaacagaggccatggtatcacctggcatgctcctccttatgccactg

SEQ ID NO: 762801 - DNA, 649 bp, Homo sapiens
gtatatgaatttagctctaggtaagcaaaatgcacacatcatataaaaataaattgcaatgatcagaccaagtggctgtgctggacatcaaagaaaagacatgctgttgccatcaggagaactctttcttatatgcgatagccaagatatcttctttaatatgaaaaaagttaatttctgaatttcaaaaagagtaagattagctaattggtcttcctaatttttatgcctttagagtttttagtctattcaagtagaagagtccagcgaggccaaagaagggttacggtgttcaagttctggttgttggagtttttagcccagagtgacatactgaaatcagtaaataattattttataatgacacagcacaactgccttgttatgaatttttcttaaatgcatatatactgtatttaaaattaaaatatagataccaatttaccaaagatacatattactaattytaagcaaaactaaaaaaaaaacccaactcatcataatttaagaatcaaaatgtagtttgtcttaagaatttagtggttatactggaaatgcattttcaactcctatgttctaaagtttatgttcaaatggtgccagtgaatttttatatgaagggaaaatgcctgcttttttttttttttta

SEQ ID NO: 762802 - DNA, 663 bp, Homo sapiens
ttttttttaactcagacaaccttaaggtataaattactattatccacttttacagctgagcaaactgaggcttaacaagcataacagtagggagcacagctctgaccttgaaccactgcccacagtcaaccacgctgtatttgctgttacctctttttgtgggtagtttcatatgtaaaatgatatagacttattgtatatttaccatatactagtaccatagtatagactacagtagataaatggccaacttgggtgcatgatcccctgcaatcaagttggagctattttaacttggtagttttcccaaaggaggcatcaggtgctaatcagcacatgaataccaaacttctgtgcaggcagtagcagagcggtagttaggagcacagyactgagatgggcttacgttctgttcaaatccaggctctgcccctcattagtggtgttaatgagggcaagctctagcactccagcgacagcacatatctgctcaaagaacaaataacatgtgcaaatagcccaagtatattgtattccaagtattctctctaagcctcaggttttttcatctgaaaaactagagtactaattcttactacccactcaagtagcatgtcaatactgagttattactacatgtcaagtttgaataaaaggtctatg

SEQ ID NO: 762803 - DNA, 622 bp, Homo sapiens
gcttagacctttttgatcgatgttttctggcaagagtgttctttaaccatgttttaactaaaacaggtatcagtactatttttcttttaaagccactataatatttcatcactagttatacattctgagattggaaaaacaacaatgacatgctatataccaacccttcaaacacstgggctgtctgatcaggattcaagattagacaactgtgatagcgcctgagaacagccacgatgcagacacacagtcctgttgtataacttcctgccaggctggaggattttaggagcagttcagcttccacaacactcagttcatttagtaactgtaacaggagaaaagactgaataaacatgtaggtgccaaaacaaatagagaaaacatttatttttataaaccatagatatactgagtcattacactacaaatacattccctaaatttaacttttttaaaatttttaatccttttccaatttatagagttgttcttctgtctagacatcaggatgtatacaattaggaagtacccagtgctgaaataaggtactgaaacttcagggcagtgcaaggtcctggactgtataattttagaaaaccccacccctcacttttctccc

SEQ ID NO: 762804 - DNA, 560 bp, Homo sapiens
aagaggttaggttatccaccgtggagcaggtcccatcatttgtgtatccaaatcaaggaaataggtaatttaaagaatgaaggatgactgagtcagaacctcccagagctgttagctccttggcaaaaatgaatctgtgacttcatgggaacatgctcttggattaccatttaaattgagtaattaccctttgttcggtaattgatctcccaccctaaggaaatggtatcaccttggaatatgtttattttctctatccctcccactcactctttaatggtatacatatttcaagcatagagacgagaatagaaaaaatgtaataatcactaatgcacttactagctttattaaataatattcttccataatgctgtagattatttttttaaaaaaaattacagatgtggatgagtctccytgtatcatcatttccctcccttcttctaaagtgggaatccccatcatgatttagcattttactttcttatgcatgtttttatacttctaatctatacgtttgcatccatcaacataaacattgtacagtattactttgt

SEQ ID NO: 762805 - DNA, 635 bp, Homo sapiens
agctgtcacatgcagatcgcattctgcttcccacaaagccaaaagagggcacgagtgttataaactacctatagatccctagattctaactcatatataaatagttgatttttctgttttgtaaaaatggtaatatacatatatttgtctctacaaagaagcacaacagtatgtctcagggaccttgtatgatgctartgtccaggagtggtctttaaggatctggttgatttaattattccttggcatagtgtttggaggatcaagagccatttggattctttgggaagaacagttttaggctcctgatggtcatactgtcatggtatgtgttctcacagaggaagtttgggctatatttctctaacccaagcaaatggagatacaattgtttttttaacagattaatgagttagagactaagagtatcttcatgatagcctactctgaaagtaagattcttgtatgtataaataccctcagaggtacactcaaaaatttatgtttcattcatgtgtagatagatagtcacctagagagatgctgaagtttcgtaaatggccacgtgattttttttgtggggatcagagaaagggcttaactgtcttaggtatgcatttggttttggtatctca

SEQ ID NO: 762806 - DNA, 515 bp, Homo sapiens
ataaagtgcatacaaatgctatgcaattataacactcattcttaaaacagtattactgttgtttgcaatgctgagctacaaaatatatggttcaaactgaactggcaaagaaatttggaaagaaataatgatggaacatgactcactcactargcacaacattcacatttcggttgatttgccaatgcagtcattatatagatatattactttgaagaaaacaacttcattagcttatctaagtatgtttcttgagaggaaaaaatctgatatacaaaaccagcaaaaatgtgtacagatagatgatacatcttctgaaagcagatagactattaatttagtgaaaagaatagtttttaatgttttggcaaagtcttttccagcccagagtaaacacaaaatgggcaggctggagtgaaatattttcacagtgtacaaagcagttcacatggatgttgccacagcaaagtaagctgacatgtatttgaggtcatttgcatgagtcaaactttgca

SEQ ID NO: 762807 - DNA, 578 bp, Homo sapiens
ttgggaggaactgaggctgcttttaggctaaaacaaagacagtcagctctccatattcatggtttctgcatccatggattcaactaactttgtatcaaaaatatctggaaaaaaaaggttacctctgtattgaacgtgtacagtctttttttcttgtccgtattccctaaacgatacagtayagcaacaatttacatagcgcttacattgtactaggtattttaagtaatctggcaatgatttagattatacaagattatgtgcaaatactacaccattttttttctcagagacttgaccatctgtggattttggtatccatgggaggtcttggaagcaatccccttcagataccaagggatgactgcagtttcagttcattagcccactctaacatagtcataagaacaggcactactgcccatatgccacaaagtaagaggaccaaaaggagatcacgatgtatgattcaaataagtaaatgtaataataaagaaaatgtggctaaaaaaaaagaaacttcaaagtgtgatattgttaatgtgtctcaaatatttggcagaatgatttgaagagac

SEQ ID NO: 762808 - DNA, 669 bp, Homo sapiens
tacctcagtttagaagacaaaatataggcaagcaaaataatgctaatgctttactcataggtaaataatccaaaaccaaatcttacaaagtgtgacttctaaatgcttcctccaaagtctaaaaataatgacccatgagagtccttcccattagtttaatgacttaaagatatcagaccaacaagactatcaccaacgttctatataaatgacacctaatgtttggagtcactttattcagttgtggaatatgtattatgagctactttttgttgtccctttatatgtgtggacactttatttattaaatcatgatgccaattaaaacatgacttctcctataggtgcaatggatggatagyggccagttttgtgaagagtaccccctcatgataccaatgagaaaactgtataaagagatttaagagcttcaaaagaaatgatggaaaagacatcactcaagtgaaagatgaaaccaaagggagtgaaaggtgcaagaacagtcagggtaactaaaagacaaagtgaaaacttgaaaatgtttaacacaaaacaggaaattttattttccaccgcttacattctatttgactgttctggaaaagagagactataacctaggtcaaaacttatttactttgctgtttcagctatggaaaccatatgcta

SEQ ID NO: 762809 - DNA, 669 bp, Homo sapiens
tacctcagtttagaagacaaaatataggcaagcaaaataatgctaatgctttactcataggtaaataatccaaaaccaaatcttacaaagtgtgacttctaaatgcttcctccaaagtctaaaaataatgacccatgagagtccttcccattagtttaatgacttaaagatatcagaccaacaagactatcaccaacgttctatataaatgacacctaatgtttggagtcactttattcagttgtggaatatgtattatgagctactttttgttgtccctttatatgtgtggacactttatttattaaatcatgatgccaattaaaacatgacttctcctataggtgcaatggatggatagcggccagttttgtgaagagtaccccctcatgataccaatgagaaaactgtataaagagatttaagagcttcaaaagaaatgatggaaaagacatcactcaagtgaaagatgaaaccaaagggagtgaaaggtgcaagaacagtcagggtaactaamagacaaagtgaaaacttgaaaatgtttaacacaaaacaggaaattttattttccaccgcttacattctatttgactgttctggaaaagagagactataacctaggtcaaaacttatttactttgctgtttcagctatggaaaccatatgcta

SEQ ID NO: 762810 - DNA, 632 bp, Homo sapiens
aatactaaacaaggagaatgtactcctgtattacttgtgctcctcaaaagcaaatgcctatacatgtatcactcgcatcacagcacgacctgagatctatttctacttctacccttagcttatttgagcattcattgttaaacagaaatggtttacctgggactggcttttcccctcttctgtgtgaccctggttgaattataccattaatctgggcttcctttttctcatttgtaaaataagggagttgagcctgttggtgtaaaagaccttcccagcactgacattctgtgattctattacaggttcccttcatgctctgaggctctgggaatccctgctaggtaaatgacgaagggtggggtggggggatctctttccagagaaagagagcaaaatgtaaygttccacactcttacctgaagtccactatttcaactgaagtaaaataacgacccagagagggcgatgtactgtacacatctgtgagctaaacaaacagaagcaaattaaaccacacacattaccgacagatcatattacacatcacctgacaaagcaaaactgcttctaaggcagaggagattccactccagcctggaatcaacgttatctggaagctctggatcaag

SEQ ID NO: 762811 - DNA, 632 bp, Homo sapiens
aatactaaacaaggagaatgtactcctgtattacttgtgctcctcaaaagcaaatgcctatacatgtatcactcgcatcacagcacgacctgagatctatttctacttctacccttagcttatttgagcattcattgttaaacagaaatggtttacctgggactggcttttcccctcttctgtgtgaccctggttgaattataccattaatctgggcttcctttttctcatttgtaaaataagggagttgagcctgttggtgtaaaagaccttcccagcactgacattctgtgattctattacaggttcccttcatgctctgaggctctgggaatccctgctaggtaaatgacgaagggtggggtggggggatctctttccagagaaagagagcaaaatgtaatgttccacactcttacctgaagtccactatttcaactgaagtaaaataacgacycagagagggcgatgtactgtacacatctgtgagctaaacaaacagaagcaaattaaaccacacacattaccgacagatcatattacacatcacctgacaaagcaaaactgcttctaaggcagaggagattccactccagcctggaatcaacgttatctggaagctctggatcaag

SEQ ID NO: 762812 - DNA, 653 bp, Homo sapiens
ctagccttcccagaatgccccatgcccttgggtttcatggaccacccaaattccaatatatactgggaagtgactcctataggattcttactttttaccttgccaagtaactacctaaaaacctcccacctacatccaccatatgtcataataaaaattatagtgtgccctcaaaatttcagggtgggccttttatggaataaatttagccttttgaacccctcactctgttgtctcttttcttattttggccacgcatcatgagtgcctatcatggcctggtctcacatggccagcccatgggacctctgtgcctgcagccaggaccaccctgcctctctgacctgccctccctgccagcctagagtcctgatcccacccacacccctatatggcctgcatacaccaasacttcactacccaagattatcacctccacaaaccccattctaaggctccacttttctcgtctctgtgtcacaccctgaaaatgggcaaatctaccttacgatgcctctggctcctgcctcctctgccaggtctcttccttcagcccaccctcccacattctgcccaggaaactttccaaaacatctgctttgtcccatctcacatgcctaaaacctccagaggcttccagggtctttaggaaa

SEQ ID NO: 762813 - DNA, 398 bp, Homo sapiens
cccaggagcagcatctgctggtggcttctggccagctagtggggcaggagctggggctcctgcagcctccttgatggcagcaggggtggttgtgggaagaggctcttcccgtgcagcccctactggcatctctggccttgaaggscccccagccccaggggccttggcagcagcaggtttccccagatagacaggcccttctgcaggtggaacactggaagcaatgggaaatctacttggtgcaggatagcggtacagccctgtgggtccaagaggtacccggggggcaatcatgggcacacgtgtcagactggtgagtggcacggctgtgattccaccagatgcgtaaggcctgtacatgccaccacgcaccatgggccgcaggactgaggcaggct

SEQ ID NO: 762814 - DNA, 592 bp, Homo sapiens
tcccttgggatccttcccctggggtgtagccttgttcattagtatatactcattccttcatgctttcctcagcagaacacttccacttctgaggtgagcttttgccccatgcccttcctccacaggtgttgcctttttataaagacctgatagcagaataaattggtgtttccctgttgacccagcaccatttctgtgggcctagaatatggccctcaacccttagagtggggcagtgagggcttgaggagtgacccttcctttctcatggttttagtcattttggctgccagcccttaatggcacagatctgctgctyctaacagatggccaggaggtgacaccgatttcagccattgccaaggttagcaccctctcctttgagcctagggccacactgttcattgtcactttaggcaagtgcctgtttggctttaaaggtaagcctgccagctgtgagaagccttggtaactgatggactcatttcctggtccttaaagatgcagcctcttaagggctccttgatggatgccatctctcctagcccccagccctggtgccactggtgggcaggttcccattctttggggc

SEQ ID NO: 762815 - DNA, 619 bp, Homo sapiens
cgtgccatcaggaatgccaaccactgtgggaacagcctcgtggaggtctgagagcactgagtgcatggatgcctcaagctggttttcccagtccctgacagcctctgagggttcactgggccagtgggactgagccataaccacagagagcaggaggagaaaggtcctccccsagaggggcagcagcagcgagaggcccacagacatcctcatcccaggtccaagtttgctcaagtcgatagtcttgctaagtaaggaagcaagtgacttggtcccagagctgggttctcaccctctgcacacctgctccatcccggagcacacagagcctgaaaaaaaaagaaaagcaggtttagacttgagcaattccagtggttcagtcacatactatcctccaggagttactgtcaaaaacatctaccccgagttggatcaagcctcttacccccatggtctcttatacagaaaccaacagtttcgtgcaactccttagcactggaaatgtagctgatccattaaatataaaatatacactggattttgaaaacttcataaaaaatgaatgtaaaatgcctcattaatacttttaaaatattgattgcaaactgaaatgatatgt

SEQ ID NO: 762816 - DNA, 620 bp, Homo sapiens
tctttgtcactttgctaagagcaggttcaccttcctggtcatgcttccatgtgatgagaaaacaggtttgcaggctttgctcacacacctgctgttagatctgtcctagtcagactacatctgtcctggccacttctaacttgatgttatgtcagtcaagaaggctgggattgccctggtgtctctgggctgaactcctgcctggcctgagattctgggcatgtgtaaggggctggttctgaagttaggtgtctgggtgggtgatggggtcagagagagtgaccttttccaggaaactcagctacagcactcactttctttttcagttcctcacttcccaggagtggcccaatcagagtagaaaaaggtagaggtactgccagtcccagcgcagatgcactgcagacactggcaactggagagtgtcctggggatcctgtgtgggctgggtagtatgcctggagctgctagtrtagtcacgctgagcctggttgaggaggtccagcagcctgggtgctgtgtccagggcgtgtcggcaggatgcgttgttcctcagcttcccagtggacagagggatatagcagtcccagagaaggacgtgggccacacaagtgacatgg

SEQ ID NO: 762817 - DNA, 451 bp, Homo sapiens
ggccagtggtccgacttgtccagcagatgcttcacccaggcagctgctgtgagaaaacatcacgtcctcaactgaggcctgcctgccacgtcccacctggtgagtctttgggccaagggtttgccagattgtagatgcttgaaagagaaaaggagggagggaggaaggaaagragaaaagaaaggattctgtcaagaattgtagatagctgcttctcaccctcacattcctctcagccatctgcctgtgctagcggccacctcctcacccacggggtgccatgccactcaggcttggggagatgggtgcttgggcaggttggaggtcacagagaggacagcaagaaagaagaatcaggtcagccaggaagggacacttcttttaatgtaacaaaagttccttttttttttttttttttggcttaagagtgatggagaagggatttggtttg

SEQ ID NO: 762818 - DNA, 542 bp, Homo sapiens
tttaatgggaatatagttcaatatttttttattttgctacatatgtgttcagagaaataatttataaaaattaacagattgttgaaactaatttcataatatgattagttaatttttgctttgtaataaaatatcctaaaattttgtggcttaaaccatagcaatttacatagcttatgattttgtgagccagcaatttgtcctggccacacctgggtggttctgccagtgtggcctggttcaactgatctctgcttggtttgtttgtattatctgcagttagatatgtggtgttgtttctgagacctctgttctgttccattggtccatatatctgttttggtaccagtaccatgctgttttggttactggtggattaactggtagattacctsttctaggacagcttagctgaaacatcttatctctagtctctgtggttcttccattatccagcaggcaacctgggcttattcacatacatagtaattgtaataggctttccaaaagtagccaaagagaacaactcccaattcagaagc

SEQ ID NO: 762819 - DNA, 615 bp, Homo sapiens
attatatatttatatataaaattaaagctaattatttatatgtatatactgagtatactcactgaaagtggctggaaacaatgactaacccaggaacagtgcatgtttctggtgaccaaattgccttgaaatgccaggggcttcatggagaaatggctgattctacgtataggggtagaaatgtacaggataaatttggaaaatcttgttacactgggtaacaagacagctaacagagactccttaggacaatgtcaaaaagaattatgtrctatcttgaagtatctccagctgaccaaatgtaggacaatttgaaagtcaatagaataagagatacaatgttgtgaaacccatacggtatgtttaaattcatgagtttaaaatgatgtaaaaattaattagtcaacttttgaaaatgtaaagggattaatacatatcttgaaaaatagtatgcaacgagaaagaataggcctttatgttgccttcttgtataaactgtactcttgggtgaccaaatggtagataagagaagtatctgtgtagaacgttatttcagctaattaaaaaatataaaattagaatatcagcattttataccataaaatatgctccagc

SEQ ID NO: 762820 - DNA, 559 bp, Homo sapiens
acaaactttgttgtgtgtctgcattttgactgcaactcttcacatgagatcaggcatggaattttccacttgtgatgtcatgtcagctctcaaaaggttcaggattttggagcatttcagatatcaaatttttggattagggatactcaacacgtgtgtgtgtgtgtgtgtgtgtgtgtgtgtgtgkgtgggtgggtgtttatgtataatttgatgaaagttaaaagaggaatgtgaataagcatgaggaaaaaattaagacacatgattggaaatccactggtcaaaatgattagcttattacttttagaattgcccttaatcattcagaaagaaaggtgatgagttactactatcagagggactgtgtcctccagcaaccacaaataatatttagtggctcagtaattactttaatcaattccttaactaccgtaagatacgtgttatcaagatctgatcattggtaggtgttgacaaaagaaagttgctttctaaagtatcctattttttctttcgctaaaagcctagtaaaataaaagtggatgttaaatttata

SEQ ID NO: 762821 - DNA, 609 bp, Homo sapiens
cctggcctccactgacattttgcacattgtcttctcagctgtcatgatggattatttagcttaatttgtctggaagagtgactgtcttatgggggtttgtattgaaagcagatttccctcattattcagaaatgagaatgccatgacacttcgtaggtaacaccagtagtcttcccttggctggcaggagtcaggaagtttactgtttaaccttttcgtgcccacttttaygtaggcaacaagaaaatataggatagtttctagtgtaaagtgggtataacagattgaaccataatagccaattactgaaaaaatagttctttgttaggtcatttataataaattttaggttgaaaatatcttctcatgggatagaagtctctgatattgaaatattgttatgcatgtagcacttataagagctgtttactgaaataatttctaagtatttttcagaattggtgttgaattacaaagactgagtcagtgagaatggaagtacatttgctaggcctactttaatatcaatagaattgatgcatggggcaagcagagggaacattcaagaattttcctttgctatacaacccttctcaagagaataaatta

SEQ ID NO: 762822 - DNA, 629 bp, Homo sapiens
ctaagatttaaataagattgccagatccttccatttatccatggtagcaaaaatagtttgtttcatatataaaatatttatgtaaaacacccaaaaagcacttaagtataaaatctgctacagcgtaagcattatgtrattattacctattgttaatattattgtagtttgtttagtgtacattttaagtcctggtatttacactgtgttaatcttataggtagctttatatatacttctctctaaattgagttttttaaacttgattcttttgaattttctcctcttcagtgtatatgcttccttttcagtctttactgatatagcttagatataaaaagatttttctaaagtcagcatcaaatactttaatacttggaagcagatgtaccttgctgtatgtagtatcagtctactctggctttgtagtctcagatttgtcatttgtgatcagagtgttggacatcaaaggatgtgaagtggttctctattttgtaaccagaaactatcctgatattttgaaataattgcctattaataaagcattttagtttcatgtttgtaaagaaaactacataagtcgtctgcttttttgttgttgctgttttgttttgttttgttttgttttt

SEQ ID NO: 762823 - DNA, 629 bp, Homo sapiens
ctaagatttaaataagattgccagatccttccatttatccatggtagcaaaaatagtttgtttcatatataaaatatttatgtaaaacacccaaaaagcacttaagtataaaatctgctacagcgtaagcattatgtgattattacctattgttaatattattgtagtttgtttagtgtacattttaagtcctggtatttacactgtgttaatcttataggtagctttatatatacttctctctaaattgagttttttaaacttgattcttttgaattttctcctcttcagtgtatatgcttccttttcagtctttactgatayagcttagatataaaaagatttttctaaagtcagcatcaaatactttaatacttggaagcagatgtaccttgctgtatgtagtatcagtctactctggctttgtagtctcagatttgtcatttgtgatcagagtgttggacatcaaaggatgtgaagtggttctctattttgtaaccagaaactatcctgatattttgaaataattgcctattaataaagcattttagtttcatgtttgtaaagaaaactacataagtcgtctgcttttttgttgttgctgttttgttttgttttgttttgttttt

SEQ ID NO: 762824 - DNA, 626 bp, Homo sapiens
tgccagtaaaaatgcatttttaaaagggattttccattaagccagacttgctaacaagattcataccaggctggactgggtagcttatgcctgatatcccaacactttgggaggccaagacaggtggactacttgagctcaggagttcgagaccagcctggggaatgtggtgaaaccctgtctctataaaaactaccaccctgggtgtggtggcgcatgcctgtagtcccagctactcgaggggctgagctgaraggatcacttgagcctgggagtttgaggctacagtgagctgtgatcatgccacagcactccagcctgggaaacagagcatgaccctgtctcagcaacaacaaccacaaaaaaaaaaaaaagattcataccaggtgcttctgtctgtagtaggaccataaagggaaataaccttcaaaagaagtccgagtagaccctaagccaattaaagtatctgatctgaaatgttcatttttcccagctcagtactatttaacagattacattttgtattatgtctacataatatgacccaggaaagaaatactgaaaaaggcaaacttgttgtaaacttgtactttaaggaaaatgattagactcttgcaccagccttt

SEQ ID NO: 762825 - DNA, 628 bp, Homo sapiens
tctgtcttactatataactgacgaagtaaatagggcattttgcttaaccagcttcagtctgatctctgtgggggtacaaaaaggaagagaaaagccctcttttaaagagtttacagtctaaagtaacatccacaaaccagagaaaattgtatattatgttatrgttgttatcgcctaaattgaaggtcaaaaaaaggagaagctattgcttggtgtaggaggctaggaagcctgcatgcaaaatgtgtggtttagaaatttccacataaagaaagtcaggcttttcaaggaatgtgggtgtggtaataaaaaaaaatcagccagtacttgtgtgcaaataaactacaagatgcctttcccagcaattctaatttcaaatatcctctttcttttatagcttaaatttgtcacgaggatgccctgcgtgtgacaaatgggagcagagagaaacttgcaggacacaccaggacacacattacatacacacagcatgagaaaggctagaattagaactttaatagtataatagatcttctgattatcagtgtcatgcatatttattccaaaatatttgaaaatagtgtggagagttgggtaatttttgagggtgtggaagtagggttgttat

SEQ ID NO: 762826 - DNA, 587 bp, Homo sapiens
attgatatacaatagatgccataactaggttcatcaatagttttacttatagttgattgaagaactaaaatatacactttccaaacaaaaacattacaccttgcaatttgcattctagtttgcagttgtaaattttaaatgcaaataacatttcaagttatcctatacaatgacaaaatcaaagaaactcgaattctatttagctctataatcaatgtgctatcattacttttattccaacacctaaatgtaggaatgtgtaataccaatggtattggagacacagaaatgcaaccaaaataattccaaactgttatggatttactcttaaaaggagtcatatagctgaattctcatgggactagagcaaacgtaaagctggaagttctctgaataaacttytaaatagaatgtaatgtttactatgtttatgcaataaaacattcaaaattgaaacacaatacataggagtaatactcaataggaagtgtagcaatgttttgaaacttaaaccaacaaaatacttttttagggatggatattttattactgacattttttaattgctggaaattgatgataataaa

SEQ ID NO: 762827 - DNA, 613 bp, Homo sapiens
acagtgacagtgtgtgctttgcacactgaccaggattaagttcatttttattaactgggttgcttgctattaaataaaccttaaattaaaccacttttgttatcaatgaaataaaccatcatcttaaaatatgattatttaccttaaaaaaaataattttattttgtgttcatgctaaggcagtctgtatgcatttggggaggaaaagattctttctggattaaaaggagccataagataatggaaaaggtcttcaaacgtgtaattaagattaaattaatcatctttttttctcaataagcatattattttgctgagtcactaagtatatttaaatgatattgcattggattaagaggattaatgcttaacctcacttctttgtttgcctaggactgccgctgagggtttaytgagtatggattgagcatcacactaaaaaccttccccggaaaaagggaccaaaggatgtaaactgaaaattttaaaaatctgctttgttttcctcaaattgctgaagatccaggtagatatttgcctgtaagtgctgtgagtcaatttaatctgctaaaacaaagtgcagcattgaagacaatgtctttcttcttcccct

SEQ ID NO: 762828 - DNA, 554 bp, Homo sapiens
agagagccctagcatatacaacagagctaaaaccatacactaataattaagaactataaaagatctttgcccagaacaaactggcccaattttccttataacctcaagtaactgaattattgatatttctagttttagttccttcaatgtataatttagccaagaatgagtaagtttgtgaatttttcttaagttatgtaagacataaggagacaaaaggagtctattgaagttaactctagagacttagcccatattcccacaattccatggaattaaagagtttttwattttactcagtcaaataagccttaagccagaatttcctattctgaaaaattacaaataagttatacttcagttgcatagcttacatcttaattgagaaaacttttcatgttataaaataagctctgttggatttttcttattattacttaaatttttcatttttcatttttttgctaatcaaagtttgtttaaaaacttctcaacaattgtgttacctccactgtaaaaattctaactgaaatatacatgttcaaaagggtatt

SEQ ID NO: 762829 - DNA, 554 bp, Homo sapiens
agagagccctagcatatacaacagagctaaaaccatacactaataattaagaactataaaagatctttgcccagaacaaactggcccaattttccttataacctcaagtaactgaattattgatatttctagttttagttccttcaatgtataatttagccaagaatgagtaagtttgtgaatttttcttaagttatgtaagacataaggagacaaaaggagtctattgaagttaactctagagacttagcccatattcccacaattccatggaattaaagagtttttaattttactcagtcaaataarccttaagccagaatttcctattctgaaaaattacaaataagttatacttcagttgcatagcttacatcttaattgagaaaacttttcatgttataaaataagctctgttggatttttcttattattacttaaatttttcatttttcatttttttgctaatcaaagtttgtttaaaaacttctcaacaattgtgttacctccactgtaaaaattctaactgaaatatacatgttcaaaagggtatt

SEQ ID NO: 762830 - DNA, 615 bp, Homo sapiens
aatggtccctatctcccttcactccccatgttacacagtgcagtttattgtctcttccagagcctttagtcattctttgtcacctcttagataagggcaaaaaaatcttagcctagcgtacaatgtctcaaactgactggttatcagaatcactattttttttttagacagggatgtaggaatgtgtacttttgaggatgtatatatatatatatatatatatatatatmtatctattcatgtatattcatatatatattccaactctggccctgacggctggaacaatctggttatcgagacatgttgagtgcccctctcatcccccttgatcattcatgggatagctccttagagagctgattaggaggaatgaggtggagccatatggtatgagatcgttccaaggtctttaggactgtacagggagctctatcaaaacataaatccaaaggctccaagaccagatgaaacccaggaatttataattttaaaaagctttccaattgactccatgatcagttagccagtttggggaatcactgggctaggaagcaaaattacagaatatatactttgttctccataatctacaggatagagtttaaggagatg

SEQ ID NO: 762831 - DNA, 718 bp, Homo sapiens
tattacttacataatgaggctttctagagagagatgggcaggctcccaagcaggtctgaaatgaaaaatggcttgagaaaacaggaaggggctactggcttgggtttttatggtagctagggggtgcagctagggtgaaggctgcctgtcgtaggacaagatgcatggtttgaacttttcacaggtgccaaaaagagacctaggctttttattaacttgctcagatgtagggcagaaggagaagttgggcttgagagcttttagcagtcaaacatcaaaaatagaatcagactttttattgtactacccaaaatgaaggcttcacaacgttccaaggcagcaccacctttcctgatagggaaatggactccccatgacctgcaggttcaactaaaataccacccctggtctaaaaccgcaagacagagccacagtttgacttcctggtyactccaccctgcccccaccccaccaaaaaaaaaaaaaaaggacaactgttcttcagaaaattatgaataaagaaaggatgcagttaactaattttatttcaagttaataatgaacagaaaactatataccttaatactgtctttcttttgaatttctttcacaggttttccttatttcttttaacctcacagtagttatataaagttgtaaggtcagaaagctgttattgtactctacagccatcactgaaactctcagtggtacacag

SEQ ID NO: 762832 - DNA, 546 bp, Homo sapiens
tttctgtggtgctttacagttttcaaagcactttaaaataccttatcatggttcattctcacaacagactaggtgggagggaggcaatttatgcccagattgcaggtggagaaactgatcttccaagaggcgaagagaccttgctggaagaacaaagctgaatcgtgggtaagggcacacgtggtacagtcagagactggggttggaattttggttcccactttttattagctgaatggattgggacaaattatttaatctgtctatgccttgatttatttatctggaaaattgaacaaaatgctgagcactgctgtgagagctacagatgcatgattctcccaacaaccctatataaagtaggatacccatttgacagataaaraaaccgaggcaagcaaagattcaggaacttgcttaagattacacagagtaagtggcagaggcaggctgcaagcccaggcaatgtgctaccattgtacagcctccgtacctctttcattggttggtgagaggagtaaataacaccatgaattgactgtaagt

SEQ ID NO: 762833 - DNA, 561 bp, Homo sapiens
ctactgagaaattccattcaacagcctggctcataacactatatggcatctgtataaaacatctaggcttgatacatgtaacactactgttattgcataggactacacaagtagataatgcactgaaactaactttataacattgcttcttgttaaaacattgttatcaagtaacagtaacttcccaatacagtatttctttcttaaaaataaattcaacaagtttgctgaaataaaccccaatttaaatgaccataatgggcgtattaatgctatggttatcartctccaagaatattgctattttcatgtcctaaaaataaatatgtaagtttattctttctagaaagcctggttttaacctattaatactacaccttaaatgtgtccaaaaacagttctgagtgagactgtaatttacaaaatattcgcaaagctgtcttttaaatgcaagaccttgcataaaagttttctttcatgggtgtacaaagaatgcggaaaaccaccagtgagttgtaaaaatatggaaaacttgccattttaagatgcatattcttacaa

SEQ ID NO: 762834 - DNA, 619 bp, Homo sapiens
cacaatgctgtgcaaccatcgctctatttccagaaatttttcaccaacccaaatggaaactttgtacccattaaataactctccataccccctatctcccccaaaccctggtaatctctatcctattttccatgtctatgaatttacctattataggtacctcatataagtggaatcataccatatttgtcctttgtctggcttatttcattyagtgcaatgtttttaaggttcatttatgttgtagcatgtatcagaatttcattcctttttatggaaaaataatattgtattgcatgtatatactgcattttgtttacgaattcttctgttgatggacacaggttgtttccaccttttggctattgtggataatgttgccatcaacctttttacaagaactgtttgagtccttgtttttaattcctttgggtatgtacctaggagtggaattgctggaccacatagtaaatctatgttcaatttggagaaattgctgaactgtttttcacagcacctgtacaattttacgcctcaccagcaatgcacaagagttccaatttctctgtatctttgccaacaattgttattttcttttttaaaaaataatagccaacat

SEQ ID NO: 762835 - DNA, 619 bp, Homo sapiens
cacaatgctgtgcaaccatcgctctatttccagaaatttttcaccaacccaaatggaaactttgtacccattaaataactctccataccccctatctcccccaaaccctggtaatctctatcctattttccatgtctatgaatttacctattataggtacctcatataagtggaatcataccatatttgtcctttgtctggcttatttcattcagygcaatgtttttaaggttcatttatgttgtagcatgtatcagaatttcattcctttttatggaaaaataatattgtattgcatgtatatactgcattttgtttacgaattcttctgttgatggacacaggttgtttccaccttttggctattgtggataatgttgccatcaacctttttacaagaactgtttgagtccttgtttttaattcctttgggtatgtacctaggagtggaattgctggaccacatagtaaatctatgttcaatttggagaaattgctgaactgtttttcacagcacctgtacaattttacgcctcaccagcaatgcacaagagttccaatttctctgtatctttgccaacaattgttattttcttttttaaaaaataatagccaacat

SEQ ID NO: 762836 - DNA, 598 bp, Homo sapiens
ggattcatgaatagttttttatagtacatattttccataaacgtttttgaagtcccctcatgtaagaccaaactgagggtcaggctgcttattcttgtggcccaataatgagatgcagatgaactgggaaagaagagattttatttctgcaaccaggtacagggagtaggcctggaaaatattgccagatcaactcaaaattacaaagttttccagagcttatataccttctaagctatatgcctacgtgcaagcatgcattcatctaaagacataagtgattaacttcttctaatctgtaactaagatctgagtcctgaagaccttcctctggagcctcagtaaatctacttaatccaaatgtgtccaggtkctggagtgattacccttgttttgtctcctgctaaatcatggaggtttgggcatttccttagacctttagacctcccccctcccccgccaataaacttgtttgtggaggtctggggagtttcttcaggcccccaataaaacttgtttaatcctaagtgggtcttgttaagaattccttcattatcttgtcatagacccatttcaagacccaggaaaggcctgggca

SEQ ID NO: 762837 - DNA, 673 bp, Homo sapiens
catatttctctgaggtttccatttttagagtggaatgtgccatttaaacagaatagtctattttatggtgaaaaaattctgatgtcacagtgaaaaaaaaaagagcaataattcaatagtgtagtgtgacatacaccagagaagatagaatagggtggcttggggagcctgaagctatacctatagtcatttatcacttcatattcctcaaactaggcaccaaaatactgatgatttgctctcttgagaactgcacagcttcagggcaccaagctcaatctgcctttgtaggggaagatgcacttggaatatttatctgggagccccttaaagtataaagcttgggatattttcttgaaaattacggtgaagcatctgggcaatgtgatgtgtactgcattgatttaaggctccatgaaatcaaggaaattagctggcagattaaatccaccactccagatttttttgaaaaaaatagttacagtgtgtttcttgaaactgcaataggcygtaaaaagatttgatgctggtttacttacttcgctagcacaaattcactatgagtagttatatctgggataattctccatatttctgaagagtctttatggcatgctgtaaaagatgtaaaatcaataagtaactctaaaaatctgtccatacttcatatttc

SEQ ID NO: 762838 - DNA, 582 bp, Homo sapiens
tttaaattttgaatggagggggaatctccagttgtgaaagcagctatatagcaaatcactggtgttcaagaatgtataaaagaatgtacattttgtataaattgtgtataatcttgtctatatttaatgtttagctttggttatccatgtcacaccttttccctatgttaaacctttctgtgtctctatgtctatcttgtgccartaccgtactatcttggttaccattgttttgtagtaagttttaaaaataggaagtgtgactcttcttaccttgttctttttgaagattgttttggccagtctgggtcccttgcaattccatatgaattttagaatcacgttatcaattactacaaagaagttggggattatgttgacactgtaggtcagtttggataatatggccatcttaacaatattaactcttccaatccatgagcatggtatgttttttcattttttagatctttaatttcttcaacaatgttttgttgttttcagagtataagttttatagttcttgttaaatttatttctaagtattttatttttgatgctgttttaagtgggattttaaaa

SEQ ID NO: 762839 - DNA, 668 bp, Homo sapiens
acaaattaccacaggctgggtgaatgaaaacaacagaaatttatttcctcacagttctggaggccagaagtctgaaatcaagcaggcttggtcctttctggagcccgtgaagaacccattccatgcctctcttgcagcttctggtggtggctagcagtccttgcgtaactcattgcctctgtcctcatgctgctatatctgtgtttcatatctcctcctctcttattgtaacgacactagtcactgggtttggagcccacccaaaatccagggtaattatatcctgagatcccctaatcacatctgtaaagactatttccaaatatggtcaccttcccaggtgtatcaagttaggacttagacttaccttctaggggacatgattcaacctactacaaatggtaagaagttctgcaggatccacactaagaagctgctaattcctaaggaatacagatagaggtcactgctaagtagttttgcactaagaagagacaaaaaaccttaaaattaaaccatatataagaatamgggtaagcacttttcaaattaaattggagaccataccaattttaatcattcatctttaataataaaataggttcctatgcagtacatacctcaaacataaacttaaggttctgtttaacaacaaccaaaaaaaaaaa

SEQ ID NO: 762840 - DNA, 641 bp, Homo sapiens
ccacacagagcagtatttaccaaaagttcagggttttcagcaaatcttaaccaaatcctctcccaacccattccattctgccctctgaaactcctttgcaattgtcattgaacgttccactaaatgtcaacttctttgaggaaggctgccctcagccttcttgtcctgactctcacctccccagcatctctaccatcctcctcattcaaccacaggttcactcaacgtccttcttcttctgctggcactaccatcctgtgtgaccttcagagtttacgtggcaaagcatatgactcttcagtttcaaattccttcctttcctcaatttcaattcygtatccctctccttcctctcttcttccttccttctacaaatatttaacaaataggagtgccagatacttttcaagcttgccaaaaaaacaaaaacaaaaacaaaaaaacctccaatctttaggctcaagcaacttatttaagacataaggtcaggcaaacatatgattataaagggtatgagtgataatactctatagtgagtaaacgctgagttctaatgaaaaaaataacccattcagcatgggggggttggttgtaaaaggtttcctgtatgagattctttgggttacaaatgagattattta

SEQ ID NO: 762841 - DNA, 586 bp, Homo sapiens
ttcttacacataatcaaattatctttagaaaagtaaaacttgctgcaccacctatagctcctggattgctaatagctgtcatctttttaggacttcatttatactagttttcatgctggaggcactcaccaagactgccatatctggctggcttgaaaagcacatattagcaagatttatgcaactattttttgggaggtgggctaagataatttaagtactatcagttgcactcatatgcaccactcagagtccagtggtggaagcatcattggattggaagatatcttctgaataggagggtttttaaataaaataatgccttttgtagtatatragccaaaagttaattttatataaatgaacctcacaggattattttaatttatgatgctttttcacatggctatcgatataatttaaaatagacaaattcaggttccttgggctgactctgcttgttctcacactttctgtctggtttgtattccgtaatctttctacatgaactcatgctgctagttgctcattaaattgttcttgcctaagtacttcctgatcagttctattattatttgttcttttt

SEQ ID NO: 762842 - DNA, 568 bp, Homo sapiens
tctccactgagtgacctaggacaataatggaatgcccacatcccttgtctcttatggtctgagttacaaagttatttgtgggcaagagattggtgtttcagaaaacttttcattcccatatagtctacatccaatcaacagaactggcagtacagctcctccacaactcatcctcatttcagacawctcgggaagaaactctcaggcaaacacttcatttatccctgcccatccagaggtactcactcctcttgtctaagttttaataccagcttcacatgcctacccttccttcccatcatctctgactcacacatgttcaattcctccaccctggaattagaagtgctcaggggagaaaattactcctctctcaatgcccatgttttttttttaattcataggatttatctctagtgcactattaatctaaaaagttgatttgcctttctaagaaataacacacatagttgaaattcattcttacaaatgaaaaggcctggcattagctactttgtctttcatgtaacttgctttatcttccacagcattctcaagtaaaaagtgc

SEQ ID NO: 762843 - DNA, 604 bp, Homo sapiens
tttcccaggtttcttgtttagatgataactttgtttatggtactttttactgtataagcatttatttttatgtagtcaaattcatcagtatttttaattatatataggaggattttttaaataagaaatttatttaaagttgaagagttattcaagaagattgtatataggttaatttttaaaccaactttagcataccaagtttagcatttaggcataccaactttagcaytgttatacagaataatgttagcattggaaggatctattaacaaaagaaagttcccataaaatgatttcttctataaaatatcatgaccgtgtgaattctgtggactctttgtgagacactagtgtaccacaggaaaaaaaaatgacagaaagggtcagatttatagtaccattctccagagagttaatagtagttgtctagtacctaaaatctagagtgaattataaataaagtaatagaaattccaagacaaatagaaagtaaaaaatataaaatcaatagagatccattatagaaaattttgtaggtacatacaaaagaaagaaagaaaaaaaatcatcctcaaaagctcttaagatttgttgtatattg

SEQ ID NO: 762844 - DNA, 634 bp, Homo sapiens
ctccaccgtttgtttccatgtctgagaaaaacacacctcatctgcattccctggatcctccatatgggagggtacacccctgcatgtaaagaaccagttcaccacctccatttttcatgaacattcagaacaaagggctcctttcttgartgctactctgatcccatgaattcaaaaatgtttaaggaagctctatctccacaccagcacctgaggagatggagacttttagaatagaattttaaaatgttctcattgagccctccattctagaaatggctataagtaaatgaaactcggaagtgtctggagcctactgagctctacctagcaacactgtgtgttccttggcacacaagacagaaactcaaggcagacccatcacttcctcagataccatcttgtcccattttccttaagataaggtgtcctggtccatgggcctattatttggggtcaatcctcagcaggagaatggttaggtgttacagggagaggaaggtgacacatgtggtttggatttttcacccaaacccttttcaatgagccttagagaaatacaggagcctgttgaaacattacttactgcctgttgaatattggtcttcacttgctcactcaacatgccttcaaa

SEQ ID NO: 762845 - DNA, 617 bp, Homo sapiens
ggtggatccaaggttctagcctattcaatctgattccaaagtctgcacccttaaccagatgacatgctgcctcatagtttttctttctgtgcccccatctccttattgaagctatactttggatagattttcaaaaaattatgaatgatcatcagaatttactttagccaggcaggccgggcatggtggctcatgtctgttatctcagcactttgggaggccaaggcgggaggatcacttaaggtcaggagttcgagaccagcctggccaatttggtgaaaccccatctctacacaaaaattagctgggcgtggtggcacaagcctgtaatcccggctactcaggaagctgaggcaggagaaatgcttgaacctgggaggcggacattgcagtgagcctagatcatgtcactgcactccagcctgggtsacagagtaagattctgtctcaaaaaaaagaatttactttagccaggcaaactggtgttggcccatgatcaaaaataagtcatcatctaaaaaagaaaattttttaaaaaatgaattataacattattctttctttttattgatttttttccttttattgattttcacctatgccatgaacattgcttt

SEQ ID NO: 762846 - DNA, 608 bp, Homo sapiens
aatttaccaagcaaatggaaagcaaaaaaaaagcaggggttgcaatcctaggctctgacaaaagagactttaaaccaacaaagaccaaaaaagacaaagaagggaatggtaaagggatcaatgcaacaagaagagctaactatcctgaatgtatatgcacccaatacaggagcacccagattcataaaacaaatttttagagatctacaaagagacttagactcccacacaataatagtgggagacttcaacactccactatcagtattagacagatcaacaagacagaagattaacaaggatattcaggacttgaacgcagctctggatcaagtggatctagtagacatctacagaactctctaccccaaaytaacagaatatacattcttctcagtgccacatggcacttattctaaaatcggccacataattggaagtaaaacactcctcagtaaatgcaaaagaactgaaatcataacaaacagtctctcagaccacagtgcaatcaaactagaactcaggattaagaaactcactcaaaaccacacaatttcatggaaattgaacaacctgttcctgaatgactcctgggtaaataatgtaat

SEQ ID NO: 762847 - DNA, 636 bp, Homo sapiens
ctgctcaccacacagaatgtcaatcactgagacaatgaatgttgccatgaaagaagtatttcactgggtgctgcagccaaggagaatgggagataaagtctcaaatccctgaccaactacaactggggaggcttacatagtgagggaaggaattaaggggggtaaagaagcaaatatgatgaatgagggggtctggcatcttattcgatgtgggatctggtgagttaagtcccttgcctgaggatcagttccctgaggaggaactcagatgagacaaatgtaaatttcaagttttaagacctgaagggtcaatttccatgtgtgttccaaaacttttaaatgtcatttctatgggacagttggaacagtttcacttytaggtatttactgatttgaaaacttgtccacataaaaacagcacacacgtgttcataacaaggttataattggttaaaacttgaagcaacacacatttcttcaataagtgaatggataaacaaactggtacatccatatgatggaatactattcaacaataaagaaatgagctatcgagccacagaaagtcctgtatgaaccttaaatgcatactgttaagtgagagaagtcattctgaacaggctgcatactatatga

SEQ ID NO: 762848 - DNA, 636 bp, Homo sapiens
ctgctcaccacacagaatgtcaatcactgagacaatgaatgttgccatgaaagaagtatttcactgggtgctgcagccaaggagaatgggagataaagtctcaaatccctgaccaactacaactggggaggcttacatagtgagggaaggaattaaggggggtaaagaagcaaatatgatgaatgagggggtctggcatcttattcgatgtgggatctggtgagttaagtcccttgcctgaggatcagttccctgaggaggaactcagatgagacaaatgtaaatttcaagttttaagacctgaagggtcaatttccatgtgtgttccaaaacttttaaatgtcatttctatgggacagttggaacagtttcacttctaggtatttactgatttgaaaacttgtccacataaaaacagcacacacgtgttcataacaaggttataattggttaaaacttgaagcaacacacatttyttcaataagtgaatggataaacaaactggtacatccatatgatggaatactattcaacaataaagaaatgagctatcgagccacagaaagtcctgtatgaaccttaaatgcatactgttaagtgagagaagtcattctgaacaggctgcatactatatga

SEQ ID NO: 762849 - DNA, 524 bp, Homo sapiens
ccttcatcactgattgacttcttccccatcctctttaaagtctcaacttgtcccattttccttgtgaggtatgccccacagctcagggggtacccaaggaagcagtctctgggaggaaaattggagcacaggaagatcaagagctgctgctaggattcccacctgtggaatggaaggaaaggaagcaggctgggcaaaggaggagttgggctgcaatgaaatctcaacgaagacctcagccaaccygcaggtagctctgaagccaaggcagctttttagggtggctccatgttgtagctgcggacagggtctttagatttctgcatcaaccagtctgttgtagctgcggacagggtctttagatttctgcatcaaccagtcagtggatgtagactgccccctggaaagaggtcttgggtaggaaggctgatagcactctcagcaattagatgaatacatctttcagtccttctaggacatctgggcaatgcacacaacaactgctgtacaaatattcccacatt

SEQ ID NO: 762850 - DNA, 644 bp, Homo sapiens
ctaacaacatatatatcagaatactgctatcaatcataattctggtacttatgtgttatatagtaaacacatattttgcttttcacatagctgatgaatgttaaacctgaacaaatcattgatcttgtgaataatttttctctatcagaagaaatgtaaaaccaatttggagtactatatctcttccatgggaattcttgatttttttttaaatctaaactttgatttcatacttccttcagggagaattcccgctatatggagagtgatgctgaaaacagacatttcaattaaaagttgagcagtactgcaggctttctgataagtagaaaactgctctacttggtttttaatrcaaacttcctttctgattcttcaatctggacactgtgatgcagtctttgtttctactgcttgcctattgctgacgatgccataacatttagaattttctctttgtggtgtcacattttgtgaccacaactgctaatatctctatattatgaacaacttcaagacagagatgatatccaaattatgttttagctgtgttgactaataccaagcctagtgcatagaaagtactcaacctataatgttaaatgattgagttatgcctccattgtaggccctgaattttttct

SEQ ID NO: 762851 - DNA, 590 bp, Homo sapiens
ctctaagggaaatacgaatgtagcctcataaaaatctagaaattcatgtttgaaatgagaactacaaaaactgaagaaacagaaaggcaaaaaaaaaaaaaggatactgtcctacaataaacctagagagttttcatttttaaaaagataatactaatactaggtaaagatatggcagaagagatactcaaatactgatgatgggaataaaaactggttctactttattgcagagcgattatataatacagctcatgggttttggctgtttacactcaacaatttaatttacaaatatctattttagggaaataatctaaagtatagagaaacatttatgtgcaaagatgttaactgcagaaaaattttaataatcaactcagtcttacataacacagaaatttaaatataaacatattttcttcatgttgsataatctattccaggttctcttaactatttctcatagcatggttactatgcctcttcatgttctggccaacatcttcttacatacacacacaccatcactaacaatattctatcatttgtccgctgaaaacaacagcatagaatcaaacacaattttc

SEQ ID NO: 762852 - DNA, 519 bp, Homo sapiens
gtcggccagctaactcaggcgatggtcacaggttaagagaagctcccaagtgagatctgcgatataatcaccttgactggggacgatctccgttgtccagaaccgagggtcgagcgggaagtgcggcgaaggagctggttgcccttgctttacaggtggacgctgggaggggcgtggcctgaaagccagggttgctatctctctaggaaggcttatggcctggagctttttttttgaracggagtctccttctgtcgcccaggctggagtgcagtaccgtgatctcagctcatttcaacctccgcctcccggggttcacgccattctcctgcctcagcctccaagtagctgggactacagcgccagcaccacgcctggctaatttttagtatttttagtagagacggggtttcaccgtgttagccaggatagtctcgatctcctgacccgtgaaccgcctgccttggcctcccaaagtgctgggattacaggcgtgagccaccgcgccccgccggcctg

SEQ ID NO: 762853 - DNA, 519 bp, Homo sapiens
gtcggccagctaactcaggcgatggtcacaggttaagagaagctcccaagtgagatctgcgatataatcaccttgactggggacgatctccgttgtccagaaccgagggtcgagcgggaagtgcggcgaaggagctggttgcccttgctttacaggtggacgctgggaggggcgtggcctgaaagccagggttgctatctctctaggaaggcttatggcctggagctttttttttgagacggagtctccttctgtcgcccaggctggagtgcagtaccgtgatctyagctcatttcaacctccgcctcccggggttcacgccattctcctgcctcagcctccaagtagctgggactacagcgccagcaccacgcctggctaatttttagtatttttagtagagacggggtttcaccgtgttagccaggatagtctcgatctcctgacccgtgaaccgcctgccttggcctcccaaagtgctgggattacaggcgtgagccaccgcgccccgccggcctg

SEQ ID NO: 762854 - DNA, 519 bp, Homo sapiens
gtcggccagctaactcaggcgatggtcacaggttaagagaagctcccaagtgagatctgcgatataatcaccttgactggggacgatctccgttgtccagaaccgagggtcgagcgggaagtgcggcgaaggagctggttgcccttgctttacaggtggacgctgggaggggcgtggcctgaaagccagggttgctatctctctaggaaggcttatggcctggagctttttttttgagacggagtctccttctgtcgcccaggctggagtgcagtaccgtgatctcrgctcatttcaacctccgcctcccggggttcacgccattctcctgcctcagcctccaagtagctgggactacagcgccagcaccacgcctggctaatttttagtatttttagtagagacggggtttcaccgtgttagccaggatagtctcgatctcctgacccgtgaaccgcctgccttggcctcccaaagtgctgggattacaggcgtgagccaccgcgccccgccggcctg

SEQ ID NO: 762855 - DNA, 581 bp, Homo sapiens
gttaacaaacttattatccaaagccagggaaattaagatgaggaatatccaagactattatacaataaaacgggatacgtgacgaaatctagatgtgagaccaggaatattgctatgtgcgtgcaaagattcaggagaagcattacagagatttgctgactaaatgatttgctgactaaagattcaggagaagcattgccaagatttgctgactaaatggtaatgagggatctcatatacataaggtgwtatggtagcctttgttctcctgagcaaacaccatgccaacatgtaatcagctaaaaaaaatctgttcagacagttctacagaatctcatgatttttccattttcagtgaaactgtttttaaagtacatttaattccagtttaaagtcatcagtttaactttaatacatgctgatgttgggcagacaagattttaggagaacataatagaactccaggcacttgtctgacttaattctgccattttcacaaatttggaaaatctccatccttacagtgatggagaggcaggcaggatgccaaggaggcttgtcataccttaggtccttccagt

SEQ ID NO: 762856 - DNA, 635 bp, Homo sapiens
gcattgcgtgacatacctatcatttatttgtggtgagaacatttaaaatctactcttttagcaattttcaagtaaataatagttattaactgtagtcaccatgttgtacaatcaatctcttgaacttattcctcctgtacaactgaattttgaatcctttgaccgatctctcccctttcctacttcccctttccctcagcccttgataaccaccattctactctctgcttcagtgagtgtgactttttaaaattccacatgtatgtgagataatgcagtattcatctttctgtgcctgttgtatttcacttgttaaacacaatttacaggaagccattggtttggaccgagctcctgcactaggcccaacagactaaacctaaatggagttattcrtgctaaagttccacaccaccaagctgaaattaagttgtttagctgattctcccagaaatcaggagagatagtagtcaaatccccaaacaggctagttttacctgcagaagggagtcccctctgctttaacttttacaaggaaagtaactttgaaacacccaatctactttttgttctctgtttctgctctctgtgtctctgtttccttttctggggataaagctaacctcctttgttca

SEQ ID NO: 762857 - DNA, 639 bp, Homo sapiens
ccaggcccagctaatttttgtggagatggggttttgccatgtttcccaggctggtcttgaagttctgagctcaaagcaatccgcccgccttggcttcccaaagtgctgggattataggcgagagctactgtgcctagcctgcattcttttttttttttttttttgagagggagtctcgctctgtcacmcaggctggagtgcaatggcaccattttggctcacttcaacctctgcctcccgagttcaagcaattttcctgcctcagccttctgagtagctgggattacaggtgcccaccaccacactcagctaatttttgtatttttaatagagacggggtttcaccatgttggtcaggctggtctctaactcctgacctaagatgattcacctgcctcggcctcccaaagtgctgggattacaggcatgagcctggccttcaagttcttaaaataaatacataaataaataaagaatacatataattcacttctggtttgaatataagaatccaagaaaccattttaagagtggtgttaacagtctacatattgtgtaaggaatcagaggaaagactaaatagtacacgtaggatgtttaaggattcacttgaaatgagttaaatgctttgcttcttac

SEQ ID NO: 762858 - DNA, 639 bp, Homo sapiens
ccaggcccagctaatttttgtggagatggggttttgccatgtttcccaggctggtcttgaagttctgagctcaaagcaatccgcccgccttggcttcccaaagtgctgggattataggcgagagctactgtgcctagcctgcattcttttttttttttttttttgagagggagtctcgctctgtcacacaggctggagtgsaatggcaccattttggctcacttcaacctctgcctcccgagttcaagcaattttcctgcctcagccttctgagtagctgggattacaggtgcccaccaccacactcagctaatttttgtatttttaatagagacggggtttcaccatgttggtcaggctggtctctaactcctgacctaagatgattcacctgcctcggcctcccaaagtgctgggattacaggcatgagcctggccttcaagttcttaaaataaatacataaataaataaagaatacatataattcacttctggtttgaatataagaatccaagaaaccattttaagagtggtgttaacagtctacatattgtgtaaggaatcagaggaaagactaaatagtacacgtaggatgtttaaggattcacttgaaatgagttaaatgctttgcttcttac

SEQ ID NO: 762859 - DNA, 585 bp, Homo sapiens
tctctgttctcctttcggttgtccttggtcactccacttggtcacatggagagaattggcagctttcggaggcagtccctgagtgctctgtgatggctgaggctcccccagctacagagctttaggggaagttcagtttatctggtggaagaaggtgaatggccctgacagcctctccccagagctcagccctgggggagtgagccgtgttcagtgggtgaggctcccccatgcagcctgacaagagctgcaagtgttctgctgatcaggaaccccgaggccggggagaagtgatctgcccaggaccccacagcagactgtgtggcagagtgtggttcccrcactgggcttctggcagcctttgctccagtcagcatgggccatgcagctgcaaatggttgtagatgccacttgtaggactgctggatgttggtatcttggcatcattcccatttgttaggagccttggagccatgttttccttgggaattgattatatgtgtccccaaactaaattaactcattgatatttgagatcttgggatcttgagtatgtgtcttatgtctcaccccaactttgttcta

SEQ ID NO: 762860 - DNA, 493 bp, Homo sapiens
catggatgaagctagaaaccatcattctcaacaaactatcacaaggacagaaaaccaaaccccacatgttctcactcacaggtgggaattgaacaatgagaacacttggacacaaggaggggaacatcacacactggggcctgtcagttggtggggaaatgggggagggatagcattagaaatacctaatgtaaatgatgagttaatgggtgtggcaaaccaagacagcacatgtatacctgtrtaacaaacctgcacattgtgcacatgtaccctagaacttaaagtataataataaaagaaaaacaatcatcaaattaacaagttaatgattgagatatcaaaaggtactatcaccttgaggaatatttacaagttagaagtgtgtacaggagaggcctggtacctaaccaatgtctgcattgcagatgccttcctaactgtgtgttggggtgggagataaagaaggaaagggtgttactctagagtgacc

SEQ ID NO: 762861 - DNA, 625 bp, Homo sapiens
tctttaagacataattaattcttatgaacctgagagcaacatatcacacaacaaattaaattgagaagaatcacaaatgagcagttcaccaaagaaaaaatttaaatgtttattaaacatattaaattggtcatctccctaagaaacaaagaatgtaattaaaaataagacaacttttgcctataaatggaatgaaaagagcgctgtgatctattgggggaattataaattggtaaaagtttcctgggagaaagatacacagatatttgccaaaacatttttaataataaagtcaaaactgaaacaacttaaatatctaacaataggggaatagttaaataaattmcggttagtaagattatgcacttggataatattcataatcggttactttaaaaaaaaaatccagtaacaaaactgtatattgaataatccaagtttgatatcacactctcacacaaatccacatacacatttttgtagaaaaaaaaacagaaaataggcaaatacattgtttgcaatcttttgatcattcagatttgccttattgtcttgggatttcttagaataactgcaaggggtatgtattgttatttttagaaattattatttaaaataacatgtg

SEQ ID NO: 762862 - DNA, 612 bp, Homo sapiens
cctcagccagagagcctagaatgactggggacatgggaggggaagggaagtaagaggttcacagataggttagtattggcatccattgatggtccttgtcattgatgtttcaaagtggggtgctaagaagagagaatgtcgtccccattctcaatcaaggtcagggaccattgcttccaatgctcaggaagagtggggctcatttattccataaaagctttgagtctatactggaaagattmgtgatttgtatctatactagaaatgggaatggagaattgaaccaaccaactttacttaatttcagaatcattgatttattccttctttgatttattgaacaaacattccttgaatgacatgtgccaggcattgctagatttggaattataaaggcagatgagactggcttctccactttgtttttttgtgcagagacatagtgtgagattgtttaaaggtattcctttgattgacagagctgcgcttcttaaaatcaaatcttttcaaaacataagaacagaatgacaattacaatctgtaaaagtgaagaagaaataactgccatttaagaggaataaaataatgtttcataacgcatttataacactg

SEQ ID NO: 762863 - DNA, 612 bp, Homo sapiens
cctcagccagagagcctagaatgactggggacatgggaggggaagggaagtaagaggttcacagataggttagtattggcatccattgatggtccttgtcattgatgtttcaaagtggggtgctaagaagagagaatgtcgtccccattctcaatcaaggtcagggaccattgcttccaatgctcaggaagagtggggctcatttattccataaaagctttgagtctatactggaaagattcgtgatttgtatctatactagaaatgggaatggagaattgaaccaaccaactttacttaatktcagaatcattgatttattccttctttgatttattgaacaaacattccttgaatgacatgtgccaggcattgctagatttggaattataaaggcagatgagactggcttctccactttgtttttttgtgcagagacatagtgtgagattgtttaaaggtattcctttgattgacagagctgcgcttcttaaaatcaaatcttttcaaaacataagaacagaatgacaattacaatctgtaaaagtgaagaagaaataactgccatttaagaggaataaaataatgtttcataacgcatttataacactg

SEQ ID NO: 762864 - DNA, 579 bp, Homo sapiens
gctcagatgtttaaatggatagggcttttactaacagttttatttataaaataggttacacagaatttggtgtgattttattgagcaccaagaattaacttaatttgctgaagatcaatatccaaacgatatatatcatagaaccctgaaagtacacagaccaaattccttttatgcaatgaccatccttacaaatatttcagaatttggggrtgtagagcatttgccgtcatctctagtgtccccatcctctacttgttgccaccccagtttttttcctttggttcccagaaatattaggcaaaaagataattttaaaagtatatttttgccaattgcaaatgcatagttttctgtcttccctggttctgtgccagcacttcccacccaactctaactgtgttgtttggaaaagtaaaataaatgccacaaaatatcggtacagttgcatttctacacaatttatcctggattttgtaaggcccttttaatgtagtaggctatgctttattctcatggctacaataattatgtggaaatttatgaactgatctttaatacaatgttgttattagaagg

SEQ ID NO: 762865 - DNA, 645 bp, Homo sapiens
ttattttgagaactgttggccagtagacagtttccatgttttcttaccaatgttactacaatttaattaacaagttactatcaatctaagatttttaaaaagacgtttgtaatttaaggtcatattaccaaaagatcatttactaatattaaaaaatgggtatttgggggtgtctcttctctagggcatcaacctgagtgggggacagaggcagagaatctgtgtggcacgagcgctgtatcaaaacaccaacattgtctttttggtaagaatatggccttcccttttatttctatttcattcttccatctggacaaatgagtctttaaaaaggtgtaagtcaagtaactcaaggaaagatggtttaacttgtgaaatcgtaaagtatataggggaaataaatccttgaagtacagattagtagatcagtagaagagyaacgtatcttgagagttgggaggatccagattggtgtccaagagacttagatgccctaagtggttgtttttctgagtttcttaaccaggaaaggatttggatggtattggatgaacgaggcaggatcataagtcttcttatttatatttgatggcaaagaaaaaaagccagaaaatatactcttggtagacacagggctaagtaagc

SEQ ID NO: 762866 - DNA, 607 bp, Homo sapiens
ttactttgcttcttcgattcttaatctatgaaaactaggtaaggtctacctcaccagttactgagacggtttatacagaggatatatatgaaagagtattatacaaactgtaaagtagtatgacattatatttgtcatgtatataccagtacgggtttcacgtagtatactatctctatacatcgaacattttctctaattatgaatgtcaatatttttaagacgtcaaagactagcaaaaaaatgggatagtttgagagcccagagaggcttttcccttgccrcagaaataggtatctgtcttgtgtatctggaagtctaacatcatcctacgccaattccagcacaaagaatgccatagttagcaaggcaggattttttccactgttaggctggtatatctcaatgtatctattgttacctaaaacccagagctgctttctctaagtcattgaattttctatagtcacactatgaaagatgatatgaaatagccagaattttttcattaacaagtagagaaaccctacttaaattgacctaagcacaagtaatttattagagcaaaacacaaactggcttcaggcatagatgaatcaatatgtcc

SEQ ID NO: 762867 - DNA, 607 bp, Homo sapiens
ttactttgcttcttcgattcttaatctatgaaaactaggtaaggtctacctcaccagttactgagacggtttatacagaggatatatatgaaagagtattatacaaactgtaaagtagtatgacattatatttgtcatgtatataccagtacgggtttcacgtagtatactatctctatacatcgaacattttctctaattatgaatgtcaatatttttaagacgtcaaagactagcaaaaaaatgggatagtttgagagcccagagaggcttttcccttgccacagaaataggtatctgtcttgtgtrtctggaagtctaacatcatcctacgccaattccagcacaaagaatgccatagttagcaaggcaggattttttccactgttaggctggtatatctcaatgtatctattgttacctaaaacccagagctgctttctctaagtcattgaattttctatagtcacactatgaaagatgatatgaaatagccagaattttttcattaacaagtagagaaaccctacttaaattgacctaagcacaagtaatttattagagcaaaacacaaactggcttcaggcatagatgaatcaatatgtcc

SEQ ID NO: 762868 - DNA, 595 bp, Homo sapiens
aatgctactactagtgcctttaaactgctactatagacaagaatggttctaaacatggtatgttacatttgtcattgaatacaattcttcaaatccatagattttcaaattttaatcttgagaatcctgaagtccaagaagaagatagaatattgttaatacctggtgaagctggaattagatcagtctatttaaagtcaatcttttcactatagcacactaactgtagatatcaggaaaatacatgcatatttgtaattgctcaatttacatgtaaaaatattactttagaaagtaatttctaagaagaaagaataaagaaggagattcaggaaaaaaaaccatgtatttgactatagwtattgtctctccatttctatttccatgatcatggacattaaagataagcctgagggtcaagaaattatctaggttaatagtcgttaactttggggctgcaattaaaaacagtttgtccgaggcaggcccagtttgtctacattaaaataaaattatctatgtgtatcaaattcacgtatttaattgaaaactattggtctaatttatcttaaatgcttaagctactgttttgtct

SEQ ID NO: 762869 - DNA, 595 bp, Homo sapiens
atgaggtataatatttaatcatcaaatttctgagaaaaataattatcattgtttaccatctaggtcccatagaacatttttgtttaatgtaatgctctcattttaagtcatttataagtaatttacaaatacaaggaaaagacagtaaaataaactagtaaatattaataaattttaaacatagtaaaagtctttcaygcagtaaatttttgtgcacaaacaccatggatgataaaatagtattgtcacacactcttttaacaaaatgggattatccaggttcttattccaaactattgtgtgaagtcctttgactaactgggtgagaatactgtatttacactttgtctttggaaataacttgtcattggttcttaaatttgagaatgttcatttcagtcatcataatctgaagacatatagtcaatttaattaatatgataaattttattatatctttaaagtctagaatgctgctatcttgttctttgcatttatcttctaattaagttaatcttataactttctttgccatcatgaaaaacaaaaacctctaattttcaactgtgttaacttaaaagcagaccacaaagat

SEQ ID NO: 762870 - DNA, 526 bp, Homo sapiens
ctctacagtgtttcttagctcattttacccttttatgtaaaacagaaaggttaaaaggggctgcagtcagagcaatgtttctccttcatgtcagatcagactttgttaaaatctttttccttagaaagtaggcctttcttaggaagaacacaatgagcatatttcacaatggttgatgtttctctttttcttccagtacagtgaggatatctttcctgattcttcacttagtggagtttctcatgataacattcactaaagagttgtgggcatcctaagggggcaagtttctcactctcacattagttcacactcagcctccagtaattctttaaaatgtcatttaaaggtttctaccagttcttggwttagcgagatctatttcagatatgcagatcttggctaggactaaagaatttctctctctccaaatactaggatggtagattgctctgcaaccttacttatgtgatgggttcaaaaaatgtaaataattttctatttgctcagctttaaaataattaag

SEQ ID NO: 762871 - DNA, 640 bp, Homo sapiens
gttaagtaaacatattaagtatcaaatccacaatgatgcatactacatgttatagaaataaatctatttgattagtattttaatactataatattaacaatatatcctatgaaaataaataatgattcataaaaatttggtgtaaggtgatttagaatgaggttttctgcacattgcatccctttacttcattgtctgctactcttataccacattattgaaactttccatttgatatcagacacatctgcacaagctctatttacaagggtggctactggctttcttctagacaacaatgacttgttcatgaaatagaaacttagtctaaactggatcaagcattgcttttcctaatatttatatattctgaaactgcaatatgttcaccctttttctttttttttttaagttggattgacaaagaattgaattagtytgtggctctcgaacctaccccaatgcacagcctatggagaaaaaccatgcatgttggcaaagaatcaaattacaaggccaagatatgacataaagagtcagctcctcttgctcctctttttgtgacctgatgaatactttactgcttaaacatgtattgggtttttgtctgttccaattagaattcctggaaaaaagtagt

SEQ ID NO: 762872 - DNA, 567 bp, Homo sapiens
  misc_feature 12: n = A,T,C or G
gagcaaagagtntaagtgaaaatttaaataaaatagtcaaaaagccagcaataatctaaatggctagcaattccttcattcagcaagcattgaatacccacaaaggtccaggtcccatgctagatgctagggacataaatgcgagcaaaaccagacatggctgctgtcctcccagcccgcactctggtggtagttgattaaatgatagcacacccatattccggaatgttacactgccattatgaagaaagtttgtaaagaataactaataaaacaatctagtttcatgttctaatagcaagataaaaagcaggatgaaaagttgtattcatagtattatccrtatgatataaataacctgtaatccacaactcaaaaataacaattgtcaacagtgtagtccattatattcaattctttttttcctattctaaacacatctactacatatatataataaactattggaaaattctaaaaagtacttatagttgttatttctggattgtgggattgtgatattccatatatttcaaggtttctacaaaaagcaggtataaacaggaa

SEQ ID NO: 762873 - DNA, 455 bp, Homo sapiens
tcacagcagtacagctgtcaatggagcttccttatatagccacggctcctataaccatatcttgagccttattttcagcagtcttccctcagctgtaggagagaattgtttaattgctgtttggagaccttctggcacttataaaatatgctgagccaacctcaggaatgatgactcactgacccataktgaacttggaaactgctgtacagaataccacagatgcacaacttaaactcaaaagcatatttctcagtcctggaagctagaactccaggacccaggcgtcatcagagttggttcctggtgaggtcttgctgtctggcttacagggggccacatactcactgtgtcatcttcactcacacacacctggctgtacctgtttcttctctgtgtgtacaaagagacagggagagagagagagagagagagatccaatgcctcttcttata

SEQ ID NO: 762874 - DNA, 455 bp, Homo sapiens
tcacagcagtacagctgtcaatggagcttccttatatagccacggctcctataaccatatcttgagccttattttcagcagtcttccctcagctgtaggagagaattgtttaattgctgtttggagaccttctggcacttataaaatatgctgagccaacctcaggaatgatgactcactgacccatagtgaacttggaaactgctgtacagaataccacakatgcacaacttaaactcaaaagcatatttctcagtcctggaagctagaactccaggacccaggcgtcatcagagttggttcctggtgaggtcttgctgtctggcttacagggggccacatactcactgtgtcatcttcactcacacacacctggctgtacctgtttcttctctgtgtgtacaaagagacagggagagagagagagagagagagatccaatgcctcttcttata

SEQ ID NO: 762875 - DNA, 455 bp, Homo sapiens
tcacagcagtacagctgtcaatggagcttccttatatagccacggctcctataaccatatcttgagccttattttcagcagtcttccctcagctgtaggagagaattgtttaattgctgtttggagaccttctggcacttataaaatatgctgagccaacctcaggaatgatgactcactgacccatagtgaacttggaaactgctgtacagaataccacagatgcacaacttaaactcaaaagcatatttctcagtcctggaagctagaactccaggacccakgcgtcatcagagttggttcctggtgaggtcttgctgtctggcttacagggggccacatactcactgtgtcatcttcactcacacacacctggctgtacctgtttcttctctgtgtgtacaaagagacagggagagagagagagagagagagatccaatgcctcttcttata

SEQ ID NO: 762876 - DNA, 555 bp, Homo sapiens
ccaatgacacagatcattttacagacagggctttaatttccaaatttacagaactcatcgctttaaattaaattatacatacaatattacatacatatttgtgttataaatttattaattatggtaaatatgatatcaataagtaatatatagatataatttctttctcatagtttcaaataatctcttgaggatgtttaaacataaatcccaaccattgtacattgytccagctttgctgcctgtttgtgtttatacacatgagaatataccagtatatttctcttaaaccattcctaaagtaaaggtgaggaagtaaatatttctttgaaggacattagcacagtatttgataactttggtagtatttgatacatattgaatgaaaagagagctatattgttcatcacaatatgaacagtgattatagaattatatcctgtataggtaagttatacagtaatctatcttatcattatgcaaagaagcccctccacatttaagttagttgtgtattgcttgaaatacgagcataataattatactcatttttgt

SEQ ID NO: 762877 - DNA, 614 bp, Homo sapiens
tggatccattccttctttctttgggccccttgcttcagcaatattcttggtattttgcttaattaaaatggaaactaaatgtaacctcattgtgtgtgtgtgtatgtgtgtgtgtgtgccgttttctctgccaaaatacagtccacctgagatgttcaccatgcattttgcctcccactacatcaattggtttctattacctaatcgtaacacttagtcttactgaaattatatatttttaatttgcctgcctgtttatattatgtcactcccactaaaatataaatgcaaatagaggaagatttataattttattcaccatggtattccaatgcctagcaagggatatgctcataccggggactcaccaaatatctgttgaataawtaaatttataaaaaataaatggatgaatgaatccacatccagattctgcagtcaacttgctttctactcttccttccagattcaagatctctgcagaatttgaccttgcataggcttatcaagaatggctgattgtcaatgatattactatagatgcctaagcaaccacattcattgaggttaactctgagttatgtctttatttaaaaatttttttgagcttgaaa

SEQ ID NO: 762878 - DNA, 614 bp, Homo sapiens
tggatccattccttctttctttgggccccttgcttcagcaatattcttggtattttgcttaattaaaatggaaactaaatgtaacctcattgtgtgtgtgtgtatgtgtgtgtgtgtgccgttttctctgccaaaatacagtccacctgagatgttcaccatgcattttgcctcccactacatcaattggtttctattacctaatcgtaacacttagtcttactgaaattatatatttttaatttgcctgcctgtttatattatgtcactcccactaaaatataaatgcaaatagaggaagatttataattttattcaccatggtattccaatgcctagcaagggatatgctcataccggggactcaccaaatatctgttgaataattaaatttataaaaaataaatggatgaatgaatccacatccagattctgcagtcaacttgctttctactcttccttccagattcaagatctctgcagaatttgaccttgcataggcttatcaasaatggctgattgtcaatgatattactatagatgcctaagcaaccacattcattgaggttaactctgagttatgtctttatttaaaaatttttttgagcttgaaa

SEQ ID NO: 762879 - DNA, 626 bp, Homo sapiens
attccaaagcatacaataatttatccaagttcacatatctgaaagtgggatgcttgagatttgaacccaagtctgtctgctttatgggctagtagtgattattggtataatggatttccaaaatcccggttctggggactgtgatttaaaaaaatcgtgtctgtgtttgtgctgccgcattctttttctaagtgtgttttgcagagttggtagagtgaatgcatgcaaggatctaagaaacgaagtgccctgtcrgcatataggtgcagtcagaacgagggttccagtgtgtattcaatgatgactgtcaagattattattcctttcttttgtccttctgttcagtagctcatttttacgtttaaaggggaaatactttttccagaatatttttttttcacagcttcattctatagaggggaagatgaatcttcagcaggtaaatgcacttccaggaatatatctggcccattataatgtagacattacataaagagtcttaggtaggtcataatacctctctagccccgtctcctcatttggagaacagggacattgatcttttataattatttgtcctctctccagtcacccctccctctccccctaaaatgggaagctatttg

SEQ ID NO: 762880 - DNA, 606 bp, Homo sapiens
cgccttgactctatccaaattctatcaccagtgaaggcctagctcagttcctactttcttttttttttttttttttttttgagtcagagtttcactgttgttgcccaggctggagtgcaatggcgtgatctcggctcaccacaacctccacctcctgggttcaagtgattctcctggctcagcctcccgagtagctgggattacaggcatgtgccaccatgcccggctaattttatagctttttagtagagatggrgtttctccatgttggttaggctggtcttgaactcctcacctcaggtgatctgcctgcctcagcctcccaaagtgctgggattacaggcgtgagccaccgcgcccctgctagttcctacattcttgatgaagcactccatctcctttaagccttattgtctgtttctcttctctgagcccttctgatctaatattaggtgaggatttgctcttgtccatatttatgtttcttactgcctccgaaaaaaatgcttgattcatggcaggcaggaaaccggtattcctttgttgcatgaacaaatggccaaattaataactgagacttacactgttttacaacttattgcatct

SEQ ID NO: 762881 - DNA, 619 bp, Homo sapiens
ctaggaaattccctctctgaaagacacatgggaaccctgttttggtatccagaacagtgctgaaatggtcagaaataggactaaagttggtggactttgcgtatgtacagacagaaacatcctgctttccaaagagctgaacgctgagggtcatttatctgtgggattcagggtacactaaaggtttctagttgaattggttctcataacttttgttgcatgtcttacctttatgaaaaaggccttttccaacaagcttatttcattgaagtgttattgccagtcagctgagcacgatggaatgaattttgtttgttgtaagggcaaagaagcaggctaaagaggrtgtggtgaaagattctacttcctgtctattcaaaggatgtgaatagacagtttacataacagaaaattcagtaggctcacatatggtaaatcatacagctttgtttgcaaataacaaaatacacattaaaaaagttatagcgtctttgaaaacctattaaactcacaaaaataaacagaaccccaaaattcaattatttcttgtgagcaatgtgtccaggttgtatgctatggtgaaaagaatgctgcatttggaatgcgaagacttaaatgt

SEQ ID NO: 762882 - DNA, 580 bp, Homo sapiens
tctgagaaggaggtaaccttgtggaggaggtctgtaggaaaacatgtcgaaaagaagtgaaagttaaaagagagagagactggaaggcatgtaagtctctgtttccagtgatcctgcagacccagttctctcctttgctcttcccttttgcctgcactaaaaggagacatttgaggttgcatttctgttacttgtatgaaaagggtcctatttaatatagattctctcattattcctttcattaaggttagactacgaagaggaaatcccagcctaattcatttttcatttgattagcatatctggaccaaaaaaaaagtttagttytaagaaaatctgaaccattggccaattggtagtaagagcttccatcacatcagagcttccatccaggcagatcttcacatgcaaaagctctcctttgctcttctggctcctgaatatagatgagctcaccaacgtgacctcacttcagagagcactcagatgaaaggaagtgtgatgtcggtgagtcaagggcagaggcgagacacccgcctctcaactcaagtttccaggcagagaaaaccaaagagggggg

SEQ ID NO: 762883 - DNA, 573 bp, Homo sapiens
taaaaatacaccataacaactatttatatagcatttacattgtattaggtataattagtaatctagagataatttaaagtatacgggcggatgtggataggttatatgcaaatactactccattttatataagggacttgagcatctccaatttttgagggaactatctgaggggagtcctggaaccaatccccgaagtatactgagggatgattgtatacattacctatctaatgatatgcagtgacttattaagagtctagaagccgggcatggtggctcacgcctgtaatcccagccctttggaggccgaggcgagagtattgcttgagccctggagcttgagaccagcctggacaacattgtgagacactgcttccacaataaatacaaaarttagccagtcatggtggcacgtacttgtggtcccagctactcaggaggctgaggtgggaggatcactggaacctgggaggtcaaggctgcaatgagctgagatcaccccactgcactccaacctgggcgacagagtgagaccctgccccctccccctacaaaaaaaaaagaaagaaa

SEQ ID NO: 762884 - DNA, 525 bp, Homo sapiens
cccaacctcaccccgcacctactgtcaagcagatattagatgatatactctctggaaagatttcaccacagaaagcctggatacagtggatactaggcactgctgaaggaataaatgaattattgtattaaagaccaagggatatatacaaaattctgcaaaccaaacagtgagatactcagcccctttccattcttgattagtcctcasaatcatagcagccaggcttattatacccatccgtttccccattcctggtaagtgattaaaggattctttaggggaactgaacagtccaaggtatagggagtgagcatgaggaggtctatagacataccttaatgatcctgcaataaaatggcaaggtcctcaccctataacttgataataaaggctaccctctcatgctccggtcagatttgttgtgcctcactcttcagtatgagtggctgaccaaagatcaccaagcagttgaggagagcctctatcataaaagacagagaaaaaaacaaacaaatattttct

SEQ ID NO: 762885 - DNA, 525 bp, Homo sapiens
cccaacctcaccccgcacctactgtcaagcagatattagatgatatactctctggaaagatttcaccacagaaagcctggatacagtggatactaggcactgctgaaggaataaatgaattattgtattaaagaccaagggatatatacaaaattctgcaaaccaaacagtgagatactcagcccctttccattcttgattagtcctcagaatcatagcagccaggcttattatacccatccgtttccccattcctggtaagtgattaaaggattctttaggggaactgaacagtccaagrtatagggagtgagcatgaggaggtctatagacataccttaatgatcctgcaataaaatggcaaggtcctcaccctataacttgataataaaggctaccctctcatgctccggtcagatttgttgtgcctcactcttcagtatgagtggctgaccaaagatcaccaagcagttgaggagagcctctatcataaaagacagagaaaaaaacaaacaaatattttct

SEQ ID NO: 762886 - DNA, 646 bp, Homo sapiens
tggttggttgaatacacagatgcagaactggaatatgaagggtagactgcagttttatgtaagaacaagattgtgaaaagaaaaagaaattggaaatataccttagacagaaatgtacttatttcattctgtagatgacaaagtggtcagaaggctactctttgaagttgtataaacaacttcaaagattgttgaaactttgaagattcaaagattgggttagagacccagggctaccagtttttagctcaatgatgttgagcaagttactagcgtgtaataatagtatctacctccttaggtcactgtgaagataatgtcaaatattgcatataaagtgattaacccagaacctgacagagactaaggttacaggaattatttattgttatcatcatcataattattgttgttgctaatagatgccatacattacatgtgaaaagtccactacatgaatgcacatgaggtttttcttattctttgttaggtctttaagtatctrtgaaatgagtgtcagggctacaaaccacagtgtctccatgaattaaaggttaagacagcagtaccagagtggattcaggataggctttaaactttgggaaggcaaagattcaccttgataataacaatgaaaattctttta

SEQ ID NO: 762887 - DNA, 536 bp, Homo sapiens
tattctgcaactatcttaggttgtggatcccttgagtgtttggagagaaatagccttttgtctgtatccatgtgtggatatggatgtacatagtagatactcaataaatatttgtgaaattagctatatttcctccttcataactttaaaaaataacttaaaaacaatattcagggctgggcatggtgcctcatgtcggtaatcccagcactttgggagaccgaggcgggtggatcacttgaggtcaggagtttgtgaccagcctggccaaacatcatgaaccccatctctaytaaaattacaaaaatcagctaggcgtggtggtgtgcacctgtagtcccagctactcaggaggctgaggtgggataatcactttaacctgggaggcagaggttgcaatgagccaagatcatgccactgcactccagcctgggtgacacagtgagattctgtctcaaaaaaacaaaacaaaacaaacattattcaacagattgatgtctcctgctacctaaattccttactctttgtgtgccaca

SEQ ID NO: 762888 - DNA, 634 bp, Homo sapiens
tgagtaccactggacacctttcgcttgctattctttcttatttttccttagaattaaggggctaaacactgggcacctgttggccagttaaaagcaactagcatggctgctggactaaagacacgggtgtcaggctttctgggaaagggctctctaacaacccccaactctaaggagtcaggagcgttagtttgcctggaagcagcttctgctttycctgcacttctgggctgagcagagggtcgacagagaggaaagccattcagctccagggtcccgacaaaaagttggttgaccctgcagccatgagcagagctctcaaagttacgttgccaaagtgagacttgcccatctatcccatctatcctgacccttgtctcctgggtcttaacacccatcagtcaaacttcttcctgcctctcttctccgaggctagtcctgcttctaaaaaccactccctgtccctggtactcttctagtttctcctgtaaggatgatttctaatataaattttgggactctgttcctttctttaagcacccgggctcaccaatcagaaagacataatttttgcccaaagccccatcgggggggactatatagaattttaggatccctcctcagactagcaggc

SEQ ID NO: 762889 - DNA, 604 bp, Homo sapiens
ttaggatccctcctcagactagcaggcctaacagaggctattcccgaagctagaatatggggagcctcagaaattatagactccaaaattggaggatatccttcctattcatatgtaaagtgaggacaaaaagcatcactcttccaaccctggagatcccttccctccctcaggatgtggcccttcactccattttgaggcatatcatgtttacaggacaagggtaaaktcccaataccaacaggagaaaatgcttatgactctaactaacaggttttcgagactgcgtcggtaaaagccactaaatcccacctttctcggtcctctttgtggtctaagaggaaaggcaatgatgcaggtttttgagaatgtgtcagtaagggccactaaatctgaccttcctcggtcctctttgtggcctagaaggaaaacaagtgtttctgctgctgctttggtgagcacaactatccctaacagcagggtccagggaccattgtagggtcttgggtgggggaaaaaaacaggccaaaactgcaagaatttttttttctttctgttttagatgggaaacactcaggtatcaacaagctcacccctgaaatgc

SEQ ID NO: 762890 - DNA, 566 bp, Homo sapiens
tcaaaactcaacagaaataaaacaaatttttaaaaagtaggtaaaatattttaattaaagaaggtatatgaatggcaaataagcacaagaaaaaatgttcaacattgttaaccatcagggagaagtaaattaaaatcacaatgaggtrcaatgacagacttataagaatggccaaaaaaaaaaaaaaagataaaacaacacaaaggttggcaaagatgtagaactactgaaaaagcatgaagtgttagtgagaatgtaaaatgattcagatattttggagaatgattttgtcatgtttctcttaaagttataatatgcacctatatatgacctagcaatcccattcctaggtatttattctagaaaaaaaaaacccttatgctcacacagaaacatgtacatgaatatttatagcagctctattaaaaattgcagaaactggagaccaccgtaatgacctccaacgggtgactgtataaacacactgtggtatgtccatgaaaaggaattttacttggtaataaaaatgcaataactgggatgaatctcattttgttgtgtagaag

SEQ ID NO: 762891 - DNA, 566 bp, Homo sapiens
tcaaaactcaacagaaataaaacaaatttttaaaaagtaggtaaaatattttaattaaagaaggtatatgaatggcaaataagcacaagaaaaaatgttcaacattgttaaccatcagggagaagtaaattaaaatcacaatgaggtacaatgacagacttataagaatggccaaaaaaaaaaaaaaagataaaacaacacaaargttggcaaagatgtagaactactgaaaaagcatgaagtgttagtgagaatgtaaaatgattcagatattttggagaatgattttgtcatgtttctcttaaagttataatatgcacctatatatgacctagcaatcccattcctaggtatttattctagaaaaaaaaaacccttatgctcacacagaaacatgtacatgaatatttatagcagctctattaaaaattgcagaaactggagaccaccgtaatgacctccaacgggtgactgtataaacacactgtggtatgtccatgaaaaggaattttacttggtaataaaaatgcaataactgggatgaatctcattttgttgtgtagaag

SEQ ID NO: 762892 - DNA, 572 bp, Homo sapiens
atgaaatacaaataaattttgcatttagacttggatcctatccccaatatatcttattatgtatatacaaatattcctaaatctgaaaaaaaatccaacctccaaaatactctggttccaagtattttggataagagatactcaacgtgtgtgtgtgtgtgtgtgtgtgtgtgtgtgtgtgtgtgtgtaatttacactgattcaaagagagagaggaaattaaaatttaattctatctgctattggactcaatgaacctatgtccacaaatcctcttcagatgggatcagtgagtcagatatttctcccataagtctcagtttccatacaaatttgctgaargaagcaattttcttaggtaacatgagcccaagatttaaaactatatttctcatggaatacggttttctaatggtaaacaaaggctttctttgttggacaacattttcatgaattctcgatgacaaattatgattatatgcaactctgtaaatactaatttagaactatatacaataaaatataactattttaataataataaaaatacacattactaaaatatgctattt

SEQ ID NO: 762893 - DNA, 601 bp, Homo sapiens
aacagcagaataaactaagctgaagacagaatctcagagcttgataaccagttctacaaatcaactgaaaagtaaagaaaaaagaatgcgggaaaatcctgctacatactatacaagatgtttgtctccaagccacatggttattgattcaccaaggtcaatgtgaaagaaaaaatcttaaaggcagttagcaagaaggctcaggtcacatacaaagggaaccccatctggctggcagcggayctttcaaaagaaactttaaaagccggaagagattgggaacctattttcaatatccttaaagaaaagacattcaaaccaaaaatttcatatcctgcaaaactaagcatcatatgcaatggagaaattaaacccttttttgacaatcatacactaagggaatctgttacaactaaaactagccttacaagggagtgctaaacatggaaatgaaataatgacacctgcttccacaaaaactaaagcacagtgcacagacagtataaagcaactacacaatcaagtctacaaaataaccagctaacaacatgatgacaggatccaaatctcacgtattaatagtaactttgaatgtaaatgg

SEQ ID NO: 762894 - DNA, 616 bp, Homo sapiens
ggagctttactttctgctgaatttcagactttcatggggcctatagtccctttgttttggccaaattcttccttttgcaaaagggcaatttacccaatgccagtacccccactgtatcttggaagtaactaacttgtttttgattttacagactgataggcgaaagggacttgcatcatcttagattagactttrgacttggacttttgagttaatgctggaattagttaagattttgggggactgctgggaaggcatgattgattttggaatgtaggaaggacatgagaatatttaggggccagaggcagaatgatagggtttcgatctgtgtccctacccaaatctcatgttgaactgtaatccccagtgttgggggagggccctaatgagaggtgactggatcaggggggtggatttccccattgctatcctcattatagtgagtgagttctcatgagatctctttgtttaaaagtgtgtagcactttccccttcactctctcttttgcctttcatgtgacgaccatgcctccttctttccccttttccttctaccattattataagtttcctgaggcctccccagccatgcctcctgtatagcctgcagaac

SEQ ID NO: 762895 - DNA, 616 bp, Homo sapiens
ggagctttactttctgctgaatttcagactttcatggggcctatagtccctttgttttggccaaattcttccttttgcaaaagggcaatttacccaatgccagtacccccactgtatcttggaagtaactaacttgtttttgattttacagactgataggcgaaagggacttgcatcatcttagattagactttggacttggacttttgagttaatgctggaattagttaagaytttgggggactgctgggaaggcatgattgattttggaatgtaggaaggacatgagaatatttaggggccagaggcagaatgatagggtttcgatctgtgtccctacccaaatctcatgttgaactgtaatccccagtgttgggggagggccctaatgagaggtgactggatcaggggggtggatttccccattgctatcctcattatagtgagtgagttctcatgagatctctttgtttaaaagtgtgtagcactttccccttcactctctcttttgcctttcatgtgacgaccatgcctccttctttccccttttccttctaccattattataagtttcctgaggcctccccagccatgcctcctgtatagcctgcagaac

SEQ ID NO: 762896 - DNA, 550 bp, Homo sapiens
aggatgttgcaaacttcagtggttatgcagggattctcacagagcaagctttggtacctagttagtctagcatttgttagccaatgatgtcctttggtactcattaaagtcaccacagcacggggggcctttatgtttatgttttgcccaagagttagcttatccacttcttgtgctagcagggctgttgctgccaaggccctcaaacatgggggccaacccttagaaaccctgtctagttgtttagagaggtaggccaccggccttggccaggaccccacagtctgggtcaaaactccaaacgccaatttttctctctctgacacatayagcataaaaggttttgtcagatcaggtaaccccaggactgaggctgacatgagtttttcttttaactcatgaaaagctcgttgctgttgggaccctcatttgaaaggttacttgtctccccgctttgtgactccatacaggggcttagccagtactgcaaagtttgggatccacaacctgcagaaccctacagctcctaagaattctttcacctgcattc

SEQ ID NO: 762897 - DNA, 589 bp, Homo sapiens
agtcgtagaaaagaatgagattctgccattttcaactacatggatggaactggggaacgttatattaagtgaaataagccaggcactgaaagacaaagtttgcattttctcacttattcatatgacctaaaaattaaaacaaactcatggagatagagtgtagaatagtggtcaccagaggctgggggaaattgaggatgsctaatgggtaacaaaatatagttagaatgagtaagatctagaattccatagtacaatagtgtgattacagtcaacaataatttattgtacattttatagtagctaaaagtgtataattggattgttcataacacaaataaagtttaaatgtttgaggtgatggatactcgacttaccctgatgtgattattttgaattgaattcctgtatcaacatatctcatgtaccccataaatatatacacctcctatctacccacaaaataaaaaaattaaaaagacactagtgttcagattcctcagggaaaaaaaaaaacaactaaacatagtacgaccatacaatctagcaatctcaccactgagttttatccaatagaaaggaaatcagt

SEQ ID NO: 762898 - DNA, 571 bp, Homo sapiens
gagagttttttgtaattatttttattcataaaattaaacccatatatcaacctaattaattatgacaatattttgctactatgataatacatatatttttccttgacctaactgatggactttcaacatgtaaaatgtacaagaacagtatgtcaaggtaacgtcatgaatatttatctatatgtgatmatgaatatttaaatattaaaatatatatgaatattgattgaccaatttaaacaaatcttcctttcatctaaaaaattagcaataaattagacaaaatatatttttaaaatatagcttgaagacatgagataattagaaaagtggtgacaaattaatatcgaagagagaaacttaaagatgtaattcctgaattttatggctactttttccctagggttaacttttggctctagaagaaatgagaagaacgtaagaagctgaacagtacttttgatggtttctcaagatgtacaaacaaaaattggagccctggatccaccaagcttgggttggaggcctagtgaacctcctacatcttagatttgtattataaatggttaaa

SEQ ID NO: 762899 - DNA, 607 bp, Homo sapiens
gcctcccggattcaagtgattctcctgcctcagcctaccaagtagctggggttagaggcacctgccacaaggcttggctaattttttttttttttttttttttggatttttagtaaaaacaggttttcaccatattggtcaggctggtcttgaactcctgacctcatgatccacccacttcatcctcccaaagtgctgggattacaggtgtgagccaccgtgcccggccctgtccttttaaatctttagtaggtttttaagtcttatttaaaagtcttgtctcttggctgggcacagtggctcatgcctgtaatctcaccactttggaaggctaaggaaggaggactgcttgagcccaraagttcaagaccagcctaggccacataggccctgtctctccatttttttttttttttttaattagctgggcatggtggttcgtgcatgtagtcccaactattggggaagctgaggctggaggattgcttgagtcggggaggtcaagacttcagtgatctgtgattacaccactgcactccagcctgggctacagagtaagaatctgtctcaaaataagataaaataaaataaaataaaaatcttgtct

SEQ ID NO: 762900 - DNA, 470 bp, Homo sapiens
ctccacatgttcttggctccatgtacctataaaaaggggaaatattctgtattccagccttagccttccaacctagatccagattcacttcaacttggccaacagctactgagaaactgccaggcatggagctaggtactaaggagatgggggaagacaaaacacctccccaaagaaaacygtgactgtctttctcagccctgggtacccatgctgccccgcaggcctcccttcaatctgtgcttgcacaattctagatgggcgttctccagcggggtctggtggtgtgcactctgctgctccatttgctgtccagttgtttgctaggtgtgttctggttttctgtaatggtgcagaattcagggcaggagttcataacttttttgctgctggggatccctttggcagaatgatgaaacctatggatcccttctcagagcaatgtttttaaatgcaaaatcctagtttta

SEQ ID NO: 762901 - DNA, 640 bp, Homo sapiens
ctctaagtggatattactatttttctcattctacagctgaggagagaccaagctagtaaaggctgctcaagatcactaagccagcagtggggaatattgtgaaatattgaaatattttattatttcatagagacagggtcttgttatactgcccaggctggtctcaaattcctggccataagcgattctcccacctcaacctctcaaartgctgggattacaggcatgagccacctggccgaatccaggtcttttgacaccaagtgccctattcatccctttgccctcccctaatctctgggcagatttgagtgaggcgataggctgggggatatggcattgggatactggggttgcacctgaggagaagccaacagcaccagggtcagaatgggcaaaggacataagcacaggcaaggccattcctggtggggctgggccagggagctgaggggctcctagaagggccaggttccccgacttctctgagcttcagcgcctggaggtttctgggcagccacacgcttctcagcgctgacccttcctcttcctttatccttggaaaataacccctagggcacaaacccaaccgaagcaatgatactaagtgtcagggcattcctcgactctcccacccctg

SEQ ID NO: 762902 - DNA, 586 bp, Homo sapiens
gtgggtggccccctagttcactctccgcgctgcccttttacacattgtggtgggcatagttgctttgtctagccaggaccccttccccctcttctagtaatgcaaagctcccccacctccactcctgccacgccccacttcttttcaggaactgttcctcctaagatcacaggacctctgtccaggcacacagggttcacaatgggccagccttggccaatcacargtccctttgtttcctccttgctgaggcatattgtacatacaataaaatgcaaaatgtgctttaatggggaatgtacaacctgatgagtttttttatttttatttttatttattttttttgagatggagtttcactcttgttgcccaggctgaagtgcaatggcacgatctcggctcactgcaacctccgctgcccaggttcaagcgattctcccgcctcagcctcctgagtagctgggactacaggcatgcgccaccacgccgggctaattttgtatttttagtagagacggggtttctccgtgttggtcaggcaactcccgacctcaggtgatccacccgcctcagcctcccaaagtgc

SEQ ID NO: 762903 - DNA, 586 bp, Homo sapiens
gtgggtggccccctagttcactctccgcgctgcccttttacacattgtggtgggcatagttgctttgtctagccaggaccccttccccctcttctagtaatgcaaagctcccccacctccactcctgccacgccccacttcttttcaggaactgttcctcctaagatcacaggacctctgtccaggcacacagggttcacaatgggccagccttggccaatcacaagtccctttgtttcctccttgctgaggcatattgtacatacaataaaatgcaaaatgtgctttaatggggaatgtacaacctgatgagtttttttatttttatttttatttattttttttgagatggagtttcactcttgttgcccaggctgaagtgcaatggcrcgatctcggctcactgcaacctccgctgcccaggttcaagcgattctcccgcctcagcctcctgagtagctgggactacaggcatgcgccaccacgccgggctaattttgtatttttagtagagacggggtttctccgtgttggtcaggcaactcccgacctcaggtgatccacccgcctcagcctcccaaagtgc

SEQ ID NO: 762904 - DNA, 327 bp, Homo sapiens
aaaccaatgttagtgctgcaaaaataatttttggaacaatatcttatgatacagaagatctatgtcatccaaggagcctcactgcaaacaatacaaatggactctgcctgatatgggcagaaaaaggatttattgaaaggctattggttagcctgcactgtccaggacagcaaacagscccagaggttgtgcacccagagatacaaccaaaatcatatcacaaagctggtcctatgtggacgttgctgctgctgccacttagcatcagatatcacagctggcccaattggcattatgtgttggatactactgtagatgtggctggcc

SEQ ID NO: 762905 - DNA, 521 bp, Homo sapiens
gttgactaaactagtggaagggatttttgaagagctttcaatgcaggattcaactcattctctttttcattcagtaaacattgtatgtgtactctgggcatatttctgtgttaggaattttgaaaagttcaaaaagaaaaaagaaatcatagtttccagcattctccttataaatcctmatggaaggttgattacagcatatggaatactaaatagtaaataatgtaagcataagatgaaatgccttttgtgattcaaagaggctcaggattgagctgtgtgagtccctggctacacataaagtggaggaaaaaaataagccaggttcagacagaaatctcacacaggcactgaaatggttataggaaacttacctggctacaaaggctggccaccaaacaggctgccaggtcattcaagcagtaacagggctagaactgtttccgtcttaatgctgctattatggatgtgaagccaactgatcagacaggtagggctgccagcagtgtcttctaatagtt

SEQ ID NO: 762906 - DNA, 612 bp, Homo sapiens
aatttgtaaatacacttttgttttcaaatcttccacaacccaaggcaccaacagggccgaggggtttggtgaattgtgggaaaatagaggtgcttggatatgtgtaagtgagtagctcatttagcaggtgttccaccacctgctcacagaccacagggaatttcatagctggtgcacatgtggcagcaagggccacgcgactggaaatgaaagtgagttgtcaatttttcttctctctctctttttttttttctttttcttttttttttttttttkgagatggagtcttgttctgtcaccaggctggagtgccgtggtgcaatcttggctcactgcaacctctgcctcccgggttcaagtgattctcctgcctcagcctcctgagtagctggcactacaggtacatgtcaccacacctggctaatttttgtattttcagtagagatggggtttcagcatgttggccaggctggtcttgatctcctggccttgtgatctgctcgcctcagcctcccaaagttctgggattacaggtgtgagccatcgcgcccagccgagttgtggattgttctatattttcattcaacatttcttcaaatgtcctttcccttt

SEQ ID NO: 762907 - DNA, 612 bp, Homo sapiens
aatttgtaaatacacttttgttttcaaatcttccacaacccaaggcaccaacagggccgaggggtttggtgaattgtgggaaaatagaggtgcttggatatgtgtaagtgagtagctcatttagcaggtgttccaccacctgctcacagaccacagggaatttcatagctggtgcacatgtggcagcaagggccacgcgactggaaatgaaagtgagttgtcaatttttcttctctctctctttttttttttctttttcttttttttttttttttggagatggagtcttgttctgtcaccaggctggagtgccgtggtgcaatcttggctcactgcaacctctgcctcccgggttcaagtgattctcctgcctcagcctcctgagtagctggcactacaggtacatgtcaccacacctggctaatttttgtattttcagtaragatggggtttcagcatgttggccaggctggtcttgatctcctggccttgtgatctgctcgcctcagcctcccaaagttctgggattacaggtgtgagccatcgcgcccagccgagttgtggattgttctatattttcattcaacatttcttcaaatgtcctttcccttt

SEQ ID NO: 762908 - DNA, 642 bp, Homo sapiens
ttatgctaaacatattcaatattttgttagagtgatggcttcctttagcagtgttggagactgcatacaagaagcatttaattataaatgccataatttgctcaattgatgcttgtcttttatgtgtaaaccatagataattttctctaaataaatgtaaccatgaaaataatatttaaaacaggaaaataaaaaaatgtatttgcttgatataaaacgaaaactgcatagtcaaaactaactgccttagtgacaaataagcagctcttaacttcaaattgcaaaggtatcatctgttcatttaggagccatttcccagrtaagaattagagaatgtatttttataaaaaatatccggattttgttttcaaggggaagctgattttaaagtaatactagaattgtgctgtgtgtatttgtaatgattttcagcaagccgttacacaatacaaccaatgacacctgattttatgcacaatgaattaataaggagtataaatttcattttgctttccatgttagattttattccagagacagaacttattgtctcaaatggcgttccctaataaaaagataacagaagtggagaatatttggaaatgtaaaccctcctttctttttatcatcagtgagtccatg

SEQ ID NO: 762909 - DNA, 615 bp, Homo sapiens
tagtatgttttcttttgcattgctgaatttacttgttattctagccagtatgtttctcatcttagactgaatttttatctccagaagttttttcagtctttttatatatctttcagatctctacttatcttttaaaatatggaacacagttttgatgtawgtttcaatattttaatgttctcatatgccaattctaacatctgtcaattctggttcaaatttgattattatatttcttaattgggtcatatttcctacttgttttcatgcttgtaatttttgatcaaataccagacatgataaattttaccttgcttgatgttggatatatttttatatttctataaatatttttgagggcttttttgggatgaaattgacttacttggaaacattttgatcttttggggtctttttaactatgttaggccagaacacagcaatactaaatctaaggccaattatttcctgctgttgaggcaagaaccttctgtgtactccacctaattctaatctgactaatgggagcaagcactgttcctggtcctgtgtgggcactggggcagtcttgccactaattcttttaggtgttttttcccccagtgttgggttatt

SEQ ID NO: 762910 - DNA, 647 bp, Homo sapiens
acccagatataaagccgcacacctacagccacctgatatttgacaaatcaacaaaaataagcaatgaggaaaggactccctatgcaacaaattatgctgggatagctggcttgcgatatgcagaagaatgaaactggacccctacctttgaccatatacaaaacttacctcaagatggattcaagatttaaagtaagacctcaaactataagaatcctagaagaggctgggcgtggtggctcatgcctgtaatcccagcactttgggaggcygaggcaggcagatcatgaggtcaggagatcgagaccatcctggctaacatggtgaaaccccatctctactaaaaatacaaaaaaaaaaaaaaatagcctggtgtggtggtgggtgcctgtagttccagctactcgggaggctgaggtaggagaatggcatgaacccaggaggcggagattgcagtgagctgagatagcaccactgcactccagcgtgggtgacagagcaagactccatctcaaaaaaaaaaaagaatcctagaagaaaacctagaaaacaccattctggacatcagccttagggaagaatttatgactaaatcctcaaaagcaattgcaacaaaaacaaaaattgataagtgggacctaattaaa

SEQ ID NO: 762911 - DNA, 704 bp, Homo sapiens
actaaatcctcaaaagcaattgcaacaaaaacaaaaattgataagtgggacctaattaaattaaagagcttctgcacagcaaaagaaattatcaacagagtaaaaagataacctacagaatgggagaaaatatttacaaactatgcttccaacaaacatctaatatccagaatctataaggaacttaaacaattgaacaaataaaaataaataaccacattaaaaatgggcaaaagacatgaacagrcacttctcaaaagaagacatacaagtggccaacaaacatacgaaacaatgcttaacgtcactgatcatcggagaagtgcaaatcaaaaccacaatgagataccatttctcaccagtcagaatggctattactaagaggcataataatagctgctggtgaggctacagaagaaagggacacttatacactgttgatgggaatgtcacttagttcagactctgtggaaagcagtttggagatttctcaaagaacttaaaacaaactaccatttgacccagcagtcccattactgggtctatatccaaaagaaaataaatcattctaccaaaaaggtatctgtgctcatatgttcatcgcagcactattcacaataacaaagacacggcatcaacctgagtactcatcaatggtgaattgggtaaagaaaacatggtacatatataccattgaatactat

SEQ ID NO: 762912 - DNA, 504 bp, Homo sapiens
catgatgcatgcacaagcatcaatagctgatttgatcaagtggaagaaaggataacagtgatggaagatcaaattaatgaaataaagcaagaagacaagattagagaaaaaagagtgaaaagaaatgaacaaagcctccaagaaatatggractatgtgaaaagaccaaatatacatttgattggtgtaccagaaagtgacagggagaaaggaccaagttagaaaacactcttcaggatattatctaggagaacttcccgaatctagcaaggcaggccaacattcaaattcaggaaatacagagaacaccacaaagatactcctcaagaagagcaaccccaagacacataatcatcagattcaacaaggttgaaatgaaggaaaaaatgttaagggcagccagagagaaaggttgggttacccacaaagggaagcccattagactaacagtggatctcttggcagaaacattacaggcaagaagagagtgggggccgatattca

SEQ ID NO: 762913 - DNA, 504 bp, Homo sapiens
catgatgcatgcacaagcatcaatagctgatttgatcaagtggaagaaaggataacagtgatggaagatcaaattaatgaaataaagcaagaagacaagattagagaaaaaagagtgaaaagaaatgaacaaagcctccaagaaatatggaactatgtgaaaagaccaaatatacatttgattggtgtaccagaaagtgacagggagaawggaccaagttagaaaacactcttcaggatattatctaggagaacttcccgaatctagcaaggcaggccaacattcaaattcaggaaatacagagaacaccacaaagatactcctcaagaagagcaaccccaagacacataatcatcagattcaacaaggttgaaatgaaggaaaaaatgttaagggcagccagagagaaaggttgggttacccacaaagggaagcccattagactaacagtggatctcttggcagaaacattacaggcaagaagagagtgggggccgatattca

SEQ ID NO: 762914 - DNA, 628 bp, Homo sapiens
gcaactcacatctgtaatcctagcactttgagaggctgaggcaggtggatttcctgaggttgggagtttgagaccagcctggccaacatggtaaaaccctgtctctactaaaaatacaaaaaattagccgggcttggtggcttgcacctgtaatcccagctactcaggaggttgaggcatgagaattgcttgaacccaggagacaaagactgcagtgagcagagatcacgccgctgtactccagcctgggcaacagagtgagactctgtcttaaaaaaaaaaaaagaaagaaaaaaaagatgtacagatgacagttaagtatacaataagtatatcaaaaatgttaaacatttyatgtcattagggaattacaaattacaacatcaataagacagcaatacacacttaatagaatggatttcaaacactggcaacactgaatgctggcaagagtgtggagaaataagaacttctattcattgctggtagaaatggaaagtggtatagccactttgagctaaacatactcatactatacaatccagcaattgtactttatttgcccaaataaactgaaaacttatactcacacaagaaactgcacactgatgtttacagtagctctatc

SEQ ID NO: 762915 - DNA, 642 bp, Homo sapiens
tgaaatattgttacagattttagttataaataactatacacatgtaaatgcatttccctactatatcctggtagtatcgtaataagtaatagcttttatttcactggttaatgctctatctgctagtgaagaatccaccttctcttttttccataattatttctgcagccacctggatatgaatcaggtgctcttatcatcatgtctagcatgttgtcacatgacattcatcatctttccttgcctcttgtctgcctatacgccaatgatcctacctctgcccgctaagctatgctaggttgccttgtcccatcctcttgtgctcacaggtgagctgcttcccccaggtatcttttttttkcgtgtgtggagacagggtctcactctatcacccagactggagtgcagtggcgtgatcacagctcacggcagcctcaacctcctgggctcaagagattctcccacctcagcctcccaacatgttcttctggctatgagctcacttccacaatttgccacctcttcctaagggacactgcttccagaatcactgactcaaacctcctgggtgactctgttactatggtgaggttaagatacaagacatctctgagtactctgaagccaaaataatataataaa

SEQ ID NO: 762916 - DNA, 642 bp, Homo sapiens
tgaaatattgttacagattttagttataaataactatacacatgtaaatgcatttccctactatatcctggtagtatcgtaataagtaatagcttttatttcactggttaatgctctatctgctagtgaagaatccaccttctcttttttccataattatttctgcagccacctggatatgaatcaggtgctcttatcatcatgtctagcatgttgtcacatgacattcatcatctttccttgcctcttgtctgcctatacgccaatgatcctacctctgcccgctaagctatgctaggttgccttgtcccatcctcttgtgctcacaggtgagctgcttcccccaggtatcttttttttgygtgtgtggagacagggtctcactctatcacccagactggagtgcagtggcgtgatcacagctcacggcagcctcaacctcctgggctcaagagattctcccacctcagcctcccaacatgttcttctggctatgagctcacttccacaatttgccacctcttcctaagggacactgcttccagaatcactgactcaaacctcctgggtgactctgttactatggtgaggttaagatacaagacatctctgagtactctgaagccaaaataatataataaa

SEQ ID NO: 762917 - DNA, 317 bp, Homo sapiens
atcagcaggattctaaaagtagccaatcatggggaggattgaaaaaaaatgcactctgataggacaaaaatagaacatgggaggggacaataagggaataaaagctggccaccccagccagcagtggcaacccgctcaggtccccttccacgccatggaarctttgttcttttgctcttcatggtaaatcttgctactgctcactctttggctccgtgccacctttaggagctgtaacactcaccatgaaggtccacagcttcactcttgaaatgagcgagaccacgaacccaccggcaggaaccaactccagacac

SEQ ID NO: 762918 - DNA, 632 bp, Homo sapiens
aaattgaatccctgaatacaccaatgacacgttctgaaattgaggcagtaacaaatagcctaacaaccaaaaaaagcccaagatcagacagattcacagctgaattctaccagcggtacaaagaaaagctggtaccatttctactgaaacttttccaaaaaattgaaaaggaaggacttctccctaactcattcttgaggccagtatcatcctcataccaaacctggcagagatacaacaacaaaaaaagaaaatttcaggccaatatccttgatgaacattgaggcaaaaatcctcaataaaatactggcaaaccaaatccagcagcacatcaaaaagcgtatccactacgatcaagttggctkcatccctgagattcaagtttggttcaacatatgcaaatcaataaatgtgattcatcacataaacagaataaaagacaaaaaccacatgattatctcaataggcccagaaaaggccttcgataaaattcaacatcccttcatgttaaaagctctcaataaactaggtattgaaggaacatacttcaaaataataagagccatctatgacagtcccacagccagtatcatactgaatgggcaaaagttggaagcattcccttgaaaact

SEQ ID NO: 762919 - DNA, 657 bp, Homo sapiens
catgtgccatggtggtttgctgcacctatcaacccatcatctaggttttaagccccacatgcattaagtatttgtcctaatgctctccctccccttgcccccaacccccaacaggcctcggtgtgcgatgttcccctctctgtgaccatgtgttctcattgttcaactcccacttatgagtgagaacatgcggtgttgggttttctgttccggtgttagtttgctaggatcaactttttaatttaatttaatttaatttytgagacagagtttcactctctaatctaggctggagtgtactggcatgatcttggcttactgcaacatttatctactgggctcaagcaatcctcccacctcagcttcccaagtagctggcactacaagtgcatgccatcacacccagttaatttttatttttttgcagagacaaggtctcattgttacccaggctggtctcaaactcctggactcaagcaatcctcccatcttggcctcccaaagagttgggattacaggagtgagccacctctcctggccaggatcaactttaaaagcatccttgcaactattttaaaagctgaaatatggaaatttggatataagactaaatgcccactatctcattatataacagctgaagtttaggaacaatag

SEQ ID NO: 762920 - DNA, 595 bp, Homo sapiens
ttgcaatgagcgaaagaacaaagcttccacagtgcggaaggggacgcgagtggattgccactgctggctcgggcagcctgcttttattcccttatctggccccacccacatcctgctgattggtccattttacagagagccaattggtccattttacagacagctgattggtccgttttgacagggtgctgattggtgcgtttacaatccctgagctagacacaaaagttctccatgtccccactaggtcagctaratacagagtgttgattggtgtatttacaaacgctgagctagacacagagtgctgattggtgcatttacaaaccttgagctagatacagaatgccgactggtgcattcacaatcccttagctagacataaagattctccaagtccccaccagattagctagatacagagtgccgactggtgcattcacaaagcttgagctagacacagggtgctgattggtgtgtttacaaaccttgagctagatacagagtgctgattggtgtatttacaatcccttagctagacataaagatgctccaagaccccaccagactcaggagcccagctggcttcacccag

SEQ ID NO: 762921 - DNA, 595 bp, Homo sapiens
ttgcaatgagcgaaagaacaaagcttccacagtgcggaaggggacgcgagtggattgccactgctggctcgggcagcctgcttttattcccttatctggccccacccacatcctgctgattggtccattttacagagagccaattggtccattttacagacagctgattggtccgttttgacagggtgctgattggtgcgtttacaatccctgagctagacacaaaagttctccatgtccccactaggtcagctagatacagagtgttgattggtgtatttacaaacgctgagctagacacagagtgctgattggtgcatttacaaaccttgagctagatacagaatgcygactggtgcattcacaatcccttagctagacataaagattctccaagtccccaccagattagctagatacagagtgccgactggtgcattcacaaagcttgagctagacacagggtgctgattggtgtgtttacaaaccttgagctagatacagagtgctgattggtgtatttacaatcccttagctagacataaagatgctccaagaccccaccagactcaggagcccagctggcttcacccag

SEQ ID NO: 762922 - DNA, 631 bp, Homo sapiens
agaatgcctaaaatgaaaaagactgatcaaatcaaatgttgccaagaatgtggaggaaatggactctcatacattgctggtggaaatgcagaatggtacaaccacttcgaaaaacagtctgactgttacttaaaaagttaaatatacacttaccatatgatccaaccatactcttaggttttcacccaagagaaataaaagcctatgtctaaacaaagactttgtacacgaatgttcatagcagctttaattttaatcgccacaactggcrataacccaaacatccatctacagataagcaaattgtgtctatgcattgtaatactactcagcaataacaaagaaataactattgatgcacacaacatagataaataactataatattcataaaaacaattatgtgagtaaaataagccagagaaaacagagtccatactgcatggttccatttatgtaaaactctggaaaatgcaaactcatctacagtgacagcaaatcaatgattttctgaggataggaacaagggatataaggattggacaggggagggagataacaaagggttgcaaggaagcttttgaagatgagggatatgttcattatgcaccatgtttcttggttgtatatc

SEQ ID NO: 762923 - DNA, 579 bp, Homo sapiens
taaaaaaaaaaaacaaaaaagagaaatacgtaagtaattctggagccagtgaaggtagctagcaagaagtagacaggtaaaaccaggacattcacatataataaatgttaagaaaagaggtttcagaaaggaagaacagaagaaacagttaatggtgttatatatctaaaggstagaaagaatttagtctaaaaagcgatctgttgatttaatgactttggcaatgagtcagatttaatgacctttcaatggagttagaagaatgggttgaagaatgaattggagatgagaaagtgaggtgactagggtagactatacacttaggagccttggtggtaataggagagggaggacaagggcagtggctttagggagaggcaagacgagaaaaatttcttctggaggccttcagaaatctcaagataaacaccaagagtttccagtgattaatcagtatttattctgcctacctgacttgaaatatgcaaaacacagaaaaccattgaattaactactactgatccattcgtagtaggcaatttgaatgtgctatcactctggtatctttctcaatacatt

SEQ ID NO: 762924 - DNA, 596 bp, Homo sapiens
tttgtttcccaatcttcagcacagaaggaacttagtaaatgttagatgaatagatggacttttgctgtgggtcccgaatgagggcttcctcccatctcaagtggacattgcagtggagactcagttctgaattcggagtcccccagggtctctcctcatcaattcagaagccatcctgcctcacagcagcttgatcataaaacacagcccagccagcactgggcactttgactcactgttttattaatgggttccttctgcaaatatttatcacctyctttgggatttcaggtagctctaggccctagtctgcatttactttgtccttgagaaagaacaaaagctgggtttttctagtcgtcccctgtgagagtggggttcagatgaatggtctggacagaaacaaatcataccatctcacccaggggaccaaccaacaacctcccgaagaacagatgagggacgtcctttgaaaagtaaggtctagatcaatgtgattatctgtgattcataggcccgcagagcctcaccaccctccctaggggcactgcacatagtctttgcttggctaatgcttgacggttgctgccgcagag

SEQ ID NO: 762925 - DNA, 645 bp, Homo sapiens
aatagggagtcttttcccattgcttgttattgtcaactttgatgaggagtagatggttgtggtgtgcagctttatttttgggttctccaacctcttccattggtctttgtgtttgtttttgtaccagtaccatgttgttttkgttactatatctttgttgtatagtttgaagtcaggtagtgtgatgtccccagctttgttctttttgcttacaatttttttgcctatttgggcacttttttggttccatatgaattttaggatagtttttttctaattctttgaaaaataacattggtattttgataagaataacaaatctctaaattgctttgatctgtatggtcattttaacagtgttgattcttcctagccatgagcctgaaatgttttttccatttgttcatgctgtttcttaatcctttcagcagtgttttagttttcttattgtagaactctttcacctctctggttagctgtattcctagatattctattctttttgtagctattgtggatgggattgtgttcttgatttgactcttagcttggacattgttggtatataaaaatgctaccgatttttgtacactgattttatatcctgaaactttgctgaattgtttgtcagttcttggagccttt

SEQ ID NO: 762926 - DNA, 616 bp, Homo sapiens
agacatttttggttgccatttgtcctagaggaggctgctagtggcataagctggtagaggccaggttgccactgaacatcctatggggcacagggctcccccaataacaaagatagacacagctctaaatgtgaatagtgccaccgtgggaaacctgaataaagcggcctgagcatgaggtccacctgatttccgggcagtgtttgcaatcatgtcctcatgtggattgaaacaccaagtccacaaagtatgagatgagctcttcccttagtctttccatttaggagagctcagattcactttgcatcattttgcaaataatgagaaatacttcgtaaaatgcaaaataataaagggaattaaataagacactctttctagacactaactggggtggtgatgtcrtgggcagaagcctctgtggctggggtagagaggcagccaaggagggactgaaatatggtggatgactgagacattattcactcagacttcatttattgagcactggtatctatgcataacctgagccgtgtggatgaacaaaacctggttggtgcctgttttgcagagcgtgcaggttagttgggacagagaatcctcaatgcctgcgtga

SEQ ID NO: 762927 - DNA, 584 bp, Homo sapiens
ctgggagaagaccttctgaaatgaatactcaccccctcacctccccaaattagcctcctgcctctgctccggaagcttcctaatggtctgtgtgcaactgtgcaattacagcagcctgtgttaacaaagctgcgtgatcacyagctttgggcaaaggcttgtgattggagcggtgtgaggtgttgtctcacccctttcacaggcagtttctcgtttttcacatgcgcccacttataaatgtctgtcacagggtttcaggccattcaccacttacacatttgctaattgttccccattcttctgtgtttcttagcctcagacttttcgtatccatctgttctaactaaaatctctctcatcaaattgaaagcccctccaaatgatttcttaccattttctcctaattgccactctagagacctggctatccatttgaaatacctttttgaagtcttgattatctgtaggaaatatttttttctgacatgatagaagtaaccagttttggtgctatttgggttgcttaagtaactacaggctggaaataggagattctctttccttttttccttctatttttcttt

SEQ ID NO: 762928 - DNA, 583 bp, Homo sapiens
aatggatgaaaaaacatgacccagctctatgctgcctacaagaaactcactttacctgttgactattaacaacacaggttttgacctgcacaggtccacttatattcaaatattttaaacaataaatatgttgtttaattttttgggagatttgcaacaatttgagaaaacttgcagacaaaccatgtagactagaaatactggaaaaatgaacaaragttgtgacatgaattcataaaatatatgtagatactagtttaatcatttattaccatgaaatagaaacacatctactttaaaaagttaaagtttatcaaaacttatatacaccagactgtacatggtgccatttgcagtcccgagaaatgtaaagaaacataaagatgcagtattaaatcataactgcatacaattaactgtagtacatactgtactatataataatgttgaagccacctgttgttgctattgcaatgagcttgagtgttgtatctgcttaaaacactgtgtgatgctaacagctccatgtgaaccattcatctgtccagtaaattatgtgttgtattaaaaagtgatctccatg

SEQ ID NO: 762929 - DNA, 583 bp, Homo sapiens
aatggatgaaaaaacatgacccagctctatgctgcctacaagaaactcactttacctgttgactattaacaacacaggttttgacctgcacaggtccacttatattcaaatattttaaacaataaatatgttgtttaattttttgggagatttgcaacaatttgagaaaacttgcagacaaaccatgtagactagaaatactggaaaaatgaacaagagttgtgacatgaattcataaaatatatgtagatactagtttaatcatttattaccatgaaataraaacacatctactttaaaaagttaaagtttatcaaaacttatatacaccagactgtacatggtgccatttgcagtcccgagaaatgtaaagaaacataaagatgcagtattaaatcataactgcatacaattaactgtagtacatactgtactatataataatgttgaagccacctgttgttgctattgcaatgagcttgagtgttgtatctgcttaaaacactgtgtgatgctaacagctccatgtgaaccattcatctgtccagtaaattatgtgttgtattaaaaagtgatctccatg

SEQ ID NO: 762930 - DNA, 597 bp, Homo sapiens
agacttacaattatacacgtttcaatgggttcctttgtgtctgagtgcttctcgctcgccggcttatcagcagatgaccacaacttcaatcagtaagttcttaaggcacaagtgttgtcactgtgaccattagctggatattgtccatttccattgaacttgggtttggacaggagaaaaagaaatagcaaataccgtgacatggcaggaacttcttttttggttctttgraatatatgaagctgctttttgaaataacctttgtagcgtgatgatctattttatatctaagcttccaagttttcctttcagatcttgctcgggatactaacgggtatggcagaacaggtgaattacatctgcgtgcagctgatctgcctgagggaagcgcttcagtctgtcttcagcccactctgaatttgatatttgtggggatttttttttttttttttgccttgctcttatttctttctcctccttctcaaatggaatgcagtgtttggaaattattctctttcttcctcagtttttctctatctgtattgtttgtccgcttaggaagaattcatgtgaaataagaagtagaaatttgttgaa

SEQ ID NO: 762931 - DNA, 512 bp, Homo sapiens
ttcaatgggttcctttgtgtctgagtgcttctcgctcgccggcttatcagcagatgaccacaacttcaatcagtaagttcttaaggcacaagtgttgtcactgtgaccattagctggatattgtccatttccattgaacttgggtttggacaggagaaaaagaaatagcaaataccgtgacatggcaggaacttcttttttggttctttggaatatatgaagctgctttttgaaataacctttgtagcgtgatgatctattttatatstaagcttccaagttttcctttcagatcttgctcgggatactaacgggtatggcagaacaggtgaattacatctgcgtgcagctgatctgcctgagggaagcgcttcagtctgtcttcagcccactctgaatttgatatttgtggggatttttttttttttttttgccttgctcttatttctttctcctccttctcaaatggaatgcagtgtttggaaattattctctttcttcctcagtttttc

SEQ ID NO: 762932 - DNA, 565 bp, Homo sapiens
taatggatgaaataataaatatcgtaggcgtgcaggccacatatggcccctgtcacacatgctgctttgttgttgttgttttgttacaaccttaaaaaacctaagagccatgccagctgggctgaattgggcccatggatgggagtttatctgcccttgctctatcccatagttctttaacttggcttgcattaagcacaataaccatttactgtctaaaccaggacactctaaaggggaaacggagataataaatccttaaatattctattataatcattacaaaataaataaagaaggcattatcaataaaaaagcagtactgctaatgggcattgtttcttttggsgtgatgaaagcatccttaagacagtggtaacgactaaacaactctgaatatgcccaaaccaccggattttatactttaataaagcaagtgatacagtatttcaattatctcaatggtgttatgtttttaaaaatctgaacctaaaaaataggttgtaaacttacatcacgaaatgacaaaaaccattgtagtaaaaataaatgcatttctaagcag

SEQ ID NO: 762933 - DNA, 548 bp, Homo sapiens
ttatttaaagtccagttttttccctccagcaaacctgaaaatacactatcctccagctatcagaattatattgagatctactcacatttatgatgatgttcagagattctcattgggaaggaaaaggcacacgctgcggcggtcttgcatgactctgttgttgtggaaattcaatttgttcattgtgttttgggctctctgggtggtcagggctgggctctgggtccttggcaattcctcaggttcccagcactccaaagccaagctcacctcctcatcacacrccctacaggagaagcattagggtgtccgactacgtgggtttcatagctgtggaaaagccaaaggggagactcctgaagaaaggcggtgaagactgtgaagagcgggtcaggaagatgagcacagcactgctactcctgtgggcacagggacagcatgtctccagccagcgccaccttgtttaatacatgggaactcactgaaattcattctgtattttgcccgcaaagttttaaagctttcatccacagtcaggaattaaactt

SEQ ID NO: 762934 - DNA, 548 bp, Homo sapiens
ttatttaaagtccagttttttccctccagcaaacctgaaaatacactatcctccagctatcagaattatattgagatctactcacatttatgatgatgttcagagattctcattgggaaggaaaaggcacacgctgcggcggtcttgcatgactctgttgttgtggaaattcaatttgttcattgtgttttgggctctctgggtggtcagggctgggctctgggtccttggcaattcctcaggttcccagcactccaaagccaagctcacctcctcatcacacaccctrcaggagaagcattagggtgtccgactacgtgggtttcatagctgtggaaaagccaaaggggagactcctgaagaaaggcggtgaagactgtgaagagcgggtcaggaagatgagcacagcactgctactcctgtgggcacagggacagcatgtctccagccagcgccaccttgtttaatacatgggaactcactgaaattcattctgtattttgcccgcaaagttttaaagctttcatccacagtcaggaattaaactt

SEQ ID NO: 762935 - DNA, 612 bp, Homo sapiens
attgctgctttttctgctttgaggatggcaaactagaaaagcccttagattaagtttttactttacctaagacagcattaaagctgattaaaaggttccactgaaatggcaaaatggccatatctctaataagcgccagtataaaacttaatcttaaattgggcagtcctggggaaaagaattagatttaatttataccaatttgaattatagaagtcagactcatagcagccrttggctacttattctgtgtgctaaactaaatctcaactcagtcccaggaggacacatttcctactacagggcaacccttttctgcccagtgatcttaggttcgattatctatgaagggtagaccatgtggtagtaacatattttccagggaacaaaacaaatcagttttaatagtgatcaaaccccacccagcctctttatgtattaatacccaacttacaaaaccgtatgttaagctgtacaattcctccactggaaatttaagcgcacattattatgagttccttatttcctgataagtcccaatggttacaaaattactcagtttctttgaagaatcaggaagccaccacccatgggcactcaatactgattgtc

SEQ ID NO: 762936 - DNA, 588 bp, Homo sapiens
atgacaataattaagtagggctgcataagtggaagaatggacatataaatgccttttttttttttttttgagacggagtcttcgctctgtcgcccaggctggagtgcagaggtgctatctatgctcactgtaagctccgcctcccgggttcacctcattcttctgcctcagcctccggactggctggtactacaggtgcccaccggctgattttttgtatttttttagtagagatgggatttcacagtgttacccaggatggtctyaatctcctgacctcgtgatccgcccgcgtcggcctccaaaattgctgggattacaggcgtgagccaccgcgcctagccagattttttttttttttcagaggctccctctgtagcccaagctggagtgtagtggcgcgatctcggctcactgcagcctccgcctcccgggttcaagcaattctcctgcctcggcctcctaagtagctgggactacaggcacgcaccactacgcctgtctaatttttgtatttttaatagagacagggtttcaccatgttggcctaggatggtcttgatctgacttcgtcatctgcccgcctct

SEQ ID NO: 762937 - DNA, 590 bp, Homo sapiens
cattgactcagaggatcctcattgagatgagatttccccgacttccttggtaaagcagcatgagcacgttattttatgccatttaatttaaaatgatgcaagcacacattttgtaggagaggtgaaatctgtgtctggggacagcccctgacagacagggtggcatatggcgacatctgtgtggcaggtctggtgggagccatggaaggaccagggcagggcacgcaccctcctaactgaggtctggtgggagccatggaaggaccagggcagggcacgcaccctcctaactgaggtctggtgggagccatggaaggaccagggcagggcaggcaccctcctaactgaggtctgctgggagccatggaaggaccagggcagggcacgcaccctcctaactgaggtctggtgggagctatggaaggaccagggcagggcacrcaccctcctaactgaggtctgctgggagccatggaaggaccagggcagggcatgcaccctcctaactgaggtctgctgggagccatggaaggaccagggcagggcacacaccctcctaactgaggtctgctgggagccatggaaggacc

SEQ ID NO: 762938 - DNA, 597 bp, Homo sapiens
agcatgttttgtgagtgaaaaattctaatttgtaatgcatatcaagtgaaaagcctcagttcagcactcgtcatatccaaaatctgtgttatataataatgtaaaagacatattttcacacatgtagctcaaatgagattcttacttaacatttctctctcttttttttttttttttgagatggagtctcgctctgttgcccaggctggagtgcagtggcgcaatctcagctcactgcaagctctgcctcctgggttcatgccattctcctgtttcagcctcccaagtagctgggactacaggtgcccgccaccacgcccggctaattttttgtatttttagtagagacggggtttcacagtgttagccaggatggtctcgatctcctgacctcgtgatcygcttgtctctgcctcccaaagtgctgggattacaggcgtgagccaccacgcccggcctacattttacaaaatttaactcaatcttttattttaaaaaatgtgcatatactgcctgttcaagtacttaatctttttatttattatttgaaattggaggtccatctttttagattgttagaaggtcttcacgtatttg

SEQ ID NO: 762939 - DNA, 646 bp, Homo sapiens
ctttctttgtcaagacatttttattgtatgccacgacatttttgtaatgttgagcaatttacaaatatacatctgcttaaatatagaaaagagacaagataaaaaggagcaaaagaaaaaagaatggatcaaccaagaacgtcaaacactccaacagttgagaacatttaaagatgtaagttttataaacaatcacctcatctacacttctggggaaataaatgaagaccgctctaaagaggaaagtattaagaacaggtcattcagaacatgwaacatttaaaaaataacattatttctggtatatcaataaaaagcaacaacaaaaatagaatatcagtgattcaaaacccatgatataaaataactgctgtttttgacatcacaacacgcttgggttcctgctctgcactcttcactgagtagtccttactggcactggtggtttagattggcagggaaaactgaaaactgttcaactcccttgactttagctggcatttcctctcatttgtaataaacaattctttaaaatgttatccaggcagcattgtgatataagtgtagtgaaagtgcccagttaaaagtaaaatgtgttgtttttttttttgatatctacaactttcttttttcttttaaagtatat

SEQ ID NO: 762940 - DNA, 646 bp, Homo sapiens
ctttctttgtcaagacatttttattgtatgccacgacatttttgtaatgttgagcaatttacaaatatacatctgcttaaatatagaaaagagacaagataaaaaggagcaaaagaaaaaagaatggatcaaccaagaacgtcaaacactccaacagttgagaacatttaaagatgtaagttttataaacaatcacctcatctacacttctggggaaataaatgaagaccgctctaaagaggaaagtattaagaacaggtcattcagaacatgtaacatttaaaaaataacattatttctggtatatcaataaaaagcaacaacaaaaatagaatatcagtgattcaaaacccatgatataaaataactgctgtttttracatcacaacacgcttgggttcctgctctgcactcttcactgagtagtccttactggcactggtggtttagattggcagggaaaactgaaaactgttcaactcccttgactttagctggcatttcctctcatttgtaataaacaattctttaaaatgttatccaggcagcattgtgatataagtgtagtgaaagtgcccagttaaaagtaaaatgtgttgtttttttttttgatatctacaactttcttttttcttttaaagtatat

SEQ ID NO: 762941 - DNA, 619 bp, Homo sapiens
tatgagtaaatacacataaaagtctgtataaaaatgatatatagaagcttccttttctgtcagaaaaaattaaatttcttagtgttatctttttatgtattcatggatttttaaaaattaagaaaaaaatcaccaaatacaaggtctgaggtgagctgaatattgttatctgtaattgttttgtgtactaaaatatatttagaattattatagctggttattagaaatrgagtttctacctattgtggtttttaaagtacctgtggtccgggggtggtggctcacacctgtaatcccaggactttgggaggccaaggtgggcggatcacttgaggtcaggagttcaagacgagcctagccgacatggcgaaaccccgtctctacaaaatatacaaaaattagctgggcgtggtggcacgtgcctgtaaacccagctacttggcaggctaaggcacgagaattgcttgaacctaggaggcagaagttgtagtgagccaagatcatgcctccgcactccagcctgggtgacagagcaagactctgtctcaaaaaaaataaaaataaagtgcctgtgtatgcagtgggaactcaacaaatagttgttgaatgaataaattaa

SEQ ID NO: 762942 - DNA, 600 bp, Homo sapiens
tgcccaccccaatttcagttttcctctaagagttagccactattatcccttcagagtggatattcaggcttttctttcctggcatggacatacatatgtaaatgtacatatataaaaataattagtgacaccatgcatggtagctcacgcctgtaatcccagcactttgggacrctgaggtgagagaattgcttgaggccatcagtttgaagctgcagtgatctatgattgtgcctctacactccagcctgggtgacagggtgagaccctgtctcttaaaaaaaaattcgtatttggggttagtagtagtacctacctcataggttattatgggatcagtacagtaggccagacaaagtgcgtatgctattattttgcatgtagtaagtaccagcatatactacctgttatccagaaatttgctgaaatgtgccttgtattttctctctttcgattttgatcagtcttcctagaagtcatcagtttgagttttttcaaagaaccagttgttggttttattgattttgtttgttttctttttcattgatttctgctttactctttattatttccttttttctgctggctttgggttccatt

SEQ ID NO: 762943 - DNA, 575 bp, Homo sapiens
ctgtggttccagctaccctggaggctggggtgggaagacagcttgagtctaggaggcagaggtttcattgagccaagatcacaccactgtactccagcctcagtgacagagtgagaccccaccccaggtcaaaaaacaaagtgcacaatggtatatgctatcttttatctaagggagggagaaaatattcctgcctcagcctcccgagtggctgggaytgcaggctgagccaccatgcccggctaatttatttatttattttttttggtggagatggggcttcatgttcgtggggctggtctcaaactcccgacctcaggttatctgcctgcctcgtcctctcagggtgctgggatgggaacaggaattaaaagaaatttaaaaatgtgtaaacaaaaactcagttgtatgtaaaaaaacccaattccccctgagaaagagaagagctagagtccttcaaaaaaaactactacctcctgcttttctatggcagtgagccttatctctcctcccttcccgggcattataaaaaccctaattccctaactgtacaactgcaaggtcactaaacaaac

SEQ ID NO: 762944 - DNA, 600 bp, Homo sapiens
tgcccaccccaatttcagttttcctctaagagttagccactattatcccttcagagtggatattcaggcttttctttcctggcatggacatacatatgtaaatgtacatatataaaaataattagtgacaccatgcatggtagctcacgcctgtaatcccagcactttgggacgctgaggtgagagaattgcttgaggccatcagtttgaagctgcagtgatctatgattgtgcctctacactccagyctgggtgacagggtgagaccctgtctcttaaaaaaaaattcgtatttggggttagtagtagtacctacctcataggttattatgggatcagtacagtaggccagacaaagtgcgtatgctattattttgcatgtagtaagtaccagcatatactacctgttatccagaaatttgctgaaatgtgccttgtattttctctctttcgattttgatcagtcttcctagaagtcatcagtttgagttttttcaaagaaccagttgttggttttattgattttgtttgttttctttttcattgatttctgctttactctttattatttccttttttctgctggctttgggttccatt

SEQ ID NO: 762945 - DNA, 605 bp, Homo sapiens
ttctccatgtttcccctcacctaggtatcaaagtacctacagttatgggtgggtaactagactaaaaatgtacctttcttgctcagattaaagcccggcttattgactcagggcagctttaatcggtttatttggaagctctgcttgttcacaggtacagagcttttgcagaaccgactctgtacctggcagccttgaagggrcttggattcaaagcatattcttgagccacgccatctttaatcaaactgcaggtggaatttgtagctgttagaatagctcctattcctttcatttctttttctgtttttttactcttccatctcagcctaaaaagaaaaacacgttaatttgagccataggaatttagaatttgttttttcttttgcttagatatgtttgactaaagcttcctttttcacaggtttattttttccaacattttattatgaaaaaaatatatacagaaaagttgaaagaattttacagcgcgcacccacatattcaccacctaagattgtgccgctggcatcatcccacgtgctttatcaccgttctctccaccttttcatccttctattcatccatcagtccctcacattttt

SEQ ID NO: 762946 - DNA, 628 bp, Homo sapiens
tccctcttgttccaaagaacccagctattttagatgctacccctagacagagtagaaactctgttgtaatggaataaacatcagagaaggaattaagagccatgggtgtgaatcccacctttggaacagatcagcagtgtaaccatggacaaggcatttctcttctctgggtctcggtctcttcttttgggatacattgctgaaaatacctgctctgcctatctcacagaaatatttattaaatcaggaaacagctgtcaaccatctgctatgtgccaattaccataccagggatgggattacaatgatgaagagaccactctctcaagttgcttatagtcctgtgcagaagacagagagctaaacagacactaataatcctatgtggtaacgtctaagactrttgtccaaagagcccttagattgctgtgagctggaggaaaccacagtacttgtagggcacagacgaacatcatggaagagggaatatttgagaaaagacttgaaggaaatatgttgtgcctataaaaaggaaagggtattccaggcaggaaaaaaatgtatgaaaagacacagatacatgagagttttgttttgtaaaattataagtttttacagatggctggag

SEQ ID NO: 762947 - DNA, 529 bp, Homo sapiens
aggagtggtgagaatctcgctggatccatcctagaactttttctgtggcaaagacatgggggttctcccctgagttagatctctcctggctcttttaaggattctgtattgagtaaaacctcagcaccttcttaaaatccatccattcagtgatttattggtgagcattttaacctgccaggcatagtgtttggaagggagaggtgggaggggaagggggtggtcctaacatgtagtaagtagcttctatgtttctagcacttgaaatgattatttatttatttatttttgagatggcgtcttgctctgttgcccaggctgaagtgtagtggcgtgatctcggctcactgcaacctctgcctcccrggttcaagtgattctcctgcctcagcctcctgagtagctgggactacaggtacctgccaccacgcccagctaatttttgtatttttagtagagacagggtttaacttgttggccaggctagtctcgaactcctgacctcaggtgatctgcctgcttcagcctc

SEQ ID NO: 762948 - DNA, 586 bp, Homo sapiens
ggtattttgtttaatgttcaaaattattttttctattacagaaatagccatgtgaatgatagaaaattaagaaaatacagatttgcaaaaagaagaaaatatctgtacaaaaatcatactgtccagaaatgaccactattttaaatttttgcttatatatctgatatgatttggatctttgtccctgtccaaatctcatgttgaattgtaatccccgatgttggaggtggggcctggtaggaggtgattggatcatgggagcagagttctcatgatgggttataaccatcccctccatgctgtccttgtgatagtgagtgggtgagttattgtgagwtctggttgtttagaagtgtgtagtcatgccagccttgtatcccaggaaggctgtgaggtggaccggcttggacgggtcatccttagggaagctcttcaccttcccacgatgcctgctgctgcgcttccgaggcaggaagccgagggacccatgtctgggagcggagaactttctgtgagacatcacgccatcaaattctctgtggcacgcgctgggcagaaaggctaccatcaccgcactgagatcaac

SEQ ID NO: 762949 - DNA, 654 bp, Homo sapiens
ttgcaaattccattcctatgctttctcgtaataaaaacaggtattttgtttaatgttcaaaattattttttctattacagaaatagccatgtgaatgatagaaaattaagaaaatacagatttgcaaaaagaagaaaatatctgtacaaaaatcatactgtccagaaatgaccactattttaaatttttgcttatatatctgatatgatttggatctttgtccctgtccaaatctcatgttgaattgtaatccccgatgttggaggtggggcctggtaggaggtgattggatcatgggagcagagttctcatgatgggttataaccatcccctccatgctgtccttgtgatagtgagtgggtgagttattgtgagatctggttgtttagaagtgtgtagtcatgccagccttgtatcccaggaaggctgtgaggtggaccggcttggacgggtcatccttagggaagctcttcaccttcccacgatgcctgctgctgcrcttccgaggcaggaagccgagggacccatgtctgggagcggagaactttctgtgagacatcacgccatcaaattctctgtggcacgcgctgggcagaaaggctaccatcaccgcactgagatcaacaagaagatctataagattggccagggcta

SEQ ID NO: 762950 - DNA, 553 bp, Homo sapiens
gcaggtaggttttgttttagtattaatgttttgtatatgcctccgtgtattaaaaagagggaatttgcctgatttgagcttatgagcaaaccccccaaaggatgtagactctgggagaagataccgggaagatgaggagaggccaatttcaccaacagaagggagatggctgcctgccgaaaagaaagcggttagcatgaacgtgcgtcaggagttgcctgttattgttgcaaaatgaaattgtttgctcactgcagatatagcaggtttgtaagcatgctgtcagtgctaaggtttttttttttttttaagtaccaccaaagacaacagcggatggcagtgtctacatattcgtkatgcgctcatagcatttgggtttttgttttaattccctttaaaaagaaagcaatctaatcagctcactcccaggattacagcctgggtgtcaggcagtgaggaagactcagagataagaaagaccctggccttggcttcaggcatccagaaaaggggcacaaagtatagataggcaagcaggatgaagcccagggag

SEQ ID NO: 762951 - DNA, 628 bp, Homo sapiens
ttagtccaccacaagaataatcacaccacatatatacaattccaaggaaaatccaacttccaaaaggaagagattccttctcaccaattcccaccacctggttattcctatgaagccttggtagagtaggttcaactctaattctggacactttgttatatgagcttctgcaaaccctcatcctgctaraatatggtgtaatacatctgtgtctcaatcccaacaaaagacttggtcagcagtggctgcataatctgtggggcacagtgtaaaatgtagaagcagaggcacttgctccaaaagcaggaaaaacgtgccctgcaaggtactgaaatgtaccctcactgttccttcctctctctccctacttgtcacggtgtctttgtttgctatgtatttgtcattctaagtaaagaaaaattaaacttaaattattagcatgaagtgtatcatacatctttatatcgtgcaattccagtttaaacacaaatataagagcatttaactcatgcatagaataaacaaaattatacaatttgtactttgcagcttgtatatgcatgtttatttcattcttaccagaaatatggaaacgctgcagaaaattaactccacttttttatttcac

SEQ ID NO: 762952 - DNA, 623 bp, Homo sapiens
aagatcaacagagaaaatggccttagctcatcagctcggcccctccttctgaggcattagagagcaggccgcctgctcatcctgacgctgtctccactgcccacgccaggagccagtgatggtcctgctctggaagccacccacagagaggcagctcgagggtacgggaggctgacaggtgcccaggtgtcggacgtgacggcccagacacctgcctggctattactgagcctcggtttccatgaactagggacaccagcttggtgttttccggacatgatgaccaccgggagaggaatcccactcaatctgctcaaacaggggacagagggtgaggggatgaggcaggggaggggcaactgaaatctcggggcaggaggacaacaaartggggctgacacttggggccaaccgtggagaacagaagtttgtgtttttctctggctttatcccccatatctgacacacacatacacgcacacacacatcaacaggcacacatgcacacacacattcatgtccacgcatttatgcacacatacacacattcacaccattgcatgtgcgtgcacacacacattcacacccacacaaattcacccacgcacacacacattcacaca

SEQ ID NO: 762953 - DNA, 518 bp, Homo sapiens
gccaggacacctctactctggggatctcgagccaacataggtggtggtcgggagaaagaatggatggaaggtcccattgttgtgcctgatgcaggtactcactctgcagtctcagcccctcacatgcccctctcacccccgagggtggtcctgcaagtgaagcacacacagacccccttccttcagccctgtgatttgagtgcggctctggtggtcgcctccatgcgctttgtcaataccccaccaccagtacccacagtggggtctcactgctcctctgaagccacagaagactgcgttgcccaagagcaggtgcaacccggagcatgggatgtggcattccccaaaacagtaatcacccaagagatcrggagcccctgcctcccatccttcaagggaacacccaaaggcctgccctgcacacttcatcggaatccccagagacctggagccccggctgcctgcagtggtgaccagcagggcaactcctttttatcagcttctccccttccctacct

SEQ ID NO: 762954 - DNA, 551 bp, Homo sapiens
ggtcaccagatgtgtttgcaccctgtccccaggacacggggaacatgcagtcaccagggctcaagatgctgctatggagcagatgaggctaaacagaaaacagtacacatttcctgggtttcagtgagaaactaaaatgctcattcacaaaatctccttccacaataaaaagccaaagctcaaagacacatgtgtttttaaggagcrctcagccttctcccaaacatcagtcataaggacagccacacccctgtttcttaccactgtgtcttggtgatttctgaaatgtttgtggacagtgagggctttcctttccaagggacacctggacctgatcccaggaaagactgcgagcaggactgaccacaggaaaaaaattaacctgaatccatacctcacaccatatacaaaaatcaactcaaaacggatcatggacttacatgtaaaacctaaaattacaaattttctaggagaaaatgtaggaaacaaagtcactatggcctcatttttctgcctctgggcattttctccggccattctctctacctgga

SEQ ID NO: 762955 - DNA, 589 bp, Homo sapiens
aatgcaagtgcacttgaactttattccattgtatggctccattttttttttaagatgtagcctgagcttcaaagcacatcacatattcttgagaaaaatggttggaaataggtttgcagccaccattagaatttgaatgcccagaatgggcggcccagagagacacctccctttatrgagtggggataaaataaaattagtttctctttttcttccattgtgatagcatgcttttttttttaagaatattgactctgtttagtaaatatgaaacatattcattgtgaaaataccccgataatacaaaaaaaagtacaaaaaagccagttaaaaaaaaaaaagaaaaactattcaaaattccaccgctcaaacaatggccaccagtatttggtaaacattattctaagcattcttctatgtgtaaaaatagataaaatgatagtgatgatgaaataaaagaaagataaagggacaaaaatagaaacattatgcacactctttttaatatttaaaagttctagattatattttacttgaagttaatggaataaaaaagaaactaaagtaaaatcggaaggcttgtctcaga

SEQ ID NO: 762956 - DNA, 627 bp, Homo sapiens
ataaagctattctcaacaaattcaaaaaaagaaaaatcataccaactacactctcaaaccacaacattatacaaatagaaatcaatatcaagaagatgtatcaaaaccatacaattaaatgaaacttaaacaatctgctcctgaatgacatttgggtacagagtgattttaaggcacaaataaaaagttctatgaaacaaatgaagacaaagaaagagcataccagaatctctaggacaaagctaaggcagtgttaactggaaatttcatagtgctaatcacctacatcaagttaaaaggatctcagattaacaacctaacatcatacctagaggactagaaaaacaagagcaaaccaaccccaaagctagcaggagaaatgagtaaccaaaaccagagctgaaatgaacaaatttgagacaygaaaatccatacagaagatgaacgaaacaaaaagttggttcttcaagagagtaaacaagattgatagagtgctacccagattaagttaaaaagagagatttaaatcaacacaattagaaatgacaaaagggacattatcactgaccccacagaaatacagaagaacctcacagactgctgtaagcatttctatggataaaaatt

SEQ ID NO: 762957 - DNA, 627 bp, Homo sapiens
ataaagctattctcaacaaattcaaaaaaagaaaaatcataccaactacactctcaaaccacaacattatacaaatagaaatcaatatcaagaagatgtatcaaaaccatacaattaaatgaaacttaaacaatctgctcctgaatgacatttgggtacagagtgattttaaggcacaaataaaaagttctatgaaacaaatgaagacaaagaaagagcataccagaatctctaggacaaagctaaggcagtgttaactggaaatttcatagtgctaatcacctacatcaagttaaaaggatctcagattaacaacctaacatcatacctagaggactagaaaaacaagagcaaaccaaccccaaagctagcaggagaaatgagtaaccaaaaccagagctgaaatgaacaaatttgagacacgaaaatccatacagaagatgaaygaaacaaaaagttggttcttcaagagagtaaacaagattgatagagtgctacccagattaagttaaaaagagagatttaaatcaacacaattagaaatgacaaaagggacattatcactgaccccacagaaatacagaagaacctcacagactgctgtaagcatttctatggataaaaatt

SEQ ID NO: 762958 - DNA, 569 bp, Homo sapiens
tttcctacaagcaagtaactcaaaagaaatgcaaaaaaccaaagagacagtattcagaaaggcaaattacaggaattaagtaatcataacttctgtgttgataaaaactcagaaaaagtaaatgacgtaattatccaaaatgtttaattttgagaaatagaacactatttatgtaaaaracatcttcatatttttgcacttttgttcccctcaactagtattttgaagggtcacaccttcagagcagagagatatgccaacgacagaaatatttaagattccacagaattttagttgatttgttgttggagttaacaataaaaccatatcaagtaatttgaactggatcagttggttgtggatagatgtcaagcaacatacatgacacagctctttaacgttctaggaaagtggctgtccccagctggatacagcatttcgacagcatgtgtgcaaacatagctggttcatccttggtgagtcatttacagccacgagtatacactgcaggtgacacaagaaccagtgcacgattggatgaaccacagaggaggcactttggtgctcaa

SEQ ID NO: 762959 - DNA, 569 bp, Homo sapiens
tttcctacaagcaagtaactcaaaagaaatgcaaaaaaccaaagagacagtattcagaaaggcaaattacaggaattaagtaatcataacttctgtgttgataaaaactcagaaaaagtaaatgacgtaattatccaaaatgtttaattttgagaaatagaacactatttatgtaaaagacatcttcatatttttgcacttttgttcccctcaactagtattttgaagggtcacaccttcagagcagagagatatgccaacgacagaaatatttaarattccacagaattttagttgatttgttgttggagttaacaataaaaccatatcaagtaatttgaactggatcagttggttgtggatagatgtcaagcaacatacatgacacagctctttaacgttctaggaaagtggctgtccccagctggatacagcatttcgacagcatgtgtgcaaacatagctggttcatccttggtgagtcatttacagccacgagtatacactgcaggtgacacaagaaccagtgcacgattggatgaaccacagaggaggcactttggtgctcaa

SEQ ID NO: 762960 - DNA, 432 bp, Homo sapiens
actggcacattattataaaatcgttataggaaaggggtcccacctgatccaggctcccacagagggttcttggatctcatgcaagaaagaattcagagtgagtccataaagtgaaagaaagtttattaagagagtaaaggaataaaagaatggctactcgatagacagagcagcccagagggctgstagttgctcatttttatggttatttcttgatgatattctaatcaaggggtggattattcatgtttccccttttcagaccatacagggtaatttcctgatgttgccaaggcatctgtaaactgtcttggcactggtaagtgtgtagcagtgaggacaaccagagggtcactctcgtcaccatcttggttttggtgggttttggctggtttctttactgcaactcattttatcagcaaggtctttatg

SEQ ID NO: 762961 - DNA, 548 bp, Homo sapiens
ttgctatgaaactgccaaattgttgtacaaagtatttgcactttgatttccattaggaaggtacttaggagaattactggatcatttggtaaatttatgtttaacttgttaagaaactgccaaattgttttagagtatytgtaccatgttatatttctactagcaatggatgagggttccagtttctctacattttcactgatacttattgttgttctttatgattatcagcattcgagtgaatataaagtgatatctcattgtggttttaactcagacgttaccctactgatgcactatgctgagcattatttcatgtgcttattcataaatctttggtgagatgtctatttaaatcttttgaccattttttaattggattatttatcttcttgagttgcaaaagttctttatgtgttctgcttacaagttctttatcagatatatgatttgcaaatgttttatcgctttctatggctttactttttacttactgtggtgtcttttgaatcacaaagtttttaatttcacatttttaaaaaaacatt

SEQ ID NO: 762962 - DNA, 618 bp, Homo sapiens
cccactctcattttttccttaagtatgtagctctctcatgaccctcataaaagaaatagttgatgcttcatgaagattctggcatcaatctcaaatatagttaaatgtaattctaacctacaaagaaaataagtctatttatgcctgaagcccttatggacaggcttatattctttgtcacaagactcctgagccccatgcaaatcaaacaatatggctggacaactctttcaattaccttcaataatctataatagcaaaggcatttcttgaacattgtatagtgggggagttatggcccaggacaatagaattcttttgagggaagtattgcctaagtcacatgctagtttaacaaaattacctgagccaaaatatgttgggaaatcaaggcacactacaggtaggagagaagaagagtgtttccaaatagcagaatccaagactcagagagtgaagtgraggggagaaaagaaggaggaggaaggggaagatgaagggaaataacaaaatagtaaggccaactctctgagatggtgctatttggcaagcggccaaaaattaggttcaggctctagaaaaatagagccaagaaagaggttcaggttctcagaggtt

SEQ ID NO: 762963 - DNA, 667 bp, Homo sapiens
ccactttcctaggagtaagtggaacaacaaacattggaagagccacgggtgagtgctgctagactaagacctttaattcctaatgaaaccttcaatagtcttctgaaaatatctacatgattcgcatatgctatattgtgaaaatacagagaraaagactagacagtcattatattgcctccttatttcctgagcttagaagggctttcattaaagcatcgaaatgtaaaaccatgacagataaataggtaatatggggagaaaattccaatttccctgccaaaaagaaggacattatagttgagaactgtctcagtaaaattgctgtggaaagaaatgttgcatgggacaagtacgaattacttctagcactgcaagtgtcagagtaacaatttgcttctaagtggggatttgagatccctattcaaatcagtggacaaacagttgaactagtgactccatctctttgttattgtaagtattactagtgtagtctctggaaaaacactgaaacctggaagttacaacacaagccagtctgaaaatacatgcaaaatctggacatgggcaccgtggttgacatactctgcccacagcactgtgtatagtctcccaaaccttaatctttaccccttctttcttttctttctcaggtgccacaacttcc

SEQ ID NO: 762964 - DNA, 635 bp, Homo sapiens
tatgatcaatttttggaaagaatgagccatttctggaaatgaagaagtgtaaacaaaaggtattttgaaagcagagagtagcaccctatgttctgctaaatcaaagatcatgatacatatttattgtctattttgaaaggaactactggaccctcagtgggtggaaaaactggagccacaagcagtgaagcgacatcatctgaaggcatgtcaggtgagtagaggatgtcattcygaggctgtggcttttggtgaaaaggacaatatttcatcagacctctgcaaatttcactaagtataaatgccatccaacaaaagatagaatggtatataacttattaacatttttcaagaaaagttttaatttatgctttctctaaatatttccttcaaaactactatggcactgggttgtcacaataatgtatatgcactcccaatactgtgtttgtcaggtgtaacaggacagtctcttggatctactgctggatctgacagtgaaatcacagctaaaacatctttcactggttccagtccacctgggaaactcaccaggccaagcccgggctcacctggtcactttagtggtggtgagtcagaaacctagttggaacttcagattcttataagtttaa

SEQ ID NO: 762965 - DNA, 625 bp, Homo sapiens
aataatgtatatgcactcccaatactgtgtttgtcaggtgtaacaggacagtctcttggatctactgctggatctgacagtgaaatcacagctaaaacatctttcactggttccagtccacctgggaaactcaccaggccaagcccgggctcacctggtcactttagtggtggtgagtcagaaacctagttggaacttcagattcttataagtttaagtgaatttagaagggatgtaattttacaacaaatgatcatggatagtttaagtagaccacctacctctttaaagaaaccctgaaatttgttcaaagagttacttcattgtaaccwtttatgtagactaggcttgccagagaaaatataggaaaccagttaatttgaatttcacacaaatcaggaacagttcttttagaatgagtatgtcccatgcaataatcaaaacacagtgtttattgtttgtcttggattcatatttaactgggtgccctgtatttttatttcatgattttgaaaactctgatgcagactgagcactgttgctcttttcaattaggaacaactgaatggggaaatgtagccaccactggagctgctggtgaaaacacttctggagcattgggtat

SEQ ID NO: 762966 - DNA, 625 bp, Homo sapiens
aataatgtatatgcactcccaatactgtgtttgtcaggtgtaacaggacagtctcttggatctactgctggatctgacagtgaaatcacagctaaaacatctttcactggttccagtccacctgggaaactcaccaggccaagcccgggctcacctggtcactttagtggtggtgagtcagaaacctagttggaacttcagattcttataagtttaagtgaatttagaagggatgtaattttacaacaaatgatcatggatagtttaagtagaccacctacctctttaaagaaaccctgaaatttgttcaaagagttacttcattgtaaccttttatgtagactaggcttgccagagaaaatataggawaccagttaatttgaatttcacacaaatcaggaacagttcttttagaatgagtatgtcccatgcaataatcaaaacacagtgtttattgtttgtcttggattcatatttaactgggtgccctgtatttttatttcatgattttgaaaactctgatgcagactgagcactgttgctcttttcaattaggaacaactgaatggggaaatgtagccaccactggagctgctggtgaaaacacttctggagcattgggtat

SEQ ID NO: 762967 - DNA, 632 bp, Homo sapiens
ttttacattttccactacaatttattttaccatttaaatactgaattcaattttgatttctgaacatggtctcagataaggagtacaacattacttagcttccagtatacatttaaatcgtccaatactaaattctcccatacaaaagaaatactacctttaatgaaataacctgcttatggtattcaagtgataaarttccaatgtattcagatacatttctggacccatttgtctatttttctgatttgtctattcatatgccaattctataatatgtgggctacactgacttgtcagcaatttttaaatatttggttattaaaacagtacagtatcagcacacgaacagtgaagtagatggcaaagcaaagccctctatgctcaatcctagccaggaatccttcttagttataattatcattatcttgttattctctagtagttatgtctttctttctaatgaatatgtaatttacatacagaaaaattgaaaaatagcatgtgtacagtttgatacttttgacaaatgtatatactactcatataatgcacacccagacaagatacagaacatttctaccatccatgtttttgagtcaggcatttattttttatttatccagttccaa

SEQ ID NO: 762968 - DNA, 531 bp, Homo sapiens
atgtccggctaatttttgtatttttaatagagatggggtttcaccatgttggccaggctggtcttgaactcctgacctcaggtgatccacctgcctcggtctcccaaagtgctgggattacaagtgtgagccaccacgccyggcctcaaccgtgaaagtttaatcctgctaccatccttaatcgtgtgtaatagtttttcagtcaaataatctgtaagtaagagatagtattattcctccttttctaaatcttatacatgtaattgttttctgttgtctaattgtattaactaaaatctctagtacagtgttaagtagcatgggctttaaataggcatttttaaacttgtttctcactgtagtcaaatgtctctagtatttctcccattaagtaagataatgacattggagccaaaatatacatttcatcatgttaagaaagtaacattatttcttttttattgacatttaaaatataaattgatgtagaattttatcaaatgccttttcagcatctctggcaaatgatta

SEQ ID NO: 762969 - DNA, 610 bp, Homo sapiens
tcttatgtttttttcttaatgttatctactgaaattttttcatggcattaaatatatctttataaacactttttgtcaatataatcaagttgtttattttattatggctttacccatagaatagtgaaaaaaattatgccctatcaagccttatgcagcttcctttttattttttgcagtcaatataaaagtttatcttaaaaagagttttattaaacattcaaaatatccagttctttacagatggcaggagtccatctctccttactttggaactcttgayagtaacctcttgtagccattccttgcccaggacaggaagaaaaggcatcaagctacatgaccagcctggttctcatacatccttctatttccatgtgcccaagtattctctcccccttctgatcccacgctgggaagaaccaggaagattaatgacatattttacaatagtggtagtgatcagccattgagaactcactttgagccaggcattgtgctaggcactttccaaattatgaaacgatttttcaacaaaatattgaaactttcattcttttgccaaactaaacaagatatgaatactatcgagcattccatttgcctccca

SEQ ID NO: 762970 - DNA, 561 bp, Homo sapiens
acaagctttatttatatacagaaaactgttaagtttcatgaaacataaattatcttcaagcagatagagaacctgaacaaaaagtaaccatgtagtgaggccatgaaacaaaccttaatgtcaaaggatagataacatactgatcaaattctctgaatataatgtaatcaatgacaaaaaagatgctcttcctctacctaaaaatatgtttataaaaattaagaagcacaattctaaacaactaagtaaagagatgaaagcccaataagatcatggaragaaaagagacaagctaaagttcttagcagagttatttttttgcaaggaaatttatgaaacatcaaaatgaatcaacaaagatggttatagaatttcttttgctggaagagagaaaaatgaagataaagtgttcatatctctacaaaaagcagtctaagaagattcttttctctactttaccttccacagccagtatataaaattgttgataggttaagcagttaggagggtgtacctaaaacataaagagcctctctctattttcagtgatggatcaaacag

SEQ ID NO: 762971 - DNA, 632 bp, Homo sapiens
atctccaacagtggaacttgcagataggaacataatggtatttcaaatatggttcaaatgttcttttaagatgccaagagaacacgagtgaagccagttgtcacatagttgtctaagtcaaatcatctgccttcaatagaaaatagcatctctttttccacatatacctcttctcactttataatagaaaggtcttatttgctaaaaggtcaaattaggtaatggacatactatktcagcaatttgtactgacatatccagctgcatgggctatgttatggaagatgaaagtgatacagcacagaaattctgctgattcagaactgccgagttagaacttcactgacagagaagacacaaaaacaattggacagtttaaaaatccttggccatgctcattgcatgaccagatcaatatttacaaatattcaatacacagtttcagtacctgaaaaatttacttatcatctagttcatttattcattcatttcaaaatgcttactgagttccttccatgtgccaggcactggatcacacatatggcccttgccctcaggaggagaaaagcattcaggtggtggaaaaagaggtgatcactgattaggggatcaggaatggcttgatctcctaa

SEQ ID NO: 762972 - DNA, 632 bp, Homo sapiens
atctccaacagtggaacttgcagataggaacataatggtatttcaaatatggttcaaatgttcttttaagatgccaagagaacacgagtgaagccagttgtcacatagttgtctaagtcaaatcatctgccttcaatagaaaatagcatctctttttccacatatacctcttctcactttataatagaaaggtcttatttgctaaaaggtcaaattaggtaatggacatactatgtcagcaatttgtactgacatatccagctgcatgggctatgttatggaagatgaaagtgatacagcacagaaattctgctgattcagaactgccgagttagaacttcactgacagagaagacacaaaaacaattkgacagtttaaaaatccttggccatgctcattgcatgaccagatcaatatttacaaatattcaatacacagtttcagtacctgaaaaatttacttatcatctagttcatttattcattcatttcaaaatgcttactgagttccttccatgtgccaggcactggatcacacatatggcccttgccctcaggaggagaaaagcattcaggtggtggaaaaagaggtgatcactgattaggggatcaggaatggcttgatctcctaa

SEQ ID NO: 762973 - DNA, 632 bp, Homo sapiens
atctccaacagtggaacttgcagataggaacataatggtatttcaaatatggttcaaatgttcttttaagatgccaagagaacacgagtgaagccagttgtcacatagttgtctaagtcaaatcatctgccttcaatagaaaatagcatctctttttccacatatacctcttctcactttataatagaaaggtcttatttgctaaaaggtcaaattaggtaatggacatactatgtcagcaatttgtactgacatatccagctgcatgggctatgttatggaagatgaaagtgatacagcacagaaattctgctgattcagaactgccgagttagaacttcactgacagagaagacacaaaaacaattggacagtttaaaaatccttggccatgctcattkcatgaccagatcaatatttacaaatattcaatacacagtttcagtacctgaaaaatttacttatcatctagttcatttattcattcatttcaaaatgcttactgagttccttccatgtgccaggcactggatcacacatatggcccttgccctcaggaggagaaaagcattcaggtggtggaaaaagaggtgatcactgattaggggatcaggaatggcttgatctcctaa

SEQ ID NO: 762974 - DNA, 632 bp, Homo sapiens
atctccaacagtggaacttgcagataggaacataatggtatttcaaatatggttcaaatgttcttttaagatgccaagagaacacgagtgaagccagttgtcacatagttgtctaagtcaaatcatctgccttcaatagaaaatagcatctctttttccacatatacctcttctcactttataatagaaaggtcttatttgctaaaaggtcaaattaggtaatggacatactatgtcagcaatttgtactgacatatccagctgcatgggctatgttatggaagatgaaagtgatacagcacagaaattctgctgattcagaactgccgagttagaacttcactgacagagaagacacaaaaacaattggacagtttaaaaatccttggccatgctcattgcatgaccagatcaatatttacaaatattcaatacacagtttcagtacctgaaaaatttacttatcatctagttcatttattcattcattkcaaaatgcttactgagttccttccatgtgccaggcactggatcacacatatggcccttgccctcaggaggagaaaagcattcaggtggtggaaaaagaggtgatcactgattaggggatcaggaatggcttgatctcctaa

SEQ ID NO: 762975 - DNA, 538 bp, Homo sapiens
ctaaaaaggtctctctaactccatctcatctccctccaactcatccatatcaactgcaagaaatatctttccaaaatgcaagtatgtttagtgttactcaactgctaaaaacattttgacagtttctaacaaaattttcagattcagctacaaaaatgcctycccctcacatcctatgctgacataccaatatccctcactactgaaactctagtactagcagtttttcacacaggtcatgttatttcacaactgcagggctttgcatatgccactccgtctataagaagctaccttccccacctgactatttggcaaagacctatttatattctgagtctaaactctaatgacttccccctaaaaatagagaataatgtcaattttgcatctatacatctaagaatttaacaaaatttctatcaaaatcgcaacagggtttaaaaccttgattaaatgattattaaattcaactgttaagagtaacaggcaagaatagttaagaaaagaaagcatagccctatcaaatctctaaatg

SEQ ID NO: 762976 - DNA, 538 bp, Homo sapiens
ctaaaaaggtctctctaactccatctcatctccctccaactcatccatatcaactgcaagaaatatctttccaaaatgcaagtatgtttagtgttactcaactgctaaaaacattttgacagtttctaacaaaattttcagattcagctacaaaaatgccttcccctcacatcctatgctgacataccaatatccctcactactgaaactctagtactagcagtttttcacacaggtcatgttatttcacaactgcasggctttgcatatgccactccgtctataagaagctaccttccccacctgactatttggcaaagacctatttatattctgagtctaaactctaatgacttccccctaaaaatagagaataatgtcaattttgcatctatacatctaagaatttaacaaaatttctatcaaaatcgcaacagggtttaaaaccttgattaaatgattattaaattcaactgttaagagtaacaggcaagaatagttaagaaaagaaagcatagccctatcaaatctctaaatg

SEQ ID NO: 762977 - DNA, 528 bp, Homo sapiens
gtaggtaggggctagacatttgtcgagttttcttttttaaaaaaaattctattaagttattctgctaccccatgggaattattaaccattgtcctatctttttatatttgttggtcaatgtattctattttctttcagccattatttttctaatttttgttatwaattaatattgagtctcttaaggttttgtgggtgggtgtgcatacgtgtatgtgcttatattgtatcccattgaaattactgagaatttttttccatataagaaagatgaaacaaaccctaacagaaaccaaatgagtgtatgatggactgctgtttttaatacttaagaaaaaagtgagttttagctgtaactaagaaacaaaaacttgtcctacgtcaagattaaaaaaaacaaaaacttattccttgttttccttgatgtgggataagtgatcacagtaagaaaagaattctttatagtgcaggattggtataatagcacagagggactatcaaagaaagtcatacatggaaaaaatacag

SEQ ID NO: 762978 - DNA, 571 bp, Homo sapiens
ttgacttatggaaaatccctaatttagagaaaaaattataatcactatgatttatctagcacttattatgtgctagcatttttctaagtattttccattattctccatttcatcctaagtggaaaatacttatgagatcagcactatcattaccctaattaacatcaaacacacacacacacacacacacacacccggcacactcagtaaattaaagaactggaacctgataaagtytgtctgattcaataccccttttcttacacacttgtgatgttaattatagagattatttcatggaaggctcagcatgtctcattaatggcctagggatatctggagtccacactctcttagcctcttgatttgacaatctttgcataagatttattgtattaattggaggctgtcttatttttttaagtgaggttttgtaattatagctacatgatttattttcagcagaaaattttaaaatcaacaaaattaatatctcctttttataagacaatttctatgtactctattggcagattacagacacgaatctcaaagtataggaagaaaacta

SEQ ID NO: 762979 - DNA, 571 bp, Homo sapiens
ttgacttatggaaaatccctaatttagagaaaaaattataatcactatgatttatctagcacttattatgtgctagcatttttctaagtattttccattattctccatttcatcctaagtggaaaatacttatgagatcagcactatcattaccctaattaacatcaaacacacacacacacacacacacacacccggcacactcagtaaattaaagaactggaacctgataaagtctgtctgattcaataccccttttcttacacacttgtgatgttaattataragattatttcatggaaggctcagcatgtctcattaatggcctagggatatctggagtccacactctcttagcctcttgatttgacaatctttgcataagatttattgtattaattggaggctgtcttatttttttaagtgaggttttgtaattatagctacatgatttattttcagcagaaaattttaaaatcaacaaaattaatatctcctttttataagacaatttctatgtactctattggcagattacagacacgaatctcaaagtataggaagaaaacta

SEQ ID NO: 762980 - DNA, 634 bp, Homo sapiens
tgatatagtttttggttttattttatatttggatctctaattcggctgggatttatttatttatctttagagacagagtcttactatattgtctaggctagactgcagcgactattcacaggtgtgatcatggtgcactacagccttgaattcctaggctcaagcgatcctcctgcctcagctaccgagtagctgggaatacaagcgtgcaccaccrtacccgacttattatttattttatcaccaaatagcaagccaatttctacaatgctatttatgcaataaatagaacaatttcattctttcctgttgattggtaattattatatgttgagttgttttaaaatcttgtgactttctgtgctctctattctatttcactgaaagctattcttgtcaatatgactccattttaattattgcagatttataatttgtaataactggaaggactagttagtagaatgactttaagaaatatgatctttcagcctgggcaacattgcaaaaccccatctctaaaaaaaatacaaaaaaaattagcagggtgtggtgcatgcctgtagtcccagctactcaggaggctgaggagggaggattgtttcagcccaggaggttgagactgcagtgagct

SEQ ID NO: 762981 - DNA, 611 bp, Homo sapiens
tcatttatttcttagttctgaactgtgtttagagtagcttcagttaacagacaactgacttccaattaaatgacatgttccaatatatcaacaaaatatttatctttgttttctcttcctcttcttccaatttctggaaactctgagggaatagggtgcctaaatatgtgggtgtgcacacacgctcacacacaccctaatggagatacactgaagcaaaatgtccctgtgtttgtgacttctgctctaaaatgtatcttttcagtttgggtaatcatctattttttttttctgttaacattctctgcagctgtatatgacatttttctttggctactttgttttatcattgtacaacttttctctytaggtcaagctcattgtgtgataacccctcatttctggatagtctttcattgtatagacacatatcgtcctgggtagttctcgatttttgttttcagaaacatgcatcaaaagtgtcccccgtttattcccccacaacacacaaaattccaataatcctttcattgctaaatgttgccttcaaatcatttacatgattaggaaaaaaaataatgagaaatctgtgtgcactgttacaaccaagg

SEQ ID NO: 762982 - DNA, 613 bp, Homo sapiens
  misc_feature 223: n = A,T,C or G
ttcttttttgtcacttaaatataatagctgctctaaagttcttgtctccaaatttcaacacataggtcatctcagagttgatgtctattgacttcttcctctctgattaggggtcacatttccttttaaatggttagtgattgtttaatatatgctggatattatgaattcctatggctggtggatatctttcagattctatgagcgtttctttagaggctantgaattgtgttttggtaggaggttcgaatagtagcagagcaggtttatcttttctcccagccttgtttttaaactttcttgggyacaagggaaagtagccttattcctaaggcatggaatatctgagatatctgtaaagtgctcagaaaatctctccaatattgcttgtcttaataattttgtccccattgttctgtgtctgctagggcctctactaagattatagcttcccatgagtttggtgtttggttatttttttttattataattttattttttggtcaggttttgtgacttctctactggtgcatatacagcttattattggaccagtaacttaaggagattcatctagggatttctgatgctccttctttgcacagctccctt

SEQ ID NO: 762983 - DNA, 536 bp, Homo sapiens
tatatacactgagaatcacatcaggtaatgttaaaattttgcttcaaggctattctatttacccacatgtttatactttacattgttgtttcttcattcttaattttcccttcttttatctcctttatgtttgaaaaactttttttaaatttagggtagttctactgggaacaaaaatctcttagttttccttcacctgggaatgtcttttgatttcctacttattttcctgaaggatattttcacttgaaagaagattctgggttaagrgttcttttcttttaacgcttgaacaatgtgtatcatttctttctggcctttgtggtttctgacaagaaacgtactgtcatttgaatccttgctcctctgcaagtagtgcttcatttctctccagctactttcacggtgtttttttgtttggttggttggtggtggtggttgttgttgtttggtcttcagttgtctaaagtgtgattaaaatgtgtctaggcatgaactttttgagatttaccacatttaaggctcacttaccttat

SEQ ID NO: 762984 - DNA, 642 bp, Homo sapiens
ggatgtttttccatttgcttgcctcctctttaatgtttttcagaagtgttttatagatgtctttcacctccttggttaaatatattcccaagtaattttttatggctattgtaaataggattacattcttttaaatttttatttaytttttgttttctcaattttttttaatacatgggggggtcttactatgttgctcaggctggtcttgaacccctagcctcaagcaatcctgccgcttcaaccttcttactagccaggattgcaggtataagccatgtgcccagctgagattgccttcttgacttaattctcagctaactcattattggtgtatacaaatactactgatttttatatgttgattttgtatcctgcgactttattgagtgtatttatcagatccaagagttttttggtagagcgtttaggttttttaagatttaagatcaattcatctgaagagaaacaacgtgatttcctttttttctgatttggatgctttttatttctgtcttttgcgtgattgctctggctagggtttccagtattatgttgaatagaagtggtgaaagtgggcatccttatcttgtttcagtatttagaagaaaggctttcagcttttcaccattcagtatgtta

SEQ ID NO: 762985 - DNA, 642 bp, Homo sapiens
ggatgtttttccatttgcttgcctcctctttaatgtttttcagaagtgttttatagatgtctttcacctccttggttaaatatattcccaagtaattttttatggctattgtaaataggattacattcttttaaatttttatttattttttgttttctcaattttttttaatacatgggggggtcttactatgttgctcaggctggtcttgaacccctagcctcaagcaatcctgccgcttcaaccttcttactagccrggattgcaggtataagccatgtgcccagctgagattgccttcttgacttaattctcagctaactcattattggtgtatacaaatactactgatttttatatgttgattttgtatcctgcgactttattgagtgtatttatcagatccaagagttttttggtagagcgtttaggttttttaagatttaagatcaattcatctgaagagaaacaacgtgatttcctttttttctgatttggatgctttttatttctgtcttttgcgtgattgctctggctagggtttccagtattatgttgaatagaagtggtgaaagtgggcatccttatcttgtttcagtatttagaagaaaggctttcagcttttcaccattcagtatgtta

SEQ ID NO: 762986 - DNA, 641 bp, Homo sapiens
tactttcaacttttctatggctttgaaattttaaaaaaagatgaggagaaagtgttttaaagagaactttattgtgcttcaatttctccaattctaaaatgggaataatagaacttttcatgccttgaagcaggtaggcacagtgggataacatttggcagaatagcagccaagagaattcctaaaaagtgatyttttttttgtcattaaagaagtgatttataatggagaacttttcaaagaacagtttgtctaaggtgatttagcttaaaatttcagttactttttttttttttttaatatggagtcttactctgtctcccaggctggagtgcagtggcgctatctcggctcacttcaacctccaccccctgggttcaagcgattctccagcctcagcctcacgagtagctaggtctacaggtgtgcaccaccgcgtccacttaatttttgtatttttagtagaaatggggttttgccatgttggccaagctggtctcgaactcctgacctcaggtgatctgcccgcctcagcctcccaaggtgctgggattacaggcgtgagccactgcgcccagccagacgtcactttttttttttttttttttaactaagagcatattgcattataattgaacaag

SEQ ID NO: 762987 - DNA, 619 bp, Homo sapiens
tgaaaactttgggattttaatctgtgtgtgcgtgtttgtgtgtgagagagagtgagaaatgtagtgtttcatttcgtatgcattaaactgtcttgccaaaactcagatctaagattgttaaatagatatttggggaatttttttttaatcactttaaatgaaaaacgtcagctttactgggcattctggaagcaaaatatattatgctgatggtaaagtgagaaccttaagagtatactcatgatggtggaaagtgtgatggaccaaaatgcataagctatatacttcctgtgagtagtaattttagttacaatggagtagaaaaatatggtccatttaaacttgtcttytacctcataacggccttgcaagatacttttgaagaagcaaatgtctagagccttactttaagtaagttaaacaacttaagtggatgatttggaataagattgttacatccagctgtagaaaatgtggttttaattgggttgatgtgcatttttgaatatcacctaagacagttaatttttttaaatcttgagaaattacttctttggcattcttgacctgttagctaatataactatagattctgaatacttagcatatactatgctgg

SEQ ID NO: 762988 - DNA, 635 bp, Homo sapiens
ttcaattttctcaatcattttgcataaatgtattaatattttgagtagtaatagttctaaacctgcaggaaggcatcattgtatactgtggtatgtagagaatactactcttacactgctctttatcttaaaatgttttggtatactgtgaatattttcctctaagtatttggtgtattttgacagttattaaaggagaatataaaattaaagattctggtctaaactaagaataatggaaagttgcttygtcctgccttagaggagttttcagttcatcctcttcttgagaaactatgtgttgctgttactaaataaacatttactcaataaacgttttatttcctcaaattatatgtctggattattttagcaatcaaaaacagttgtagaatctttgggattgaggtgcttgagaaccaggagtctaggtggagggcagttcctagattggctaattcagcagctgaacagtgtcatcaagagccttagtaccttctgcctttcattgccattcttaacaagtgagtctgatgtctccccttatggctccaaagtgaccacaaaggttccaggtggtggatgataagaggctgaaatatcttttttttttcttttttataagaggaaggttt

SEQ ID NO: 762989 - DNA, 622 bp, Homo sapiens
cttgagagttactctgataatctagatggcagctaagtgactaatgagcaggtgatgtgtacagcatggatacactggacaaagggatgattcacatcccacagggcagtgtgaggtttcattacactactcagaatggtgtgcagtttaaaacttatgaattgttaggccaggcacagtggctcatgactataatcccagccctttgggaggccgaggtgggtggatcacttgaatccaggagttcgagaccagcttgggcaacatcgtawaacactgtctctaccaaataacataaacattagctgggcatggtggcatgtgcctgtagtcccagctactcaggaagctgaggtggcaggattgcttcaacccaggaggcggaggttgcagtgagccgagatcatgccactgcacttcagcctgggcaacagagtgagacccttcctcaaaaataaataaaaataataaaacttatgaattatttatttctggaatttttcatttaatattttcagactgcagtttactctggacaactgaaaccatggaaagcaaaaccatggctaagaagagaatactgtatttggtttcttagttcaagaatgttttttattattgg

SEQ ID NO: 762990 - DNA, 604 bp, Homo sapiens
actttgttttatgaacaaaattattaaaaatatcatggaaaattaccttcaggctatatgtataaggtgtgtgtgtgtgtgtgtgtgtgtatacatgtatgtatataaaaattaatgtaatgtttagtcctgggtgccatccctaaggtatctaattatgtatatacaaatattccmaaatctgaaaaagtccaaatctaaaacacttctggtctgaaggctttcagataagggatattcaacttgtattagaattccaaatcactaaaaacactctcacccaacttcctacctttaaaggagggtattaaggatacctcagttgagtaaatgtcaaacaactaagttttgtttttgtttcctgatgtttttccatttataaagtaaacatacacttcacatataatactttaaaatatcacaaatgtataattatgtcaccataaatacagtattaaaaacttacaaaacagcagagctgaggagcaagcacatttcatcatcctcttcttgaagcactgaacttattttctttcctgtagctttacttatagatgtcttgagtttcttagctagcttttttggtgtgttggttatagaagat

SEQ ID NO: 762991 - DNA, 629 bp, Homo sapiens
aggttaaaaaagtaaaatgacagaaagcgccacacgatattagaaaaacgtgtgatgctttaagcttgaacttctgaaagttcaagaaataaacctaccatcgttttctcaactgtactttaaacaacatttattgaacaggaattgttcaataaaattggctagccaagttctaatatatatatataaaacataataataattaaccaataataataaatacttaaacctctaatccatagattgcaaatgcaacaatgatagcttattttcttggggaacargagtgggtggggacagagggaacgggaacaggacttttgctgaaaggagggatgacaggaacacagggctgtgggctgaaaagaagaacaaatagaagaaacagcagagaaggcggctggctggggtggggcgggcgcctccctggccctgctccaggactcaggactgggtcccgcctgggccgcccctcctgccaagcccctggcctcttcccagggtgactggcccactcctagaccctaggacatctgaagggcaggagtcccaacggcctgagagggtatgggccaggagcagcacgctgacccatctgggcccaaaagccacctgtgtttgggggctgg

SEQ ID NO: 762992 - DNA, 626 bp, Homo sapiens
attgtattactttgttctcacaatgctataaaggaccacctgagattgggtaatttaagaagaaaagaggtttaattgactcacagttctgcatgctatacaggaagcatggcttggaggcctgaggaaacttacagtcatggcaaaagggtgaagggaaagcaagcatttccttcacatggcgacrgaagagcgagcgaactaatggggaaatgctacacacttttaaacaaccagatctcttgagaactcactatcatgagaatagcaagggggaaatccgcccccatgattcaatcacctcccaccaggtctctcccccagcactggggattacaattcaacatgagatttgggtgggacacagagccaaaccatatcaatgaactttttcttatggtcttgttattaaatcataaacagacttatttgtttctgtttgctttttttctctttgaattaattacttttttggatagatagtgtttctgtgtcctccttcccagtttccaattagtagctcttgtcacggttcccaccccaagaatcagccactattctgacttttttttccactgtaggttaattttgcctgttctggaacttagtataaatagaactataca

SEQ ID NO: 762993 - DNA, 642 bp, Homo sapiens
ctgaaagtaacaaaaaagtctgactcaagtatcttaaaaggagattcatgatctcgtataactgtaaatccaaaggttgtacagccccaagtgtgactctagccatgctgctttgtcattcttgggtccagaaaagacaaaaagaccacctcttcctctgactcattgtagggaaacggaaccttttcaccaaaacttcagaggtctcgttggctagaactgggtcaaaactcctcttaaaccttggtaaagtaaaaggtacctctgtgattagttgatactagtcaggatcaccgcagaactgaggtgagttcgcctttccccgtatcatataggagaagagaggatcactgaccaaacaaggaatctattggctagtggcgyatggggtggatattggagagatagctagagggtctgccaaagagaattttggtaaaggtaaccttgaggaataaatagacttgagtgctactgtgatactgctgctgagttcattccacagccttgctgaaaagagaaccctctaactactaaatgtacacccctttacacttgatccaacaggtgctccctttatcaaaaataatgaggcatgtaacagtaaaacctgggaatttttattgaattttattcattggt

SEQ ID NO: 762994 - DNA, 644 bp, Homo sapiens
aactttccagttagcatggttgtttcaaatttattttcaattattgatagttcagaaaaatttatttcagcttttcaccctgttattagtaatgcaaattttgtggattttagtcaaatttgggaaaacctctgtcatagtgcagtctaagattttatggcatttcaagttttgaggggacagtgaatgatcttaaatactctgaattaatgacccccatgacacagtttgttatcactgtcctcattcattaggataccaasagttttgcattagcttcattgatgtcagtatttcacaagtcagtcagaaatttaaattttctggtatgctcgtatgattaacttctcttcataattagattgttaaacaacccaagagcttattcattaatttcaattggttacgtggccattttttgtcacttttgtttcatagttcattaattttttgtctgaattattttattttagttgtttaatgaattttttccaaaattacaaaagaagtagtctttgctgtatatagaaatcaggcatcataatttttcactaatttttttgaaatgccttttaaaatcatagttaaaatagtgtattcaaacttcaccaaatatgctattctaataaaaaaaagtgcattta

SEQ ID NO: 762995 - DNA, 627 bp, Homo sapiens
gtttcttttaaagttaaatataaacttaccctataatccagcaatcctaattcgagatacttaccctagagaaattaaaacttatatccacacaaacttccatgtaaatgtttatatcgactgtattcatgatcgccccaactggaggaaaactaaatggtgtccaatggatgaatggataaacaaactggtacctgcatataagatgtcmtactattcatcaacagaaaggatggaatactgatacatgcaacaacctggatggatgtcaagggaactatgctaaatgaaaaaagccaatctcaaaaggttacatgctccatgatgcctttacatgacagacttgaaaagacaaaactgtaatgacagagaatagatcagtggttgccagggcctaggagtgacaggagggtgtgactgtacagcatgagggaatttgggggtatggaaactatcctgtatcctgattgtggtggtggttgcatgactacacatacacaaaatcaactttactgtatgttaatttaaaaaataaaatgaaaaacacttctggaaaactataatcatttccaaatcttactggaatcatgtaccttcagcattttcctataatgcaaatggattact

SEQ ID NO: 762996 - DNA, 565 bp, Homo sapiens
taaagtcacttaagtgaactaatggcattttgaagtacataaaatcagatacaagggcagggggtggaaacagctctaggaaaatgtctataataggacacaccctatcctgacagtctccaacgcctgttaaaggagagttaatttaataagctacatttaaaaatcaacagcctataattatctcattccttttatgtgcagttttaggtgacttcctcaaattccccaawcctaaattctatttgcttattttacttctgggccctaaaatcaattactcccctctttccaccaccactaccagtgagaaaaagacagaaaaaggagagccaaggataataagcacgaatcgatgtgatcatagtttttcatgtattagttttaaagcctgttcgtctgagtctccattttctcccatcttcccatgcttgccgtgctgatgtgagtgcgctctctctctctctctgtgtcaatatccatcacacatgtgcacaccaaacactaccagagcctttgggttgtcccctggctctttagttaccctggcccatgcgtcttgatt

SEQ ID NO: 762997 - DNA, 638 bp, Homo sapiens
atgtcagaggttgcagtgaactaagataacaccactgcacaccagcctgggcaacaaagaccccttgtctcagaaaaagaaaatattagccacgatctttcaaaaaatagatttatagttgatttttatgaagaatactgcagtgcttatcaaacttcttagtgatatgtgctattcaaggttgtcaggcaagaaactctcattccaaggacatcacccactttaactcccctgcaccctgatactgcccactactctctgggcgtagaacttggctccattgcctggcttgcctgatcctagctgtgcttaatagctcagcctcgtcgatggacacatggcattccccaccacrggatccatcccgaaacagcagtcaagtgctcctttacaggaatcatactaccaaattcacagtatggggtggtcaactggcatgtattattatttttgtgggtggtttcccatcatcgcttaaggagaacaaccacaccctcttacccgtctggttcgtgtgagaaacagccaggcaccattccatcctccaatccagagactgcgctcttgtggccatgccgtaagactttgagagttaacttgcacaaactttctggtgaaagtcttaaacagtcatatca

SEQ ID NO: 762998 - DNA, 638 bp, Homo sapiens
atgtcagaggttgcagtgaactaagataacaccactgcacaccagcctgggcaacaaagaccccttgtctcagaaaaagaaaatattagccacgatctttcaaaaaatagatttatagttgatttttatgaagaatactgcagtgcttatcaaacttcttagtgatatgtgctattcaaggttgtcaggcaagaaactctcattccaaggacatcacccactttaactcccctgcaccctgatactgcccactactctctgggcgtagaacttggctccattgcctggcttgcctgatcctagctgtgcttaatagctcagcctcgtcgatggacacatggcattccccaccacgggatccatcccgaaacagcagtcaagtgctcctttacaggaatcatactaccaaattcacagtatggggtggtcaactggcatgtattattatttttgtgggtggtttcccatcatcgcttaaggagaacaaccacaccctcttaccmgtctggttcgtgtgagaaacagccaggcaccattccatcctccaatccagagactgcgctcttgtggccatgccgtaagactttgagagttaacttgcacaaactttctggtgaaagtcttaaacagtcatatca

SEQ ID NO: 762999 - DNA, 615 bp, Homo sapiens
agcctagggattctggaccagacactttctgaaaagacccaagatgtgatggcttgttgtcaaaaacaattacagaaaaggtggcatatcccaagccagatggtatatccgatgtgacagttgggtctatgagatgcagttttaatatacagcaggcaaaactgcagtgacaattatataaagcagatgaagctgcttcttgctggtcagcaaacatcagctcagaaccactttacagctctttaccagcaactaagtgcctttatttacagagtgcctgtcacttccctttggctggagagctggtgtattatttagcacgcatttatctggggaaaacatttcaatttaaatcagctggtacaacagtggctcttgccagactgtttccctgtggttcaaaaagatgagaactgagtctgatcttggaagaaagggtgagcagagggaggcartgtccgctctctgagctgcttcagttcatacctgaaaagagggagcatgccatggcatttcccattctgctttcatattgttttgaaatgatgatcttgtagttgcttcctgcttacccttccatgaaaggtaactcctaaggaaaagaaaaaggaataa

SEQ ID NO: 763000 - DNA, 615 bp, Homo sapiens
agcctagggattctggaccagacactttctgaaaagacccaagatgtgatggcttgttgtcaaaaacaattacagaaaaggtggcatatcccaagccagatggtatatccgatgtgacagttgggtctatgagatgcagttttaatatacagcaggcaaaactgcagtgacaattatataaagcagatgaagctgcttcttgctggtcagcaaacatcagctcagaaccactttacagctctttaccagcaactaagtgcctttatttacagagtgcctgtcacttccctttggctggagagctggtgtattatttagcacgcatttatctggggaaaacatttcaatttaaatcagctggtacaacagtggctcttgccagactgtttccctgtggttcaaaaagatgagaactgagtctgatcttggaagaaagggtgagcagagggaggcaakgtccgctctctgagctgcttcagttcatacctgaaaagagggagcatgccatggcatttcccattctgctttcatattgttttgaaatgatgatcttgtagttgcttcctgcttacccttccatgaaaggtaactcctaaggaaaagaaaaaggaataa

SEQ ID NO: 763001 - DNA, 613 bp, Homo sapiens
gaagaaaaagtaaaaacagacagaatcatcttttccttccaaatggatgcagagcagattcatgtccccactcaggctgtgcccggcttgtgacaactgtcgtgaagggaaatcttagcttcagagacagaaagcagattttgggtggtcttggggttggactgaacttatggttttagcatctggctctcacatgccagtttactcctcaaaatttgtgtgcctggttaatgccttttttaagaaaatgtaatttttttttcaggtgagccatacaccagacacattcctatgtaatatcttatttaatctccctgacaacctgctgagggagagttaccaccttcattttacagttgagaaarcagagattcaggggaattaggtacctttcccatagccttatagctagtcaagggcacatggagttgatctccaaacatctgatttcaaagtctatgcttttctcggcacatcagcctgtctcttaaaaggcaagtgttatcctgatgagaatgggcctgaagctatacatgtactttcaagggtcatgggggcacccccaggacaaacactcaaggggatgaaagtgctcaaggtgtgccagcctcac

SEQ ID NO: 763002 - DNA, 696 bp, Homo sapiens
tcctgatgagaatgggcctgaagctatacatgtactttcaagggtcatgggggcacccccaggacaaacactcaaggggatgaaagtgctcaaggtgtgccagcctcacttctaaactggtccttgcacctaaggggctgaagtttgttttcaacggttcttgtctytgtgaatccccattttttgagccccttgaccctagctgttccaacaatgagagatactaggattctgttggcttcagtctttcttgctactaccactggacaaatgagtaaatctgggggcaatgtgaagcactgtgcttagcctgtctctgtgaacagtatgactgttggagtctttcttttctgtttttcttgtgaatatagatgggacttcggagctgtaaggaagagagtggaatatttgagacctagctgttactttctttgtgaagacacttaaataacattttcaggttttatttactccttccatgctcaagcggaagtttccgtgacagcagatgagaatgaagagaccactgtagcgcccaaagcctaggctcagaaaatggtccagagaaattgtcttatagtggggaaaccacagctgtagaatcagagagaagtaaaggaagtcttgtaatcccatggaccctctaagacacctcatgaaattctggataaggataggtcaactaccttatcctgc

SEQ ID NO: 763003 - DNA, 696 bp, Homo sapiens
tcctgatgagaatgggcctgaagctatacatgtactttcaagggtcatgggggcacccccaggacaaacactcaaggggatgaaagtgctcaaggtgtgccagcctcacttctaaactggtccttgcacctaaggggctgaagtttgttttcaacggttcttgtctctgtgaatccccattttttgagccccttgaccctagctgttccaacaatgagagatactaggattctgttggcttcagtctttcttgctactaccactggacaaatgagtaaatctgggggcaatgtgaagcactgtgcttagcctgtctctgtgaacagtatgactgttggagtctttcttttcygtttttcttgtgaatatagatgggacttcggagctgtaaggaagagagtggaatatttgagacctagctgttactttctttgtgaagacacttaaataacattttcaggttttatttactccttccatgctcaagcggaagtttccgtgacagcagatgagaatgaagagaccactgtagcgcccaaagcctaggctcagaaaatggtccagagaaattgtcttatagtggggaaaccacagctgtagaatcagagagaagtaaaggaagtcttgtaatcccatggaccctctaagacacctcatgaaattctggataaggataggtcaactaccttatcctgc

SEQ ID NO: 763004 - DNA, 696 bp, Homo sapiens
tcctgatgagaatgggcctgaagctatacatgtactttcaagggtcatgggggcacccccaggacaaacactcaaggggatgaaagtgctcaaggtgtgccagcctcacttctaaactggtccttgcacctaaggggctgaagtttgttttcaacggttcttgtctctgtgaatccccattttttgagccccttgaccctagctgttccaacaatgagagatactaggattctgttggcttcagtctttcttgctactaccactggacaaatgagtaaatctgggggcaatgtgaagcactgtgcttagcctgtctctgtgaacagtatgactgttggagtctttcttttctgtttttcttgtgaatatagatgggacttcggagctgtaaggaagagagtggaatatttgagacctagctgttactttctttgtgaagacacttaaataacatkttcaggttttatttactccttccatgctcaagcggaagtttccgtgacagcagatgagaatgaagagaccactgtagcgcccaaagcctaggctcagaaaatggtccagagaaattgtcttatagtggggaaaccacagctgtagaatcagagagaagtaaaggaagtcttgtaatcccatggaccctctaagacacctcatgaaattctggataaggataggtcaactaccttatcctgc

SEQ ID NO: 763005 - DNA, 609 bp, Homo sapiens
aaccctaggtcccagatacggcatccagcctgtgacctgccacaagtggtaacatcaggctaaatttaggccaccagggcaaaagtgccatgaatacatcagaatgtacatatatggctgggtgcagtgactcacgcctgtaatcccagcactttgggaggccaaggttggcggatcatgagctcaagaaatcgagaccatcctggccaatatggtgaaaccctgtctctactaaaaatacaaaaaaataactgggtatggtggcgcgaacctatagtcccagctactcgggaggctgaggcaggagaatcgcttgaatctgggaggcagatgtttcagtgagctgatagggctctgcactccagcctggcgacagagcgagactctgtctcaaaaaaacaaaacaaaacaaaaagaatgtacatacgtgaagcagctttgcgagtagaacaatttgcactcctggtcagttggacaacrgctgtttgctaagaattctgactttctgtgctcttgcctgcaactttcccacctctgagacagcctccagcttgatactgtattggctgttaatgctcatttataattaagctgagaacacacatacac

SEQ ID NO: 763006 - DNA, 687 bp, Homo sapiens
cccccaaccccaggatccaatcacctcacaccaggccccttctccaacatcggggacatgagatttgggtggggacacagatccaaaccatattagtggggctgaaacaccagcacgccactgcccacctcccggcatcttgtcacatgacaaaaatacatgccggcttggttaagccacttgacacacagctgagcccatttctgacatatttgtgtttggaatatctcataataaaatgattaaatagaaaacaagggatacataggaaatatttctaagtatacctgtgacagtatttcctgacttacaaacctgtgagttgcaacaatttaaaggaagacttcctattctctttggccaataacattccatgcagcaatttgggcccagcaacaacaagaccaggttcacaaccacagtggaccaacaggccgacacgccctccagggcagtgagcttcagccccggaatgggtttgttcattcagcacacatgcattcatccctaccgtgcacaggccccaagagatacagcagtgagaccrggataataaggtcccctccttccaagaaaagactaatactaattgctagttagtaaaagtcagtttcctaggttgcaagcaacagaaaatctcagctcacctaagaagaaggggttctttagaaggccttaggggttaac

SEQ ID NO: 763007 - DNA, 650 bp, Homo sapiens
ccccaccaacagtgcacactggaggtggggcagggaaataggacaggggagagcagaaatgccacagggagccagttacgcggagtgggggagggtggcacaaggataaaaagtacagtcctcaccactgagaacatcagggaccacttcaggataacggtcttgaagaacaaaggttcacggtagcctcgtggtctgggtgcagttacacattcgcctcctagcaacggaggcctccacattcccctcagcttcaccacgtttatagctaatggattcctcagcccygtggctaaactcacacggtgctgtgcttcttcagttcaaacattccctttctgcttgccgttttggggtctaaaataaacatgtgccctgaagataaaggaagaaatccaaaactgcgtctaatgatatattaatagcacaaaaatgctcaagctgggggcatgtcagaaaaaatgcagtgcaaaggaaaatactgttaaaagctgtgggtgtgaagggaggaaaccgagtcgttttgcagccttgcctctgccccctcacagagcagctgtgctctgggacttggttgctccaccgcgccaggtgggagggaaggcaaaaggaggggaccaccatggatccttccagctccgccctctctc

SEQ ID NO: 763008 - DNA, 507 bp, Homo sapiens
gtggaggcatcaatactgcttgtggatgtcattttgacaatggtgacgtgcaccgggattctaaccttgcctatattcacattatgaatgaaaaaacaaggtaaacccctcttccatttaccagagcttccccagtttcctacctctaatccaacccttagcaatatcttcttcttctctgtcataaagggtaggatccaagcagttaagaacacacttgccttcaaagagtagaatgtgtttgctctgaaggtagyagggtatccaggagaagagatgtgtttaataaagtattgaagagttgcaatgtgggcctgtgaattaaacactagactggggagtggggcaagcatggtgttttcctggcgtcttcctaactggctcacatctgctcccttggaactcaagcatgcgtgtctgtgaatgacgcttgcaccgtgaacatctttacttcccaatgacatgagatgacatctgctttggggacttgaagcccccatatctgac

SEQ ID NO: 763009 - DNA, 625 bp, Homo sapiens
attaatgaggcatctaagaccatcagcagccttgactttcctgctaaataatttacatcttaacctgcagggaatagggggccactgaaatattaagcaggaagactgacatcaccatttttccagaaatgaagtctagagtctttggtgattttartttttttaaaaaaatttctcctttatgtctaacccataaccaagttcccttctttttacactatgtcaattagccagcaggagcctacatctaaatcctgctatacagcaactccagctgtgaaacttttactacagttcttaagatttttcagcctcagtttcctgctctgtaaaatagggagaataaaagtacccagtatgtaggttgcattgaggctccagtggataatggtatataagctcatgcctggctcatggtaggcacccagtgtgatgtgttaaattgtccccgcaaattcaacgttaagacgttgaagtcttaactgccaacatctaagaatgtgactttatttgaagatggaatatttgcagagggaatcaagttaaagtcaggtcctcagagtgggctgtaagccagtatgactggagtgtttacaggaagaggagtatgcatgtttggacacag

SEQ ID NO: 763010 - DNA, 659 bp, Homo sapiens
taggtcacacaggtagtacaggaggatccaggattattttattttatgtttaagatggagttttactcttgttgcgtaggctggagtgcaatggcactatctcggctcaccgcaacctctgcctccagggttcaagcaattgtcctgcctcagcctcccaagttgctgagattacaagcgcctgccatcatactcggctaatttcgtatttttagtagagacagggtttctccatgttgatcagacwggtcttgaactcctgacctcaggtgatctgcccaccttggcctcccaaagtgctggaattacagggttcagccaccactccaggccagatccaggattttacacttagtaaactgcagagactgtgctcttatgacacattactacatgctaagagtcacacaacaccttgtccaagagcactctctccacttggctgcatgcatgggcctcccagcctaatgtcttgtccacagggcatcactaccatcactaggcacaagtagtgcatgcaacctacagcagccacccagcctacatcacagcacacatacttctgagcagaagagcagaccttcaagcctagagatgcaacactgttttcccaggaaccgacaggccttgcctcttctcccaagagatttataattaag

SEQ ID NO: 763011 - DNA, 413 bp, Homo sapiens
acacacagagtcagggccagggtaggaaatacataagttgaccaggaacaccttgtcacctcacaaagcaaggaatctctccatccatctgaacaaggagacagcagaaagacattcccactggccaacaacagagcttcagaatggacatttaraatgatcattagtctcctttggaatatgcaagcaaactaactcaaacggatttgaaaactggaaaaaaatgaaggaagatacagatgcccctatttttctcacatgaactctaccttggggtaagcaaagaatcagtaaaagatttttctctgtacaagtattctatctaataaatgaaaaaggagtgatggtaatggttgctagtgactgataaaaatttccaaaaaggacttcaataaagaaaagcattatgtggt

SEQ ID NO: 763012 - DNA, 508 bp, Homo sapiens
tagttttccagtggagcaacaaatgcatactatatttctgctattgtttcttattaaatattcatatgtatattttgtgtttgcttcataactggccatttactggtgcttaacaagcataggcagtcccgctgaagagaaataacaccaaacaacagtaaacaaaaaagcagacgaatgaaaaaagatatcttatttctgcagccgttacatttaaaaagtgcatttaacatttttaatacagtccatatttcataaatcycacatgttgacatgtcctagagaaagatggatgggttgacttggaggtatgcttctatctagttttatgtgtgcatctggcagagctaatctttacttccctttagcagaacacaaaaatgtaattctctaataactgacataactgcatcattttccaatatggactgcattattaaatcacagagacaagcaaaaccagagtagtggggaagcttgacttctgcttgatatcagaccataaaat

SEQ ID NO: 763013 - DNA, 519 bp, Homo sapiens
taagaattgcttgttaacttgcttctctttcagactaaccaataaagtctgtctttctccccccaagacacattgaaatgcattccaagacaatacactttgctctaattaaaacatggaattatttttcttcctggagcattttcacatccattgtgatatctgcgactttttcagctgatgaatatttccaaagaaaagcttatgctaggttagcagatgtgcattctgaaaactccccaaatttgggataaactctcccagcctaaaagaaaatgtacacactggatcctgtaattagatgaaagctcagtgcttcctctttcaaaaacacctcrattgcagtggatctcttataaaattccatgaagaaagtgttctaagactcatctcactcaataatgacataacaatgatttatatacagtgtagattacccaaaatattaatctgagaaacttacttgtgctgatatgatcagacttgctgctctttggggctggcctttcacactgtgtg

SEQ ID NO: 763014 - DNA, 575 bp, Homo sapiens
acatgtatcttcatcacagttctattcacaatagcaaagacatggatccaacctagatggccatcaatggtagactggataaagaaaaatgttatacatatacaccatggaatactgcacaacaattaaaaaaagttagcttatgtccttctcagtaacatggatggagctggaggtcatttttctaagagaactaatgaactaaccaaatactacatgttcttacttataagtgagagttaaacattgagtacacatggacacaaagaagggaatactagacactgaggtctacttgaaggtggaaggtgggaggagggtgaggatcaraaaaactactatttggtactatgcttattacctgggtgacaaaataatctatacatcaaacctccatgacatgcagtttacctatataacaaacctgctcatgtgcccccaaactgcaataaaagttaagaaataaaaataagaataaaaagtaaacattcaattcattgcaacatgattaaaatataatctaaaaaatcttaaattatggcattcacaaaggactaagatttgacccattcatg

SEQ ID NO: 763015 - DNA, 620 bp, Homo sapiens
aaaagaaaaaaaaatggccagaatttgaggtactggaagcctaagtccagtccttcctcggtctaacaatatgacctcacctgagtttcctgattaagttctccaagatatcctttggccatctttgaactgaggcagttacattaaatcatgcccaagattatgtcatgattccttcctcacccaccaatttccaatggtgccctctatctaggtttagcaccttcttttagtaaaatgaygtaaatgataattacgatgttgataaacactcatttttcagtgtctcctacatgccaggcacatgggtttttggtatagtcagaggcattagatggtgttaccctctttttatagataaataaactgatgcacatagaggttaagcaattgccaaggcttgcacacaaacaagaggtagaacagaacttcaaatccaaataggcctaactctagaggataaactcttatttttcatatttagtgattcataaatacgttcaggaaaacaaatctacaaagtgatttgaatatctttgctgttctctttcctttctgtgtatttaaaatggaaagtatcccatctctgtggacatcttaggacctacccagcagttgga

SEQ ID NO: 763016 - DNA, 573 bp, Homo sapiens
gtgattacatcggtatagcactggaggctatatgagtaagccacaaactttctcattaatgcagaacattgtcaaaccaacaaactgtgtatgccacccagaaggactgctgagagcagtcaatgatccaggcacaaatgtttcttatgattaggtataattgaagcctgtcagtaacaatacaaacctgtgatcaattaagcagtctacctgctcttgttacccaataaataggaagggctgtagaagctcggcagttgcctttgctcactagaagcagagagctctcttcttcttcccctggccctttccttaaagcagtttcttttgtcttaagttttcatttctaagtttgtcccttcattcagtcttgtaatgacggtctyaatcactaacagtagtaactgctgtaatgacggtctcaagtagtcaaagtggcagtcagccacatgtggtgagcagaggactcatacccctgcaccagactttagtgttgtggaaagaagcttccctgtacacgtagcagaacaaacccaggtattttctgcatgcctgagcaggtgagcaaacaac

SEQ ID NO: 763017 - DNA, 590 bp, Homo sapiens
cctgttttctatatctgggatggcccatagcatatatcgccagaggcatagttgtgcctggcttgtacttgaatattcatgcattagcatgccccaaaatcatggggaatggagcgtggtaaaacatcgccataaacttcagagtgggcaagattaactcctttgccctctctttatacatgtattttttaatacttaataaataaaaccaaaagtatttgaatgggtgtaagtagaaaacttttaactactttagaacacctcckattctaaccagtagcttctcatatcaataggatgtctgcaagtgaggagatggggtgaaatgctactaaatagccaattgagcatcatatttgggacttcttatgtgttaagtttcttgggtacctgcccccctgtattcacttagatgtagaagtggcaagacagtatatatggcattatcatgtgttacttgatttcatgcaaccatgagaggacactcaagattattcttgtcctggcgcttcccctccatacatgtggttttctcaatacccccagagtttaaaaagaccagaattctgtctctccaagaagcatagtca

SEQ ID NO: 763018 - DNA, 569 bp, Homo sapiens
aaaaattggggtcattttatcactatcttattttccatttccaaccacaaatttatcaatttatatatagtaaatgtcaaataataaatgcaacaagagtcaaaaaatttaactcagtctgctgcccaaagggtcaacgttattcctagggagtggcaggcccagggtaaacagagtgtataacaatttcacctcttaattatggtaatcatattatttagctagtgacattgaacaaactccttggtatttccattaatgatcttgtttaatgtacacactgatcctagcattctatacaggatcactgtgtacattaaacaagatmattaatgaatagtgcataacacacgcataactctcaattttgtgaaagggttgatgtttttcttactttcaatctgactgtttcataacagctttaagaattttcactaagttcagtaaggtcaaaatggtttaaataacacaggcttaaagccaagtggtgacggggtataaaagtcagtataattagattttttttccctgttgaataaactaggcccaaggtgatggcattcatgctt

SEQ ID NO: 763019 - DNA, 612 bp, Homo sapiens
agcttgccaggagactatagtcactgacatatgtttcacacttccattacccctaaatgtactttttatcctccctaaaagcttaggttaattgaccttactttgttaatgaatgtgttagtttatgatatgctagctatgatattgcttttcgatagaaatataatggtatcatatagttataattagcaacacctctggaaaacaaaagcgttttttgtctgtaagttgtgaacatgttggtagacaggataaaccttttccaaatgctatttgttccaactttttcttttttgcaaatttgtaaataatacaratgtctactgccaaagaaggacaacttattcaatccatcagttaatgagcatttgttgtgacaaactgaactagtcattcgggcaaaaaaggcaaagaacagtctcttataaagaaatcctgtagtgaggggacaaatttcagatgtggttccaaatgttaagacagattttgttatatatgtgtgtgtgtgtggtatgtggccactagccactttgttcttgtgtagctagaattccttgttcctaaagcaaatattaccttctaattataatctctgtaaataatcccccaggt

SEQ ID NO: 763020 - DNA, 698 bp, Homo sapiens
agtccctgaaaaatgcttgtgagtggatccagtgctagatgatatcagactcctggcatatgatgacacatatcagtgtgtatgcattctgatggaaagcaatgtgtgaaatgctatgacattatttgaataaacaaccttttttattaaacatgctttatccaacttaagaaaatttaagcttagttttagatacccacttctctgtccaagtaagtcatgatagctgtaggtgggacatgtgcatggaatgtgaataatcacccttctggatgattgattgcttcagttcactgaaagtgtttgtttacaagtttaagcagtctgtggaatttggcatgacaggccccctttctcttgccttcaaggmggctagagcttcactgggacaagaaatatcacaaatactgagagaattgctaaaggctatgtaaagcttccagcatagcccatctttcatagaaatattgatatagtagacataataaatattgcataaccttcataattttggcagtggaagttgaagctgataactttcactttttattatttaatttttttccctctggaatctccaagtctatacagtttgaggatttgtttaaatcatgagaatgaataaggaaggttctgtaggttttataggaacgcatatgaagtataatatatactatggagcactcgtattttttttc

SEQ ID NO: 763021 - DNA, 563 bp, Homo sapiens
gcaacatcagatattttttgtttgattcactgtttaaattcatacaaggtgatcaatagatttctgttcagtgaatcatatattattattggtgttaatttaagacttgtctatacattagactgtaaggtacataaaaagaagaacaacgtctgttttgctcaccagtgtatttttaatacctagcattgtcacaggctagaaagttttttaaatatcattttaccaataaataaatgaatagatggattgtacttcagaatgaattatttcaaaagagatttaaaagcccgtcaccttgaaagtggcttataaacatgcaactaaatgtgaatcaaatcaattatttattgataaaagtaataataacatgatttaatgtaaaaraatatatcattacagaaaatcacttagctattcaaaataaaacattcaaagataaagtaaatcttgtaaacacaacactgggtgacatacagcaaatttcagaaaaatacatgtattgtgatatctaccttatgaatgtaaagcatgcaatatgactcaatttattgctaagagag

SEQ ID NO: 763022 - DNA, 628 bp, Homo sapiens
agtatgggagaaaatattcccaaactgtgcatccaacaaaggcctaatttccagaatccataaagaacttaaacaattgaacaagcaaaaaacaaccccattaaaaatgcatgaaagacatagacagacacttctcaaatgaagacgtacaagcagccagcaaacatgaaaaagtgctcatcatgactaatcattagagaaatgcaaatcaaaaccacaatgagatactacctcacaccattcagaatgactcttactaaaaagacaaaaacaacagatatgatgaagctgcagagaaaaggaaacatgtatacactgttggtgggaatgtaaactagttcagccactatgaacagtagtttggagatttctcaaagaacttaaaacagaactaccatttgatgcagcaatggcattactggagatatatatatatatacacaaattattctaccaaaaagacacatgcacttgcatgttcatcgtarcaccacttacaataaatagcaaagacatggaatcaacctaggtgctcatcagtggtgggttgaataaagaaaatgtggtacatatatgccatgaaatactatacagccataaaaaagacccaaatcctgtcctttgcagc

SEQ ID NO: 763023 - DNA, 620 bp, Homo sapiens
ggagaatgtactcctgtattacttgtgctcctcaaaagcaaatgcctatacatgtatcactcgcatcacagcacgacctgagatctatttctacttctacccttagcttatttgagcattcattgttaaacagaaatggtttacctgggactggcttttcccctcttctgtgtgaccctggttgaattataccattaatctgggcttcctttttctcatttgtaaaataagggagttgagcctgttggtgtaaaagaccttcccagcactgacattctgtgattctattacaggttcccttcatgctctgaggctctgggaatccctgctaggtaaatgacgaagggtggggtggggggatctctttccagagaaagagagcaaaatgtaaygttccacactcttacctgaagtccactatttcaactgaagtaaaataacgacccagagagggcgatgtactgtacacatctgtgagctaaacaaacagaagcaaattaaaccacacacattaccgacagatcatattacacatcacctgacaaagcaaaactgcttctaaggcagaggagattccactccagcctggaatcaacgttatctggaagctctggatcaag

SEQ ID NO: 763024 - DNA, 620 bp, Homo sapiens
ggagaatgtactcctgtattacttgtgctcctcaaaagcaaatgcctatacatgtatcactcgcatcacagcacgacctgagatctatttctacttctacccttagcttatttgagcattcattgttaaacagaaatggtttacctgggactggcttttcccctcttctgtgtgaccctggttgaattataccattaatctgggcttcctttttctcatttgtaaaataagggagttgagcctgttggtgtaaaagaccttcccagcactgacattctgtgattctattacaggttcccttcatgctctgaggctctgggaatccctgctaggtaaatgacgaagggtggggtggggggatctctttccagagaaagagagcaaaatgtaatgttccacactcttacctgaagtccactatttcaactgaagtaaaataacgacycagagagggcgatgtactgtacacatctgtgagctaaacaaacagaagcaaattaaaccacacacattaccgacagatcatattacacatcacctgacaaagcaaaactgcttctaaggcagaggagattccactccagcctggaatcaacgttatctggaagctctggatcaag

SEQ ID NO: 763025 - DNA, 574 bp, Homo sapiens
gatactaacgtaattgaaaagaatgaagtcattcaattatctgatattcaatataatatgcggtaaataaatggaaaatgttgaatatgtatatgacttgattcatttataattgaaaaaatatttattcaacatctgctattgttgttaaatgccaaagataaaccataaagaaatactggtctgccctcaaggctgcagcagactagtgggatgaaacatgtaaataccaattgcagtaaaacgtggtaagtgttgccacagagataataaatgagagggctccctggactcaaaaaaataagcatttaatatagtcttattgtgatatctatgtgtgacactttacagcacamattactgagtaattcaggctcttgaactcctattttacatcaacatgttcactgtttagacctgatttagggaaacagtatgatctatttaaccggatagtgaggcagcttggctttgaatcccaactctgtaatttatgagtcaaatgaccttgcataaattatttaatttctctttgttttattttcctaacctgcatcgtgaatataacaacagc

SEQ ID NO: 763026 - DNA, 537 bp, Homo sapiens
atgaagcttagtttggctggatatcaaattctgggttgaaaattcttttctctgagaatgttgaatattggccccccactctgttctggcttgtagaatttctgccgtgagatcagctgttagtctgacggtcttccctttgtgggyaacccaacttttctctctggctgcccttaacattttttctttcatttcaactttggtgaatctgacaattatgtgtcttggagttgctcttctcgaggagtatctttgtggcattctctgtatttcctgaatttgaatgttggcctgccttgctagattgaggaagttctcctagataatatcctgcagagtgttttccaacttggttccattctcctcgtcactttcaggtataccaatcagacgtagatttggtcttttcacatagtcccatatttcttggagactttgttcatttctttttattctgttttctctaaacttctcttctcacttcatttcattcatttgatcttccatcactgataccctttcttccagttgattgaa

SEQ ID NO: 763027 - DNA, 537 bp, Homo sapiens
atgaagcttagtttggctggatatcaaattctgggttgaaaattcttttctctgagaatgttgaatattggccccccactctgttctggcttgtagaatttctgccgtgagatcagctgttagtctgacggtcttccctttgtgggcaacccaacttttctctctggctgcccttaacattttttctttcatttcaacttyggtgaatctgacaattatgtgtcttggagttgctcttctcgaggagtatctttgtggcattctctgtatttcctgaatttgaatgttggcctgccttgctagattgaggaagttctcctagataatatcctgcagagtgttttccaacttggttccattctcctcgtcactttcaggtataccaatcagacgtagatttggtcttttcacatagtcccatatttcttggagactttgttcatttctttttattctgttttctctaaacttctcttctcacttcatttcattcatttgatcttccatcactgataccctttcttccagttgattgaa

SEQ ID NO: 763028 - DNA, 554 bp, Homo sapiens
acataaatgtcttcaattttcttgggtataaacttaggagtggaattactatgttatatggtgactctgtttaactttttatttgacctgctgctgagttaggtcacatttattctttaattgtttgagtatttccatgtcagtattgaacattacatttatttcactgttaaagatatccccagcctggcgcagcgactcatgcctgtactcccakcacttttggaggcctaggtgggtggattgcttgagcccagaagttcaagatcagcctggacaacatggtgaaaccccatctctaaaaaataaaaataaaaaaataccagaaatttgtcagggcacggtgctatgctcctgtagtcccagctaatcaagaggctgaggtgggaggatcacctgaatctggaaggtagaggctgcagtgagctgtgattgcatcatgtactccagcctgggtgacagagcaagaccctgtctcacaaaaaacacaaaaagaaaaaagaaatcccctgatcatatgaccctctatcctactattttcttttagtgcttag

SEQ ID NO: 763029 - DNA, 605 bp, Homo sapiens
cagagacgatcataatgatatttcgtctccaaatatctcgtgtcttctaatgtgatagaaaagaaacaaacaaacatctactgcttttcatttggaagacacacatgccagatgtggttaaagtttgtccatggaamgtgaaatttcaaattgtgaacataccccaaagaaaatattaaggacaaacgcataacaactaaacattaatgaatactgttgtttatttcttctccctttccttcatattttccgtaaaagttttaaagattaacattttaatattttatcaaagggctcatgattatttgacattgtctgataagatgtgtctaaacaagaaatatatatatatatattgtatatatatgcatatgcacacatacatatttatcatgggtgatgtatcacatggaggtcaaattgtgctcccttttctaggaagggacacttttccctaaaatttagccagtatgctgcacgtaggccaatgcagctagaaaaagtctcactcactctcaagggaaaggggcgggggaacaagactattgccaatcaaacaacacctgttaaatctgcctacttgggcttacattacaatgacccat

SEQ ID NO: 763030 - DNA, 543 bp, Homo sapiens
aaatgcaaatacgccattttctctcagggactcgagcatctgaggattttggtatccacggaggtcctagagccaatcacctgtgaggatactgaggggcaactgtatttcacctttccctcagccttccaggcctctcactttcacaaggtggcatcactgagtttgaggatgcagctccaccttacctcttcagtggctcttctcccacttgcttacaataattgctgtttgccygcccctctgcctttctctcccttgcttttgtgtctttgtattcccgtcttctgggagaggcttgttgaatgaatggatgataggtacatacacgtgttcaggaaggctcctttttgtctcttctcctcagggccgcccaataactccagtatacacggtggctccaaacgttcagagaattcctactgccgggatctacggggccagttacgtgccatttgctgctccagctacagccacgatcgccacactacagaagaacgcggcagccgcggccgccatgtatggaggatacgcaggctacat

SEQ ID NO: 763031 - DNA, 543 bp, Homo sapiens
aaatgcaaatacgccattttctctcagggactcgagcatctgaggattttggtatccacggaggtcctagagccaatcacctgtgaggatactgaggggcaactgtatttcacctttccctcagccttccaggcctctcactttcacaaggtggcatcactgagtttgaggatgcagctccaccttacctcttcagtggctcttctcccacttgcttacaataattgctgtttgcccgcccctctgcctttctctcccttgcttttgtgtctttgtattcccgtcttctgggagaggcttgttgaatgaatggatgataggtacatacacgtgttcaggaaggctcctttttgtctcttctcctcagggccgcccaataactccagtatacacggtggctccaaacgttcagagaattcctactgccgggatctacggggccagttacgtgccatttgctgctccagctacagccacgatcgccacactacagaagaacgcggcagccgcggccgccrtgtatggaggatacgcaggctacat

SEQ ID NO: 763032 - DNA, 627 bp, Homo sapiens
cctttctttatccttgaccttcaggaatttgattattaaatgccttgaggtagtcctcttgtcgttaaatcttcttggtgttctatgaccttcttgtacttgaatattgatatattcctctaggtttgggacattctgttttattaattctttgaataaactttctaccctgatctctctctctctacctcctctttaaggccaataaccttagatttgcccctttggacctattttctagatctcgtaagcacscttcattgttttttattcttttttcttttgtctcctctgactgtattttcaaatagcctgtcttcaggctcactaattctttcttctgcttgatgaattctgctgttaagagacactgatgcattcttccacatgtcaattgcatttttcagctccagaatttctgctcgactctttccaattatgttaacctctttgttaaacttatctgataggattctgaatttgttctctgtgttatcttggatttagttgagcttcctcaaaacaactcttttgaattctctatccaaaaggtcacacatctctgtgtctccgggattagtcactggtgtcttatttagatcatttggtaaagtcatgttttcctgg

SEQ ID NO: 763033 - DNA, 583 bp, Homo sapiens
gaatctgcattctccttgcctattttaaggttttgatgttgacactaatttgtgaaatccctcctgtggtgtgatatttcgttttccttgctttttgttaggacaagaatgcttcagctcttaatttaaaattatgtttctccctcctaggttgagcgaacttagaatgcattctctgacatatccaagtttttgttaatatgaatttggggaaaaaagcatacttaattagctaagacttcttattctaggcttgaccctgtgttcgacatctattgaatttgtagttgcatgggctgctctctgacactggttactgacctggaagctatattaacgttaggggaggtggtgtatgagcattagaggtatccttgcaaggaaggacttgtcttawctcaatacgtcttttttttttgcgcacaagaaagtcagtgtttgagtcttctaaaatcttcctatttccaagttgcagagtaccattgattcctaaacaaagacctaatttttgactcagagacgtggcaaggtagtgaatcaccattataatttaacaatcttcaagataaaattatctctctga

SEQ ID NO: 763034 - DNA, 350 bp, Homo sapiens
atactctttcctttcaagtgaaaaaaaaaaaaaacagtatggcatattctctaacaaacacagaatttctaatatttgcggttttccttccttctttccatcttcctttgtcttctcttcccttcccttgccttcttccttcctttcttcttttcctcttccttttttcttttttyttttcctttctttctttttcttttttctccttccttccttctttccttcttccctcttattcttccttccctcctccctcccttcctttctccctcccttttcttccttcttttctcgtattctttctttctttctcacgttcttgctttctttccttttttctcccttcctcc

SEQ ID NO: 763035 - DNA, 590 bp, Homo sapiens
acctttttttttgattgaccggtttggaaacactctgtctttaaaatctggaagtgaacatttggagtgctttgaggcctatggtggaaaaggaaatatcttcacataaaaagtatacagaagcattctctaagactactttgtgatgtgtgcattcaactcatggagttgaasagactttatcttagaagagttttgaaacactcttttagtagaatctgcaggtggagatttggacagctttgaggccttccttggaaactggagtatcttcacataatcactagacagatgctttctcagaaacatctttgtgctgtgtggattgaacatacagatttgaaactttcttttgatagagcagctttgacacactctttttgtagaatctgcaagtggacatttggagcgctttgaggtctatggtggaaaaggaaatatcttcatataaaacgtggaaagaagcattctcagaaacccctttgtaatgtgtgcatttaactcacagagttgaaacttttttttgatagaacagctttgaaacacactttttgtaaaatctgcaattggacatttggagagctttgagg

SEQ ID NO: 763036 - DNA, 545 bp, Homo sapiens
caaacgctacctttggcctagcacacaccttgatcaatttggcaagcaggaactggaatatagcccgaggctctctcccttttcccctgaattcccagtctgtcccaatatccagctgttgatggtccaggaaacacaatgcaataaacattatgccagattatgcctcctttctaattgctcacatcaatagctccatttccaccatgttcagacttttgtgttgaagtgccatgtaaatgcattaaaaaatcattacacaccagaggccatatgtgggcagaaataattctgattwagtgtaaaagggaaagaattaagtcttgggtatcaagggtagtgtttgcacaccacacccaggggcaaacaagggtgcagctgaagacagggcgctgtctcaggagggggtggctggccccattggggtggggctggcattcccagggttgtgtgggtttggctgcatgtggggacccagagcccagacgaatcatggcaaaaggcccagaggaggcaaaatgtccccatgagctgccatgagaaag

SEQ ID NO: 763037 - DNA, 545 bp, Homo sapiens
caaacgctacctttggcctagcacacaccttgatcaatttggcaagcaggaactggaatatagcccgaggctctctcccttttcccctgaattcccagtctgtcccaatatccagctgttgatggtccaggaaacacaatgcaataaacattatgccagattatgcctcctttctaattgctcacatcaatagctccatttccaccatgttcagacttttgtgttgaagtgccatgtaaatgcattaaaaaatcattacacaccagaggccatatgtgggcagaaataattctgattaagtgtaaaagggaaagaattaagtcttgggtatcaagggtagtgtttgcacacyacacccaggggcaaacaagggtgcagctgaagacagggcgctgtctcaggagggggtggctggccccattggggtggggctggcattcccagggttgtgtgggtttggctgcatgtggggacccagagcccagacgaatcatggcaaaaggcccagaggaggcaaaatgtccccatgagctgccatgagaaag

SEQ ID NO: 763038 - DNA, 545 bp, Homo sapiens
caaacgctacctttggcctagcacacaccttgatcaatttggcaagcaggaactggaatatagcccgaggctctctcccttttcccctgaattcccagtctgtcccaatatccagctgttgatggtccaggaaacacaatgcaataaacattatgccagattatgcctcctttctaattgctcacatcaatagctccatttccaccatgttcagacttttgtgttgaagtgccatgtaaatgcattaaaaaatcattacacaccagaggccatatgtgggcagaaataattctgattaagtgtaaaagggaaagaattaagtcttgggtatcaagggtagtgtttgcacaccacacccaggggcaaacaagggtgcagctgaagacagggcgctgtctcaggaggsggtggctggccccattggggtggggctggcattcccagggttgtgtgggtttggctgcatgtggggacccagagcccagacgaatcatggcaaaaggcccagaggaggcaaaatgtccccatgagctgccatgagaaag

SEQ ID NO: 763039 - DNA, 657 bp, Homo sapiens
attctgctgggtgttaagagaaggaaataataaaaacctgctaaggacactccattgtctccagatgaccaggaatgcgggaaatgtctgtggaggtcctaaaaggactctccgggggccaatgttaacctcatgtggaacaggccttagtctgcctggaaactctgaggctgggccacgctcatcccactgattcctcgacattttcccattcagatgtgtgggacacaggctgcatccatgtgggtctcctggacaggtacctgtgctcctggagtgtctgtgaaggtccccactcaacaagagggaagggagagccggccttccctatggccagtgacctggacagcattctgratggcacaatcactctttgtaaggtgtccatggtcatcatgtgccacaaaatctaaagggcacttgtttcattaaaagttgggcaaaaattgaagcagtttgaggtgcatgttgccaaagatgaaggcaaatatcacgccttaaaaaaaaaaaagagctaaaggagtaaaacagttggcactggcagaaagaaagacgcataggccaatggaacagaacagagagcccagaaataaaccctcctggacatggtcaaatgatcttccacaaatgtgccaagaccactcaatgggaaaagga

SEQ ID NO: 763040 - DNA, 625 bp, Homo sapiens
tgacacaaagcaggaaggttcagtagggaatggagacaggcacgtctggggtggaggtggaaactcaattttcaatcgtgtggctaggaaaggcctctccaaggcaggcgacaactgagtcaagacccaaaagagatgggagagtgagatgtggagattctggggtccagacacaatcacggcatgagctraggccctgggacaggagctggtgtgtgcagagaatggcaaggaggccagagggacagaaggtgagggatcagtaccaggtccagagaggaggtggaaggggcaggtaactggtcatggtatgtctttggctgtgaagccagtgggatggagcctgggggattctgagcccaagaaaaacaggatgggtttatgggctaggcatcttgctttttttttttttcacacaggtgacaacattctgtcacccaagttggagtgcagtggaggaatcccagctcactgcaacctccacctcccaggctaagccttcctcccacctcagcctcctgagtggctgagaccacaggtgcacaccaccatgcccagctaatttttttgcactttttgtaaagacgggtttttgccatgttgcccaggttggtttcaaactcct

SEQ ID NO: 763041 - DNA, 625 bp, Homo sapiens
caagcaagctgggagcttgaacaggtgaatgtaaacaggaactaggtactagacatgttcaagatggtggcttcatcttcctttctctgcaggccacgtgtaaagtaaggagcagaaaagatggtgccagtcaaggggagaattcatttgcataataagatcagggtggggtgaccagccttccttgcacactacataaacgtcacacctgattgaatcaatctgtgagccctgagtaaatcagacaccacatcttcaagctggactataaaatccagagcacccaccaccagcctgtctttcccctcagaagtattttctcttacaatagagagaaagctgtttttctttttctttattctgtctattaaacctctgctcctaaactctcatgtgtgtccatrtcctaaatttatctggtgcgagatgacgaatcccaggtatataccccagagaatgtggccacttcatataggggacattgtccaggatgccaaggtagacatcaaaacagtgagtagaggagcagactccaactctgttctttagtgttagggctctcagcctccattttaggaccaaatcaaatcaataatgggcatccatcagccagttaaaaacacag

SEQ ID NO: 763042 - DNA, 557 bp, Homo sapiens
attatttgttcttatttaacagtgaatagttaatacttgtttgctgtgaaaacactcatggatgtttctgaagcttttccccaaaggagagttggcttaaaattcttgcatcagaatattttgtgctttataatggttccgaaayattgcttttatactgacctatggtattaattttaactgacttcaactctttagggcatttctaaacaatgttgccgtttaaaaggaacagttgtgttcttgaaattattttttccacagggccactgcatatgcattgggatataataaagccataaactcatttattattgcaaattttacattgagtatgtcagctatggttctaaacaattgatttgttaaatggaacaaatccatttacactttaatagctgctaatttgttacattttagacatttggaaaattaatggaagctttataatccactgacaaattatcaccagagtagtcatatgccataagtaatgtttctttaatatgtgacataaaatggactcagaagaaagaaatgcatgtaggtgtgatata

SEQ ID NO: 763043 - DNA, 557 bp, Homo sapiens
attatttgttcttatttaacagtgaatagttaatacttgtttgctgtgaaaacactcatggatgtttctgaagcttttccccaaaggagagttggcttaaaattcttgcatcagaatattttgtgctttataatggttccgaaacattgcttttatactgacctatgktattaattttaactgacttcaactctttagggcatttctaaacaatgttgccgtttaaaaggaacagttgtgttcttgaaattattttttccacagggccactgcatatgcattgggatataataaagccataaactcatttattattgcaaattttacattgagtatgtcagctatggttctaaacaattgatttgttaaatggaacaaatccatttacactttaatagctgctaatttgttacattttagacatttggaaaattaatggaagctttataatccactgacaaattatcaccagagtagtcatatgccataagtaatgtttctttaatatgtgacataaaatggactcagaagaaagaaatgcatgtaggtgtgatata

SEQ ID NO: 763044 - DNA, 573 bp, Homo sapiens
aataaatgaagaacatcagtaaagttaactagtaggtaatatggaagacagcatgaagatatttctattcgtaacttctttctttttctatctgacataaaatacaatgactaaaagggataacaatttatttgtttatctatttatttattgagatggagtctcactctgtcacccaggctggagtgcagtggcgcaatctcagctcactgccacccctgcctcctgggttcaagcaattctcatgccttagccttccgaacagctaggattacaggcgcccgcccccacatccagctaatttttgtactttcagtagagttgtggtttctccatgttggctaggcttgtcttgaactcctgacctcaagtgatctgccagcctyagcctcttaaagtgctggaattacaggtgtgagccacagtgcccagccaaaataactatttaaaaaaagcaaaaagtacagagctatattacagcaagttttgtgtacgctattgaaattagaccaatattattcccacttagatagttttaaattaaggtgtttatttaatctccagggaccacta

SEQ ID NO: 763045 - DNA, 618 bp, Homo sapiens
taaaagcttttatgcatctaagacttttgtttcttaaagcaatatcatattgatgctaatacacaagtaggtagcatttagatggacaagaacatatatttttttttagaaaaggcgatcattcaatgcatattttctgaagtgttttaaaattaacaatagctatcacatactytttttaatatataaatattcatttttatagatattaatttattgatgattattacttattgggctgtttcaaaacattggaatcttaaacagagttgcagaaatattctttatgcacataggtttgtatgtatatatatctttgcatactcatgctaatgtatctgtaggaaaaattcttgatagtcctattagtgaaaaattaaaataagtatggattgaattaatttgtatagttaattaatcctgttctatgtatcagttgttcacacatattaaaaaggattcatgcaaactgcaggtacaaattcactgcttagcatgtccttctcacacttcaaaggcataaatctcatatacaaatgtgtattatttgataaaatggtcataaaatttccatgataaaaatagtatatatttttagagatgacagagaagcactac

SEQ ID NO: 763046 - DNA, 553 bp, Homo sapiens
cattcagatgtaaaaatttggtacgaacaaaaatatgtatgttctctaaagttcaatttccctgtctatattaattattattatctttggtgtccaacaatgtgcttatagttttaagcatatctgaattctgtattttaaaaagcactaacaagattctgttctcaatcaatgtcttcatagataagttaattcacaactttttgagcacttatgtagtctaaaaataatcatctttcttaattgaaatactcaccwgattttattattcatttgtaatgtaagaacttaaactgctatgcataattattagagtggatatttctggtctatctgtattgtttatagttagcagaactgaattttgtggatttatgaggcacccttgtctgtagaaaggatatagccacacaaagtgtctaattgatactaattatgctttgtataaaatggggacgctccagaataagtggctccctgtatgcaattttccgcattcatcaatcatagcaaatctctgtgaaagctaaagccacgatatatcctattacag

SEQ ID NO: 763047 - DNA, 487 bp, Homo sapiens
gttcctagtctgacatgactcacagtctgggttcagtggatctccacatggctttcccctgaagatcaggatatttacagcatggtgcctgggtgctgagaatgaacattctgagaggcggtgtctgaagagcaacactgcaagacaccagagaaaaactgcactttttatttttttgtactgaactggcaagtcacatagcttctcgttgctgaataagagaaacagtacaaggtactgacagccgctgctagtctcaggcattggaagaggcttagaaaatttcaagtagatgtcctggccattgggaccccacatgaggctgagttagagatgaaaacatcctgcytgcatggccaatcctagccactgaagggagcttactttaaagatactccaaaatcaggattccttcgggtttggggcccagggggaaggcctcccttagctcaggtctaagagcagcattgctggtagctcattgtta

SEQ ID NO: 763048 - DNA, 508 bp, Homo sapiens
gtaaagtagtaagtctttatttaatcaactgtctctccacaggatgtaatgactagttgaaagaaggaagagtaagaataatttctaaatttctgttttgataaactgatttgatggtattatttaactccacacatattttatcacgcactatttaagacaaaaagtctccaagatttaaaagcagattgtcatggctaaccctgccccaaccttgttgtactctgccaactgccctgatagcttaacacaaaagacataaacttttgggagcttttgtagcrctgcccattgcttatgaaaccagattacttccccctgggcaatttggggcaagctcaaatcccactgctattactacagctggtgctctcttgcaagcactgcctcctggctggagactgtcagtgtattatcatgtctccaggtagaataacactgcacccaggaaggagaaaataaatacataacctcagctatagccactgcatacaacaccctcactaac

SEQ ID NO: 763049 - DNA, 488 bp, Homo sapiens
tgcagaccactatccctgatgagcatagatgcaaaagtcctcaacaaaatactagctaactaaataaaactgcacatcaagaagatagtatatcaccatcaagtgggttttataccagggatgcagggatgggttaacatatgcaagtcaataaatgtgatacatcacttaaaaacaaattaaaacaaaaaacatacgatcatctcaatagacacagaaaaagcagttgataaattccarcatttctttacaacaaaacccttcaacaaaataggcgtagaaggggcttacctcaaagtaataaaagccatatgtaacaagcccacaggtaatattatactgagtggggaaaagttgaaagcattctccctgagaactggaacaagacaaggatactcactttcagcacttttctttaatatccactttaaccacttctatttaatatagtactgaaagttctagccagagcaatcagataagagaaa

SEQ ID NO: 763050 - DNA, 499 bp, Homo sapiens
acccttggaaactatactatggtcagccttaggtagctatttgattactcagtaagagactgaaagttctatttttcaaaacaaatcattattagatgcattctgtagccaagaactgttctatgccatgggtgtatagtcggaaaaaagaacagatgcttttttatacctcatggtagtagaaaaggcagatatcaactaaatgaatatatagataagcactgaattacaaatgtgggtaagagctatcaaggaaagctgtwgagtgctatagcacaatagcctaacttggattaatgggccaggaaaagcatctgatcaggtgatgtttgtgttgagagctgcagtctgagttgaagtcagctatgtgaacaggaaagacaagaacactccagacagcagccacagcatgtgtgatgaccctgagctgtgttgtaaagatggaaaagtcatggtgaccagagcataaggatccagcaagtgtggacctagaaaggca

SEQ ID NO: 763051 - DNA, 627 bp, Homo sapiens
acattggtttggcctgaaaaggtgggctatcttgaagtggggctttcaggttataggtgaatagagagattctttaatttgcaataggataaaggagtaaagctctgtctaaaacttgagtcagcagaaaggactgttttaagttaacataaggatgttatgtggcaaggatgatggcctgcagrtggaacttgactcttgacttgcatgccttaggtcttgtgtataatttgtaatcttattgccacaaagagtctcttttgtcagccttatgatcactgttttaacattaatactagtcagtagttgtgcctaaactccaaaagggaaggggcataatgaggtgtgttccatctgctttccttcaggtccaggaactcactttttatggtttctctggggtcccctttggctaagagaaggtctgttcagcaggtaagggttttcaattttaaatttagtttacaataattttcaattcagtccaaaaagctctactcaaacatgaaatgcctataatctaacacttctgtattattttagctatacctaatcaccacaaaactttgctaaggaaaatatattagaaatgttaaatggaaattcctaataactaaaaacatgagt

SEQ ID NO: 763052 - DNA, 612 bp, Homo sapiens
aaagttggggtaataccctagagaaaaatggggatgggaaaagagtcttcagatcaaactgtgtatcctgatccaggcgttgagataatcctgaactggtgaggcattgacttctagaggacacaaaacagaagatttaaaatctggctgcctgtcaaatccaagacgcataggtatcagagggctaagagctggagatggagatgaatttagggagaagcagggtggcttaggctcataaactttgggacctcaagtcactggtttgtgtctacgtggcagtattacaaaggctgtctactgtttttgcttttagaaaatttcccacctgttctttctttggttgttccttttctataccttcattttggccaagcatcctatatggctggactaygaacatagagagctctccttccttctcatcttgagccagggatcattcccttttgtattggctgttttccttggaagcgtgaagcatgagctttaatcagtttacagagccgctgacctaattttacatctgcaataagatcactatgaattctctgcttccctatggaggataaagctctgccttccccctcccctctgcagtctttctttgtg

SEQ ID NO: 763053 - DNA, 516 bp, Homo sapiens
ctgccttttctcttccctgggacactccaacacagttatacgtagtatagtgttaggaagggttacctggtgctttattttctcactggttggtctttgttgtgttattctgtatctcttttggggttttttaaatacttcataataacaaaaaaatagagatgaagatatggactctgccttcaaaaggcttcctgtttatcagggaagacttgcatagtaaatagctgtaataaattatgagaaagcactacagatgagatgggtctataatagttccagagatgagggaaccctgcctggaaggtagggttcctacctggaagwggtggtggtggtggtggtggtgctgttgctggtggttgcgatattatcggggtagtgggaagggagtgatataaacaggataagcacaggaattatcctcggtctgacccttgaaggacaaggaaagttcaccaggcagacaaaacaataagggcattttagggaaagggcatggccaggtaaaaatac

SEQ ID NO: 763054 - DNA, 612 bp, Homo sapiens
ttgctttgcttggtagcagttcaagggaataaaagcattttcttgcactccacacattgcagtgtctaactcctcagcctttgcaccaaagaggcaaatctagaatgtgaacgttggtcacatgtattttggccttaggatgaagtcctgcctgttagagtctatatatgaggcttaatattcagtatttattttccaggttgccctaaatctgggcacagccaccccgccacctccacttycactgaccctgttaaccctgaaaagaaagttaaatcctacaactcaagcctagccctgcaaaactgaagctgtagctctcaatcaaatagtctcttgccatttttaataaattggattgtggattaatcttgggagtatttgggcccctgatgaaacattctctttcagggaagatcaaaattttcctatttgcatagaaagtttacaaataaaggttctttaaaaagataagtctttaattatttggttattaacctagataacctctaagggttcttaaatctaatgatttattttatttgagttgcatttgtcaagttctcaccatcttgccaaattacttcagacaatagcaatatctaatgtttt

SEQ ID NO: 763055 - DNA, 557 bp, Homo sapiens
aggcaaatctagaatgtgaacgttggtcacatgtattttggccttaggatgaagtcctgcctgttagagtctatatatgaggcttaatattcagtatttattttccaggttgccctaaatctgggcacagccaccccgccacctccactttcactgaccctgttaaccctgaaaagaaagttaaatcctayaactcaagcctagccctgcaaaactgaagctgtagctctcaatcaaatagtctcttgccatttttaataaattggattgtggattaatcttgggagtatttgggcccctgatgaaacattctctttcagggaagatcaaaattttcctatttgcatagaaagtttacaaataaaggttctttaaaaagataagtctttaattatttggttattaacctagataacctctaagggttcttaaatctaatgatttattttatttgagttgcatttgtcaagttctcaccatcttgccaaattacttcagacaatagcaatatctaatgtttttacagcactttatagagagtttgtaaagcgctttca

SEQ ID NO: 763056 - DNA, 652 bp, Homo sapiens
atgtctataccagccttatacacaaagaacataacggaacagaagtcatcctgcccaagactttcagaagttctcaaaaatagttgtagatcagttttacataggcttctagcaattatttcaaaaatttatttagcctataatcccagcactttgagaggctgaggcagaargattgctcgaggccaggagttctagaccagcccaggcgacgtagcaagacctcatctctacaaaagatttaaaagttagctggtcatggtagtacacacctgtagtcttacctacttgggaggctgaggcaagaggattgcttgagctcaggagtttgaggctgcagtgagccatgatcataccactcaagcctgggcagcacagctagaccccagcttaaaaaaattatttagaataagttatcaattccttgcaagatgggaaaaggaatataaagcacagttcctgtcctcaagaaactcacagtcttaatcaactgggacataaaatttaaaccatcattcttcagcaaactaacacaagaaaagaaaaccaaacaccgcatgttctcactcataagtgggagttgaacaatgagaacacacggatacagggaggagaacatcacacaccagggcctgtcgggggttggggggca

SEQ ID NO: 763057 - DNA, 590 bp, Homo sapiens
aaaattacattagggacaatatttgtaggacacattcaacccctgagctgctatttaatgactcccaagagagagacatgccttcctaagcccagcctggcctctgtgcagacccagggcaggcaggcaatgattttccagtttcacttcagaacactgttgttccacttttgctcgctgcatagcaaagcacacaaacttaatgctctaaacaaccaccattttcttatgctcctggattccgtgggtcaggaacttggaaggacaaaagttagtagatgcctctactccacaatggctggggcctcagccaggaagtcttggaggagctggcagatccctgaagcttgggatcctgtgaaggcccactccaaacatgtgcaatggttgaggytggctcttgcctgggacccccgttggggtttcagactggttcatggcactactttgtggtggggcttcctcacaatatggtggccttgagcttcttaagtggtggctttgagctccaagtatcacaagaggatggtggaggctgatcttcctctcataacagaactcacagcctcatagtgtgacttctatctcag

SEQ ID NO: 763058 - DNA, 528 bp, Homo sapiens
ataaaataagcacattcttggttatgattgcagggcagagtacctgggcatcaggacaggggacagtcaggccagtggaagtcttaaccagactttgaggatcccataacacaaatgaaaccccaggggaccccagccactggcttctgcagaagatgctaacagagtgccccattgcacctgtgatgatcraaccccacgctagctcagacaacctgagaacagacagtgcagatgtccaagaggcacctggacatgtccctccttctgctatgattcccatgtagaccatgttcctcctcatattcctggtcctcttgctggagagaagagagacagctccgagagacggttttacctgaagagttaaaccaagtgttctcaccagagtggaactaccctattgaatgaacatttagttttgttcccacttcactgtaagatgggaacttgtgtaagaagtctcagaagttgtaaagacagcaagaaaccacacttactctctacacctaaacggatgctttcagc

SEQ ID NO: 763059 - DNA, 650 bp, Homo sapiens
ccgtctcagcctcctgagtagctgggtgggattacaggcatacaccaccacatctggctaattttgtatttttagtagagacagggtttctccatcttagtcaagctggtcttgaactcccggcctcaggtgatcttcccacctcggcctcccacatggctgggattacaggcgtgagctaccgcgcccggccgcatatgaaaatatttttactgataggggtgcatgacaaagaagttggaaacatatcattcacattgttactttaggcttagctctttcttctgcttcactgttggtctttaactggctatagtggaatagtcacaaagtaaggagacttagcaaatatattccagtaatagaaagagggacctagtgtctcccaaagtgaaaagtgggacatgattcctaaaatactgacagtggcatygtaagcaggcatatccatgtaactgctggcgagggcagggccaagacgtccagatcgggctggaagtgcttcatcatataagcaaaatgttatgtgatatatcaacatgttgatgtagtggaaagtagcgtttccataaatttgtttttctggtcaactggaaattagaagccaagagtgattgcacaatatgttaatagagctatgacctataaaa

SEQ ID NO: 763060 - DNA, 489 bp, Homo sapiens
tcgtatttatttctgaaatattcaattattgttgttactggtggctgtagcattcatattatgaaataagaaaacatccccagaagttgctcaggtcacatgaaactggaccaatcactgacatgaacgaggagatccctgagacgggcttagtaaacaatgactcgtctgctgtggctgggagatcatgttcccccagcacatagccagggacaggacgaatgcagaagccaagggtggctgtgaagtcaccaaggaagggggaggggctgatgggtcakaaatcaatcatgtttgctgtaattagactacgttagagataattctatgccatctgaatgtagccatacgttagaggtaattctattccatttgaatgtagccaaagggaagttgtcctctttcccgtccctggatggacactgttgaacaggaatttaatcccattcttaccgcagggtgaccacaaaacctctatgaatgctagga

SEQ ID NO: 763061 - DNA, 678 bp, Homo sapiens
taaactgtgcttctcaatagctcataaaaaaataaggagcattttataggatgccttttcctcatggaagatgtaatgtgtgaaaacacttctgaattttataagaatctgtccaggaaatccggcttatagtgtgctagaattctacaccttccaaatgtgtacaatttatatttgtagttgaattcctttgtagttttttgktgttgttgttgttgtttttgcaagtatgtcatggctgggttcctactttagaatttcttcttctatttccctactcactgcttttgattgaattcttatgcttctgacctcattcaaatggtgttttttttaaactcctgtttgaatgtacccatcaccccatccaccccccgccaataaagcccttctaaatataggacccagtctgaactcggtaggaaattctgtgattgtctgagctccacagctagtccaaggcggatgggaaaatcctacctttggggcatttgatgatgtgaagagaacacttcaaccaatgtacctacactttctaaatgctatgttatggttgaaacgcaggtgagagtgtgaatacaatgttttggttccctgactatacatttttgtttttaaagggatttctttcatgtttcacttaggggaatgatattttagtccttggactgcctgagg

SEQ ID NO: 763062 - DNA, 678 bp, Homo sapiens
taaactgtgcttctcaatagctcataaaaaaataaggagcattttataggatgccttttcctcatggaagatgtaatgtgtgaaaacacttctgaattttataagaatctgtccaggaaatccggcttatagtgtgctagaattctacaccttccaaatgtgtacaatttatatttgtagttgaattcctttgtagttttttgttgttgttgttgttgkttttgcaagtatgtcatggctgggttcctactttagaatttcttcttctatttccctactcactgcttttgattgaattcttatgcttctgacctcattcaaatggtgttttttttaaactcctgtttgaatgtacccatcaccccatccaccccccgccaataaagcccttctaaatataggacccagtctgaactcggtaggaaattctgtgattgtctgagctccacagctagtccaaggcggatgggaaaatcctacctttggggcatttgatgatgtgaagagaacacttcaaccaatgtacctacactttctaaatgctatgttatggttgaaacgcaggtgagagtgtgaatacaatgttttggttccctgactatacatttttgtttttaaagggatttctttcatgtttcacttaggggaatgatattttagtccttggactgcctgagg

SEQ ID NO: 763063 - DNA, 612 bp, Homo sapiens
tcatggtaattaacactagctaccctcagtttgcatgcggattctgtcatttgggaagaattcccttatctgtaaatgtccacagctcttggcattttgaaaggttcttccttttgctgtgatcctccttgtctacaactgaaatgggggttgtggatatttttcccagttacttccttactcatggaagcttgggggcccaaggcatattttaagtgtaagtagcttagcacaacaaactttttcacttaraagtccaatggacgttgactggggctctcctccatccagtgacttaaggatccaggctccctctaccttgtaatgccaccatctcaacacagggcttccaggttcactccatcatgggaggacaggaatggaggaggcaccctgatactgaagtgccttgaactagagataattcatcattgatgctcacatttccatccgctacaatgtcatcttgtggcctcagcccaattgtagggaaagtctggagatgtaggggagcacagggctattggatgagcataaaccctcagcaaagactgtcttccagccccttcccacacattgaggaatacacttaacagctcccattctgttccc

SEQ ID NO: 763064 - DNA, 714 bp, Homo sapiens
tgaatcctctatcacctataataacacttgccaataatgttcactcattagctcattcacttaacacacacttattaggtacattccctggagaagacactgttcgacaggcacttcaggctccaagagggaacagcacacagtcttctgactatgatgaatgacttgcagtttcccattcactctgctcattgcttacttgttctcatgtattatttccttaggcttgaatgctctttccatccttcccctgtrgcttgtttccggagctcatcttcatccttcaacactcagcttcaacgtcaccatctccaggaagactatgcagatatatccaggtttgcatgaacagagtaagttctccaaggtgtctattgacctactctgcactgctgtaattatttacatctccccttttggttggatgaatagtccttaaaaggcaggaacagtccctcagagctgaatctgtgatctgacacacggtaggtgcctaataaaaatatacgtcaaatgaataacagaataaaatttaaaatatgcatctgtaattaaagtccaacagataaaataagtactgtttttgtaagtgcttgcaagaaacagacactaatgcaactctggcttagaccaaagaatagtaatttgttggattatatgactgggaaattcaaagggtgggtctggatccaaacatggttgaatccaggattg

SEQ ID NO: 763065 - DNA, 527 bp, Homo sapiens
cattggatgtcaatccatacgattccattccattcgagtacattccatggcgaggccattccatccgatgccattccatttgattctattccattagactccattcaattccattaatctccattgcattccattctactccaactgattccattccattctattcctttccattccattccattccattccattcgcttccattccattcgtgtccattccactccagtccattccattcgtgtccattccattccagtccattccatttgtgtccactgcattccattccactccattccatattattccattacactccattccattctatyactttcatttccattcagttccattccatttggttccattccactcggtttcactccatttgagtccattccattccattccattccattccattccattccattccattccattccattccattccattccattccattccattccattccattgggtaccattccatattgttctattcgattccattcg

SEQ ID NO: 763066 - DNA, 597 bp, Homo sapiens
attccattctattcctttccattccattccactccattccattcgcttccattccattcgtgtccattccactccagtccattccattcgtgtccattccactccagtccattccatttgtgtccactgcattccattccactccattccatattattccattacactgcattccattctattactttcatttccattcarttccattccatttgattctattccactcggtttcactccatgtgagtccattccattccattccattccattccattccattccattccattccattctgttccattccattccattccattccattgggtaccattccatattgttccattcgattccattcgaatccattccattccagtccattccattcgattccattcccttccattccattccacttgattccactccattcccttccactgcattccattcgattccattccattgcattgcattccattccattggattgcattccattcgattccattccattccaatcaattacatagcaatccattacattcgagtctgttctattccgttccattcgatttcgttccaatccat

SEQ ID NO: 763067 - DNA, 404 bp, Homo sapiens
tctcaagttgcatttatagatatagaatggaatccaatggaatgcaactgtacggaatggaatagaatggaatggaatcaaatggaatggagcagaatggagtggactggaataaaacggactcaatagtaatggatttcaaagtaattgattcgaattcgaatggaatcgcatggaatgtaatcaaatggaatggaatggaatgcaatagaattgaatagaatggaatgcartgaaatggaacggagtggaatcgagtggaatggaatcgaatggagtgaaatggaatggaatggacttgaaaggaatagactggaacaaaatgaaatcgaacggtaggaatcatacagaacagaaagaaatggaacggaatggaatgcactcgaatggaaaggagtccaatg

SEQ ID NO: 763068 - DNA, 421 bp, Homo sapiens
gaatggaatggaatcagttggagtagaatggaatggaatggagattaatggaattgaatggagtctaatggaatagaatcaaatggaatggcatcgaatggaatggactcgaatggaatgtgctcgaatggaatggaatcgtatggattgatatcaaatggaatggaatggaagggaatggaatggaatggaattgaaccaaatgtaatggacttgaatggaatggaatcatatagaatggactcaaaagcaatggtctcaagttgmatttatagatatagaatggaatccaatggaacgcaactgtacggaatggaatacaatggaatggaatcaaatggaatggagcagaatggagtggactggaataaaacggactcaatagtaatggatttcaatgtaattgattcgaattctaatg

SEQ ID NO: 763069 - DNA, 633 bp, Homo sapiens
tgcctgccatagtgagtgcctggcccttggcagactgtcaaatggagctatggagcagcagcgggagtaatattattatctagaccttatcggtccttttaaactcagttcagattccttctcctttttaaattactgcaacctgattttacctgcccctgcctccaagttgctgtatcagttagcctctgaacaattcatttagcaattttaattatatattgcttcttgacactgctttgtgatcttaaaaactctgcttcaaatacgtacttggttgcttttcctgagtgctgttaattcctgctctaacggactaaagtaatttgaaggcaggactaggttttatgcatggcacacagtctggtgccttacatgtaactactcacaaacttttttgatccaaaatttagaaacttcacaygcattcataagaaatcaataaaaataagctaagttggtttcagatacagagggttcccaggaaggtgtgtacattggcaattagcccaaatgtctttgttcataatttttttttttttttttaagtagagacagggtttcaccatattggccaggccggtcttgaactcctggcctcaagtgatctgcctgcctcagcctcccaaagtg

SEQ ID NO: 763070 - DNA, 567 bp, Homo sapiens
gctgagatcgtgccgctgcactccagcctgggagacagagcaagactctctgtttaaaaaaaaaaaaaaaaaggaaagaaagcaagcatatccattctaactcagaaaagtggaaagtgaagatgttgaatggccaattggttgtgtggttgttagactcaggatagaggtctgagctggagaaaagagatttgggagttatcagcccatctatggagttgaagccaaaggtgtggatcaggtcacataaggatagtgtggagaagcagaagtgatgaagatgacctggagctgaatccaaacacatactagctgtttaaggcagaggccttgaaactggggtcaagcacttttaggcacgtccgaagactgtaaggcataggcgagcatgcaggtttcaagaatccatttygagattctcacttccgtttgtaacttccctccacttgctctgcctgggaacacgcctgtgctggggaggtggggagtggggtggtatctctgttcttatccgttcaatattgcctttcttccactttccaagggaaaggcaatactcttcgtagc

SEQ ID NO: 763071 - DNA, 554 bp, Homo sapiens
atctggtagataaaaaggaagcctacctctcagggctctgagtggcacaggcaaagttctaattggatgttattgatgtgaatcttcttaggtataaaaggagacaacatcacttgggagagaagccatgattagactgggtctgttcatagacctcatcctcatagggctgagaaaccagggcagataataggattattacttaaaaggtgcttgagtggaaaataaactgtgtttgctgaaaactgtttgacctacatttttagggtcccrcatctttcacttgctgacctataaaacataacttatctaggtccctggccgaaggagtcctccaggtccttagccaaaattactctccaaacaatgacataatttgaacgtctcaaggcctcaacaggcagccctttcaggaactgtttctggtagagacttatcgttaagctatacttgaagagtggtcaagagttagtaatctcttataaaaataacattaaaatgtggtctgggattcacctcaaaatagtctagagtgaggaggtgcagatgggtgg

SEQ ID NO: 763072 - DNA, 675 bp, Homo sapiens
caagcactaggctggcagaactctccttgtctggatcctctgctctcttaagagccaacaggcaggaatgtttaagtccactgaagctattcccacagccgcctcttcccccaggtgctctgtcccagtgagatgggagttttatctataagcccttgactaaggctgctgcctttatttcagagatgctctgcccaatgaagagaaatgtagagaggcagtctggccacagccactttcccgcactttgttgatttccacccagtcccaacttccaggcctttttagcatggtcggggaaaaccacctactcaagcctcagtaatggcagacacccctcccaatccccacaccaagcttgattgtcccaggtcgacttgagactggtatgctggcagcaagaatttcaagccagtgattcttagcatgcagggctctgtgggagtgggacctgttgagagagaacacttggctccctggcttcakccacctttccacgggtgtgaatggttctgtctcattggggttccaggcgccactgggggtggattggcaggggggagcaataacaaaaaaactcctgcagttaactgagtgtctgcccgacagccattcagttttgtgcttgaaacccagggccttggtggtgtaggcacatgagggaatctcctggtc

SEQ ID NO: 763073 - DNA, 675 bp, Homo sapiens
caagcactaggctggcagaactctccttgtctggatcctctgctctcttaagagccaacaggcaggaatgtttaagtccactgaagctattcccacagccgcctcttcccccaggtgctctgtcccagtgagatgggagttttatctataagcccttgactaaggctgctgcctttatttcagagatgctctgcccaatgaagagaaatgtagagaggcagtctggccacagccactttcccgcactttgttgatttccacccagtcccaacttccaggcctttttagcatggtcggggaaaaccacctactcaagcctcagtaatggcagacacccctcccaatccccacaccaagcttgattgtcccaggtcgacttgagactggtatgctggcagcaagaatttcaagccagtgattcttagcatgcagggctctgtgggagtgggacctgttgagagagaacacttggctccctggcttcatccacctttccacgggtgtgaatggttctgtctcaytggggttccaggcgccactgggggtggattggcaggggggagcaataacaaaaaaactcctgcagttaactgagtgtctgcccgacagccattcagttttgtgcttgaaacccagggccttggtggtgtaggcacatgagggaatctcctggtc

SEQ ID NO: 763074 - DNA, 500 bp, Homo sapiens
gatgtgaatacattttacaacttttaatattatatctctgtgatcaagcaatgctaaaaaataggctgtatgaacatctggctcttttttaaaaaaattgaaattgaaattaaaagattctatcattaggcaggaaacaagattttttttttatcagaaaacatgaaaaccagaaggtaatggagtaatttggaagwactgtgtggaaaattcttccaagtcctaattttgtaacaaatagaagtttattatactttgatacttatatcaaacataagtatatttgatataaacattttgatataaacatgtttataacaatataaagattttttcagacagtcaaataattagatttaattgtctgaatatgtgcactaaaaggaatggttaagaaagctacacagaaattgtcaccagagagaaacttggatctacacaaagaaataaatcattccaggaatgacaagaagaaaattagaacccaaagcgagaggatg

SEQ ID NO: 763075 - DNA, 617 bp, Homo sapiens
tgatgattcagcaatgttgaagtctccaattatagtagtgtgttctctttgtagttctatatgtttttcctcatatattttgaagctctggtgttagggacttaagtactaactgtcattatgtcttcttagaaaattggcccctttatcatcatgtaataccattctttagctgtgataatgttccctgctctgacatcggtactctaaaattaatgttgctactctcattttcttttgattagtcttagtatgctatggctttctccatcctttgctcttaatctctgtatgtctttatatttaaagtcaatttattgtacacagcgtatagtttgtcttgtttttgtatcccactttgacttagttttttaagtagaatattttgacsttttaaataaaaagtgactattgatatagttgaatttatattgaccatattgtaattgtttcctatttgatgtctttgttatttgtcactatttttgttatctactctttttctgccttttatgtttttaataaagcatttgcagtattctattttctctcctttcataggtagtacaagtaccaactaataataatgtatttctaatttcctccctcttgttcct

SEQ ID NO: 763076 - DNA, 575 bp, Homo sapiens
attggatttgtaggttgcattgggtaatatggacattttagcaatattgattctttcaatccatagacatggagtatctttccttttcatgtgtaggtgtccccttcaattcttcaatttcttttcttctttttttttttttttttttttgactgagtcacgctctgtcacccaggctggagtgtagtggcatgatctaggctcactgcaacctctgtcttctgggttcaagcgattctaatgcctcaacctcccgagtagctgggacctcatgtgcgcaccaccacgcctggctaattttttgtatttttagtagagatggggtttcaccacattggtcaggctggtcttgaatttctgacctcaagtaatcmacccacattggcctcccaaagtgctgggattagaggcgtgaaggcgtgagctaccatgcctggcagtcctcttcagtttctttcatcagtgtttagtggttttcattatgggaatatttcacttctttgggcaagtaaattcttaggtatttaatttttttgtagctattgaaaatgggattgaattttttaatttctttt

SEQ ID NO: 763077 - DNA, 617 bp, Homo sapiens
gacaggcattcctgttttcatgctgaaaaactactttttgacctgccatgccccctatcctgtacccatattaaccccaggcctcaggctccagaagcagaaaaggagaggagcagacaaatagcagaacagtgtggcagagaaagagagaagagaaggggtgtctgaacgcctagaggagtttgactggtgatgkatggagaggatatcggctgctgagcagccaaactccaggggaagatcatcttcccactctatccccttcccagctcctcatccgtcttgctgaaagccacttccactacttaataaaccccctgcattcatgcttcaagtccgtgtgagacctgacactttcgggagactgaacaagagctcaggatacagaaaactgtcacactggccttctgctcttataaagaggcagagggtccactgagctggataacacttaagctgtccatggatggcaaggctaatagagtgcactgtaacaaacactcatttgggctttggtagtcacaggctcccacctctggaggctgctgtggggctggagtccagtgccctggctcctaccactgcctgtctatgtgctcctccctcccataaggggt

SEQ ID NO: 763078 - DNA, 617 bp, Homo sapiens
gacaggcattcctgttttcatgctgaaaaactactttttgacctgccatgccccctatcctgtacccatattaaccccaggcctcaggctccagaagcagaaaaggagaggagcagacaaatagcagaacagtgtggcagagaaagagagaagagaaggggtgtctgaacgcctagaggagtttgactggtgatgtatggagaggatatcggctgctgagcagccaaactccaggggaagatcatcttcccactctatccccttcccagctcctcatccgtcttgctgaaagccacttccactacttaataaaccccctgyattcatgcttcaagtccgtgtgagacctgacactttcgggagactgaacaagagctcaggatacagaaaactgtcacactggccttctgctcttataaagaggcagagggtccactgagctggataacacttaagctgtccatggatggcaaggctaatagagtgcactgtaacaaacactcatttgggctttggtagtcacaggctcccacctctggaggctgctgtggggctggagtccagtgccctggctcctaccactgcctgtctatgtgctcctccctcccataaggggt

SEQ ID NO: 763079 - DNA, 616 bp, Homo sapiens
cagactctgacacccgcagcaaagaataacttacaatgtaagtggacagcacgataacaaatggacaattaagcagagagatgaaaacaccaagaaagagttaaaataaaacactagaaatcaaaaacattactgaaaagaagaatgtcttgaatgggtcaatagattggacataaacaacattgtatacagtgagattaaggatatgtcaatagaaacttttgaaattgaaatgcaaagagaaaatagaaaagaaaattagaacagaataacctagaactgtgggacaattacaaaaggtataacattcataatgagactaccagagagagaggaaagagaagaagaaacaagaactatttgctgcaaaaatgacagaattttccaaatttaatgataggtaccaaaccaaaccacagacacwcaaagcccaaagaacaacaagcggaatacatactaaaacatttacacctagcatatcatgttcaaaccacagaaaacaaaagagaaagaaaaaaatcctggtggatgccggggaagtgaaagggggaatggggaccttgtgcttatacaggagcaaggataagaattaagtaacaacatattaaacgatttc

SEQ ID NO: 763080 - DNA, 578 bp, Homo sapiens
tttgttacttttagggagttttagtgtaggataataaattaaaattgtctttactctggtgtttataaccagaaattcataaaatacagtagtgtgattaatttggtattgcaggcaaataaaaccaaacaaaatgaaaccctcataatccctaagaagttgaattcaaaggcagagccaaaggattagataaccacttaaaacactaaagcagtttttgcatgaaacaaagaccggactatgattgtggaagtgaaggggcatttggtttyttccagtgctgtagtgtcaggtgtgaaatgcccttacatcatttagcatctagcctacgttaaaaaaaaaaaaaaaagtgaatagttctacttgatgacaagactttttgccacagtaaatgaacaattaaggcatttgcaaagaaaaagagattaaatgaagaattggatatagtttccacatgaacattaaactcacactggataataaaagaaaataaaggttaagtagtaaattttattctggaataacacaccaaaacctcaagctagaaaaaagaaaactaaataaatgggattacattg

SEQ ID NO: 763081 - DNA, 603 bp, Homo sapiens
aaggagataaagacagtcaggaatacagtagatactccaaatggcccttataatgacaatgatggtgatgatcatgacaatgataatggtgcaacattcttaccaacttctaagttataagcaatacagtgcaacccatgccagcagaaaacaacgactgcagaagaatttcatagccttcttcatacctggcaggctggagttgcatcagttgctggcttgaattcctctaatggaaaagtagatatttggttgatgctgcagggataaacagatgcatcataccgttttgagggtcttcagtaaaagtgtaaagagcagctgaaaagatacacaacggagcttcaycatgtccttcagccatcactcataaaggaatagaaggtatcccaaattttaaaaatcgaagataattttttgatcattgccatttctgtagaatcttctgactgttgaagttatcattccaacgtagaccaaatttagagagtcatctgatgggcagtcccttttttttttttttttttttttgccaatttgtttcatccctgaatgatgtatgagaatttcatgtctgtggagagagattatactacagggaag

SEQ ID NO: 763082 - DNA, 637 bp, Homo sapiens
tacaaaaggtttataaacgatttaatggattgaaacaatatttgccatccatgattatttttgaaagtgaattgctattaaaatctaactaaaacttcatacaaaacaatttattgtcttctaaactctattttgatgaaaacattttataatttccataaatatgtaacttaaaaatctcatttttctcaaatatcttacaaattccctacatttaggctatttaaattaatttcagtgaaagctagaaattataaccatagcctgaaaattaatcaattttcatttcatwaactcatagatttttaatgttgacataaaaaatggttttacatgctattaagaagagtcacaaatgttaagaagtttacagtcactaaccttcaacataaattttaaaaaacagtatatctattggatacaagaagagataaaaattagacaaatgtccagtagtgggtaagtggatggtggtgttcatacaatagaatactatttagtaatacaattcaatgaattgtggcttcattcatctgaatggatgaatttggaagtctctgagcaaaagaaataggtcatgggataacacataaagtatgactccatttatataaaattcaaagagtcagaactaaac

SEQ ID NO: 763083 - DNA, 637 bp, Homo sapiens
tacaaaaggtttataaacgatttaatggattgaaacaatatttgccatccatgattatttttgaaagtgaattgctattaaaatctaactaaaacttcatacaaaacaatttattgtcttctaaactctattttgatgaaaacattttataatttccataaatatgtaacttaaaaatctcatttttctcaaatatcttacaaattccctacatttaggctatttaaattaatttcagtgaaagctagaaattataaccatagcctgaaaattaatcaattttcatttcataaactcatagatttttaatgttgacataaaaaatggttttacatgctattaagaagagtcacaaatgttaagaagtttacagtcactaaccttcaacataaattttaaaaaacagtatatctattggatacaagaagagataaaaattagacaaatgtccagtagtgggtaagtggatggtggtgttcatacaatagaatactattkagtaatacaattcaatgaattgtggcttcattcatctgaatggatgaatttggaagtctctgagcaaaagaaataggtcatgggataacacataaagtatgactccatttatataaaattcaaagagtcagaactaaac

SEQ ID NO: 763084 - DNA, 603 bp, Homo sapiens
ttaaatgttgatattacccaaaacaccctcacagaaacacctagaataatgtttcaccaaatgtctggacaccccatggcccagcctattgacatgtaaaattaaccttcacacacccctgtaagcccctaaactcatctatagcaggaaaaagaggagagggsatggtgtagttatcatcatttaggaatttggcctgggctgccaccacagatgtgattcagctatgaggacttagccagcacacagttccctaatgttccaactttaggagattcacgtcagttcccttgtaagagatctttctctgtctcctgtagggatatgtcattttcatcagaacatggcattctctcctaatgctgcttcaaacagagaaatggcatttaggaaaagcctataaacctatcccagtggaagtggaaatattttcagattactgaggccctgaagtagggcaataaataaataatagtttaacattctcatctggaagaggaattggtgcaagcactgaggttctaatagaattgacttcattctcttccatatcagaaggcagcaagcactgactactacagatgaggtttgggttttctcctt

SEQ ID NO: 763085 - DNA, 595 bp, Homo sapiens
tctgttcctaaatgtatggcatgggcactccatgcactgtgtttccaatttgtgcatgtgaatctgagtctcagaatatttgaatgagaagggatctggtgtaggtccttcatttcacatgtatggagagtgcagctggcagcgggtaaaccactgaggatgtggaggaactgggggaacagaggcctcataactctcagaccaggactctgccagtcctcatttctagcactcagtgcatcctagaattcatagatcactgcttctcctctgagaacatccatattagaccaactctggattgtgataaacacagttcctgtcttacctggttamcgttatgcatctcaaacattattatgctaggattgatccctctctgagaaatatcagctaaagaacaccagacacatagatggttgacttctcaatttatagttcacttcataaagattctaggaggtaggcagaatgcatattttaatgtatattccactagtaatgaaacaggagatggatgacttgcccacaacttagggctgaagcatatcataggggaagcatgtttattattaaacaagtgtaataagtgcct

SEQ ID NO: 763086 - DNA, 419 bp, Homo sapiens
attctcggagctaaatgtgaagggaaatgctaatgccctccccagaatgcagagctaatggtgtgcaaagttataggtggaattacttagtggaagtgctggaagaatttctaagggaaaagccacatggctggtgcacatgcctgatgatagcaaaaatgggatgtgctttacttaaaatcagacatgcccttcctcagccaccgaggtttttccttcacttgtagttgtacatttgcagcttgtcaggacttgcctgctatcttttgaatattcagccatcaacctttayggtggaattagctccactttaatttcctgataacacctaaattaaggtaagagttctaaattctttattaataatgtacactctaattaatagaaattacttttccagcatgtattattaaaggatg

SEQ ID NO: 763087 - DNA, 570 bp, Homo sapiens
gaaaacaattgccttttaaaatttagaaaaaatgtctcataatcccatcctacaaacaataagaaaatcatcacagtttccaatatttttgaggggttttagagacttacattcatctattcaatttctgtttctattcaatttctgatctcatgtgtytctccttttataaaatgacctaaatggacttatatatggaagtcagccctcctactttatggacttgatatactatggtttgggattacagtaatttggcaatctctttatttacctacacaaatgaaagactatgatcttccctgagatcacagatttagaccattcatctaaatatacacttaagtatcatgaaatcttttatttttcacgaaagttaaaggaatgattttcaacatatcatacaggccattcaatatgtttacaatggacacttcttatgagttagttaattagtgttaattacattgtgaaatttagcaaagtatatcaagtacaatagtatatttctcttgacctgaacattttatttataggatattacaaaattatcagacatttgtacgagaa

SEQ ID NO: 763088 - DNA, 646 bp, Homo sapiens
acaacgtcttatcaaagaaagactatcaataaggaaattaacatttgaaaaaattctggaattgaaaactttaataagtgaagtaaaaaatttactagagggggaaaaagtagatttcacctggcagaagaaagaatcattgtatttgaatataaatcaacagagatcatacagagtgaaaaattgacataaaaattaataaaaaatgtgaagagcctcagagaattgtggaatgccataaacatactaacatctgcataataagaatmccagaaatagagaagaaagggaaagaagcagaaaaaaaattcaaatcataatggctaaaacatttcaaaattggttaaaagaaacattaagccatatagtcaaaaaactaagcaaactccaatctgaactcaaagatattcacaggttgattcaatgttagtcataataaaaatgttggatgacaaagatgaaaaaaatcataaaagcagtaagagaaaagaatgacttatcatatttgaggaaatcctaatgataaaacagctgacttttcatcagaaacaatgaaggccagaaggcagttgtaagatatatgctgacttgagcatggaataagagaaggaatatcagtcataaactggaagagacatttttatga

SEQ ID NO: 763089 - DNA, 646 bp, Homo sapiens
acaacgtcttatcaaagaaagactatcaataaggaaattaacatttgaaaaaattctggaattgaaaactttaataagtgaagtaaaaaatttactagagggggaaaaagtagatttcacctggcagaagaaagaatcattgtatttgaatataaatcaacagagatcatacagagtgaaaaattgacataaaaattaataaaaaatgtgaagagcctcagagaattgtggaatgccataaacatactaacatctgcataataagaataccagaaatagagaagaaagggaaagaagcagaaaaaaaattcaaatcataatggctaaaacatttcaaaattggttaaaagaaacattaagccatatagtcaaaaaactaagcaaactccaatctgaactcaaagatattcamaggttgattcaatgttagtcataataaaaatgttggatgacaaagatgaaaaaaatcataaaagcagtaagagaaaagaatgacttatcatatttgaggaaatcctaatgataaaacagctgacttttcatcagaaacaatgaaggccagaaggcagttgtaagatatatgctgacttgagcatggaataagagaaggaatatcagtcataaactggaagagacatttttatga

SEQ ID NO: 763090 - DNA, 609 bp, Homo sapiens
ggagtagtagactgatttcatcttgataggcaggatcaatcaccccagccaacgctgtaactccctttatagcctgctgccttaaaggtaggaggagctctaagtgtccaggtggcaatcttaacttcttgtttaatagaaccattgttgtgtctcctggtggcagttctcctctctctggaactgagacctctaggcctgcagaacataatgtcatggaacggtaagcaaaaatttggctagtgggtcatagggtgatggtgagtggtaccacttccatttccacccttgattcctggacccatgaatcctggttatgggagaaacagtgtcacatactggatgcgattcagagcatacacagctttctggagaactttgccccagccctgcaaagtattgtcacttagttggcattgtaattgtgacttcaaatggtcattccacyattctatcaattcagctgcttcaggatgactgggaacatggtaagaacagtggattccatgagcatgagcccactgctgcacttctttaactgtaaagtgagtgccttggtcagaggcaatgctgtatggaataccatgatggtggataaggcattctgtg

SEQ ID NO: 763091 - DNA, 602 bp, Homo sapiens
gactgggaacatggtaagaacagtggattccatgagcatgagcccactgctgcacttctttaactgtaaagtgagtgccttggtcagaggcaatgctgtatggaataccatgatggtggataaggcattctgtgagtccacagatagtagtgttggcagaagtattctgtgcagcataggcgaacccatatctggaataagtgtctactcyagtaaggacaaaccgctgcccttttcatgatggaagaggtctgatataatcaacctgccaccaagtggctggctgatgactccgagaaatggtgccacattgagggctcagtgttggtctgtgttgctggcaaattgggcactcaacaatgtctgtagccaggtcagccttggtgagtagaagtccacattactgagcccatgtataacctccatccctgccaccatggccactttgttcatgggcccactgggtgacaggggtggttggggagtactcatatgagatacaaatatcttcacagtttttgatcactcagagaggtccatccacataccttttccccaaatatctttgttaccaattttccagtcatgcttattccaagtcc

SEQ ID NO: 763092 - DNA, 571 bp, Homo sapiens
gcatagttttgagaaatgcccttttgtatcattttctagttttattctgctatggtctgacaagatatttggtatgatttcaagtttttaaaatgcattgaagccagttttgtgccctaatacatggcctatcttggagaatgttccatgtgttgatgagatgtatttacattctgttgttgtccagtagaatgtcatttaaatgtctgtttgctaagtgcatttggcccaaagccttacttaagtccagtgatcttttgtttsattattttgtattgctgtctatattgtatcctctgttttattgtttcatttattcttacatgatatccttttgtgtattttttactgtttttgatttgaagtttgttttatttgatataagaataactaattctgccctcttttgactctcatttgcatggaatattcatttttacctctgttccttcagtctataatataaatgtctgtactagtaaggtgagtttcttgtaagaagcagatggttggttcatctcaaaaatttttctacctatttcttttaagtggaacatttattccatttatg

SEQ ID NO: 763093 - DNA, 583 bp, Homo sapiens
cttatctactgggcttcaagtctctcaatggaaagatcaagatttaggattgagaaacgtgagtttgaattatgcatttgttatcgcttcactggagttttctgatgtaatcatatttttttaaagtcattatttattgaaaacatctataaaattactatgtgagtactcatgcataatagttttccttatacagattgtaacattttagctggagagctggttattctgcagggtttcttttcgcctctaagcttagaggagtaactccatgtctgtgccttttcaacaaaaggaagcagaccttaagttcttgtcctagagctaaggtagctggcttctggcaaagagtacatttatacccyctatggagtatacacagacccttcaagaacttgtaagaagtgtcattgagtgtgacaaatggaatagcagttggccattccagaatgtcctagcagatttggggcatccttgcatagtcatttatatatctagactttccattcatgtagcactcactagctttgtacatttcaagggttgaattgagcagggagttcagccactcatttttttttaa

SEQ ID NO: 763094 - DNA, 537 bp, Homo sapiens
aagacaattaggtacttctatttaaaatgctcaataacttactaaatcattgtcagcaggcatttgctctacatttttacattgaaattattttaggaaatttttcaaaattattagaatgacctgaaatgacagtcatcttaactttgggattataacagcaaacagtattagatagtttccacattgctgaaatgtaactttaagttcataaattgagctgggtctgctagattttcagtttgggaaatataattttctttagaatattaagagatatttatttatttatttattttatttatttatttttaatttttatttccttttttaaaattttttattttattttattattattatactctaagtkttagggtacatgtgcacaatgtgcacgttacttacatatgtatacatgtgccatgctggtgtgctgcacccattaactcgtcatttagtattaggtatatctcctaatgctctctttgtataaataaaccaatgcaatattttttctgggtccaacaacttcca

SEQ ID NO: 763095 - DNA, 537 bp, Homo sapiens
aagacaattaggtacttctatttaaaatgctcaataacttactaaatcattgtcagcaggcatttgctctacatttttacattgaaattattttaggaaatttttcaaaattattagaatgacctgaaatgacagtcatcttaactttgggattataacagcaaacagtattagatagtttccacattgctgaaatgtaactttaagttcataaattgagctgggtctgctagattttcagtttgggaaatataattttctttagaatattaagagatatttatttatttatttattttatttatttatttttaatttttatttccttttttaaaattttttattttattttattattattatactctaagtgttagggtacatgtgcacaatgtgcasgttacttacatatgtatacatgtgccatgctggtgtgctgcacccattaactcgtcatttagtattaggtatatctcctaatgctctctttgtataaataaaccaatgcaatattttttctgggtccaacaacttcca

SEQ ID NO: 763096 - DNA, 653 bp, Homo sapiens
tcaaaaactattaatgagttatgactcacaaatttaggagtgataatttacactaacagataactatccatcaatgtcccaaattcctaattctattatttacatagcagcagggatacaaaccaatgaaagatggttaataatagaataccaggcatcagtgaagacacagggaataattacctgaaagatttacctgagtttggtggattgttccaccaggagagttttttttcttgcaaagctcagtgagaccacttatcacaaccttacttgtggcgactcataaagtgacatgagtcgctttcagcctgatcataaatcttcccatgagtgatcccccatcctccatcctctgacttgagacagattaacataacagtattgaaagccaagtgttcacaatggcaaaaatataagatggaaggagtctgaatatcttaaccactgattttttttwaaaaaaatctgtctatcaatcacgaacaccagttttggactttacatgagagataaagaaatgtctattttgctaagtcccaaagatttgggggtttgtttattaaagcagctagtattatttcaactaatgcgtaagctatcattttggaaattactaagaatagccttctaagaggacgtgataggaagtc

SEQ ID NO: 763097 - DNA, 508 bp, Homo sapiens
tttattggccatggggataatttgtttaatgaacaaagacagtgcactttcacttcaagtgtctgtgtgcaaaggtataatgcagtggacagagtctagtcaaaatctttgctccaaaccacattacttgtaaagcactgataattgaccaaagatttttgaaactcagagttttcttatcattggargtaggcattacctagctgagtgtttaaattattagactgagtgtatatttttttttcagcaaataggtgctgaataaataaaccatattaccattaaaaacaggaaaacactgtcatactaaacattcttaggacttcaaatagtttttttaaataacagatgtgaactgggcattttcaactatagaaaagaatatgttcttgtctgtatattatatattaatactgcatttcataggaatttttattggtgaaacaaaatatgttggttgagggaaaggctaatatgtatctaatctatttatatttacagaaaaatt

SEQ ID NO: 763098 - DNA, 508 bp, Homo sapiens
tttattggccatggggataatttgtttaatgaacaaagacagtgcactttcacttcaagtgtctgtgtgcaaaggtataatgcagtggacagagtctagtcaaaatctttgctccaaaccacattacttgtaaagcactgataattgaccaaagatttttgaaactcagagttttcttatcattggaggtaggcattacctagctgagtgtttaaattattagactgagtgtatatttttttttcagcaaataggtgctgaataaataaaccatattaccattaaaaacaggaaaacactgtcatactaaacattcttaggacttcaaatagtttttttaaataacakatgtgaactgggcattttcaactatagaaaagaatatgttcttgtctgtatattatatattaatactgcatttcataggaatttttattggtgaaacaaaatatgttggttgagggaaaggctaatatgtatctaatctatttatatttacagaaaaatt

SEQ ID NO: 763099 - DNA, 541 bp, Homo sapiens
tatgaaatctgcactttctcggagtcacaatatcacagctttgtagttttgctgtagattcagttcagacgactattctgtccacagatattatacacactaacgctcctttcactctacacaccagttcttttgtttgtttgcttgtttgttcaatggattggaaawtatgcgaaaatataaacacgcttttagtatggttgggtgcctgattgctcttctaattttggaatgccttaaactgttgttgggctcagaagacgtcctctggcttgctgaggacttggagcaaagggcctgggagggccttggagggcctcagaagcaaagtttctgaccttctcctcgccttcctcctcctgctaaactttctcccccaaggccgaccatagaaactaggaaactagggccgggtgcggtggctcatgtctgtaatcccaacactgtgggaagccgaggcgggtggatcatctgaggtcaggagttcgagaccagcctgtccaacatggcaaaacctggtatctactaaaaatacaaaaat

SEQ ID NO: 763100 - DNA, 541 bp, Homo sapiens
tatgaaatctgcactttctcggagtcacaatatcacagctttgtagttttgctgtagattcagttcagacgactattctgtccacagatattatacacactaacgctcctttcactctacacaccagttcttttgtttgtttgcttgtttgttcaatggattggaaaatatgcgaaaatataaacacgcttttagtatggttgggtgcctgattgctcttctaattttkgaatgccttaaactgttgttgggctcagaagacgtcctctggcttgctgaggacttggagcaaagggcctgggagggccttggagggcctcagaagcaaagtttctgaccttctcctcgccttcctcctcctgctaaactttctcccccaaggccgaccatagaaactaggaaactagggccgggtgcggtggctcatgtctgtaatcccaacactgtgggaagccgaggcgggtggatcatctgaggtcaggagttcgagaccagcctgtccaacatggcaaaacctggtatctactaaaaatacaaaaat

SEQ ID NO: 763101 - DNA, 541 bp, Homo sapiens
tatgaaatctgcactttctcggagtcacaatatcacagctttgtagttttgctgtagattcagttcagacgactattctgtccacagatattatacacactaacgctcctttcactctacacaccagttcttttgtttgtttgcttgtttgttcaatggattggaaaatatgcgaaaatataaacacgcttttagtatggttgggtgcctgattgctcttctaattttggaatgccttaaactgttgttgggctcagaagacgtcctctggcttgytgaggacttggagcaaagggcctgggagggccttggagggcctcagaagcaaagtttctgaccttctcctcgccttcctcctcctgctaaactttctcccccaaggccgaccatagaaactaggaaactagggccgggtgcggtggctcatgtctgtaatcccaacactgtgggaagccgaggcgggtggatcatctgaggtcaggagttcgagaccagcctgtccaacatggcaaaacctggtatctactaaaaatacaaaaat

SEQ ID NO: 763102 - DNA, 622 bp, Homo sapiens
caactctttcatagtccatttctgcagagtggatcttctctgacctattccatgctatatcttttggttcaatttagtatctatacttcattacacacttgaatagctatttaatcttgcacaaacacccatatggtgaggtttgaaacctggcacaagagataaaggcaaataattactatcctcacttaacattttatcttcttgccatttaaaacctttttgtagaagtgctgataatctggatgattaaatggcttaggtccttctgatagatttttatggcctggactcaacaaaaacttaggtttyaaaagttcagttgcaattttatctgaaacctgaagatagtttcttatacctgcaaaaaatgaactcatatgaaatgaaaaatatgaagtgatgttgtagactgagcacgttattacagactctgctcacacaatggaagtgctaagaggaaacatgaactatttttttaaaaatggctgagaatgccacaatcatgcctccttatttgcttcctgtaatacaattattttactgacatatgttcaaaatgtcctctttaacaatcattttggaatactgtttaaagcatatcagaagtagagtggaaagt

SEQ ID NO: 763103 - DNA, 622 bp, Homo sapiens
caactctttcatagtccatttctgcagagtggatcttctctgacctattccatgctatatcttttggttcaatttagtatctatacttcattacacacttgaatagctatttaatcttgcacaaacacccatatggtgaggtttgaaacctggcacaagagataaaggcaaataattactatcctcacttaacattttatcttcttgccatttaaaacctttttgtagaagtgctgataatctggatgattaaatggcttaggtccttctgatagatttttatggcctggactcaacaaaaacttaggttttaaaagttcagttgcaattttatctgaaacctgaagatagtttcttatacctgcaaaaaatgaactcatatgaaatgaaaaatatgaagygatgttgtagactgagcacgttattacagactctgctcacacaatggaagtgctaagaggaaacatgaactatttttttaaaaatggctgagaatgccacaatcatgcctccttatttgcttcctgtaatacaattattttactgacatatgttcaaaatgtcctctttaacaatcattttggaatactgtttaaagcatatcagaagtagagtggaaagt

SEQ ID NO: 763104 - DNA, 674 bp, Homo sapiens
tatcccaattaatctaggatcataaaattgagcccatattcctgccctgcaagctggtgactagtcaaattattcatggttttccccctcttgaatattccaaagttttttagtttactccacttttccccatatgtttaaagggcttttcttcaaggccagtgaaacttccccgcattttatctgactttctcttgttccagtttctgcagagagtacaccagaccaataagtgtaatagcaaggccaaatacagtcttaatatctgaaatagctagaactttcagcatttcaattggccacaggttctacccttattttcaaatttttaagctttgagagaaaaatatacacaacgtctcagatttcctgctctactgagctcagaaaagtgtgtaattctagcttagcttttataagcattgtttttggtgaccrtaagcttggtgtgaactcataaatctacattgaggaaacacctatttttggtaacctatttttgtcttgggtattttgattttgtcatattccagcccagatgactaaaggataattaacaaagacagttttagtttaatctgataataatataacaaagtctctccctgcgaccatttgtattacttctaaatgtacataagcatcaaatatttaagcatgagcataaacaacct

SEQ ID NO: 763105 - DNA, 674 bp, Homo sapiens
tatcccaattaatctaggatcataaaattgagcccatattcctgccctgcaagctggtgactagtcaaattattcatggttttccccctcttgaatattccaaagttttttagtttactccacttttccccatatgtttaaagggcttttcttcaaggccagtgaaacttccccgcattttatctgactttctcttgttccagtttctgcagagagtacaccagaccaataagtgtaatagcaaggccaaatacagtcttaatatctgaaatagctagaactttcagcatttcaattggccacaggttctacccttattttcaaatttttaagctttgagagaaaaatatacacaacgtctcagatttcctgctctactgagctcagaaaagtgtgtaattctagcttagcttttataagcattgtttttggtgaccataagcttggtgtgaactcrtaaatctacattgaggaaacacctatttttggtaacctatttttgtcttgggtattttgattttgtcatattccagcccagatgactaaaggataattaacaaagacagttttagtttaatctgataataatataacaaagtctctccctgcgaccatttgtattacttctaaatgtacataagcatcaaatatttaagcatgagcataaacaacct

SEQ ID NO: 763106 - DNA, 660 bp, Homo sapiens
attcagggaagaaaaaaactatctgtatattgaattgaccttagagatactactcttggatagacataggtagtgaagattttgtcaaagtatttatttggctttctttgaaaatgtaaaccttaatatatatctaggatgatataacaaattttggtcttgccatgttatttctaaggtaaagggcattgtgatagtcacatttctcagaacaatgcctggcacatagtaggtactcaataaaaaccacatattrttgttgagtaagccaaatggtattcattcattgaagagatccattataattcttcataatgaccaagtatttattatcatataaactttgtttaatattctaacaattctattgcttttggctttagtgtttttcaatcagtatgaaacagattgtgaagatggaatcctatggaatatgctgtgtttggtgctaattcccaatcaagatgtgtatattgcttaatagcctctgaaatctgtatgaaactaatgtacacttaacaattttacaactgtcctctcttaacacaaaacataaggctttcaaataaaggaagcagatttaaatacaatttgtatcaacacattgcagtaacatttttacctagggaaatgaaaaagaatgtaatggattttaatgca

SEQ ID NO: 763107 - DNA, 629 bp, Homo sapiens
taattggtataataagcagatagaaaatcaataaggttcaagaacagcctggccaacctggtgaaaccccgtctctactaaaaatacaaaaattatctgggtgtggtggcacacgcctgtagttccagctactagggaggctgaggcacaagaatcgcttgaaccagggaggctgaggttgcagtgagcagagattgtaccagtgtactccagccyaggcgacagagtgagaccctgtctcaaaacaaacaaacaaacaaacaaaaattaataagaatacagaagacccgaacattactgtcaaccaacttaagaacactcaacccaaaactgcagaacacacatatttatcaagtgcatatgaaaactttacaagtaaaatttgtgtttcttaaatacaataacaacaaatataataattaatatatacttataagtatactaattactttaaaagcacaggaatcatgcaaaatatgtctttgaattaagctaaatgataaaattgaattaaattaaactaaaatgatagtggaaacatatttggaaaacccccaaagattgggaaattaaacaaggcacatccaaataactcaagtcaaagaagaagaaaataataataatataag

SEQ ID NO: 763108 - DNA, 589 bp, Homo sapiens
taagttcattcggatatagtccccattaattttcatgtttttcaagcagataccatcattttccctgttccggcatccttccaggaagctgcaaggactaggttaataaaatagctgtgtcaaatggttagctaccaggatatctcagggactgaaattcctttataacaaagttggaaatacattgcagataccctcagaattttggcaacaggacagtcaaataacagagggtttgggggaatrtggaaaaggatatcttctcagcctggatatgtagcaaagccacacaggtctgacagagaacatagagcccaatccatttgctattgagtcccttgacacccttccattttggagaagaagttgagggcctggaataactgagcaaaggctgcacatacacttgcatggcatcccaagtgtagcctcatgtacacatacatgctcacactcatagcattttaccataatattaccattatatgctttcacgcatatgaatctaaatgagcgtgtttcacttgaaaagacagagacattggccttctccctctgtttcttttcttcctctaccttcccttccaca

SEQ ID NO: 763109 - DNA, 588 bp, Homo sapiens
tctgccataacagttgacacatatattaaggatttaccatgtgctgtagcatttacgtacattagctcaatgactcagcaaacccctcagtaaaataagcatgattattccattttatggatgagaaacaggaatctaaagaattaagtaggctgagcgcagtggctcacatctgtaaacccagcactttgggagatcaaggagggtggatcacctcaggtcaggagttcaagaccaacctggccaacatggtgaatcctctactctgctaaaaatacaaaaattagccgggtgtggtggcgagtgcctgtaatcccagctacttgggagactgaggcaggaggatcgcttgaacccgggaggcagaggttgcagtgagccgagatcgcaccaccacactccaacctgggtgacagagtgagactccatctcaaaaaaaaaaaaamattaaggaacttgcccaagttcacagagttaaaaagtgaggtcgttgtgcatgactccgtctcccaggcccattcaccaggggtgctgtttccttatccagttcattcattccgagattttttcacttatttgtgtgctttg

SEQ ID NO: 763110 - DNA, 555 bp, Homo sapiens
ggaccctacactgctgtcaggtttgtcccagcctctggtggaagaaccagaaaacgacattctaaaggaactgatcacactcggccttggattttagatacttttatctctaccaccactctgtcagtagggggcagcggggaagagggaagggaagggagaggttgagaggagacagatgagaagaagaaaacggacactgctattggttggtacctactacttcctggtggctcggaaccttacctatacctttygtttaattcttgcaacaagcctataagatgttattatccccattttgcacatgaggaagctaagcctcagagatgtttagtaatggaacaaggtccccctagtcagtaaggagtagagctgggattcaaaccccaggttgtccaccaccaaagtctcaaacccttcctctctcctgcactgtcttcacatcttggtattccctgcagtgtctggcagagtaccttcatagaacaggtgcataaaaatgtttgatagatgaatgcatgaatggctgactccagccttaataccttaata

SEQ ID NO: 763111 - DNA, 533 bp, Homo sapiens
acaggtagggcttcttgttcccttaaaacatgcgttgggtgctcatcagctgaatgacaacagcagacaattcttgttttctattttttacagtaactcagcatttaagcagacttatttgtttatagaattttttcatactcaccaaatcttcattctgacttgctaaaagatcacgactgaatgcaagctgactgacacaaaccacaaatctgtcagggaatacacagagttctgtataaaatgaagaaaaacaagtttaaaggtgtcaaaaaactataaacacagaatggttgttccagatttttgttcattttaagttactgcaatatgcacatccatataaaacatacgtctcttctctcctcccrtcctttcggtgtttgccgtcaatagggcagggtgagcgcaaagctctagggagagctgatgaggctgcaaattggtccacctgcgccccgggaccattacattacaggaaacccccaggcagaacctctgtagcctcccctctgtgtcagtcagctgttttc

SEQ ID NO: 763112 - DNA, 492 bp, Homo sapiens
aatttgctgtagaaaattcacagatggatgcagagactccttgtctttgagcctgtgtaaagattttggtgacatctagaaggttctttccggtgaagatgcttattggcatcaaaacaagaaccccaatagcaacccagatccctgacacctctggcatagaaagctctgctgcctacaagtgccttcagattgattgatggggcattttcacaggagagccacctaagaatattcttttctagatgccccaggctctgccacaggcagayggcccacatgctgagcagaagggcgctgggacaaggctcactggggcagcattttaaggagaatatatcaatagagcaatgttgctgcttcacaaggtccttctcttgtgctgtgacaggaaggtccctctaggctcctcctactgggacacatcccaaatacccagcccagtctcccacctcctggctggaggctgccctgatttaccattccacctct

SEQ ID NO: 763113 - DNA, 631 bp, Homo sapiens
aggtccttctcttgtgctgtgacaggaaggtccctctaggctcctcctactgggacacatcccaaatacccagcccagtctcccacctcctggctggaggctgccctgatttaccattccacctctccctctgacaataggaatggatgcgctggtattcatcttyccaggcacccaccgtgggtttgggaaagagccttctgcgttcttctcaccagtcaagcatgtgaaggaggaactgaaaaggccttgggagctgctgggcctagaaaaattcccagtcaatccatcacctgcctcctctggagcagggtctgtcagtctctccactgttcctggggcaggtggagagagggatgtgaagcaacgagtggaaatgaggtgtgagtgtgcctgtgtgtgtgtgtgtctgtgtgtgtgtgtctaagcgcagaacaggactggtaacagaagtgcaggcgagagggcgtgggagactgggaactcatttataaaagctcttctgccctaaagcaagtcaaactccctgctgaggagttgctttttcttcctcccttttgagtcttgtgtgctgaactgacctctcccctggcagaggtcagcgctctgctcaccccgcacacactcagcc

SEQ ID NO: 763114 - DNA, 581 bp, Homo sapiens
tggttactgaccaggctacaaagctctagaagacttcactcacatgtttagttcttctcaatgataccctctctcttcacaaggtgtctcatcactcagtaatctggcttgagctcccttacaacatggcatctagcttccccagagcacatgaaagtggaagctgccagcttcctaagggctacctctggaactggyacactattatttccactgtattctattgggcagcaaatcacaaggtcaagaggagaggaaataactgcctcttgatggaaggagcagcgtacctccagaggagggaagggattgttggtggccatctttggaaattgtttagtgtagttttcttatttgtttattatagttttcttatctattaaatgagatgttgaattagggagtttctaagggcctgtcaaactctacatttccgtaatactatacttttttttttttttgagatggagtctggctctgtcgcccaggctcgagtgcagtggcacgatctcggcttactgcaacctgtgcctcccaggttcacgctattctcctgccttagcctcccgagtagctgggac

SEQ ID NO: 763115 - DNA, 555 bp, Homo sapiens
ttctaattgcttctgtttaagaagattcagtgacacactgtggtcctgtgttcaataaagagcacacctaaaatactgtttgctctaagagaggcgcctacagtgggccatggaaatgcacattctaccaggtactcggtttccactctgtgcagcccacccctattgtataagcagagtcagctccactgaagttagtattctgttgggctccctcttctcctatagaatcccctgactgggttccgctgggagcaggaaaaaagccaagagggaagaggacaggataccagtaggmagggctgtttcaagtgggggtggtgaggctgggatcatgggacaggaacaggtttctaggcagggtttggaacattaaagtaacagtatctaccaccacagtcaggcttggtgaccaagatggaatttcatgacccaaaatggtgccatgaaatatagctgctgcttcatgagtcttactggtcttaacaagtggggacaggagatacgggaaaggatagaacgggatggaataaaccactaatccatctcaagcat

SEQ ID NO: 763116 - DNA, 598 bp, Homo sapiens
gtaatcaaataatccattgctatgtgaaaactctgaaaacctgttatagagttaaattgtcattgaaaattccttaaaaaggcaataaaatattgtctattcaccagtaggtaggtacttctacatctttgaaaaggaagttacatctcttagattaaatagtcatttccctgtttttaaaagaaattttwaagaaacttaatcacagaactttactagcctagaacacctggtttcatttttgtctactctaaatttttttaatcaacatgtacacattttcagaaataatgtaaactagacatgaaaagttactattgtttttacatcaattattttattattcaattagggatcctcatattttcaggacactgtgtgttggtgtgatgtacatagtttaaatgtgtccccaccaacagcatagtataaactagaatccagtactgaataaaatatgtttcgaaaagtccaaagataggttgttttataactattctgattatttatattcaaggtcaattttgtagtttgctaagatttaaactatataacataaggaagtctgagatagattgtaaaacctcactttcttcct

SEQ ID NO: 763117 - DNA, 626 bp, Homo sapiens
aaaattctgagagtggttgtaaaatgtgctcaccacaaaaatgacaactttgtgaggtgatgcatatgctagttgactgggttcaacaattccacaattcatgtaaacttcagaatattatgttgtacacaataaatatccacatacaattgtatctatcaattcaaaaaaatttaattaaaaagaaaaaactaaagacaacacatgcagatcagaatgggtggtgccagtattaatgcccattaagttcaagtgatttatgaacatggtagggtggaataatgagaattcagggaggatccacggaacagatgagccttattctctgctggcaaagtgatacatgtcatatatgtagaggggaagagaaaagtcattctaagtaaagagtcacatgaatggaacaccaagaaaagaatttccaccactgaatttagcatacagggtggtaagtatttgctaatgtaytggactcctccactagcctgtgaaatttttgaaggcaggagctgtatattctcagctccaggaatattcatttacactgtacattatcagttctcaataaatatttgttgaataattggatattaacctggtttctaatgtggttgcaaatttgagat

SEQ ID NO: 763118 - DNA, 603 bp, Homo sapiens
ccactcctggtaccaatttactgtattagcctgttctcacactgctatgaagaaatacccaagattaggtaatttataaaggaaaaaggtttaattgattcacagttctacattgctgaggaggcctcgggaaatttacaatcatggcagaaggcaacgggagaagcaggcaccttcttcatgtggcagcaggacacagkgtgagccagcagggggaatgccagatgcttataaagccatcatatttcatgagaactcattcactatcatgagaacaacaaagggaaaacaacctccatgattcaattacctctcagggggacatagggattattgggattacaattcaagatgagatttgggtgaagatgaagccaaactgtatcaaatagactattcagaagtatcaagataggcatatgaactactctgatgggtttcgcagtagagaagagagattgagccaacttcaaatatagcaagaaaaagtgggaatttatagacaagaagcaggatggaggtcagtagatggaaaattattaagaggaaacatcagggatgagggggattctggccaaaccaccctaacagtactgttggtga

SEQ ID NO: 763119 - DNA, 603 bp, Homo sapiens
ccactcctggtaccaatttactgtattagcctgttctcacactgctatgaagaaatacccaagattaggtaatttataaaggaaaaaggtttaattgattcacagttctacattgctgaggaggcctcgggaaatttacaatcatggcagaaggcaacgggagaagcaggcaccttcttcatgtggcagcaggacacagggtgagccagcagggggaatgccagatgcttataaagccatyatatttcatgagaactcattcactatcatgagaacaacaaagggaaaacaacctccatgattcaattacctctcagggggacatagggattattgggattacaattcaagatgagatttgggtgaagatgaagccaaactgtatcaaatagactattcagaagtatcaagataggcatatgaactactctgatgggtttcgcagtagagaagagagattgagccaacttcaaatatagcaagaaaaagtgggaatttatagacaagaagcaggatggaggtcagtagatggaaaattattaagaggaaacatcagggatgagggggattctggccaaaccaccctaacagtactgttggtga

SEQ ID NO: 763120 - DNA, 603 bp, Homo sapiens
ccactcctggtaccaatttactgtattagcctgttctcacactgctatgaagaaatacccaagattaggtaatttataaaggaaaaaggtttaattgattcacagttctacattgctgaggaggcctcgggaaatttacaatcatggcagaaggcaacgggagaagcaggcaccttcttcatgtggcagcaggacacagggtgagccagcagggggaatgccagatgcttataaagccatcrtatttcatgagaactcattcactatcatgagaacaacaaagggaaaacaacctccatgattcaattacctctcagggggacatagggattattgggattacaattcaagatgagatttgggtgaagatgaagccaaactgtatcaaatagactattcagaagtatcaagataggcatatgaactactctgatgggtttcgcagtagagaagagagattgagccaacttcaaatatagcaagaaaaagtgggaatttatagacaagaagcaggatggaggtcagtagatggaaaattattaagaggaaacatcagggatgagggggattctggccaaaccaccctaacagtactgttggtga

SEQ ID NO: 763121 - DNA, 503 bp, Homo sapiens
ttcagttccatctaaggacatggactctggcttcaactgccaggattcagatctcagcttcatctttttttttttttgagatggagtcttatcctgtctcctaggctggagtgcagtggcgcaatctcagctcattgcaacctctgcctcctgggttcaagcaattctcctgcctcagcctccaragtagctgggactacaggcgcccaccatcacgtctggctaatttttgtatttttagtagagacggggtttcaccatattggccaggctggtctcgaactcccgacctggtgagcctcctcagcctcccaaagtggtaggattacaggcgtgagccactgcacctggccagcttcatctcttcatatgtgatcttgggcaagacaatctcttaatgactccatttgattgcctcagctgtagaatgtggagagtacttagtcatctcattagttgttggaaggcttaaatgagttaaaatatgtaaagtacttagaagg

SEQ ID NO: 763122 - DNA, 503 bp, Homo sapiens
ttcagttccatctaaggacatggactctggcttcaactgccaggattcagatctcagcttcatctttttttttttttgagatggagtcttatcctgtctcctaggctggagtgcagtggcgcaatctcagctcattgcaacctctgcctcctgggttcaagcaattctcctgcctcagcctccaaagtagctgggactacaggcgcccaccatcacrtctggctaatttttgtatttttagtagagacggggtttcaccatattggccaggctggtctcgaactcccgacctggtgagcctcctcagcctcccaaagtggtaggattacaggcgtgagccactgcacctggccagcttcatctcttcatatgtgatcttgggcaagacaatctcttaatgactccatttgattgcctcagctgtagaatgtggagagtacttagtcatctcattagttgttggaaggcttaaatgagttaaaatatgtaaagtacttagaagg

SEQ ID NO: 763123 - DNA, 553 bp, Homo sapiens
  misc_feature 296: n = A,T,C or G
tttttatctagagtcaatgaataaatccttgcaaacacacaacctcccaagatagtatcagtgagaaactgaaaccctgaacagaccactgagttctaaaataaaatcagtaagaaaaaaacctaccaagaataaaaacaaagccccagaccagatggatttatggctgaattctacaaaacatacaaagctgataccaatttaccaaaacttacaaaaattcaatgagaagggactttcctaactcgttctacaaaggccaccattaacctaataccaaaacacgggcaaagccncaccaaaaaaagaaaaatacaggacaatatttctgatgaacccagttcstaaaatcctcagcaaaatactatcaaaccaactccagtagcatatcaaaaagttaattcgccatgatcaaacaggattcttcctgggatgcaaggttgtttcaacatatgcaaattaatacatgtgattccccatgtaaatagaattaaaaataaaagccatatgatcatttcaatagatgcagaaaaagctttcaataaaatccaac

SEQ ID NO: 763124 - DNA, 621 bp, Homo sapiens
acagaaatccaacaccctttcatgacaaaaacttttcaacaaactagaaatagaggggaacccagtccatttatgttcttaaaattatatatgtttattgtatctgtgtagtggaaatactatatactgatgtgatactgagtatctcttcccaactctgtattcagtgatgtcaggtttgtagcttgattaaaccatggtgggagtatttacaccacagaaatccccaaatgcaacaaaaaatgttttgaagaaccagttgttatacatttactaacacgctacgagcacatycagcttcagaaaacagaagaatgctggtgagcaataggggcaaacttattcagtgttctagacaggaatgttacaaaaagcctgcagctaacatcatatttaagggtgaaggaaggaatgctttccttctaagatcagaaacaagataaggatgtctgctctcaccacttctatgtaacaatggactggaggcagtcaggggaaaaaagaacaaaagaaagaaacaagtagagagaaaaaaatccagattaaaaaggaagaagtaaattatcagatgatatgactttatagacacaaaatcctaataaaatctactaaaaactatta

SEQ ID NO: 763125 - DNA, 683 bp, Homo sapiens
aataacaatgagataccatttcttacccactagatggctacaataaaaaagacagacaataacagtgttaacaagatcggtgaattggaatcctcctctgtttctgatgggaatgctgtagaaaacagtttagtagatactcaaaatgttaaactacatgttccagtaattctactttcaggtatttatacccaagggaattaaaaacatayacatatacaagaacttgacacgaatgttcacagcagcattatttataacagtgaaaaagtggaaacaatccaattctccatcaactgacaaatggatacataacatgtagtatattcttataagggaacattattggcatgaaaagaaatgaaatacttacgcatgctacgatatgatgaacttgaaacattatgctaagtgaaagaagccagtcacacaagcctgcatattttgtgattctgtatatatgagatgtccaggataagcaagtttacagagacagaaagtagtttaggcgttgattagggcagggctggttaggagggttatgaggagtgagtgctaatgggtgcctggtctttgagggtggaaactgaaaatattctaattaggttagattgtgatgatggttgcacaaccttgacaacatattaaaaattatggagttgtatgctttaattgaatgaact

SEQ ID NO: 763126 - DNA, 683 bp, Homo sapiens
aataacaatgagataccatttcttacccactagatggctacaataaaaaagacagacaataacagtgttaacaagatcggtgaattggaatcctcctctgtttctgatgggaatgctgtagaaaacagtttagtagatactcaaaatgttaaactacatgttccagtaattctactttcaggtatttatacccaagggaattaaaaacatacacatatacaagaacttgacacgaatgttcacagcagcattatttataacagtgaaaaagtggaaacaatccaattctccatcaactgamaaatggatacataacatgtagtatattcttataagggaacattattggcatgaaaagaaatgaaatacttacgcatgctacgatatgatgaacttgaaacattatgctaagtgaaagaagccagtcacacaagcctgcatattttgtgattctgtatatatgagatgtccaggataagcaagtttacagagacagaaagtagtttaggcgttgattagggcagggctggttaggagggttatgaggagtgagtgctaatgggtgcctggtctttgagggtggaaactgaaaatattctaattaggttagattgtgatgatggttgcacaaccttgacaacatattaaaaattatggagttgtatgctttaattgaatgaact

SEQ ID NO: 763127 - DNA, 579 bp, Homo sapiens
ggagattaggacttcaacatatgaattttggggtgttgtggggagatgcagtttatcccataacactctacttaagtaaaatgctttttccaaaatgttgctgcagaagaattttgaagcaaaggagccaacaaattttctcttgaaactctgggagctcaagcagtccaatttaattaaattcatttactactaagtaaatgcctgtgcacacaatgtactcctctagagaaaagcctattgtcactgcatctatataattgaatcacaaaagatgcctcccttgcctccccccacgccatcaagtcctttcatctgtttccaataagggaaaaaagagaactcttctgggcatgtttrcattttatctttaaacaaaactaaatggaatttgacatggtaaagccaggccatgttacatatcaatgtgaaatgaaacgtttctcgggccaggtgttgcccagcacctgtgtgcaggttcccaggattctccacgcacctgaatagaatgtggggcccagagaggaaagggagggactcagtcagcaccactgcaatatttgtgcaagaagatgtttc

SEQ ID NO: 763128 - DNA, 572 bp, Homo sapiens
cctacattttaaaaaaatttatggagcattattttatagtatgtggttatcaaatcttctgtttattctaataatgtatattctttgagatgtacaggattctatatgcttatatatgtacacacatatgtacacacaactatgtatatttatatatatgtgtatatatacacacacacacgtgtgtatatgtgtgtgtgtatatatgtgtatatatatatgtgtgtgtgtatttatgtatatatacacacacacacatacgtgtgtgtgtatttttttgagacagggtctcgttctgttgcccaggctgaartgcagtggtacagttatagctcactgcagtcttgacctcctgggctcaatctattctcccacctcagcttcctaagtagctgggactacagatacatgccaccttgctcagctaatttttgtattttttagtaacaccgggtttcaccatgctgaggctggtctcgaattcctggggtcaagcgatcctccctccttggccttccaaagtgctgggattacaggcgagacccactgtacctggctggattctatatatt

SEQ ID NO: 763129 - DNA, 640 bp, Homo sapiens
gaaaataaaatagtgtatttgcattgcatttacaacttctttaatgtctgagatttttttacttaatgaaattaataacattgatattctttacccagaataataaatggtatctatttttagtatcagtcaaagtcaagtcaggggacagaaactaacatctacttaaatagagataatcgaatacaaacaactggcaaataagtaaaaagttattaactaggtaactgaaatggcaataaaagaactctgaggtaccacaaatgttgcatttgcaaaatgcagctamcattcctagggctagggaaataaaagaaaaagtttggaattattaaaacttagaaaccttgaggttgatccccatgggcctaggccccagacctctgaggaatctgagctcaaaagggagagtcagggacattgccatatagatgataagcatgtcaattctctatatctgtgtaaaaaagtccaacaaaacttaggctcttagaaatttatttttattatactcattgattctgtgggcactttagaaagaacacgataaggtggctctgtcaatcattttgggggcctcaattggaaggaccagaaagctgggggtgacttcgtgggtagggtcaggaatctcaagcac

SEQ ID NO: 763130 - DNA, 520 bp, Homo sapiens
gaactgtcaactacagaacagtattacatcagtgttacaaatttctgattttgctctctgtactgtggttaagtaagagtatcctagcttttaggaaatacaatgaaatatttaggaactaaggagcacagtgtctccaacttattttcaagtggttcaggaaaaaaaagtatttatattttattttcttgagacaagatcttgctctgtcacccaggctggagtgcagtggaatgatcatagctcattgcagccttgactgcccaggctcaagcaatcgtcccacctcagccgcccaagkagctggggctacaggtgcatgccaccacacccagctaattaattttttttttagagacgggggtcttactttgcagcccaggttggtctcgaactcctggcggcttcaagccatctgcccgtctcagcctcccaaagtattaggattacaggcatgagccaccacgcctggccaaaatgtatgtatgtatgtatgtatgtatgtatgtatgtatgcatg

SEQ ID NO: 763131 - DNA, 569 bp, Homo sapiens
atctgttaacttcctaataagttgagaagttagccctgttgccctcattcctttctttccttcaataacataaaagttttttttttccccacatgaagttcagtactggtgtttgtggtcatgtgattattcaggactggggcactggttctcaaagtgtggtccagaaaccccagagaggtttccaggatcctgtcacagggtccataagatgtaaagtatttgtgtgtgtgtgtgtgtgtrtgtgtgtgtgtgtgtgtgtgtgtgtttatgtttggcacgcttattttttccacaagtatacatggagttttccagtagccacatgacgtttgatgacatgatggcatcacactgttagctaatgaaacgtgcacttgtgtgttcttgtgttttccagaattttctgaggtaagaatacctcagtcgattgaatgcagagacaggtatgaaaattgacctgtgttctgttaaaccacatatcaaaaagccttgcagaaatgtaaaataaggccaatcactaaatgttttgttttggaaaaaaagtacttttcgttaaaagcagttac

SEQ ID NO: 763132 - DNA, 569 bp, Homo sapiens
atctgttaacttcctaataagttgagaagttagccctgttgccctcattcctttctttccttcaataacataaaagttttttttttccccacatgaagttcagtactggtgtttgtggtcatgtgattattcaggactggggcactggttctcaaagtgtggtccagaaaccccagagaggtttccaggatcctgtcacagggtccataagatgtaaagtatttgtgtgtgtgtgtgtgtgtatgtgtgtgtgtgtgtgtgtgtgtgtttatgtttggcacgcttattttttccacaagtatacatggagttttccagtagccacatgacgtttgatgacatgatggcatcacactgwtagctaatgaaacgtgcacttgtgtgttcttgtgttttccagaattttctgaggtaagaatacctcagtcgattgaatgcagagacaggtatgaaaattgacctgtgttctgttaaaccacatatcaaaaagccttgcagaaatgtaaaataaggccaatcactaaatgttttgttttggaaaaaaagtacttttcgttaaaagcagttac

SEQ ID NO: 763133 - DNA, 569 bp, Homo sapiens
atctgttaacttcctaataagttgagaagttagccctgttgccctcattcctttctttccttcaataacataaaagttttttttttccccacatgaagttcagtactggtgtttgtggtcatgtgattattcaggactggggcactggttctcaaagtgtggtccagaaaccccagagaggtttccaggatcctgtcacagggtccataagatgtaaagtatttgtgtgtgtgtgtgtgtgtatgtgtgtgtgtgtgtgtgtgtgtgtttatgtttggcacgcttattttttccacaagtatacatggagttttccagtagccacatgacgtttgatgacatgatggcatcacactgttagctaatgaaacrtgcacttgtgtgttcttgtgttttccagaattttctgaggtaagaatacctcagtcgattgaatgcagagacaggtatgaaaattgacctgtgttctgttaaaccacatatcaaaaagccttgcagaaatgtaaaataaggccaatcactaaatgttttgttttggaaaaaaagtacttttcgttaaaagcagttac

SEQ ID NO: 763134 - DNA, 597 bp, Homo sapiens
ctgccccacacatgcatagccttccccattgtcaacattccccaccagatggggtacacttattacaatcgatgaacctacattcactcatcattaccacccagagtccatagtttatcttagagtttactctccatgttgtacattctgtgggtttggacaaatgtataatgacatgtattcactattatagcatcatatgtagtagcttcactacmcaaaaaatcctctgtgatccacctattcatccctctgtcctcctaactcccggcaactgctgatctttttactatcttcatagttttgcccttctagagtgttatatagttggaatcatacagtacgtggccttttcacattggcttcttttactcagtaaaatcttggttgcttcaagttttggcaattatgaataaagctgctataaacattggtgtataggtttttgtgtggacataagttttcaattcctttgggtaaataccaaggaatgtaattgctggatcatgtggtaaaagcatgtttagttttgtaagaaatcaccaaactgtctaacgctgtaatggccttttagaaaaaaagaaaacaaacaaaaga

SEQ ID NO: 763135 - DNA, 615 bp, Homo sapiens
ggatgacgagatgacacatattctgcttgcttactagtcagactgccaaaaatcatttgtttctcctcttgtaggtttaaacaaacacaaaaggaactgtgctcctatgtacggctactgcttctccacaggacttgaaaaactgaggcattaragacacttcctctctataaacccgaacagaacactttgtttcttttctcttagcatatagttggtagtttgtatttccaggccatcattgtacatgtttggcaagggccttcaattttctcagtacaatgtttcatccagtcactgaaggcccggcactgtaccttgaatttacaagccaagaaaaagactcagactgaaaagaagaccttcggtatcatcttcctgaaatacatcagactctacaaatgagttagaagacccagatccaattcccagtgtcttgcagtgtgatctctagacagctctttaatcttctgtagctccagtttttccatcctggaaaacagggattgtattacctgtccctccttgaattcagactcttactactgaatgagaatatttttatttctataatttgtgaaacaaccagcattcagaagactcagaaaataaagc

SEQ ID NO: 763136 - DNA, 478 bp, Homo sapiens
tttttaaatttttttgtagagatggaggtttcactatgttgcccaggccaatccttctcactggactcaagcaatcctcctgcattagcctcccaaagtagtgggattacaggtgtgaaccactacacctggcctcttgctaagtcaagrctgttcttatttgaaagataagaacaccctagtgtagagagggatttagctaaagtcacgcagcctttagtgacctaactggaattttatcccaactctgtaagactccaataccgtaatcgccactgtctacttccttgtgtctgagaatgaccaggggaccggcagacagatgcttgctctgggtgtgcctgtacactgtgcttcctgcctggtgcatgcctgagcctgcagggctggtggggctggaggcctgtggggtccctggagactggtggttctttctccacaactgttactgatggtattgaaaggtgagaatgtacct

SEQ ID NO: 763137 - DNA, 537 bp, Homo sapiens
atcagccttcttgattcgacaggtgaaggtactagatactgaggcccaaagagtagaagggtgtttgctcaatatcacagtcatttcatggcttgcacaaataagttaaaccttttcccgtgaagtatgtcctatcccatcttctttcctctttccactctctcctcttctggaatcttaacatttttcccttccccttttcatttctttgctcactttccctttgttaatcatactacaggttgaacatctgaaaatctaaaatccaaaatactccaaaatctgaaacttttggagtgctgagatkatgctcaaaggaaatgctcattggagcatttcagttttcagattttcaggtttgggatgctcaaccagtaagtataatgcaaataattcaaaatctgaaacatttccttggtcccaagtattttggataagggatatttaacttgtgtataattgacattttatcttactgtggaaattgtatgctccctatacttaatttaaagggggaaatagagaatttgttttctc

SEQ ID NO: 763138 - DNA, 609 bp, Homo sapiens
cctgaataagattctgcctgtcccttgaaggtttgtagctgagacctcctttctagccataaagtcctagatagcatcttcttccaatagaggactcattcatctacactgaaaatccgttgtttagtgaagcctgcatcaatgatcttagcttgattttctgggtaacttgctgcagattctccatcagcacttaactgtttcaccttgtactttttgtatttcaaatagccaacttgagacaagtttattagtaatttcatggtacccttttgtgggctgattctcacctcacccttccccaagcaactcctgtgactaatgtcaaacaatatgtccttttgttgcttttttcagccacccttacagacccccaacacmatcaacctggaaatgacctcagtatgtgtaatcttaagtcatcttgctaacgcagacacctctgaggttcccaagaaaacttcagtggagttctctaaactgaaaccttgagagaggaagattttcaagtaggaaccagacaaattcacttaaaactcaccactacacacctgtgtcatagaagcattccattttttctattgcagatgggatttcctcttcaagctt

SEQ ID NO: 763139 - DNA, 667 bp, Homo sapiens
agcagcagttaaaatagaaatcttaaagacattcccagaataagggttacccagaagtcaacatggcagattaacacccaatatagagttgctttagcctccacaataatgtagggaaataaatataatgaagatggcagtattttttaaaccatatttcaaagaaatcttctctttgaaacatggagaagaaggcatatgtcactatatgcaacataagcttatattcatatctatttagtatatccaggacaaattttatttagttctaggaatatacagtgagatttttcttactgccccttgacgttagatattattcaccttacagtgatcagagatacrtcttttagcatccaccacttgttcatcaaccttgtctgtcaaatggagaaatctatgtggcaaatgcaacaagaagttttccttgacccaataaagatacaggtccttccttaaatggctatgttgaaatataaattcttaaattatatacttatttacatggcttctcccctctagtgaacttatcctggaatctgtcaattagatttattctatgtactgtctattcttttaaaatgggactctctcagaaatatccctctggataaggtacacatctcatttttctcagtgacagtaaaggggcgtaatttctattaca

SEQ ID NO: 763140 - DNA, 499 bp, Homo sapiens
tttcccacatcttcctatcttcttttgagccctccaaactgttccaacctcagcctgttacccagttcaaagtcccttccacatttttaggtatatttatagcagtaccccattctcctggtactagtttactgtattactctgttctcacactgctataaagatactacctgagactgggtaatttttaaagaaaagaggtttaaytgattcacagttccacatggctggggaggcctcaagaaacttagaatcatggcaaaaggcaaaggaggcatcttctttacaaggtgacaggagagagaataaggtaagagtgaagggggaagagcctcttataaaaccatcagctatctcgtgagaactcactcattaccatgagaacagcatgggaaaactgcccccatcatccaatcacttcccaccagttctctcccttaacacatggggattacaattcaagatgagatgtggatggggacacaaagccaaactatat

SEQ ID NO: 763141 - DNA, 433 bp, Homo sapiens
tgggtgatgggatcctttgtaccccaaacctcagcgtcatgaagcattcccatgtaatgaacctgcatatgcactcccgaatctaaaataacagttgaataactttaaaaaagaaagaggcagccaagagtagtggctaatgcctgtaatcccrtcactttgggaggctgaggcgagtggatcacctaaggtcaggagttcgagaccagcctgaccaatatgatgaaaccctgtttctactaaaaatacaaaaattagccaagcgtggtggcatgcgcctgtagtcccagctactcgggaggctgagacagcagaattgctggaacccaggaggcggagactgcagtaagccgagattgcaccactgcactccagcctgggtgacagaggaagactccatcacaaaagaaaacaaaacaaaacagatgaagaa

SEQ ID NO: 763142 - DNA, 521 bp, Homo sapiens
tctccatctccattctcccagtagaatgagattatctctgatgttccctccagctctgaaagtcacagattctctggcaaacaaaatatatcaaaagtctcctccaaagtaagcccatgatttgagtagcaattggaggctggaaggcctatgaggtctgctgaaaaaaagttacaaatgtacctgatgtgaacatgctttcctagcttcaaaacccagaagacmttccaggaggttataaggaaccaatgcatcatctttggttcacaacagttgatgatattaccaaagtctcagcacttccacttactcactgtccagcctattgggaaaaaccctgatttgagactcagtttccccagctataaaatgggtataataattgctttgcctcattcccagattcttggtataggcacttaatttatgacagcaacagagataagagaatagagagcctgcgacaggcttgtcaagccatttgtcaaaatgaagtaaaaacattgcttatcaagttacat

SEQ ID NO: 763143 - DNA, 513 bp, Homo sapiens
taggaaatcacaccagagaaatagaaattatttttttaaagcaatggaaaatttagaagtagaaaatatagtatctgaaatatttttaaaaatcactgaatgggctaaatagcagattggatatgacagaaggaaaagttagtaggcatgaacatagatcagtaraaattatccgatccgacaaacagaaaatcgattttttttttgttttaaacagagcatcataaactgtaggacacagcaacggattaccacatgtattacaggaatacaagaatgaccagaaggaaaaaatgaagcaagaaaaaagttttagtcttgaacacaaggcaaaaaaaaaaaaaaaaaaactctggagaaataataaataaaagtttgatctccaaccaggaaaaatacaaaaaatgtacaaccaggcacatcacaaactactagaaagtttaaatacagaaataatcttgaaagaaggcagagaaaaatgacacattaacgtatagaaaaaaaatgactact

SEQ ID NO: 763144 - DNA, 569 bp, Homo sapiens
aaacaaagcccccctactaccttgctgtgcttgagtgatgtttcaggagggcatgggatttcattgtgtgtgaccaatccattaacccaaatccagcatgcttttctatagtttctacattccctttgattagcatatattattattattttttaagagacagggtctcactctgttgcccaggctgcagtgcagtggtgtcaccatagttcaccacagtcttgaactcctgggctcaagcggtcctcccacctcaacctcccaagtagcagcgactaaaggcgtgcaccaccattcctggctaatttttaatttttttgtaggacaggatgtcactatgtggcccagactggtcttgaattcctaaagtgatcatcttgcctcagcctcccaaagtgttgagattataggcatcagycactgtgcctggccacattatttttataatcagaaaagaaaaagcaatgagagggagacagatagagattttggaggtggactggaaagaccctggatcctgcctgcaagcaggagcgacagccaggcaggaattgacaagactcagagag

SEQ ID NO: 763145 - DNA, 589 bp, Homo sapiens
atggagagtagggatgtggaggtggcagtcttaggaggcaaaactccctggtgtcatagagcctcaatacttgtgcagaacactataaaccttgtctagtgggaagtagacaagggggtaacatagagggaggcttagagaaataaggatgaggcccatatttaaaaggcaagaaatacatgtgtggtttggttcacttagaccttcagggaatctgggaaaacattgctacccacttatacactgcctcacacgtgagagcttctctccagggaaagaaattgaggaaagggacttggtttatgtcttgtggaagataacagatataggtgattctcattattcacagtacttccattctataaaatcactatgaacacagaattatgaaaatttgctcctacaggatatacagaattaggctcctgtgagcctckagtcacaaaatttttctcagtctatcaatacataacctaatcttatgtgtgtttttgtttaaaggcaccttatttaatatatattgttaattcattaacattaaactcatggtcaacaacaatataactcatgctttcacgaaacatattta

SEQ ID NO: 763146 - DNA, 593 bp, Homo sapiens
cggggcccgccaagccgacgcccacccggaactccagctggccggcgagcgccccgtgcagcctcggttcccacccgcgcctctccctctacacctccccgcaagctgagggagccggctccggccttggccagcccagaaaggggcccccacagtacagcagcgggytgaagggctcctcaagtgccgccaaagtgggagcccaggcagaggaggcgcccagagcgagcgagggctgtgaggactgccagcatgctgtcacctctcaccagcactttgggaggtcgaggaaggcagatcacctgaggtcaggagttcgagaccagcctggccaaaatggtgaaatcccgtctctactaaaaacacgaaaattagccaggcatggtggcaagcacctgtaatcccagctactctggaggctgaggcaggagaatcacttgaacttggaaggtggagattgcagtgagccaagatcggccactgcactctagactgggtgacagagtgagactctgtctcaaaaaaaaaaaaatcttttttccaaaagatttttaactttttgttaagaaaatttaatggaattttcaaatatg

SEQ ID NO: 763147 - DNA, 608 bp, Homo sapiens
tttgagataaagttgctctgttgtcttaatttcctttaacactcaaagaggacactataaactatcagacatatgtcccacactaaaagcagatttcaaaaagtccaatgaaaatataattaactgtcatgagacccaaaaaaaggttcaagaaagatggaagtttatcaaaaacacttgtcagttcaataatgtgcccactatagaataggaacttaaaacattttttgaatgaatgaatgacaaacagttctggtaaagatattaatgtattactcctatcataaactcttmaagtgaaaaagtggccaggtgcagtggctcacatctgtaattccaacacttcaggaggccgaggtgggcagaccccttgagcctaggagtttgagaccagcctggataacatggtgaaaccccacccctacaaaagaatttcaaaactagctgagcgtggtggcgtgtgcctgtagtcccagccactcgggaggctgaggtgggaggatcacttaagcccaggaggtggaggctgcagtgagccatgatttcaccactctactactccactccagcctgggtgacagagtgagaccctgtctccaaaaaaaaaa

SEQ ID NO: 763148 - DNA, 623 bp, Homo sapiens
caatttgtaatatattacttagattcatctattcttattttgcttaacagtgtctttcaattatcagctatcttacaaatgcttaaacattttatatttgtttttaattatgatgacaacaaatattaagtgcttactctcagtggaaaacagaaacagacgttataagggattccaaaggggaaatcaagaaactcccaaagattatgaaagaaataagaggtttatataataaaacacgtatttattgaatatacttaatgtaccttgctagatggtacaacataaaattygagtaataaagaacttagtagaaactaattactgaatgcttaagccagattattgtgctgagttacacatccttaatctttacaactatacaaggtagattttattaatattattctcattttggaaatgaggaagcaagggggtcagagtaaagcacttacttaaggaagggacataatcaggattcaagtatagatattataaatttaggtattcagatatctcatataacatgggtatttctcattcgatcattattttattccatgaatatattgttctaagcactagagatacacagataatgtaaaatttctaaccttacagat

SEQ ID NO: 763149 - DNA, 605 bp, Homo sapiens
caaagaaaattttcacaattgcttcatttcaataactcaaataatttacttgtaagacatttaaacaggttttgattccagatagaattatagttacattatattgaataaatacattttgttttgttttgagacagagtcttgctctgttgcccagactggaatgcagtggtatgatcacggctcactgcaagctccacctcctgggttcacgccattctcctgcctcagcctcccgagtagctgggactacaggygcccgccaccacacccggctaatttctgtatgtttagtagagatggggtttcatcttgttagccaggattgtctcgatctcctgaccttgtgatccacccaccctggcctcccaaagtgctgggattacaggcgtgagccaccacgcctggtcgaataaataagttttttaagtaacacataacaactttaagtaactttatatttttgtggaatacattaaagtgctttaaaataaggctgttgctttttatacccataatatttctttctttgggttgtatcatattcatggctatttttcccttaagtaaaacatgtgaaggggttctgaaagccatttcagtaa

SEQ ID NO: 763150 - DNA, 507 bp, Homo sapiens
ggaaacagcctaaattttttactcatctatagatgaatggataaataaaatatggtatgtacatataatgaaatactatttactattttagtaggaaaaaaacttctccatatttaacaacatagatgaacttggggaaarttatgctaagtgaaataaaccaggcccagaaggataaatattacattattccacttatgtgagatatcttaaatagtctagtagaatcagagagtagaatgttgttgcagagatttgtttagtggtcataaagtttcagttatgctagattaatacattttagatatccatagtacaatacaatacctgtaactaacaatatcatatttatcatttaaaaatcttgagtgtaaatttcataataagtcttcttgccaaaaaacaaaaacaggggcaaaaacaagaaatgaaagggcaagaggaaactgttgggggtcctgggtatatttattcccttgattgtatagttggtcttatgggtgtatg

SEQ ID NO: 763151 - DNA, 529 bp, Homo sapiens
atacacatatatttatacacatttatatatgcacacatgatatatatttaatacacatatatacatatacatacactccacatgaacacatacaaatgcacacacacactttaacaatatagttaacttttcaaatattgacatttttctaggtcgttgcaacatttatcttaaactaaaaaaagatttgcttaaytcttgtttgcttataaaaacgttaaaattaaacatgcaagtgaaagaactttcttattttgtcatatttgtgcctggtaaaattaacattaaaagaatatcatagcttagaagtattcatataagtttaagaaatccaaaagtataatcctaacacaactccacaaatatattagggtatcacatagttacataagaagatatttacatcttaccctctgtatttgaataaaatattttttgtttaaaaaattgtggatcactttttgcattttagtttcctttgtaatttgtgtttcatgatgtcaatatttctacagatttaaataagaac

SEQ ID NO: 763152 - DNA, 594 bp, Homo sapiens
ttcctttgttgtgcggaagcattttagtttgattttaagtactagttttttcttgaaaacacacagagcctgtattatttatattttgttttcactactaagtcaatcattataaggctatccaaaatgttaagaatcacggctaaatattgtctgtcaattctaagacaaagggtcatgtcaggattaagaaaataatgattatattgatataaattattaatagaaaaataatgatgtgtcattactatttttactcttttgtttgtgagtagattaattttaaatgtagctctaggagctaaaatgctaatatattcattactttccaagtcttcaattaagmattgtatttgctaaagttttatgacttctgttgtcttaatattgatatgtcaaatttatctcaaaggctttttatattatatttttaaaaatatttcagatactttttattaatattagattttattttaaaactattttcataaatccaaatataattgatttaaatagtagtaagatcttagttttccattaccatacagagcttgtacataactgaaagcaaattaatttttctccacaaatttt

SEQ ID NO: 763153 - DNA, 599 bp, Homo sapiens
atattgtaggtcagtatcatcagcttcctgaagaacctttactgaaatcgattttaagagtgactaatttggaagtagtgtattttatttcaaatgctgcagagtggaagagcatatctgggctgacacaagacctgcagttcgctagcataattacacatagctctgtgtgatccagacacacaggaagttattcccaaggraacagccaagccagccgagtggatcatataaaagggacttcccaacttcatctgtaaatgtcatgtgagacactgcagataaagcagttagtatactttctatgcaagctaagtgggactggcttcaaaacggctgggatgttcacccactgaatatgcctgttcctcactgccttgctgcatttgggttgctgtaactgaataccttagactgggttgcttatgggcaactaacatttacttcccagagccaaatgcactgtgattctgaaaactgctagtgaagttttaatggtgactaaggttagattgggaagctatggtgatgcaatgattaatgagattagagaaaaaggttagataaaaattgtgagtttttgtcacatatcctttgcc

SEQ ID NO: 763154 - DNA, 641 bp, Homo sapiens
tcttctgttggcttggtttgataaaatgacaaaataataaatgacctgataaaaatgacaaataaggaaggatttatctctagactccaaatctcctttattcataaacacacacacacatacacactcactcactcactcaaatatcaagagatgatttcagaactcaattcttcatttttgtcttatactactcctaaaaccttctctaaagaaaagctaataaattcactcccaataacatattattgcttgaaaaatccagcttacttactgttcaagtcattcgatttgattatgcttctttaaaacaaacacctttttggcattttttactgctacatctttagtgtctagggcagtgcctggcatatgtgtacaagaaatttttgttgaattaatacatacattaaagttttcagccaaagaaattgaaaaattgttggcagcatgaaaaaaatgtttaatttctttttgttgtccctaaaatacctccgtcaasgctgcttccaattctacataaggccaccttgtaatattctttcctcccagttgtcttcccccacttctctgccctgatactgaagagtaggaattgtcacctggactctgagtctatatgcagagattagatacccctc

SEQ ID NO: 763155 - DNA, 626 bp, Homo sapiens
atgacagcagactctgtgttcgggggtgttaacggtgaagggtatacaggttcttggggtttcgaacaaagaattggacaaaatgcacaaacaaagcaaggaaggaatgaagggttttattgaaaatgaaagtacactccacagtgtgggagcgggcctaagcataggggctcaagggccctgttacagagcttttgtgagtttaaatascctctacttggggtacgccctatgtaaaagaagaggatgtagtaaagttacaaagtcatctatggcattcaccctatggagagggcatttcctgttatagctgaagtgtgaattggccttatgtttcctgcctccagatcctattttcctgcctcaatgagggtccgctctcttattcatagatggtgacttctggctatttcctcacatggtggaagagggaaggcagccgttggaggtctcctttataaaagcactaatctcattcatgaggggtctagccacttcccagaggctgcactcctaataccatcacattggtcattagtttcaacatatgaactttccagaggacacaggcatccagaccatagcagattggttctttggttcggatcctctctcctctgttctgt

SEQ ID NO: 763156 - DNA, 626 bp, Homo sapiens
atgacagcagactctgtgttcgggggtgttaacggtgaagggtatacaggttcttggggtttcgaacaaagaattggacaaaatgcacaaacaaagcaaggaaggaatgaagggttttattgaaaatgaaagtacactccacagtgtgggagcgggcctaagcataggggctcaagggccctgttacagagcttttgtgagtttaaatacyctctacttggggtacgccctatgtaaaagaagaggatgtagtaaagttacaaagtcatctatggcattcaccctatggagagggcatttcctgttatagctgaagtgtgaattggccttatgtttcctgcctccagatcctattttcctgcctcaatgagggtccgctctcttattcatagatggtgacttctggctatttcctcacatggtggaagagggaaggcagccgttggaggtctcctttataaaagcactaatctcattcatgaggggtctagccacttcccagaggctgcactcctaataccatcacattggtcattagtttcaacatatgaactttccagaggacacaggcatccagaccatagcagattggttctttggttcggatcctctctcctctgttctgt

SEQ ID NO: 763157 - DNA, 635 bp, Homo sapiens
  misc_feature 610, 619, 620, 621, 622, 623, 624, 625, 626, 627, 628, 629,630, 631, 632, 633, 634, 635: n = A,T,C or G
ttttgtgagtttaaataccctctacttggggtacgccctatgtaaaagaagaggatgtagtaaagttacaaagtcatctatggcattcaccctatggagagggcatttcctgttatagctgaagtgtgaattggccttatgtttcctgcctccagatcctattttcctgcctcaatgagggtcygctctcttattcatagatggtgacttctggctatttcctcacatggtggaagagggaaggcagccgttggaggtctcctttataaaagcactaatctcattcatgaggggtctagccacttcccagaggctgcactcctaataccatcacattggtcattagtttcaacatatgaactttccagaggacacaggcatccagaccatagcagattggttctttggttcggatcctctctcctctgttctgtctgtctcatctgaccctcatgcctctgctgctgataactctcattagtttatcattctgcttgacaaagctgtcctttgttggtgaccaccagtgccactagtagttttggcaacagacgttgttctttacttttacttcacgccaaatatgggataggcccttgtcttcgatctntaaagagcnnnnnnnnnnnnnnnnn

SEQ ID NO: 763158 - DNA, 679 bp, Homo sapiens
cacggggatccatagggagggcggccagaggggcaggtggtaaaactccacagggagaaagaattctctagctgaactttgtaacaattggaacgggcgggaagcctcctggccagaactcggrggagggtgcaaatctggagtacagacttcataggcaggggaagaacttaagccctttttttcccccacagcttggagacagatagcctcaggcaagttttcaagcccttctcgccctctacctggaaatatactcagggatactggttgggggtcacggtggaagtaatactggccgttcagtttgcatgggagctgggtgaggcctgtgactgctggctttaccctgcttccctgacaacctgcaagactcagcagaggcagccataatcctcctaggtacacaactccagtgacctgagaatctcacctccatccctgacagcaggtgcaacaagatccacccaaggagagtctgagctcagacacacctagccctgccccaacctgatggtacttccctatacaccctagtagtgaagacaaagggcatgtaatcttgggaatctagggcccagctcaccgccggttcctcttcacactactgcagttaatgctttctggaaagcaccacctcctggcaggaggccaaccagcacaaaaatagagcattaaa

SEQ ID NO: 763159 - DNA, 588 bp, Homo sapiens
gcctgtaatcccagctactcaggaggctgaggcaggggaattgcttgaatcagggaggaggaggttgcaatgagttgcagtgagccaagatcacaccactgcactgcagcctgggtgacagagtgagactctgtctcaaaaaaaaaaaaaaaaaaaaaagatagaaagaatgaaagaaaggaaagagatatgcagaaacatatatctggtttaaaaattatacacacacacacacacgcaatgatatagtttggatatgtgtccccacccaaatctcatgttgaagtgtaatccccagtattggaggtggggcctggtgggaggtgactggatcatgggggtgaatttctcacaaatggtttagcaccatccccttggtgctatccttgcaaaagtgagtgacttcttrcaagatctgcctgtttaaaactgtatggcacctctctctctctctctctctctctctctctctctgtctctctctcacttgctcctgctctggccatgtgatatgcctgctccccctttaccttccaccatgattggaagcttcctgaggcctctccagaagcaaatgcctgtatagcc

SEQ ID NO: 763160 - DNA, 517 bp, Homo sapiens
ctgcagctgcacttgggaggggcggggctcctgcctactcttggctcccaagagcacaggagtgccctggtagcagccacagcttgggtggctgcagttgcacctgggaagctcccactctaccaactttctggctccataaagcatgcagccctagccataccactggtctgcattttccccttagtggcagcaggcaaggtgcgggtggctggtggcctcagccaaccccgcgcaaacaaacccaatgctcctggggccaccccacaagtcctggctgcactatcagctcacagactcctgagacgcagcacacagcgagattgaaggcacggcagaggttccgggcctgcagtgggtcctkcccagttgtgcaagggtcggggtggtgcagtcagctgcctcagggatgtagggcacaggggacccaccactaccactgctgctcccacagccactcctgccaccaccacttgtgcctccatactgcagctggcgtgataacagtggctgctcc

SEQ ID NO: 763161 - DNA, 626 bp, Homo sapiens
accctattttcaaatgcatatttgcattcataataacccgtgaatacatacatctattgatctatgtattcatgcatctctatatgtaaatgtctgtccaaaatgccactatatatatatttatatattaaacttttattttaagtttgggttacatgggcaggtttgttatataggtaaacgcgtgtcatagaggtttgttgtacagattatgtcatctctcaggtattaagcctagtaaccaatagttattttttgtacccctttccctcctcccaccctccactctcaggtaggccccagtgtgtgtcrctgccctctatgtatccatgtgttctcatcgtttaactcccacttgtaggtgagaagatgcggtattttgttttcagttcctgtgttagtttgctaaggataatggcctccagcttcatcatgttcctgaaaaggacatgatctcattcttttttatggttgcatagtattccactattccacggtgtgtatgtaccacaatatgttaaattttagtttattacaacttttatgcaacacacaatggcaagatgaatcagatcagaagataaacaattgagtgtgaaaagacagcagtttttttcctgttttat

SEQ ID NO: 763162 - DNA, 626 bp, Homo sapiens
accctattttcaaatgcatatttgcattcataataacccgtgaatacatacatctattgatctatgtattcatgcatctctatatgtaaatgtctgtccaaaatgccactatatatatatttatatattaaacttttattttaagtttgggttacatgggcaggtttgttatataggtaaacgcgtgtcatagaggtttgttgtacagattatgtcatctctcaggtattaagcctagtaaccaatagttattttttgtacccctttccctcctcccaccctccactctcaggtaggccccagtgtgtgtcaytgccctctatgtatccatgtgttctcatcgtttaactcccacttgtaggtgagaagatgcggtattttgttttcagttcctgtgttagtttgctaaggataatggcctccagcttcatcatgttcctgaaaaggacatgatctcattcttttttatggttgcatagtattccactattccacggtgtgtatgtaccacaatatgttaaattttagtttattacaacttttatgcaacacacaatggcaagatgaatcagatcagaagataaacaattgagtgtgaaaagacagcagtttttttcctgttttat

SEQ ID NO: 763163 - DNA, 626 bp, Homo sapiens
accctattttcaaatgcatatttgcattcataataacccgtgaatacatacatctattgatctatgtattcatgcatctctatatgtaaatgtctgtccaaaatgccactatatatatatttatatattaaacttttattttaagtttgggttacatgggcaggtttgttatataggtaaacgcgtgtcatagaggtttgttgtacagattatgtcatctctcaggtattaagcctagtaaccaatagttattttttgtacccctttccctcctcccaccctccactctcaggtaggccccagtgtgtgtcactgccctctatgtatccatgtgttctcatcgtttaactcccacttgtaggtgagaagatgcggtattttgttttcagttcctgtgttagtttgctaaggataatggcctccagcttcatcatgttcctgaraaggacatgatctcattcttttttatggttgcatagtattccactattccacggtgtgtatgtaccacaatatgttaaattttagtttattacaacttttatgcaacacacaatggcaagatgaatcagatcagaagataaacaattgagtgtgaaaagacagcagtttttttcctgttttat

SEQ ID NO: 763164 - DNA, 633 bp, Homo sapiens
gtttgtttctattttaaacagctctagtcaggaagtgttagagagttctaaacaggaaatattccaacacatcatctaagcatgaagcaggagacacccataattgagtttgctgccaccaaccccaacagcaagaattccagtcctgctgctgcaaagtaagtgtcactctgattttattgctgctgtgtaacccagttttagactctctggttstcacttaatgttctaaaaaagtattaaagagaaaattttattctggtgatgagcccatccactgcagccatctcaacatcataccaattataagcctatcatttaaaaagaaagctgttagtttaacttatttatccaaatatcagtattacataaacatatttgtcatcagactttggacttatgggttaaatagcatataaatatgattagagccttaaagtttacacttctctggttcgctcaaatttttttcaaaatagcatatgcctttctaaacaatggttagtatatttttcaaaatgaacattaaaatgtatattttccaaaaacaaaatacagctcccattggtaaatgatgctattgagacacaacagacaacttctcttgggaaccatttaatcagtgctcacttt

SEQ ID NO: 763165 - DNA, 633 bp, Homo sapiens
gtttgtttctattttaaacagctctagtcaggaagtgttagagagttctaaacaggaaatattccaacacatcatctaagcatgaagcaggagacacccataattgagtttgctgccaccaaccccaacagcaagaattccagtcctgctgctgcaaagtaagtgtcactctgattttattgctgctgtgtaacccagttttagactctctggttctcacttaatgttctaaaaaagtattaaagagaaaattttattctggtgatgagcccatccactgcagccatctcaacatcataccaattataagcctatcatttaaaaagaaagctgttagtttaacttatttatccaaatatcagtattacataaacatrtttgtcatcagactttggacttatgggttaaatagcatataaatatgattagagccttaaagtttacacttctctggttcgctcaaatttttttcaaaatagcatatgcctttctaaacaatggttagtatatttttcaaaatgaacattaaaatgtatattttccaaaaacaaaatacagctcccattggtaaatgatgctattgagacacaacagacaacttctcttgggaaccatttaatcagtgctcacttt

SEQ ID NO: 763166 - DNA, 633 bp, Homo sapiens
gtttgtttctattttaaacagctctagtcaggaagtgttagagagttctaaacaggaaatattccaacacatcatctaagcatgaagcaggagacacccataattgagtttgctgccaccaaccccaacagcaagaattccagtcctgctgctgcaaagtaagtgtcactctgattttattgctgctgtgtaacccagttttagactctctggttctcacttaatgttctaaaaaagtattaaagagaaaattttattctggtgatgagcccatccactgcagccatctcaacatcataccaattataagcctatcatttaaaaagaaagctgttagtttaacttatttatccaaatatcagtattacataaacatatttgtcatcagactttggacttatgggttaaatagcatawaaatatgattagagccttaaagtttacacttctctggttcgctcaaatttttttcaaaatagcatatgcctttctaaacaatggttagtatatttttcaaaatgaacattaaaatgtatattttccaaaaacaaaatacagctcccattggtaaatgatgctattgagacacaacagacaacttctcttgggaaccatttaatcagtgctcacttt

SEQ ID NO: 763167 - DNA, 466 bp, Homo sapiens
gtcctagaatacgacttctgctgcatcctattggaaaagcaagtcattgtgaccagcacagattcaagaaatgggagattcgactctacctgtcaatgtaaacagcagcatgtgcatgcagggaggaaagaaattgagggcatcatcttgaagactatcatatcacaccattattccaactartgaacattatgttttagatgggtagtactagctactcatctgtcccccagaaacccaagctaagcatggacatattgaagagaatgtcaacaccattaaaaaaactctagaaaaatcacatgtgatgactgaggttaattcagtctgtcaactacatcaatataattgccttcttgtaaccctaagtatggtgaagcagaattgaattctacaaaagtctttcatctgttttcctatggaataattaacaaacccaataaatgtataaatagcatgaagtccg

SEQ ID NO: 763168 - DNA, 599 bp, Homo sapiens
tgaataaaatgatttatttttaaaatatattcttgatatgatttggctgtgtccccactcatcttaacttgtggttcccataatccccatgtgttgtgggaaggacccagtgggaggtaattgaatcatgggggcggttacttccatgctgctgttctcataatrgtgagtgagttctcacgagaactgatggttttataagggccttttctccgtttgctcagcacttctcctttctgccatcatgtgaaggaggacatgtttgcttccccttctgccatgattttaagtttcctgaggcctccccagccatgctgaactgtgagtcaattaaagctcccttttacaaattacccagtctcgggtatgcctttattagcagcgtgagaacggactaatacaattcttccgatgaatatattcttctcattgataaatgcttgatgtaaatgcttaatttttcctctagctgccttcaagatttttctcattgtctgtggttttcagcaatttggataccttacatatcatttttgtgaatcttccacagagatcagtggacacatgtggcacaaagaacatgtgaattaagaatgcac

SEQ ID NO: 763169 - DNA, 663 bp, Homo sapiens
tatgaaggagtttatgaccgctaggtttgttcttcaagaaatgctagaaagtcctttgagattaaaaaatgagagtaccaaaaaagccatagaatactataaagctctgttgtaaagcaaatatatagagaaatatagcatcctgtattattgtgatgttggtaagtaatttcaatccccttatagtatttgacaccaatatacaaaaatattttatatgtatgttaaagaatacatcatgtaaaaaggcctaatttgtgacatcaagaacaacatgagtgttgggaaagacagtcatgtaaaagactggagtttttatatgctactgagataacatcagattaaactagattgttataactttgagacgtttcatgtcacctgtatagtaatcacaaagataatacatgtagaatgtatacaaaagaaaaagaaataaaaacatattagyacaaaaattagacaaaaaggaatacagcaagaaataaaataaataaacaaaagaactacaaaagaaacacaatactattaacaaaatggcagtagtaactccttaactgcaaataataaccttatatgtaacaatgttaaattctccaataacagacagaaggtcactgaagaaataaaaatataaaatcgaatgaattctgtttataaatt

SEQ ID NO: 763170 - DNA, 445 bp, Homo sapiens
ccgatgatagtttctgccatgttggaaaatgacagcattcagggtctatctggtgtgaagcccactggctcccagaagcactcctccagcatggcagatggggataactcataccgcctggaagctatcatccgccagatgaatgcctttcatacagtcatgtgtgaccagggcttggaccctgagatcatcctgcaggtattcaaacagctcttctacatgatcaacgcagtgactcttaatgacctgctsctgcggaaggacgtctgctcttggagcacaggcatgcaactcaggtacaatataagtcagcttgaggagtggctttggggaagaaaccttcaccagagtggagtagttcagaccatggaacctctgatccaagcagcccagctcctgcaattaaagaagaaaacccaggaggatgcagaggccatctgctccc

SEQ ID NO: 763171 - DNA, 655 bp, Homo sapiens
tcttcctattctaccaacatcctattgaaatgaccatgtgatggacaaaagagaagatatgtgtccatgctgagaacaggatgcaaaaccttcagcaccctagagggcaggaggagatgggaacacattgggatgtgtagcccgaacgatgcaaagaacagagttgagggtgagatggaaacccctcacaaaagaaagattaaaacaaatctagaatcccaggcacgcgcctcacaagcaactgcagtgctattaaaacaaacctagaatcccaggcactcatcacaagcaactgcagtgctattaaagggctgtttatggatcagctgggccagtcagcttcccttcctcccatcctgcaactcctggcagtagctggcagcagttatttaaaggagaccagccaagccggttcctgagtgartccaaccacagtcagcccagggccagccttgtggctcccaatctatggtactgagggtcacgttcattaattacatttccaatgaaacaataattgtctttagtaaactacagaagcataagtagaaacaatattgtagtaaatgtctcatatcattacttctgccagaaatacctctgcccttgaattttcaaaagatatttgctgcacccttttctgaaatatactttt

SEQ ID NO: 763172 - DNA, 542 bp, Homo sapiens
aaaaacctgattatttatttatttatttatttatttatttatttatttattgtatttgagacacagtctcgttctgtcacccaggctggagtgcaatggtgccatctctcctcactgcaacctctgcctcccaggttcaagagattctcctgcctcagcctccagagtagctgggattgcaggcgcccgccatcacacctggataattctggtacttttagtagagacagggtttcactatgttggccaggctggtctcgaactcgtgacctcaagtgatcaccagccacrgcctcccacagtgttgggattacaggcgtgagccacctcgcctggaccaaaaacctaactttaattatttccctagccactacacggattattttatttagtgcttttttacaccattacatatacatataaggaaaactggcatcttttacatatttatttatttttatcctgttttcctctaaaaactattaaggcaacttccaaaatatattctacataatgagattaataaacaagcaaaataaatc

SEQ ID NO: 763173 - DNA, 592 bp, Homo sapiens
acatatttatttatttttatcctgttttcctctaaaaactattaaggcaacttccaaaatatattctacataatgagattaataaacaagcaaaataaatcagtaagaaaatctagtttggattgttatgggttaaaaaatgaatacacaaaatataacatgatatttggtctaatataggcttcccgtgccctcccccaaccccccgccaccgcccccaacccccgccggagaggacacggatgccckggtctgaagccatggctgggcagctgcccttgcgcctgggactgcagggtcccctccccaccagctcagaagccggcagggctctttccttcctgttctcagctcccgccggctccacaaagcgcgcggccctgcggcgcctcccctgctgcagccggcatcttggcagcagcctctccagatgggccgctgccatcaacaccacccaaaccagtaatgtggctcaaccagttctgccatcccacccaggaacagaaggtagcaagaaaacctcactttgatccccctgtgattccatctccaacctgaccaatcagcactccccactttctgagaccatgcc

SEQ ID NO: 763174 - DNA, 635 bp, Homo sapiens
ccatgtaaagggtgaaacagtttctcagcaattgctgagatcaaggataagccctacaagtttgggcaggaaagaggactcttattactctgagggaatgcagaaatccctccgttttgttgttgtttgttttctctgagcccttgtgatctggcccccaagaattcctgtgttggcagcagtaggtggtgcctaggagaaacaaaaccctgaggccagggcatcttcctctccagttggtgcagtagtgatcccaagagggtgatgcaaactttttaaagtcttttctcattttgccacctgtcacctggctccaaacatgggtgcagccatgaaacactgtagcagagtaccgtaatcaaagacccagcattctggccagaaaacagaaaagaggagctccaggaaaacagaaaatattggagacattgtggagaggaaggagtatgagaaagtgacaccataaagtttttaatgaactgagygcatccccaagctgcatgtgtgtggatctgctcctaattagttaaccaaagattttgagaacgaagctagcagattattatccgagttccacactgaccaccaggacatatctgaagcaaactggaaaggttttgaaaactcgattattg

SEQ ID NO: 763175 - DNA, 380 bp, Homo sapiens
aagaaataacaaatgtacaattatgtttagataattcaacactcctctctcactaataattagtgaacatttgaaattaattgatggtaagtttgattaattctgagatttttagcagtattgtttatcacatagaattaacagatyatttctgtatagcagacaaaaatgcattctgagccctatgtaatagttcatcacagaaaatgttgagttaatgccagtcagaatgtctctcttcttccagtacagggattacaaataatggcaagacctaaggtcatgtatgcagtgatgcactaagtaccttaaataataggacatgagattgcaagcacaatgcagtcactatgaatgagaaaattacgtaagagctcaag

SEQ ID NO: 763176 - DNA, 380 bp, Homo sapiens
aagaaataacaaatgtacaattatgtttagataattcaacactcctctctcactaataattagtgaacatttgaaattaattgatggtaagtttgattaattctgagatttttagcagtattgtttatcacatagaattaacagattatttctgtatagcagacaaaaatgcattctgagccmtatgtaatagttcatcacagaaaatgttgagttaatgccagtcagaatgtctctcttcttccagtacagggattacaaataatggcaagacctaaggtcatgtatgcagtgatgcactaagtaccttaaataataggacatgagattgcaagcacaatgcagtcactatgaatgagaaaattacgtaagagctcaag

SEQ ID NO: 763177 - DNA, 380 bp, Homo sapiens
aagaaataacaaatgtacaattatgtttagataattcaacactcctctctcactaataattagtgaacatttgaaattaattgatggtaagtttgattaattctgagatttttagcagtattgtttatcacatagaattaacagattatttctgtatagcagacaaaaatgcattctgagcccyatgtaatagttcatcacagaaaatgttgagttaatgccagtcagaatgtctctcttcttccagtacagggattacaaataatggcaagacctaaggtcatgtatgcagtgatgcactaagtaccttaaataataggacatgagattgcaagcacaatgcagtcactatgaatgagaaaattacgtaagagctcaag

SEQ ID NO: 763178 - DNA, 636 bp, Homo sapiens
aaccataaaaaccctagaagaaatcctaggctacatcattcaggtcataggcatgggcaaagatttcatgactaaaataccaaaaacaatggcaacaaaagccagaatagacaaatcagatctaattaaactaaagcgcttctgcacagtaagagaaactaccaacagcatgaayagacaacctacagaatgggagaaaattgttggcaatctatccatctgacaaagggctagtatccagaatctacaaaaaacttaaacaaatttacaagaaaaaaacaccatcaaaaattgggcaaaggatatggacagacacttctcaaaagaagacatctatgcagccaacagacacatgagaaaatgctcatcatcaatggtcatcagagaaatgcaaatcaaaaccacagtgagatacaatctcacgccagttagaatggtgattatttgaaagtcaggaaacaacagatgctggaaagcatgtggaaaaataggaaggcttttacactgttggagggattgcaaattagttccaccactgtggaagacagtgtggccattcctccaggatctagaactagaaataccatctgacccagcaatcccattactgggcatatacccaaaggattataaatc

SEQ ID NO: 763179 - DNA, 636 bp, Homo sapiens
aaccataaaaaccctagaagaaatcctaggctacatcattcaggtcataggcatgggcaaagatttcatgactaaaataccaaaaacaatggcaacaaaagccagaatagacaaatcagatctaattaaactaaagcgcttctgcacagtaagagaaactaccaacagcatgaacagacaacctacagaatgggagaaaattgttggcaatctatccatctgacaaagggctagtatccagaatctacaaaaaacttaaacaaatttacaagaaaaaaacaccatcaaaaattgggcaaaggatatggacagacacttctcaaaagaagacatctatgcagccaacagacacatgagaaaatgctcatcatcamtggtcatcagagaaatgcaaatcaaaaccacagtgagatacaatctcacgccagttagaatggtgattatttgaaagtcaggaaacaacagatgctggaaagcatgtggaaaaataggaaggcttttacactgttggagggattgcaaattagttccaccactgtggaagacagtgtggccattcctccaggatctagaactagaaataccatctgacccagcaatcccattactgggcatatacccaaaggattataaatc

SEQ ID NO: 763180 - DNA, 584 bp, Homo sapiens
tttctatcctgtttcatcagtcagtttatttttatgccagtgccatgctattttcattacaataacttcataagatttttgaaattagggagtgtaatggcaccagcttttttccttttgcccaagatcgttttgactctttagggtcttttgtaattccacacaaatttaaggatattttttattgctgtgaaaaatgacattgcaattttgagagagattacattgacactgtagatcattttgggttgtatggacatttttgaaagaggggtgttgaggttccataatattgtagtattgccatttatttatccctttatgtcatttaataattgctttacgtatttaggtactctgatgttgggtgcatatataattacaattgttatgtcctcttggtgaaytgacccctttctcattatttagtgaccttctttatctctttttacagtttttgatttaaagacgattttgattgatataaatatagattctcttggtctcttttgatgtctatttgcatggagtatctttttccataccttcagtttcagtctgtatgtgtcctcactagtagagtg

SEQ ID NO: 763181 - DNA, 561 bp, Homo sapiens
ctctctttcgtttttttcagcaaagttttgtgtataccaccatggttagatttatgcctgaataacttattctttgatgctattataaatggaatttttaaaatattttcatagttctttacaactatatagaaatatagctcatttgcctatgtttgttttgcatcctgcctcttttattagttataatcggttttgtgttttatttggagctttatacacataagatcatgtgtagatataattttacttctgttttttatttctaatktagatgccttttatttctttgtcttgcctaattgctctggctaaaattgccagtggtacattgaacacaagtggcaaatgcaccatgcttgtcttgttctagatgttaggaaaacagctttcagtgtttcatcattgatcatgatattaactgttgggtttttgtacatcctattgtcatgttgcagaaaatcccttctatgcctagtttattgagtatttttattatagaagggtgttgtatttcatcaatgttttctctgcatcaattgaaataatcacgtgcttatt

SEQ ID NO: 763182 - DNA, 608 bp, Homo sapiens
tgactcaccagttaatgcagctatttggtcataaatgtttctttgttaatcactttcgattactaattcaatctcctaggttataggtctattcagattttctctttcttcttgagccactttggtagtttgtgtctttctagtgattcgtccatttcatccagggcagctaatttgttgttagacagttgttcacagtatactcctgtaatccttttgtatttctgtaaagttggtagtaatggctctgctttcatttattattttaataattagtcttccatcttttgctcagtcaatatagtgaaaggcttgatctttcaaataatctatgtttattcattctactgctctccaaacttctattttattgatttatgctctaattatgctctctattatttctttcatactgctagctttggatttagtcttmttttgtcttcttccactgcctttaggtatagagtgaggatgttgatttcagatttttcttaaatgtagttgtttatatccatacattttcctttgaactctactttcactgcattcaataagttttggtatgttttgtttttattttaatttatctcaagatattttataat

SEQ ID NO: 763183 - DNA, 608 bp, Homo sapiens
tgactcaccagttaatgcagctatttggtcataaatgtttctttgttaatcactttcgattactaattcaatctcctaggttataggtctattcagattttctctttcttcttgagccactttggtagtttgtgtctttctagtgattcgtccatttcatccagggcagctaatttgttgttagacagttgttcacagtatactcctgtaatccttttgtatttctgtaaagttggtagtaatggctctgctttcatttattattttaataattagtcttccatcttttgctcagtcaatatagtgaaaggcttgatctttcaaataatctatgtttattcattctactgctctccaaacttctattttattgatttatgctctaattatgctctctattatttctttcatactgctagctttggatttagtcttattttgtmttcttccactgcctttaggtatagagtgaggatgttgatttcagatttttcttaaatgtagttgtttatatccatacattttcctttgaactctactttcactgcattcaataagttttggtatgttttgtttttattttaatttatctcaagatattttataat

SEQ ID NO: 763184 - DNA, 594 bp, Homo sapiens
cggccaagccaggcggtctgccctgcagcagctgcacgggggcgggaagcggccctcagccccatccccagtggctctagaggccccctggctagaggtatccagctctggcagaggaggagccgggcgggggcagggtctggcttgaccatttggaattacaatacacttcattcatcaaccacagaacatacactggagtatcatctgcgtgcagatgagtatactgctcaaagcgatttacagattcaatgcttttcctatcaaattactaatgtcattttgcacaaaatagaaaacatctaaaatttatatggaacctaaaaggagtcwgaatagccaagccaaagcaatactaaggctagagacgtaggctagccaagccaaagcaatactaaggctagagacataggctagagacatcatattacatgacttcaaactatactagaagactatagtaatcaaaacaacatggtactggtagaaaaacagacacatagaccaatggaacagactagagtactagaaactaaggccacatgcctgcaaccatcacatctttaacaaagttgacaaaagtaagcaatggga

SEQ ID NO: 763185 - DNA, 594 bp, Homo sapiens
cggccaagccaggcggtctgccctgcagcagctgcacgggggcgggaagcggccctcagccccatccccagtggctctagaggccccctggctagaggtatccagctctggcagaggaggagccgggcgggggcagggtctggcttgaccatttggaattacaatacacttcattcatcaaccacagaacatacactggagtatcatctgcgtgcagatgagtatactgctcaaagcgatttacagattcaatgcttttcctatcaaattactaatgtcattttgcacaaaatagaaaacatctaaaatttatatggaacctaaaaggagtctgaatagccaagccaaagcaatactaaggctagagacgtaggctagccargccaaagcaatactaaggctagagacataggctagagacatcatattacatgacttcaaactatactagaagactatagtaatcaaaacaacatggtactggtagaaaaacagacacatagaccaatggaacagactagagtactagaaactaaggccacatgcctgcaaccatcacatctttaacaaagttgacaaaagtaagcaatggga

SEQ ID NO: 763186 - DNA, 645 bp, Homo sapiens
aaaacaaggattttaaaacttgaattgttacagtgagtatgtcttaatataggctacagtcactttagataaaaaattacctcacatctattttcaatattacttaaagatgttcatttagtggcaaatattttttttttgcctagaggcagatattttgccacatggctatttatgaaactgtatttaaatgcatgtacacatataaaagctgccactgtggctgtaaactattacaagttatcaagattaaaaaataaacaaaaaatatttcagtttttctatgaaatgtctttactcgagtccaaatttagaggtttaaaatgcttcaaattaataaaaccaagtgtttcacatatttcagttggartggcgtttgtcctagttttattagtgaagcagcagactgcattttttcactctcatacaccttcaaaagatggacagaaaaatttgataaaacttctagggcattatctgatgaaacacattaaacactaaaggagatatacaacttcattgcttgtaaaagacatataagaaggaaacctacatacatatatctatcagttttgtattttcaggaaatatttgccttaaagtgagcttcataacagtatgtgttctccaacaaagccaaggaaa

SEQ ID NO: 763187 - DNA, 611 bp, Homo sapiens
ttcctcttagcactgcctttgctgtatcccagaggtcttgattggttgtgtcatccagttcaaagaaattttttccatttccatcttgattttgtttttcacccagtgctcattcaggagcaggttatttaatttccatgtatttgcatggttttgaagattccttttggagttgattttcagttttattccactgtgatctgagacagtgcrtggtacaatttcaattttcttaaatttattgagactcattttatggcctatcatatggtctatcttggagaaaattccatgtgctgttgcatggaatgtgtattctgtggttgttggatgaaatgttcttatatatctgttaagtccatttgttccaaagtatagtttaaatccagtgtttctttgttgactttctgtcttgatgacctgtctagtgctgtcagtggagtaatgaagtcccccactattattgtgttgctgtctatcttatttcttatgtttactagtgattgttttataaatttgggagctccagtgttaggttcatgtatgtttaggattgtcatgtttttctgttgaatgagacctttaccattatatactgtctgtctttgtct

SEQ ID NO: 763188 - DNA, 606 bp, Homo sapiens
agagaatatatataatacaatttaaaaatttaaagtgtaaagcatacaaatcttaatatttggaaaaaaaataaataccctactactgatgaactctcatgaatcagaatactacaaaaatacatatgtgctactcatacctgtagtaccaccctatcacagtgttattaaggacagcctctagcaggagagtctttgtgtattgaactacgtttttattagttttctgacatgaaaccaaagccactgtaatgctttttagatgatagtcaaaatttccctgtstctagtccctcatattcattctcttgttactcaattaacagcactttttcccaactcttcttttctagaagcttattctttattctcatcttttaactcaaacactgagatatgggtattcacttattataaagaggtctattatgaattagctatatgatcttggatactagatctgtcccatttttcctttccattttaaggaaatcctttccctcattaatttcctctgaaagctaattacaacccctctcctcaatattgtgcctctaattattttcttatttaaagtgactagcagctattatatactgttccata

SEQ ID NO: 763189 - DNA, 606 bp, Homo sapiens
agagaatatatataatacaatttaaaaatttaaagtgtaaagcatacaaatcttaatatttggaaaaaaaataaataccctactactgatgaactctcatgaatcagaatactacaaaaatacatatgtgctactcatacctgtagtaccaccctatcacagtgttattaaggacagcctctagcaggagagtctttgtgtattgaactacgtttttattagttttctgacatgaaaccaaagccactgtaatgctttttagatgatagtcaaaatttccctgtgtctagtccctcatattcattctcttgttactcaattaacagcactttttcccaactcttcttttctagaagcttattctttattctcatcttttaactcaaacactgagatatggktattcacttattataaagaggtctattatgaattagctatatgatcttggatactagatctgtcccatttttcctttccattttaaggaaatcctttccctcattaatttcctctgaaagctaattacaacccctctcctcaatattgtgcctctaattattttcttatttaaagtgactagcagctattatatactgttccata

SEQ ID NO: 763190 - DNA, 606 bp, Homo sapiens
agagaatatatataatacaatttaaaaatttaaagtgtaaagcatacaaatcttaatatttggaaaaaaaataaataccctactactgatgaactctcatgaatcagaatactacaaaaatacatatgtgctactcatacctgtagtaccaccctatcacagtgttattaaggacagcctctagcaggagagtctttgtgtattgaactacgtttttattagttttctgacatgaaaccaaagccactgtaatgctttttagatgatagtcaaaatttccctgtgtctagtccctcatattcattctcttgttactcaattaacagcactttttcccaactcttcttttctagaagcttattctttattctcatcttttaactcaaacactgagatatgggtattcacttattataaagaggtctattatgaattagctatwtgatcttggatactagatctgtcccatttttcctttccattttaaggaaatcctttccctcattaatttcctctgaaagctaattacaacccctctcctcaatattgtgcctctaattattttcttatttaaagtgactagcagctattatatactgttccata

SEQ ID NO: 763191 - DNA, 545 bp, Homo sapiens
atataggtttattcacttataatattatttactaaacacttcttgatcttaggaagtatgtttgtccttaagaatatgagaaattaatacatttttataaatctaggtaacttaatatctaatgggagagacataatctgtctctatatacctatgtagctatctatctactttatgacctattgtcagargtggttgaaccagagcaactccatcttgaataggggctggataaaacaagggtgaaacttactggtttcctagagatttagtatctagaggtttcgtgtctagaggttaaatttcaaaatatttaaacatactatgactttgtgatttaggagatacactttaatatgtgtctcgtaagaacaagaacaatatataaagaatccatatacatattcttcactaagattcctcaatagttaatattttgccagtgggctttgtaattttctccatatataatcatattattattttttctgaatcatttgagagcaagttacaaaaatgatatgacttcactccccaatcttcag

SEQ ID NO: 763192 - DNA, 585 bp, Homo sapiens
tcctttcttttgctagcattggttttgatatttgtcttttcttaaaaaggtagtcacccctacttctagtcattatccacctccatgcctgggaaatgccagtggtcacttgacttcagattaactcagaaaatcatgtggacaaatatcgtttgctagagattactttcaggccttttttttttttttgtatttatttgctcaraaaacttgttcacggtgagttatttctgaagcagagttttgtctattgtctcactgtcaaaaaactatatgatagatggatagatagatagatacagagatagagatagatgatatcaatatctatatatacttgattatactctgagccacaactaccctcaatgactttactttggaaaccaggagccaaactgtcatttgcagatgatttggtcatctacctaaaaaatctcaagatagttaataaaaaaaaattccacctgtttaaaaggttaagaaaattacaatatacagtaaccaaaatagcatgggactggtaccaaaacagatatatagaccaatggaacagaacggaggcctcagaaataactccacaca

SEQ ID NO: 763193 - DNA, 455 bp, Homo sapiens
ttaattgtaccttttaaaataactaaaataatataatcggatttttttataacgcaaaggattaatgcttgaggtgacagatactccatttaccctgatgtaattattatacattgtatgtctgtatcaaaatatctcatgtaccccataaacatatttacctactatgtaccccccaaaattaaaaaaaaattaaaaataattcttctcatccttacgctctccatcatttctacaattaagtattcttgatccattaaaaaagggaagaggttctctgtatgtcctagttcatttgggttgctataacaaastattatagactgtttataaatgacagaaatttgttcccccagtcctagagtctgagaaatctaagatcaaggtggtagtaggttcaatatcttatgaaggcctgttttctggttcatatattatcatgtcttttcactgtg

SEQ ID NO: 763194 - DNA, 529 bp, Homo sapiens
tccagatttccaaaattaaatcagcgatatgaagcctgccaaccaaaaaaaagcccaggaccagatggattcacagccaaattctaccagatgtatacagaagagctgataccattccttcagaaaccatccaaaaaattgaagagargggactcctccctaactcattctatgaagactggcatcatcctcttgtcaaaacctggcatggacacaacaacaacaacaaaaacttcaggccaatattcttgacaaacataaataccgaaatcctcaacaaaatactagcaaatcaaatccagcagcacattaaaaagctagttcactataatcaagtggctttgatgcaagattgattggttcaaaatatgcaaatcaataaatgtgattcatcacataaccaggactaaaaatgaaaaccacatgattatctcaacagatgtagaataggctttcaataaaatttgacatctctttatgtgaaaaaccctcaacaatctaggaattgaaggaacatacttcaaaataa

SEQ ID NO: 763195 - DNA, 623 bp, Homo sapiens
accatctcattcacaattgccacaaaaagaataaaatacttagggatacagctaaccaaagaggcaagatatctctataacaagaactacaaaacaccactcaaagaaataagagatagcacaaataaatgacaaaacattccatgctcaaggataagaagagtcaatattattaaaatggttatactgcaagaatcaatttatggattcaatattatttctatcaaactgccaatgattcttcmcagaattagaaaaaaactatgttacaattcatttgaaaccataaaagagcccaaatacccaaggcaatcctaagcaaaaagaataaagctgaagacatcacattacctgacttcaggttatactacaagggtacagtaaccaaaacagcatggaattggtaaataaataaataaataaataaaaaattttttaaaaattaaaacaacagacacatagaccaatggagtagaatagagacctcagagataatgccacaaacctacaaccatctgatcttcaacaaagttgacaaaaacaagcaatgaagaaaagactccctattcaacaaatgatactggggtacgggctagccacatacaggagattgaagctgaaac

SEQ ID NO: 763196 - DNA, 634 bp, Homo sapiens
aaatactattcagtgataaaaaaagggataagcaatcaagccatatgcagagatgcatgcatcttagctgcatattaataagtgaaagaagccaatctgcaaaagtttcatagtgtatgatgccatttgtatgacattccrgaagaagcaaaattacatcatcaggaaacaaatcagaggttgactatgtttcagaatgcaaagaggttgactacaattgtggaaacatgatgccacggatttgtcaaaagtcataaaatttttataacataaggagtcaaccttaatataaaaattttaaaatatcatttaggtggttggagatatcaggatatgatgcaaaatgtgccaaatcaactaactctagtataaatgtatgaaacaaacttactaaagtgaacaggtaagaaaggaactgacatagggtagatatagatcaagagaatttaattgaaaatttgaaatcaaccttaatatttaaggttaattatttattttctttctttctttctttttttctttttttttttttgtgagacagagtctcgctttgttgcccaggctgaagtgcagtggtatgatcttggctcactgcaacctccgcctccaaggttcaagcaattctcctgcctca

SEQ ID NO: 763197 - DNA, 541 bp, Homo sapiens
ctgttggtgggagtgtaaattagttcaaccattgtggaagacagtatggggattccccaaggatctagaaccggaaataccatttgacccagcaatcccattataaacccctaaggattataaatcatgctactataaagacacatgcacacgtatgtttattgcagcactgttcacaatagcaaagaaccaaccgaaatgcccaccaatgatagactggataaagaaaatgtgacatacatayaccatggaatactacgtagccataaaaacgatgatttcatgtcctttgcagggacatggatgaagctggaaaccatcattctcagcaaactaacacaggaacagaaaaccaaacactgcatgttctcactgataagttggagttgaagaatgagaacatgtggacacagggaggggaatatcacacaccgaggcctgtcagggggatggggggctaggggagggatagcattaggagaaacacctaatgtagatgacaggttgataggtgcagcaaaccaccatggaacgtgtatac

SEQ ID NO: 763198 - DNA, 627 bp, Homo sapiens
tgaattagtgaagctatattccaataaaactataggcactgtaattgacttaagataattttaacatgtcacaaaatcttatttttttcccaaccattaaacataaaaaccatttttatggctgcaccaaaaccaggtggtggccagggtttggcctaaggcctataatttgttgatccttgccttataggtttctgaatatgacacgttatttacaatttctgattacattcagtacagcatgtatcaacatgagtttgggtaaaccatacacactataaatttcaaaattacatttgtatttgtgtatatttgtatacatagatgaattgtgaagttttagggaaaaaaatatcaaatctytctggaaatctccagcatgaggcttctgaggttgaactccatagcttttgattgcaaccaaacatgaaagggaaatgattatgtttgtattcatgaaatcaaattcctttttcaggtcttttgtttcttgtcagaagggttcttcatttttctttttaaagcaattgcttacacatgattttcagaagagcagcactatgtcagaagaaaagggaaaaacgttaagaaataaatgggatgaaaaaagaaaagtatgaatatgag

SEQ ID NO: 763199 - DNA, 583 bp, Homo sapiens
atttgggggaataatcaaggaaaacttccctggccttgctagagacctagacatccaaatacaagaaaagcacaaagaatacctgggaaattaatcataaaaagatcattgcctaggcacattgtcatcacgttgtcttaagttaagacaatgaagaaaagaatctttttttttttttgagatggagtttcgctcttgttgcccaggctggagtacaatggcgtgatctcggctcactgcaacctctgcctcctgggttcaagtgattctcctgcctcagcctcttgggtagctgggattacaggcatgtgccactatgcctggctaatttttttgtatttttagtagagatgggktttctccatgttggtcaggctggtcttgaactcccgacctcaggtgatctgcccacctcggcctcccaaagtgctgggattacaggggtgagccaccgcgcccagtgaagaaaagaatcttaagagctgtgagacaaaagcaccaggtaacctataaagaggggtgggggaaactatcggattaacagcagatttcttagcagaaaccctataagctagaagggatt

SEQ ID NO: 763200 - DNA, 626 bp, Homo sapiens
actaccttcccttagccccggattatttaaaagcaagtcacagacatcattttatttttatttttaaaactttaaaatgatatatctctaagacctaaggactctcttaaaacacaaccacagcacattagcatacctaaaaattgacaataattacttaatttcaaaacttaatttcagtgttataattttcccaatcatctcacaattttatctcaaaattttagttaagtctggatcaagtttaagttcacacatagacattatgtggtttgtctttgagtttatttagtctttaggtttccctctcaactctttttttttccctgaaaatttccctaagtatcttattgaaaaaaccaggtcccactgtgtagattcacttattgcatcatggtggtrtcgttaaacatgttcttctttcttctgtatttcctgtaaattggtagatagatctagagccttgatgagattcaggttcaattgtcttgtctagactacttcacagatgatattgggtattcccatcaggaagcacataaggacttattgtctccttttcatgatgctagtaggcatttgtgatcatcatgcaggtccattaattcagtaggggttgcataaca

SEQ ID NO: 763201 - DNA, 649 bp, Homo sapiens
gaccccttactggagggggagaatgcaaatgggcaggtggaggagccagagtgagcacttttgggctctggccccgtggtagtgtctaggagtgggtgcctgtgatgcccgaagtccaagtgggtgtgttacagtgctcttttagcttcaccatcagcagatggattaagtgttgaccagctcagtgacctcttggtacccaggtctttggcatccaggaagtacaaggtcacacagacaaattgaaggatggcaaatgggggggactttattggcagatggaggtggccatgagcaggatggatggggagctggagagggaatggagtgggaagagtatcttccccttgatttcagccaycctgcagcatatctcctctccgaatgtccccagcccaactcctctagagattcagactctctttctcttttctccttatctgctgcgccactgttctgctcttctgcctttctgctcgtggaatctgtggtttggggtttatatgggtacaggatggggggtgtggtgggccaaaaggcaacattttggggtgaaaaacaggaatgcgtgctcccatttagggccatgggtttccaagcttgagagtggggcctttgccaggaaaccaccctcttctactcagtattt

SEQ ID NO: 763202 - DNA, 508 bp, Homo sapiens
tggaagacagattcacatatacctatattgatgcccaaagaacacaataaaagaaccagtattcatgaagaatgtggaaaataaggagttaagctgaagtgacagtcctttagtcaaaaattctgtatatgctagaagttttgtgatttctgttttagctccaagcaataatacagagaatagaaatgatttttatagaattgggatacttaacttgtgggttctctggaggccttggataaattggtcattatttaatctttaactagtaaagatggcccaggcagcatgaagaggaagaggcagstggactaatctgctcatgctgctcttatctcatttatttatatagaaattatttctttttacgcagaacagtatagaaaaagtctgaataaatagaagataattaaatattctcaaagggatctaaagtcacttagatttttcattaaaaagtgcattttttattgtaactgaaaggacaaataaaatttcatacaccttt

SEQ ID NO: 763203 - DNA, 603 bp, Homo sapiens
gtataaggtgaaagatgaggatccagtttccttctacatgcggcttgccaattatcccagcaccttgtgttgaatagggtatcctttcctcactttgtttttgtttgctttgttgaagatcagttggctgtaagtatatggctttatttctgggttctctattctgtgctattggtctatgtgcctattttaatactagtaccatgctgttttggtgactatagccttacagtatagtttacaatcaggtaatgtgatgcttccagatttgttccttttacttagtctgctttggctatrtaagctctttttaggttccatataaattttaggattgttttttctagttctgtggggaatgattgtggtattttgatggaaattgcattgaatctgtagattgcttttggtagtaggtcattttcacaatattgattctacccatccatgagcatgagatggtgtttccatttgtgtcatctatgatttctttcaacagtgctttgtagttttccttgtagaggtctttcatctccttggttagatatattcccaacatatatttttttgcagctattataaaagaggttgcattcttgattt

SEQ ID NO: 763204 - DNA, 634 bp, Homo sapiens
acagagggcagagattctgtcttacatctttggatatttcaaaatttggcttagtgtgttggccataatagctgctcagtaaataattcttgataagaatgaaaaggaaaaggaggaggatgtaaaatatgctcaactgtaatcttgaagaggaagaataattataggcaataaacaagccccaagtgcaggctcaattgtaaactgttttcctcttgcgatttgaagaaagaatgcccaacacccccagtaaaacccaggtctaagtttagaaagtgccatttkgtcattcaaagttggccattcttcagcctagatagagtacttcttgtggctcgttcaacttacgttagtgtaatacatttaaccttaattggcaactcagttgtcaaggatgtttagcttaaactatataattctgcaaagtcaggagtaagcaaaacagaaattaaagattgtaaggaaaagggcattaaacagactttgttcatttgttttaattagtatagctgaattttaattatcacaattcttcaccagatactagtaaatgtgtccctacaattgctcagctaacagcaagacacaacaactagatttttacttacatgttctcttggatggcatcctagtg

SEQ ID NO: 763205 - DNA, 717 bp, Homo sapiens
ctgtgcacacgtgggcacacatacacacacacattccttttaggggtacacgtgaattctcagagagagagtgcagtctaaactcataaggagaaagaaaaaaaacccatccctaactgctttgtaatttgcaaggtgtgattctttccacagagtcaggcaactatactattatgccaaatagtgtggattcccttcctttcttctcccttccaaattgctcccctttgggatcttgtggaaacagagggtctagtgctgtaccattgggctactggtggctgtccccttagttacccaaggatgagcattgagattattgccttgagaaggattccattaaaattttagtctagattttgcaaggcagaaggcaggtgactgacttattttccagcttactcagttgactgggacagtgggactctggtcagaagggctgggagagaagaactagttccatcatagaagcaggcagaggaagctctgccttgcttgggggtcatgttgccagttgatggtgtggcaagatttaaaggagggctaagagctctcatgcccaaagataccctaayctcttcaccagtcaaattctcaccattaacaagagctcagtatctggttgtctggaaagcaaagtggaaccttggtcgggctgtctttctcaagctgtctcccagaataccttaactatgtttgagaatgtccatctcttaa

SEQ ID NO: 763206 - DNA, 630 bp, Homo sapiens
tgtagaaaatacagtatggtcccagttatttttttaaagaaaacacattatactacaaaaatgatgtactttatatatgcttgtaaaaggttctgaaaggtatttactaaatgttaacagtggttacctgtgaaaattgggagtgtcatttttgaagcaggggagatattgatctttttctgacttatttsacaattttaaatgagaatgattcttgctcagataatttcactatttgtgaaattaaaattaattagtaatgtattgaactaaaaaaaagatatttattgaaagaaaacactgagcctgcttctgtgaatctacaaaaaatctgtgattttaatgacattgtaattttttcatattgacccttagtgaaatacagcttttggaaaatcccttctctatgagagcattgctaaataaggaagtgtttaggttttgtaggagtaaaaatagcttctccagggatgttgatatttaaaataatgcaaatgtacaataaaatcccacaatctaaactctggattcagcccatatacccagagttttagaatacatttctgactaaaacacaaaagaccttgaaagcaggtgctgtctttgtcccctgataccaatgtgttttaa

SEQ ID NO: 763207 - DNA, 527 bp, Homo sapiens
tagtcaggctaccaccctctagatgcaactgttttttttaagtttgaaaacggaaatatttaagataatatactacatatagttacatagaactattttcatataaaaataatatttttctgataattttggaagaattagaaaaacacagagctcgcaaatggatcatctcactatccagagataacttttattaatcttttgatgtatttccttccagtccccccatattttaaacttattatatattcatttgtggacatatttttaaaawcagatatgccagtctagcccttttttttttttttttttttttttttttaatctggagctgccgttagggacagctgaggaagtgcagagcaatgccacaaaatgtctcccctccctttttttctccacagcccagatggctaagatttgtggtgggtgggcaggcgcacccgcccccaacccccgaagtcacatgtactcttggtggctttggcacttcctgaccttgcgtgtatgtttgctgctggaatcct

SEQ ID NO: 763208 - DNA, 527 bp, Homo sapiens
tagtcaggctaccaccctctagatgcaactgttttttttaagtttgaaaacggaaatatttaagataatatactacatatagttacatagaactattttcatataaaaataatatttttctgataattttggaagaattagaaaaacacagagctcgcaaatggatcatctcactatccagagataacttttattaatcttttgatgtatttccttccagtccccccatattttaaacttattatatattcatttgtggacatatttttaaaaacagatatgccagtctagccyttttttttttttttttttttttttttttaatctggagctgccgttagggacagctgaggaagtgcagagcaatgccacaaaatgtctcccctccctttttttctccacagcccagatggctaagatttgtggtgggtgggcaggcgcacccgcccccaacccccgaagtcacatgtactcttggtggctttggcacttcctgaccttgcgtgtatgtttgctgctggaatcct

SEQ ID NO: 763209 - DNA, 652 bp, Homo sapiens
ctcttttttggttccatatgaattttataatagttttttctaattctgtgaataatgtcattggtagttcaatagaaatagcatttaatctgyaaattgcttgggataggatggccaatttaacaatatcgattcttccagtgatagatttttcaagtacaagaatatataaacatttcattagctgcagagtgataacgtcatctcgtggcacatagcctctggaaaatttcactgtacaattgtgaagaatgagaatgaaaaagtcttataacattatagtattattataaagatgtcttgacctcatggacccctgaaagggtctcagagatcctcagaggtccccaaaccactttgagaaccatcccagaccattgacaggagatgtttatactcaagatttgggatgattgtgctgattctttcatttagtcaactgtcagttctttttccaggataaataggcttatacgcagttttgaaaatgaaggctgaatttcacaaatcacttgtggtctggaattggtactactagtggtaaaaaagtaagaaaactcaaaacaacaaagaacgaaattcaatagtttctaatctttcagtaactattttgcacagattaggttagacttctgagtcaaatgaatgaaga

SEQ ID NO: 763210 - DNA, 693 bp, Homo sapiens
gcatattaatggtaccaaagtattgataaaatctacccagcagagatatgatgagaatgaggggaaacatagaaaacatccaacggggagtctaatacataaagactctcactaaatgaggaaatgactacactttatatccaataaatgtttggttaagttgaactgtttggtgttttaaaggattcagatatttatggcatgagctggccctcaagtgacatgtcagattagtaaaaatagattaaaatacatgaaatataaatgaagagaagcaaaagaactgtgttttagaagagcacatgactgaaaatgacttcatcgtttataatttttctgacattgaacaaggccactaatattttttagcctttggtgtcttttcctatcaagtagaaataagaataaaggcagcctgcttgcctctcagagttgaactaaagttattctaaagttaaaatgagctaaagagaatgaaggaattttgccaaatacaaagaaatgattaagtcrgtgtttatcaagtaacactaaaatacaacatacccatcacaaactgagctcacactcaaaggtggccaaacatgaagggcacacggaggtcaaaacggtacattaaggccactggtttgaggatggagttttagtggaaagaatgaagagtgagccaaaggggacaagtagctctgcctt

SEQ ID NO: 763211 - DNA, 592 bp, Homo sapiens
ctgcttgtctattgttggtgtataggaatggttgtgatttttgcatatcgattttgtatcctgaaattctgttgaagttgcttatcagtttaaggagtttttgggctgagatgatggggttttctaaatataaaattatgtcatctgcaaacaaagacaatttgacttcctctcttcctatttgaataccctatattccttctcttgcttgattgccctggccagaaattccaatactgtgttgaataggagtggtgagagagggcatccctgttttgtgccagttttcaaaggaaatgcttccagcgtttgcccattcagtatgatattggctgtgggtttttcataaataactcttattattttgagatatgttccatmagtacctagttcattgagagtttttaacacaaaggaatactgcattttatcaaaggcctgttctgcatctattgagatgatcaggtggtttttgtctttggttctgtttaagtgatggattgcatttattgctttgcgtatgttgaaccagccttgcatcccagggatgaagccggcttcatcatggtgggtaagatttttgatgtgcttt

SEQ ID NO: 763212 - DNA, 595 bp, Homo sapiens
tccgatcagcataatgtaatcaatgtaatggagcagtgtgatatcttgcagaagtgaaaagtgatcaagttctctccaaataagattatgacacaaagctggagagctcatacactcctgaagtagaaaaataagggtatattgctggccttgccagctgaaggccaattgcttctagtgggccttacagacaggaatggaaaaaaggacatttgtcaagtcaatggccacataccaggtaccaggagatgtgttaatttgctcaaggaatgaaaccacatctagtatagcaggtgcaattgtagtcaccacttggttatgctaacaataatccactgtcattctccaagatctctctgtcttctgcacaggccaaatgggacagttgaayatggatgcggtgagaatcactatgcctcaatctttcaagtcctagatggtggtactaatatccgcaatccctccaaggatgaaatgttgttgttgttgttgctgttgttattgtttttgatttatgatttttcttcttttgtatttttttattttttattttattttattattattatactttaagttttagggtacatgtgca

SEQ ID NO: 763213 - DNA, 595 bp, Homo sapiens
cacttatattctggatttaatggctagagaatagtttttctaatcttcaattcaaagtaatagtgatttaggaaatgaaagtcatctgcaaaagattaacaaatgccagcagtcgctgtgtaactcaatgtctcatgttctgttttgcaatacagtatttccaaaaagataaatattacatccatgtagtcactaagtgtgagaaaaccatgtayttcagtgctacaaactgtttccctagagtttacacattgtatttaatatctcataactatcataccacatcagaatttcactgctaatgcaatcctttccatgcaatgttttctctttgtcatacgtaagatgttacgagactgattcaataaaaggaagctggagttatccacgaataaagcaggactattaccaaagatccagacagacccagtccaaaggagggcacatttccataatcaagctacagacaaaatgaacacaaaccaaagcaaagaaggagaaaaaaaaaacagcctgattcaacccattccctccctacatcttagcaaaacatgtacaaattgagaaagtgacctacccttctaaaggagtttcc

SEQ ID NO: 763214 - DNA, 666 bp, Homo sapiens
aggacttgggggaaaatcaagaggttagttttggatatcacaagtgcgagatgcatgtttgctatgtaagtggaaatattgagtaggcacttaaaaatgtaagcctggaatttagtggggaggttcggactggcaatttgagtcagaaatcatctgtttgtaaagggcattcaaagcagtgagcttgtatcagatcatctgaagagtgtgtgtgaagaaagatgtggttgagctactgagctccaagttactctaacataaagaggtcaggaagaaaaacagaagctggaagctaagaagataaagaaggatatgcaggtgaaatgggaggacctatttaaataagcatgttttagaaggagttagtgctcaaaatgccagctgcatttgcagagtttaatttagatgaggattgagaattggccattgatttagcatggtggycatttatttggactaaaaatggttttgttggaatgattggtctgaaattctgattcatatgggttaagaagaaaatggaaagtgagaaagtgaaggcagcaagtgtagaaaacttttatgtatagagagaggatatttacaaagtagtagaaaagtgggtttggtagctggaatggaggtcaaaagtcaaaaagtttcttttaaggtaggtgatagttcagc

SEQ ID NO: 763215 - DNA, 586 bp, Homo sapiens
tatttttagcagctcattttttttcttaccaatgggctctccatttttttttccttttttaacctgaagttctgtacttaagcaggatatttttgacaaggcattcttatagtcagagacaatattagtgtaatgatggcctgggacaagagctggtagcaagaacagatggtctacgcaaaagccccccccaaagggatatgatgatgccatgtgtgtgatagctgttttagaagtccaagagggtagcatgctgcagagattaagtggggactctgaaaccagactatgtgacctgaactcaaattgattgatttasccagtgaatttaatagatgggcctcattcattttgaataggaaaagaaacctgctgcatcttccctattcatgagctcattctccaatttaggaaggtcgcctcatgcttaaagcaaaaaacagcctcctagctgggaagcaaaggtttattgcagtactcagatgttaatgttttctgggctcagactatttttatttggcagcacagacggtagtgtaagcacagatttcttcagcagattttattatagcaggtgtgggatcct

SEQ ID NO: 763216 - DNA, 620 bp, Homo sapiens
atgttagtactttcatccttatttttttcaaattttttagctatgctgtgaactaaatgagctgaagcctccactattcaaagttcttcaaggtttgacatttaaatttattctaaaatagtttttgcatgaaaaaccaagaaagggaggattgtggtttktaccttggcatggaattttatgagtgggatagaaacagagtagtggtgttgaagctgtctgcaggatttactggcactgattgggaacaggagcggcccagtctccaaacaagcccataattcatatgactaattctagcttttgccttaagcctccaccccagcccccaccccgccacacacacaatcagcatatatggaaatgttaataaagtcatcatcttattctcttcaaaatgactgattcttatcacacccatgcctcagcatttccaggtgggaagggggccttcaggacaagaggttgcaaagggaagcaaattcaagtgagaaaccctgcaaaactttctgggaggtgacagaattaaacatctctcattccgagacgtgttctagtaggcatgcttctgagccataagagcatccatattatggctttgaaaatattttatatacaca

SEQ ID NO: 763217 - DNA, 515 bp, Homo sapiens
aaaaatacataaacaagattaaaggaaatttcccaggggtctcacacctgtaatcccagcactttgggaagctgaggcgggtggatcacctgagatcgggagttcaagacccacctgaccaacatggagaaaccccgtctctactaaaaatacaaaattagccgggcatggtggcgcctgcctgtaatcccagctactcaggaggctgaggcaggagaatcgcttgaacccaggaggcggaggttgcagtgagctgagatcatgccattgcacaccagcctgggcaacaagagcgaaataccwtctcaaaaaagaaaaaaaaaaaagaaatttcccaatatattaatgtcagcatcttcagtgattttcctgtttatatatttcttctattctaaacttttaataatatacatataaatcacaataatcaaagagaaaaatggaaagtaataattttatataccttaaactgcttattcctagtttctattttgtgagaggaaaactatttccta

SEQ ID NO: 763218 - DNA, 546 bp, Homo sapiens
tgtgactttaaatctcagttaaaatattaagaggtgtttaaccccagccagtcaccactttggcatttggattgctgtgaagcgtgtactacatcaaagggcaattacaaatttgtttgtaataaatattcaagaagcatagaaattttcagtgttttgaagatgagaaattagcatgtactttcccactgagattcaatgaaaagaaaatgggcaattttctttttaaataactttatctcaaactgttgaatgggactttctgcaaatgtatggagggcttatttttagttggaayaagattaagagagatgatagaatttgtactaagaaaattctcgcccagcctgattccctctcaaatgtcacacgagtgtcagtggtgaggtgagggagaaagcacttctccgaggatcttgccttttgttccctgacttgaaactcacgcttttcattggcctggctagatagtccttgttgccatgtccttttgacaggagcatcatttccttacaagcagtgaccgaaatggttactaatcctaca

SEQ ID NO: 763219 - DNA, 626 bp, Homo sapiens
cacctatatatttaatttcactaagtgatttctggatgctcatctgagtggctgaatgccttgacaccaccaccaattatgaagaactattttatcccatgtcctcagctctacttggtattatccatcttttaatttttgccaagcattatgactataaagttatatatcattgtctattgatcttcctttttctgatctcttgtgaggttaaacatctgatcatatgcttgttggcattcaagttttcctttttgtrtatatttcctgttcacatgccatgcccatttttaaactggggtttcttacctttttttgtgctgatttgcaggatctccttgtacttaatattatagatataatccatagttgcacaggttttgtatttagactttaatccatctggagtccacctttgtgagatgagacaggagtctatttttctccatgtatgatctaatttttccacacatcccatcttttcttccactgaattggcatatttatcacatatcaagtttccacatatagtcgagtctttttctgaactcttatttctgtttcattgatctgtttatctattctgataccagggtcacattgtttctgtaattgcagctttgtgg

SEQ ID NO: 763220 - DNA, 619 bp, Homo sapiens
ttggtttgttaagctatcttgagatggaaaaatgcttgtgtttggggcttactgtaagaagagggaatctgacatcagcatcttcaaaaaagacatttaattgtacaagaattataagtgaatgaataaactaaggtgtgtgtaccttttgaaagacaaatgtcactcagagaattctaggtttggtaatacttggggtatacaccacatccttaaggcccaaaagaagttgagagtagtaaacattaactatcatatcccacatctttttaaataaaaaactctaacatttgcacataattttatatttttccggcttttcatatccattttcaaatgtgagttcatattgattttatgggttagggcagggaaaaacatacagagagaaattaattgatttctcaaatgtcaaaaagttcakaaaaactaagataaaaatcttaatgcagtatttttccttcacatccatccacttcatttgcagacattcctttaggcaatctattgaaaataataccttgagtatgaatttcagcttacagtttacaaagcacatacattatgtcattatacataccattatacatggtatgtcactatacaactctagttgagt

SEQ ID NO: 763221 - DNA, 634 bp, Homo sapiens
caattttaccataattgcaagagattatacaggaaaatgaaagcagggaggagcactggagaaatcaccaaatagacaagcccactccatcttataacattatagttatagccattggacagagacagaggttttcttttagccatgccacaatgtatacatatttcaaattatcatgttgtacatgataaacccattagattcccaattaaaaacccagttagagtccaaacaatatgtgccatagataaaagacactcccaggaagcttgtagtactttaatatggttgacggttgtttaaacwttattccttttcaagaaaaatacaattcaagtcatttgcttgtttgtatatagtggtcaatagttattacatttgcttgcttgtatatagcaacacatttacttgcttgtatatagtggtaaatagttattaaatatagataatagtgaatataaatgaaatagggtttccctagctgagcatatagacatcttatttaatcacgccattgaatactcattgatccaaatgtgaagcatctgtgttattctctgaggctgttttgttctcctctgtgtggatccaaatactagggccaataaaaggtcattgctgacatggcctgtga

SEQ ID NO: 763222 - DNA, 601 bp, Homo sapiens
agaaattatatccttcctattcgtataagtgaagacaaaaggcatcactcttccaaccctggaaatcccttccctccctcagggtatggccctccacttcatttttggggcataacatctttatagcacaagggtaaagtcccaatactaacaggagaatgcttaggactttaacaggttttccagaatgcatcaataagggccactaaatccgatttttcttggtcctctttgtggtctaggaggacaggcaagggtgcaggtttttgagaatgcattggtaagggccactaaatctgacattccttggtcctccctgtggtctaggaggaaaactagtgtttctgctgctgcatcagtgagcgcaactcttctgatcagcagggtctagggactgttgtgggttcttgggcaagagrtgtttctgctgctgtgtcggtgagctcaactattccaatcagcagagtccagggaccattgtgggttcttgggcaagaggtgtttctgttgctgcgtcggttagcgcaactattctgatcagcagggtccagggaccgttgtgggttctggggcaccaggagaaacaaacaaacccaaaccg

SEQ ID NO: 763223 - DNA, 589 bp, Homo sapiens
gattatgcctactgctttaattctgcccctccctattcacccttaagaccccacaactctatggaaaccactcagacaaggcccctaattgtcaaatccaaaggaatcctcttaatggttacctaatcgtttatgcaatagcattgtttcacagtgttccttgggatccagttccctgtactattattaacagttgttatgtagggggaaaaggaagagatatgtgcccagaccatgagctktggaaactttaatttggaaattaaaatctatgttgtctgtatagcaagacttctcagagacattattatgctaatgttttgggggattctgcaagagaagtatgtagacttcagcatttatctcactaagttgaccagttttccaaaagagtaaatcatggaagagttattccttggaacagtctttgagaaatactttatcccttgatataggtgatcattccattcaatatcttttcccctttgatactatgattccttaactcttgctttgctcctgcctcctaacacttctcaaccaaactttgctttccccactcaatctttaaacattagtgttttccttg

SEQ ID NO: 763224 - DNA, 641 bp, Homo sapiens
aagaaaaatccattcacaggtgaatttccttggtatttttgttcttttgttttcccactttgactcaagagtggttccatcatggaagcgagcagcaaaagctctaagagtatttctgatcagagggcccagaaaataggtccccataaaaagaggactgggaaaaatgggaagagtagaaaattcccatcagtttttctattttttcccagttctacaccaagggcagcccacccatgaacctacaatgtggtggcaacaatgtctccagtacctaacaccttgagggaaaacccaaaytttgggccagaggaactagaaaggaaccaaaaggaaatcctgtagtacaaaaagggtagatgaatcacttttatgttttatcttcctctctcttttctctgccattttgctctaaaggcagccccgatcatggagaattatgggtattatggtcactatagcttcaagttaaatcttatctttctagtgaccacataactaggaaaacaagcccttggaagtcagagaatttgggggaaggaaatacttgaggggaaagagctagagaaggaaatcttctaattctgtagctaaagacacactggagttatctctgagtagcacatgcacagacagaccca

SEQ ID NO: 763225 - DNA, 602 bp, Homo sapiens
taaataaataatgtttcaactctggacaatatccattgacttccagccaagaaacatgaggaaaaaaagaaaagaataaagcttttaaatttatattccaactttataccttaagaaactagaaaaataagagcaaattaaacacaaagcaaatggaaggaagaaaataagaaagagcacaaatcaataaaattaaaaacacaaaatagagaacatttataaaatcaattgtattaaaacatcaaaattattaataaacccctagccagactaagacagaaaaaagataacacaaattatcaatatcaggaatgaaagaagggatattactacagatactacagacattaaaagggtacaagagaatactacaaataactttatgcccatacattcaaygacttaaataaaatggaataaatctttaaagatacactgccaaaattcacttgagaagaaataagtaaactgagccatctattaaaagctgaatttatagtttaaaaccttccaacaaagaaaagtaccacaagacttcactgataatatcaaccaaacatttgagaaagtaataacattaaatcaacataattttttccaga

SEQ ID NO: 763226 - DNA, 606 bp, Homo sapiens
agaacccccacattggctccctgactggtagggcgagggctaccatggtggaaaaggccaaatggaagccattagagctgcctctacctagaaaaacagtaaatcaaaaacaatgtcgcatccctggagggactgtggagattagtgccaccatcaaggacttgaaagatgcaggggttgtgattcccaccacattctcattcaactctcccatttgggctgtgcagaagacagatggatcttgcggaatgacagtggattatcataagcttaaccaagtggtgactccaattgcagctgctgtaccagaggtggtttcattgcttgagcaaactaacacatctcctggtacctggtacaccatcattgacttggtaaatgtctttttctccattcctgtccataaggcccaccagaagcaatttgccttcagctggcaaggccagcaatatgyctttgctgtcctacctcagggtgtatcaactctctggctttgggttataatccaagagaccttgatcactttttgcttccacaagatatcacactggtccattacattgatgacattatgctgattggatccagtaagcaagaagtagcaaa

SEQ ID NO: 763227 - DNA, 547 bp, Homo sapiens
atatgtgattagaaattttggtgagatcttatctttgaagttgagatagaaaatcctgacaacagatttatatattattccagtgaatatgtaataatattcaacaatggtgacgttttagtggttagattaattggaggtaaatataaattaaycaatgtaacttagaattcatttatataaaatctgtaaaagcagtttgtattaagtatcacatacctaatccttataagatactaaaatgatttaagatttgtttatctattatatttaagtgaatgctactaagatatataagatgcttaggaggttttctttcggtttatttttttaaatttaaataatattttccccactctttttagaggctggaaagagagtatggctgtccttgtatcacaggaaagccaaaagttgcctttcgagagaccattactgcccctgtcccgtaagtatgcaacgtaattaaacattatgaggctgaaatttttgctttttattttggatatacataccactattactgttttaaagacatttttatgta

SEQ ID NO: 763228 - DNA, 635 bp, Homo sapiens
tatatgcaacaagcactataaagaagttgtgacaatttataaattaattttaatttaaaatctcagtgtgtacagatcaatagtacacacggagcagctcatgttttagcacactagaaggcagaaagggagtcgttttttgttttccaaaatcagattatgaagaacaaaattactttaaaattagtaattcaaaatttggcatacgtatcactctactttttttttccacctcacaaaatctttcttttttttttttaagttccggggtacatgtgcaggatgtgcaggtttgttacataggtgaacatgtgccatggtggtttgctacacgtatcaacccatcacctaggtattaagtccagtatgcattagccatttttcctaatgctctccctmcttccaccccactctactttttatttgaaggtacagagtttcaagtagttctaaaatgcacaaatgagttacccatggaacattttctaactcctacctcaaaaaccagattattccaaagtattcgttatacctttgcagtatgtttgaaatatttcataataaatgtaactgcatgaggttaaaggatttcataccatttgatgttttaaaacaggcatttcaaaaggaggtcc

SEQ ID NO: 763229 - DNA, 635 bp, Homo sapiens
caataaagaaaataaacaacctatgtaaaaataggcaaaagatttgaatagattcttcaccaaagaacatatactggtattaaataaacatgttaaaagacactcaatatcattggttatttgggaaatacaaattaaaatcacaatgagataacattatacactaagtgctggctaggttattgaagatctagaattgccgttcactccgttatgaatgtaaaatggtataaccactttagaaaatagcttggcagtttcttaaacagttagamataaacttacctattccattcctagatttttagttaactaaagcattgttcctatgaaaacttttacatgaatgttcatatcatttctatttgtgatataatagctaaaaactggaaacagtccaaatgtccacgagcagataaatagataaacaaaccattgtatatttgtaaactagaatactagtcaacaataaaaagaaatttatgctacaccatatatgtaactgttagtgaaacaattatgctgagtgaaagaagccattgaaaataggacacaatgtatggttcttctatctctacaaaatactaagaaatgaaaattaacaaagattggtaaaaagcagatcaacgattgcc

SEQ ID NO: 763230 - DNA, 635 bp, Homo sapiens
caataaagaaaataaacaacctatgtaaaaataggcaaaagatttgaatagattcttcaccaaagaacatatactggtattaaataaacatgttaaaagacactcaatatcattggttatttgggaaatacaaattaaaatcacaatgagataacattatacactaagtgctggctaggttattgaagatctagaattgccgttcactccgttatgaatgtaaaatggtataaccactttagaaaatagcttggcagtttcttaaacagttagaaataaacttacctattccattcctagatttttagttaactaaagcattgttcctatgaaaacttttacatgaatgttcatwtcatttctatttgtgatataatagctaaaaactggaaacagtccaaatgtccacgagcagataaatagataaacaaaccattgtatatttgtaaactagaatactagtcaacaataaaaagaaatttatgctacaccatatatgtaactgttagtgaaacaattatgctgagtgaaagaagccattgaaaataggacacaatgtatggttcttctatctctacaaaatactaagaaatgaaaattaacaaagattggtaaaaagcagatcaacgattgcc

SEQ ID NO: 763231 - DNA, 635 bp, Homo sapiens
caataaagaaaataaacaacctatgtaaaaataggcaaaagatttgaatagattcttcaccaaagaacatatactggtattaaataaacatgttaaaagacactcaatatcattggttatttgggaaatacaaattaaaatcacaatgagataacattatacactaagtgctggctaggttattgaagatctagaattgccgttcactccgttatgaatgtaaaatggtataaccactttagaaaatagcttggcagtttcttaaacagttagaaataaacttacctattccattcctagatttttagttaactaaagcattgttcctatgaaaacttttacatgaatgttcatatmatttctatttgtgatataatagctaaaaactggaaacagtccaaatgtccacgagcagataaatagataaacaaaccattgtatatttgtaaactagaatactagtcaacaataaaaagaaatttatgctacaccatatatgtaactgttagtgaaacaattatgctgagtgaaagaagccattgaaaataggacacaatgtatggttcttctatctctacaaaatactaagaaatgaaaattaacaaagattggtaaaaagcagatcaacgattgcc

SEQ ID NO: 763232 - DNA, 614 bp, Homo sapiens
tcaacctgaaaaagggccctcatcagaacctgatcatcagaacttggcaccccaatctttgtcttctgatctacattgtgacctaagtcaggtaaatacatctggcatacatctttgacatttttatacaatctctatgcactgtggttttagatgtgcaataatttgtacaatggtttattcccaagaacagattttttgtgtgtgtatacttccttgctttaataaatatatgatataaatttaaataaatttctattttgtatatttttgttttgttttttgttttttkttttgttttgtttttgagatggagtcttgctctgttgcccagactggagtgtagtggcatgatctcggctcactgcaacctctgactcccaggttgaagtgattctcctgcctcagcctcccaaatagctgggattacaggcacccaccaccatgtccagctaatttttgtattttactagagacagggcttcaccatgttggccaggctggtcttgaactcctgacctcaagctatccacctaccccagcctcccaaagtgctgggattacaggggtgagccaccacacccagcgtattttgtatatttgtaaagtacaaa

SEQ ID NO: 763233 - DNA, 581 bp, Homo sapiens
aaataccctgacttgatcattatacattctgtgcatgtatcaaaatatgacatataccctataaatatgatttcaatatccacatccataccctttccaattttctgacctctttcttccctgacatgcactcctccattcacgttgcccttcacactatctcagacccttattatcatcatactcacactagcttccttgcaatttcccaaacacattaagcacaacctcatctctgggtctttgtacttgctctgttctgcccttagaaatgctcttcctcctcatatctgatggccacagtcttaccacttcaattctcatctaactcattcaagctttcctcacattctttttcaaacagcaactcttccacccacttctcctgccctacttagttacattgtttttataccattcaagactctctgacrtatgatttatttgcatattattcatttctccacccatattagacttgaactgcagaaaggcagagatatttgtctgttttgttcactgctgtatccttagtaactgaaatatacaacatatatatgccacatagtagacatatagta

SEQ ID NO: 763234 - DNA, 626 bp, Homo sapiens
cactggttctgttaggaagatgcaaccccaccaagttctgactctttgactcaaaggtattgaatgcaaagaagcaatactggtcggaaatccattcttgcaggagtagggcagtaagtgaagctacatcaaattccagaagaggcaatggtggtgattctgctagcctgtgcaacttccagcatccatggyttgtggggtacaacagctgtgcctgtgcccagtggtggctgcatagggatttgtatagaatcaattatctgacatcattttagagattgtttctgatggtgtggcctctaaacacaagttgtgtaagtattctagaatacagttctttcctgcataaattagcctgggttggttcatgatgcttaaaattaagaactttgactagccatctacctttctaacaaatccaaaactttaatctactgatattcactgaatgcaagaaactatgttatgtgcttgagtgaagggatagcgtcaggggtaaatactgaaatgtaagccacaggcctgctctccaggggcaagcagcataaaacaactgtaaactgagaaggatgattgtagggctacatcaaagcacaagccttgcagtacagaagaagtaacaacca

SEQ ID NO: 763235 - DNA, 661 bp, Homo sapiens
atccatatatactttgcttggcttttgtcccttaatagatctataactgtgttgggaagttgtttaatcataagtcattctaggtaagttagagttttaaaaaaataaaaatgaaagaattaaaaaaaaaataaccctgatgtcaagataagtaaaaatgtgagattagcaaaactgattacagtcacggtagaaagaacataaatccttttcaataatttttttctttattaaaaaaaaccccttttctcactttacaggggaaaaaaagggtatttggcatacagtagtactggacgttatccagagaagagtttttttcagaacttggtcccttttctaatctgaacaagttcaagctacagcaaaattacagtttcccagtctccttttaatttccaatttttgttaaaaaggaacctcagaagatattgacttcgtactactaaatttgagacagggcaggttagaaatstttgcaatttaactaatatcagtaacctaatggtgatgaacaaaatttatatgtagatggaaaaatttaagctagtaaacactattttgtcgtttttaattgagatggatttttacatttttttttgttctaaatggatattttaccatcacaaaacggatggtaattataaattacattttgccc

SEQ ID NO: 763236 - DNA, 535 bp, Homo sapiens
gtgagaactcactgactatcatgagaacaacatggagaaaaccatccccatgatccaatcacttcctttcctcgacacgtggggattacaattcgagatgacatttgggtggggatgcagagccaaaccatataattccacccttggcccctgtcaaatctcatgtcttttcacatttcaaaaccaatcattccttcccaacagtagcstaaagacttaactcatttcatcattaactcaaaaatccacagtccaaagtctcatctgaggcaaaggcaagtcctttctgactatgatcctgtaaaatcaaaagctagttaattactttctagatataatgggagtataggaattgcataaatgctcccattccaaatgagataaattggacaaaataaaggggctaccagccccatgcaggtctgaaatccagcagggcagtcattaaatcttaaagctctgaaatgatctcctttgactccatgtctcacatccagatcacactgatgcaagaggtaggctcccagggccttgg

SEQ ID NO: 763237 - DNA, 600 bp, Homo sapiens
tgttacagaaatattgcttcttgattataaccaatcagataataaaaatatgtttcagttttactgagatgtttgattttcttaggtcttgttgtgccacaccaggaataaagcttaattaaggattcatttactaattgtttatcataaaagctatattcaagggaaaaagttacattgaatccatagttttctgggaggagaacatgggaacagtctgtttgtgacctgtatttctctgccaacttcaggacttggtaacctayacaggtttcctatgtgagaggttaaagtgtgggtccttctgtttcctaaaaaggaagcctataaagcaccacatcatcttttaattattttccatacaataaagccagtttaaggccatgaaatggcctatgagctcctatgtgttatgtaacattttcagtggttactgtagcaacattttgtcctttatggcatttcatttccatataaagtaatctgcattgttatgggatgctttgtcccatagtgatgaccataaaccatgctcaagggtctcaaacactgactccccactcccttttgttctacctgaaaggcgcctactaagcttct

SEQ ID NO: 763238 - DNA, 620 bp, Homo sapiens
attgatcataaaggaatatttttcatttcatttcaccataaattttatatggaaaacaatcctcaatagtcctgtaacaaagggctttcttcccctctacatacttctcctaatatgctccttgaagtattgtgttgggattttcatttaaagaaaatatgtctttgaattttgaacagactattaaaataactataaacttaacagagcaaaagagttttgaaaatgttcatattctgtttattttatgccatmactctaaaatgttcattaagtggcataaaattaaaatgaaaatgttcatccagtaaactgataagctccagaaactgatgtgtgtttgtgtgtgtgtgtgtgtgtgtgtgtgtgtgtgtttatgtgtgtgtgtgtatgtggtctatattgtagccattgggacaattagatgaaaagattttgaggtttaaaagtactaattttccctcttcagaactgcagttgcatatcttttaaaaacatttttaagtgccaaaaaatagagataaaaccagaaatgaacaagcaattaaatctgcatatttagtattgcttgaagataatataaccattacaaatgttatttaggcattagttttggaagg

SEQ ID NO: 763239 - DNA, 573 bp, Homo sapiens
gatggtggattattgtaagcttaacctagtgggtacttgaattgcagctagtgtagcagatgtagtttcattgcttgagcaaattaacacatcttctggtacctggtatgcagccattgacttggcaaatgcctttttttctccattcctgttcatgcggcccacagaagcaatataccttcagctggaaaggccagcaatatacctttgccgtcctacctcaggagtatatcaagtctcaagctttgtgtcataatctttttggaagataacttgattgcktttcacttccatgagatatcacacttgtccattacattgattacattatgctgattggatccagtgaaggagaagtagcaaacacagtgaactcattggtgagacatttgtgtgccagaggatgggaaataattccaactaaaattcagggaccttccacttgagtaaaatgtctaggagtacagtggtgtggggcctgtggagtcattccttctaaggtgaaggataagttactgcacttggctcctcttacaacccagaaagaaaaatgcttagtgtgcctctttggat

SEQ ID NO: 763240 - DNA, 511 bp, Homo sapiens
cactgactcaaaccattgctaacagcctagccacttggtcagcagaatttcaattgagtgactggactattaaagaatcccttataagggaacaaggacaatagcagcatgcttgctgcttggaggggacaaatatatgacactcatgtggatgctgatggcaaagaacctttcaaaatggaacataaatagaattatcatgctaatcaagcttgtgcccaacaggtagcaacagttacttayggatatataactgatgtcgaggtacattttagatgcaagactgggcaaaggcttaagagatgattctacaagatgctgagactaaggatgctgtacaattgtgtgattctttccaatgggcccagattattcaaagaggagaattaggacatattaactgaaggctagggcttacctgggtctgacagattgaccacacagagtgaggtacactgagagtacctcactgccattagttagcacctatgcagactgtggtatttcatgc

SEQ ID NO: 763241 - DNA, 624 bp, Homo sapiens
ggaggtatcagtactgtagcatataagttagccttaaactaatctacagattcaatgaacccttaaccattatcccagtcttatttttggggataatgataaactgatttaaaaacatattgaaatacaaattaccagcttagcaaagtcaaatttggaagaaataaagaatatggtgacttagactaacaggtatcatacaaagctatggtaattaagattgtttgcggtataggaaaagagatacaaatatgaracacctggttgtgtagaaacagatcatatatgtatgatgacctaaattatggcaaaggtcacattgctctgtcatgtgcaaatgacaatcttttcaataaacagtggtgggtcatttgaatattcatatttataatgaagagtttgactttattatttgatacttaactaattacagattttaaagttacaatattgcaatgtgattcttcatgttaaccacctagagttgctgcacattccacaagtttaaaggcacattccccaacaacactgccttcactccaaatgacagctatcactttagggagctccagaccacaggcacttcttactaagtggataaaaattcagagttttccataatgc

SEQ ID NO: 763242 - DNA, 624 bp, Homo sapiens
ggaggtatcagtactgtagcatataagttagccttaaactaatctacagattcaatgaacccttaaccattatcccagtcttatttttggggataatgataaactgatttaaaaacatattgaaatacaaattaccagcttagcaaagtcaaatttggaagaaataaagaatatggtgacttagactaacaggtatcatacaaagctatggtaattaagattgtttgcggtataggaaaagagatacaaatatgaaacacctggttgtgtagaaacagatcatatatgtatgatgacytaaattatggcaaaggtcacattgctctgtcatgtgcaaatgacaatcttttcaataaacagtggtgggtcatttgaatattcatatttataatgaagagtttgactttattatttgatacttaactaattacagattttaaagttacaatattgcaatgtgattcttcatgttaaccacctagagttgctgcacattccacaagtttaaaggcacattccccaacaacactgccttcactccaaatgacagctatcactttagggagctccagaccacaggcacttcttactaagtggataaaaattcagagttttccataatgc

SEQ ID NO: 763243 - DNA, 624 bp, Homo sapiens
ggaggtatcagtactgtagcatataagttagccttaaactaatctacagattcaatgaacccttaaccattatcccagtcttatttttggggataatgataaactgatttaaaaacatattgaaatacaaattaccagcttagcaaagtcaaatttggaagaaataaagaatatggtgacttagactaacaggtatcatacaaagctatggtaattaagattgtttgcggtataggaaaagagatacaaatatgaaacacctggttgtgtagaaacagatcatatatgtatgatgacctaaattatggcaaaggtcacattgctctgtcatgtgcaaatgacaatcttttcaataaacagtggtgggtcawttgaatattcatatttataatgaagagtttgactttattatttgatacttaactaattacagattttaaagttacaatattgcaatgtgattcttcatgttaaccacctagagttgctgcacattccacaagtttaaaggcacattccccaacaacactgccttcactccaaatgacagctatcactttagggagctccagaccacaggcacttcttactaagtggataaaaattcagagttttccataatgc

SEQ ID NO: 763244 - DNA, 570 bp, Homo sapiens
tatgtggttttttttttttttttttttttttgagacggagtctcgctccatcgcccaggctggggtgcagtggcgcgatctctgctcactgcaagctccgcctccagggttcccaccattctcctccctcagcctcctgagtagctgagactacaggcgcccgccaccacgcccggstaattttttgtatttttagtagagatggggtttcaccatcttagccacgaaggtctcaatctcctgaccttgtgatccgcccgccccggcctcccaaagtgctgggattacaggcgtgagccaccgcgcctggcgctttggatatattaacaaagacttccatatggattatatattggcggtgcaagaaagagaagaattagtgatgacttcttggacctcggcctgatcaatctcaaactcttaaaagtttttccaggactcattcttgtcccaccatgttctaacagctcaagagttctatacaagtatttttatgactacatcctttaggatgttccattgtaaaagtttgcactgcatatacacaatgtgcatcttcagccacctata

SEQ ID NO: 763245 - DNA, 572 bp, Homo sapiens
tctgatcttatctgttacgatgcactgcctcggtatttaccttttgtttttaaaaaaactattaaaatcactcataaaacagtcagatttaaggagtgtttaattttcaactctttatactattgaagtcatcttgctacatctttattgaacagcagttatttggatgggggccagtagttaacaaattaataattgrcaggttaattatatttttatattgtctgttgtactctctataaaatatactaaagtactcatatctataagtaaactaaaaaaagtctacttataaggttgataccttttactctattttgaaaatgagtttacttttttttttaatgaataggactcaggatttgaagacaaaaaagcatcatattccagtggttgatcagactccactagagccgccaccaatagtgatagtggtgacggggcctccaaaagttggaaagagcactttgatataatgcctcattgggaacttcacccagcagaagttgaccgagatcagaggccctgtgatgatcgtgtcaggtaggagatgccaccacagacacagagtt

SEQ ID NO: 763246 - DNA, 548 bp, Homo sapiens
ataacttttctacattggttttagctttaagagcaaacatttgtgtgttatttgaagcaactatcaaaataattttttgaaaggaaatgtaacaaatttcactctttatcagagaaatgtaattcttaataagatcttttgcttttacgtagtaactaattaccaacttattccayctaataaaagtttattatagaacaatgtgaactggggcgaagactgagaattttgtatcatattgcctacgtgtgatctaaacagattttaaaaaaatttatgccaaaatggagattacctggaagtgaggtagcaaatataatattactatgaatttaactcatcttcaaaactatagcagctttggttgatgctgatcaacaaggcatgtaacagatattgaagtaaaggtattgtactaaataatttggtgtttcacaagtaaaagtggcttttgctgaaggctctgtattcttagcatggtaatactaaagatattgttgtaatactaaggatatggttataatactaaggcaaaataaaaagaagct

SEQ ID NO: 763247 - DNA, 637 bp, Homo sapiens
atctatcattgagcatcttattgtccctgggtgaattggtttctgacataaaagaatgaggatctgaccttggtgtatagaagatgcaccccatggagtccatggcagctggttgccagacttccctcctgtcacactatggaccacacagtattcttcaaaacatttgtaattagcctccaactgccaatttaaatcatttttctttgtatgtgacaatagaaggtaatacagtcatcctcagtatctgtagtggattggttccagggcccctgtggatactaaaatccagggaagctcaaatccsttatataaaatggcacagtacctgcacataatctatgcacattttccatcatattttaaatcattgctagattatgtataatacctaatacaatgtaaatgctatgtaaatagctgttataccgtgttgtttagaaaatactatcaatttttgaaaaaaaatgcataaagtaaaactttcacaaaatacaataaaaacccatgagggaacccctatataagctgggagtttaaaaaccttgtaagtatggctaaaaataaagatataatgaatgagaaagatgaacagatgttattataaacccaatttagcttattaattctaatagat

SEQ ID NO: 763248 - DNA, 637 bp, Homo sapiens
atctatcattgagcatcttattgtccctgggtgaattggtttctgacataaaagaatgaggatctgaccttggtgtatagaagatgcaccccatggagtccatggcagctggttgccagacttccctcctgtcacactatggaccacacagtattcttcaaaacatttgtaattagcctccaactgccaatttaaatcatttttctttgtatgtgacaatagaaggtaatacagtcatcctcagtatctgtagtggattggttccagggcccctgtggatactaaaatccagggaagctcaaatccgttatataaaatggcacagtacctgcacataatctatgcacattttccatcatattttaaatcattgctagattatgtataatacctaatacaatgtaaatgctatgtaaatagctgttatacygtgttgtttagaaaatactatcaatttttgaaaaaaaatgcataaagtaaaactttcacaaaatacaataaaaacccatgagggaacccctatataagctgggagtttaaaaaccttgtaagtatggctaaaaataaagatataatgaatgagaaagatgaacagatgttattataaacccaatttagcttattaattctaatagat

SEQ ID NO: 763249 - DNA, 637 bp, Homo sapiens
atctatcattgagcatcttattgtccctgggtgaattggtttctgacataaaagaatgaggatctgaccttggtgtatagaagatgcaccccatggagtccatggcagctggttgccagacttccctcctgtcacactatggaccacacagtattcttcaaaacatttgtaattagcctccaactgccaatttaaatcatttttctttgtatgtgacaatagaaggtaatacagtcatcctcagtatctgtagtggattggttccagggcccctgtggatactaaaatccagggaagctcaaatccgttatataaaatggcacagtacctgcacataatctatgcacattttccatcatattttaaatcattgctagattatgtataatacctaatacaatgtaaatgctatgtaaatagctgttataccgtgttgtttagaaaatamtatcaatttttgaaaaaaaatgcataaagtaaaactttcacaaaatacaataaaaacccatgagggaacccctatataagctgggagtttaaaaaccttgtaagtatggctaaaaataaagatataatgaatgagaaagatgaacagatgttattataaacccaatttagcttattaattctaatagat

SEQ ID NO: 763250 - DNA, 611 bp, Homo sapiens
ttaaataaggtgaagtgctcagaacagtgcccagtcaacgcctgtgaggacctcagcagctgttgctttttactatttttctgtcaaggtgcggcttcgtgcgtctctgctgttgtgtttttggtggcaactggcaggcttctgggtgcaggaggggtgcaaggggtacccagctccaggtccagcggggagcatgagactggctggggccaggtgggaggcgccgcagggtccacctyctgtctctcctgtgggatgcccttcatcctcactaggtttagacttctccatctttgaaagtcaccatctgccccagggaggatgttaggtggccctgttcctcttgcgacactggagcccagaactcacatggagggaagacccaggagcctatcttcacctcctgctgacagtgggttcctcagggactcagagcaggcaggcgggggctaccttgaggctgagctaagctatccccgtggatgggactgtgagtcctgtcgaatgtcttggggagccgaaggcagtgctgcctcctccatgttaaaggcaatgggtgggttgggggtgttcctgaaggctcacgcaggtcccatgaatgccctgtgtgt

SEQ ID NO: 763251 - DNA, 611 bp, Homo sapiens
ttaaataaggtgaagtgctcagaacagtgcccagtcaacgcctgtgaggacctcagcagctgttgctttttactatttttctgtcaaggtgcggcttcgtgcgtctctgctgttgtgtttttggtggcaactggcaggcttctgggtgcaggaggggtgcaaggggtacccagctccaggtccagcggggagcatgagactggctggggccaggtgggaggcgccgcagggtccaccttctgtctctcctgtgggatgcccttcatcctcactaggtttagacttctccatctttgaaagtcaccatctgccccagggaggatgttaggtggccctgttcctcttgcgacactggagcccagaactcacatggagggaagacccaggagcctatcttcacctcctgctgacagtgggttcctcagggactcagagcaggcaggcgggggctaccttgaggctgagmtaagctatccccgtggatgggactgtgagtcctgtcgaatgtcttggggagccgaaggcagtgctgcctcctccatgttaaaggcaatgggtgggttgggggtgttcctgaaggctcacgcaggtcccatgaatgccctgtgtgt

SEQ ID NO: 763252 - DNA, 503 bp, Homo sapiens
cctactctagacagacttctcccattctcctatattttttcattagtgatttccttcaaattatttctgatcagtaatcttgactgggaggtatatatttatctttataaaatgtcataaattattggagaggaaattctattttatttgatacaaatagtattttgttccatagttaaaaccaaatatattgtgctatttcaacatttttattargaaatcaccttttgaagaactgttcaatctaaagggacataaaaaactcaatgttgcttcacatgataactgtaaaaccaaagagcaggtaaaagaggtaggcaaaccttgaagaaatataaggagacactttctaaaattggagttgttaaggagtaagagtaaaattagctaccttttgccaaacacatgcaatgcaccaaatactgtgttaagagctttgttatcttattccaacagttcagaaacctacatcatatgtattattagtatttttctcttacaaa

SEQ ID NO: 763253 - DNA, 605 bp, Homo sapiens
atttacaagttcttgtgtattctaatagtctctttacttttctatatacacagtcatatcatctgcaagtgaagatacatttaatccttctaccacacaatttatattttttttgccatggcgttagctagaaccttctaaacaattttgaatagcaatgaggatagcaacaagctaaggcttctttctgctttgtaggagaatagtctagcaagtaattataacacataacattaataaaggatttttttctgtagaaaactaccatattttagtaaattttcttctagatacatgcatattttctaaaatctcacaatcctttctttggaattccrtaatattattctgtagaattatatagcaagataaacatttgatgcattttattaggtttatttttcccttcactcttgacattacttcatgatatttctcttatttaagcaggagcgaagttgttctctgcttacagcttcagagaaaggaggacacaacagcatgtgaaaatcaataaagtcaatgccatgcccatgggttttaaaagtccaagtcttgaaggacccagggcataaacaatagatttttaaaaatagatgaaaagg

SEQ ID NO: 763254 - DNA, 587 bp, Homo sapiens
atatgtgtttgtcattttaatccactaagtttttgacttgatttttttttcttttacaaagcaatagaaaacgcatactgagagcattatatggsgtgattctgcaaatagatttgagactggttctcaacccagttcagcgatagtagaataatatcgtatttacccgtcaatagccctgaggaagtacagggtctttaaaagctacataaatttcatttagatccagagtaacatgagagcaatgaatgtaaccaaatattttctgacccttgagaggagaatggcatttactgagaggaagctgaaacttcagagactgtgtactaggttaaaaaaaagatgatctaccagttagttattttgagttaaaaaacagtgcaagatggtataatgcatacattcaaggatttagtgtattgtgataacaaaaaccagatattacccctcctctgtaagcactgtcacacacagagtgctcactctgctctccacttccaagaacttagaattggaatgactcagattaaatttctaccatcaagtagaatgtaaatatcgaaacatgttcaaggtaatttaaaaaa

SEQ ID NO: 763255 - DNA, 594 bp, Homo sapiens
ttgtagagttgttttttttttttttttgaggcggagtctcgctctgtcacccaatctggagcgcagtggcgcaatctgagctcactgcaacctctgcatcccgggttcaagcgattctcctgcctcagcctcttgagtagctgggattacaggtgtgcaccaccacgcctggctaatttttgtgcttttagtagagacggggtttcgccatgttggccaggctggtctcgaactccaracctcaagtggtccacccgcctcggcctcccaaagtgctgggattacaggtgtgagccatcgcacctggccaagttgatattttatataatgctcctatacttagtccttcttccctagttgtcttgattttttttcttaggtgacggagaaatctgttttttccccaagtcctcctcctccttttataatgaaggcttatggaagtagtggagagtaaaggtggacagttgtaatacctgaaacttgatttcagattagtcaggctagaaatgtagactaagtggaaacatgctgctacttttgaaaatgtcatttggtgtcaaagagggcaatgactttagctttttctttcat

SEQ ID NO: 763256 - DNA, 517 bp, Homo sapiens
  misc_feature 479, 480, 481, 482, 483, 484, 485, 486, 487, 488, 489, 490,491, 492, 493, 494, 495, 496, 497, 498, 499, 500, 501, 502,503, 504, 505, 506, 507, 508, 509, 510, 511, 512, 513, 514,515, 516, 517: n = A,T,C or G
gacaggactgctgccttctaaagggagtctctggctaacagacaactgcctcctgaaatatcaagctttgctactggagggatctgcaatccagttaagaacctgtcccttcctaaacccagccactttcctcctagaggaagctggggagtttgaactcgactgcaaacagatagtagtgtaaacctgaggtcagagaggacttcaacacctcccaccctttagagaacccagactggactctctttrtggacagaagttcttttgtagaacgagggatccataaagcagcatatgcagtagtcaccctgaatgacactgttgacagtatgcctctctccttgggcacaagtgctcaactagctgagcgaattgcctcacaagggcacttcaattaagcaaagggaaagcagttaacatttatactgattgtaagtataccttctagtcctccatacccatgccactatttggaaagnnnnnnnnnnnnnnnnnnnnnnnnnnnnnnnnnnnnnnn

SEQ ID NO: 763257 - DNA, 641 bp, Homo sapiens
tttcttacacattttgtccatctttgggatagatgtaaagtgtgatgagtggtaattaactgtttattcagaaatcagaaatcatcacagcatcatcaatattattatgaatttcaagtcattatttacttaattgatgccagttggtctgatgaccatttcatttgcatgattgtatttaatcctcacaacattcctatgatatctttatacacatattacagatcaaggcactaatacttagaaaaattaagcagtttcctcaaggtttctgatgatagaaatatcaccagaaatagatgacaaaaacctggcttttgaccccaactctatagtgttaagtcctygtctgtctttcatgtgaataaagtgaaggaaatacaggtgttgaggaataccacggagaatatgatgtaagttgaacaagtcaatatcatccttttgtatctggactatggctcttaaagagatgtgaaaaatatttgcctagtgagataaatttgtgtttgtttctcatgtaaattaaagccaagacttgcatggtgctccatggtcatgagagttcattagaatcacagctttcaactcagacatctcttgttacctcttggccttacaatccaaaatagcttccagcacac

SEQ ID NO: 763258 - DNA, 515 bp, Homo sapiens
caataaatgcaaaaccataatactactgaggactccccatactttcatggccacagctaatggggcaggccttgtgggagaacagagaatagatgatccaatacaatgcaccatccagtctaaatggctcagtttattgttccctctatgatcgcatcaactgttatagaacttcctccaccccaaagctgcatttcagtatattacataattgtctgcctgccgaaggagccatccttttccagcagtccagatctatgccacacagagctcagatgggtggacagatttgggaaggccccaaggtaygctaagcaggcatgatgagaattaatatcccaccagagtggagcagcatttagagataactagttgagaagctgtctggtgacacggtctatctgtgggccaacgctgaagaaaaggacgttaagccacatagaacccatgtgaaatagctgctcaatagtaaagaaaataataataaaaaaaaaaagcaaagaaaaaatccactt

SEQ ID NO: 763259 - DNA, 543 bp, Homo sapiens
tctttagttttttactttgtctttagttttttactttgtctttagttttcagacgattgactatgatgttcttggtgtggattttttaaggtttatcctatttggggtttacttagccacttgaatccatgggtttgtttcttttgaacaatttggaaagtttttaggcattattccttttaatatttcttagccctactcattttttcttcaatttctggaatgctgataacatggatgtcatcttttacgtttcctcaggtccctgagcttctgttcctttgctttaatttatgttctctttgtagttcagatagtgtaattttgattgttttctttctagttcaacaatttttttctatgtcctctattctgctgytaatctcattcattttttatttcatttttttttcagttttagaatttccatcaagttctattttttatttactttttcttgttctttttttgggttgaggtattccatttctttgctgagacttctttttaaattttttcagtgtgtttgtaactactaattga

SEQ ID NO: 763260 - DNA, 571 bp, Homo sapiens
gattttgtgtttttctacactattgagtgggttacaatgtgggttatcagttaaattcccacctaaatcatttccaagtgccctataatttttgtaaaattagtaaacaactgctttaaccagcagcttctctttaattttaggatgaaagcatgatagtttaaaatcactgataaatttggattaagacamaacacacggagtgccttccataaacaaaattttaggataactttttaatgacaattagtttttttaataaaatcactaaaaaaaatcacacagattggtaaattagcttctgtgaattaggatctggaaaatttttgactcacagtggtaggacccaagtgtattatttttctttgcttacattcctttcccaaatgactgagcaagcttattataggaccaaattactcagtgtcaaaaccataaagggggattcagaataaaactaaacgtgttggatgtctcccgtgggccaagtacacaggataagcatggagcaatcattttcatattctgagtctcctaattctcaaagcaatgctatttatttttcagataa

SEQ ID NO: 763261 - DNA, 571 bp, Homo sapiens
gattttgtgtttttctacactattgagtgggttacaatgtgggttatcagttaaattcccacctaaatcatttccaagtgccctataatttttgtaaaattagtaaacaactgctttaaccagcagcttctctttaattttaggatgaaagcatgatagtttaaaatcactgataaatttggattaagacacaacacacggagtgccttccataaacaaaattttaggataactttttaatgacaattagtttttttaataaaatcactaaaaaaaatcacacagattggtaaattagcttctgtgaattaggatctggaawatttttgactcacagtggtaggacccaagtgtattatttttctttgcttacattcctttcccaaatgactgagcaagcttattataggaccaaattactcagtgtcaaaaccataaagggggattcagaataaaactaaacgtgttggatgtctcccgtgggccaagtacacaggataagcatggagcaatcattttcatattctgagtctcctaattctcaaagcaatgctatttatttttcagataa

SEQ ID NO: 763262 - DNA, 548 bp, Homo sapiens
acatgtgaagatacatatacacacagtttgatttaatgtccattatttcttaattaggccactatttagaaattggtcaatctcctaagtatgttgtaaatgacaggtagatctgtcattccatgtatgttttcatgcagttagattaagaaaacaagatcgcattaatataatcaaactatgaatattagmtttataataaagcaatcagtagtaaggaagaatctaggaaatttgctaatgattatcttcaaaaatgctcccctactctctatagacatggccagcaaagatatttagaaccaagcaatgacaatttaaattaattatttctaattttttaaacagaccaataaaagacagtcaaggttaatttagttaacatctcatgaattcagggctgcaagaagctaaggtggaattttatggagggtttgttttctgtaagaaatccattaaggcttctgaagtttgcctatttcttttaaatggcatcctaaaagcaatttttttaaagaaatcctttttattcaaatataagcaccttc

SEQ ID NO: 763263 - DNA, 605 bp, Homo sapiens
caacagtgtaaaagcattcctatttctccacatcctttccagcatctgctgtttcctgacatttcaatgatcaccattctaactggcatgagatggtatctcattgtggttttaatttgcatttctctaatgaccagtgatgatgaggttttttccatatgtttgttggctgcataaatgtcttcttttgagaagtgtctgttcatattcttcacccactttttaatggggttgkttttttttcttgtaaatttgtttaaattctttgtagattctggatattagccctctgtcagatggatagattgcaaaaattttctcccattttgtacgttgcctgttcactctgaagatagtttcttttgctgtgcagaagctctttagtttaatgagatcccaattgtcaatttaggcttttattgctattacatttggtgttttagtcatgaagtctttacccatgcctatgtcctgaatggtattgcctaggttttcttctaaggtttttatggttttaggtcttatgtttaagtccttaatccatcttgagttaatttttgtacaaggtgtaaggaaggggtccagtttcagttttctgcataggg

SEQ ID NO: 763264 - DNA, 577 bp, Homo sapiens
tccaaataaattgcaagcattctatccaaatggtaagcagaacatcttattatgtaatcatatttgtttatccataattaatataactttctgagtattgaaatgagaaacttgatttactcttcttcactcatgttttaatttttttataagaaaaactagaatcactaaagaatttctttttattttatttaaaaattataatcctgagatgcaaatatatgccatgtaagcctgggaactatttaatcactttactctaaaatctggtaaaaggtaaaatttctgaaaataggtgactggcaaacattttgtaaacaatatataagaagaattgtatatcaaaatatacacataaaactatcttttcagataattatgtatcatttattttcttwtagcgaaattataaaaatacaacctatagccttccatagatacataattaactatgttttgaaatgatatccaattcagtaccctcatacatttgaaactttgataagctggtctatcttcactttggggatcatcttcattaagagtttgttttctcaagttttgaggtaggatacat

SEQ ID NO: 763265 - DNA, 577 bp, Homo sapiens
tccaaataaattgcaagcattctatccaaatggtaagcagaacatcttattatgtaatcatatttgtttatccataattaatataactttctgagtattgaaatgagaaacttgatttactcttcttcactcatgttttaatttttttataagaaaaactagaatcactaaagaatttctttttattttatttaaaaattataatcctgagatgcaaatatatgccatgtaagcctgggaactatttaatcactttactctaaaatctggtaaaaggtaaaatttctgaaaataggtgactggcaaacattttgtaaacaatatataagaagaattgtatatcaaaatatacacataaaactatcttttcagataattatgtatcatttattttcttatrgcgaaattataaaaatacaacctatagccttccatagatacataattaactatgttttgaaatgatatccaattcagtaccctcatacatttgaaactttgataagctggtctatcttcactttggggatcatcttcattaagagtttgttttctcaagttttgaggtaggatacat

SEQ ID NO: 763266 - DNA, 675 bp, Homo sapiens
cagcttgctctgatttcagctgttatctctggttatggaaaccaatggtcaagtctatttttttgtatttgaaaaatctctgtaacattagtgttactcttgtagatgaataagtgatttggcttctgctgcatatttttcaaagtgctcatcactgaattctaaaatcaacagattcactctctgctgatcttttcttgttcaactttttacctaagaagtacygtgttttgtcttatcaatttcatggcctatgaaactaatcttctcacagtgtgttattttacttatgctaaaagtactaataattcactctcagtgtttgatcctctctttaggaatccacagtttatgttctattttaagaacctagttgtaggactagaccccctggaatatgcaccctaaactatatagatggaaaaaagttgatttcattgttcctgttgtagaaactaaagttcctctaagtcaaagaaatggctcagctaagctcctatgtttttgaaagtgataagagggtacaatgagaacatattattggaaagaaagcaaatgaaatagctgtgctaacataggaagggcctgcactgctgtagttataataataacagtgaagctaacagatccttaaaatgagcctactttactccctcaaaccataactggtaaggc

SEQ ID NO: 763267 - DNA, 675 bp, Homo sapiens
cagcttgctctgatttcagctgttatctctggttatggaaaccaatggtcaagtctatttttttgtatttgaaaaatctctgtaacattagtgttactcttgtagatgaataagtgatttggcttctgctgcatatttttcaaagtgctcatcactgaattctaaaatcaacagattcactctctgctgatcttttcttgttcaactttttacctaagaagtactgtgttttgtcttatcaatttcatggcctatgaaactaatcttctcacagtgtgttattttacttatgctaaaagtactaataattcactctcagtgtttgatcctctctttaggratccacagtttatgttctattttaagaacctagttgtaggactagaccccctggaatatgcaccctaaactatatagatggaaaaaagttgatttcattgttcctgttgtagaaactaaagttcctctaagtcaaagaaatggctcagctaagctcctatgtttttgaaagtgataagagggtacaatgagaacatattattggaaagaaagcaaatgaaatagctgtgctaacataggaagggcctgcactgctgtagttataataataacagtgaagctaacagatccttaaaatgagcctactttactccctcaaaccataactggtaaggc

SEQ ID NO: 763268 - DNA, 591 bp, Homo sapiens
taaaatactcaaggcttcccttggccactgtctttctgtcatattccacattcagtgtgctmatcttgttgactctgtattcaaaatggattcagaattcactactccctaccattccattgctaccaccctagtgaaagccaccttctagattattgcaatagcctcctaaactaatctcttgctcctgagaacccctcttagctattcttaacacagcagcgagattgttaatgagatggttatgaaagtatattcatgtcattcttccgtttaaatccctccaatggctttcagtcttcatctaaagccagtggttataatgacttgcaaggtctaacacagtgtgtccttgcaactctgttaacacccaacttccatttattctactctcctcctttctctcttcacaccagatacacttatctcccccactgaacatgctaaacatgctctttccttgggacctgcacaggctgttctctctgtccagaacactcttcttccgtttggctttgctttcatatctcactcaggcctttattcaaacgtcattccaataaagcctttcctggaaatttttaaaaactg

SEQ ID NO: 763269 - DNA, 658 bp, Homo sapiens
tatactcacttccttttatctcatttagttcatgactttaaattccatgtcgatgctgaaaactccagatttacataattaaccccaatatcacacataaactagaggcaactgtagcatcttaaacatagcatgacagaaactgagttcctaaacttcttcaaacctgtctctcccacaaatttttctgtctagagttactagttatttcatcttttcaaaagttgcataggtttaaaatactcaaggcttcccttggccactgtctttctgtcatattccacattcagtgtgctcatcttgttgactctgtattcaaaatgkattcagaattcactactccctaccattccattgctaccaccctagtgaaagccaccttctagattattgcaatagcctcctaaactaatctcttgctcctgagaacccctcttagctattcttaacacagcagcgagattgttaatgagatggttatgaaagtatattcatgtcattcttccgtttaaatccctccaatggctttcagtcttcatctaaagccagtggttataatgacttgcaaggtctaacacagtgtgtccttgcaactctgttaacacccaacttccatttattctactctcctcctttctctcttcacaccagatacact

SEQ ID NO: 763270 - DNA, 621 bp, Homo sapiens
aacacatacactcagaaatgacaggagcctcttattatggagataatttgtataagtgatctacacagtctagtttaactctactcgtaaaaatttatgaaaaagctgtctggagtacagatacaatttgctgtgcattttttacattaatttgtgatggacttttttttcagaaacctcattcaaagagtttccataaaagaggggaaaaatatgatttggctaaaaggcagtggatttggcttcatggaatcactggttaatggatttagccaggtgttcgaatctaaattgaaagggccaattgtactttatgatctgcagaagtcatattagattagtaacactgaggtttagaaagcaaagtggcatttcatgctgctgtcaagtaagtttctacccctttgccctgggagcttagagatttcagtctagttcagtcctagcccaatatagggttttaaaaaatatgtkaatcagtgtatttggaatcataaagtcttctgttaactttctaaaattattctttactgaatcatttgaaccagtgatatcatctcactggacctcttagtttaatctgagaggcgttttttttggatggaaacttctaagactaaa

SEQ ID NO: 763271 - DNA, 608 bp, Homo sapiens
caaagttcaaaatggttgatctctctctctctccccattctccctccttttgttcctctctcccttcctcctttcctcgttctctttatctctttctctctctcccttttcatcttcctcccttcccccctcagtttcaaaaagtaaacacactgtatgatttggaaatttttcttagaaaaagtcaattcaaaacttttcaatattaatctttgagaagaccattaaacaagccaatctggttttaatataactattacatatttcagataaattcagtaaaatatatacaagcaaagaaaaagtactgattttattctactttctataaccctccaacattgtgacttatcaatgccatatgtgaatctatatctrttaatgtatgcattgaaaaagttggatttaagctgagcatgtaaaaataaacagatatattagttaattttgagagctggcatgttataattaatacaactgtagctttatatgattatacatgttatatattctttgaaataaaacaacatttaactaccaatttatgacattgttctatttgttaaaaagaaaaactagacatatggactatttttttcttcttaaaa

SEQ ID NO: 763272 - DNA, 475 bp, Homo sapiens
acttgcctgcttgcgactgagcttacaaggaaatgactttaaacaatgtcacacctctttacccacagacacagtttacaggacctcattcgcactccaatgacaatgaaaggaagggggtgttgggcagagaagcaaagagctccggttctcaccatcacayggtagcgggtaagccccccgcaaccttggcaaagtcattccccagttcctgcactcactttccctatcttggcaaaatgaagggctggactagaagagagaatctttctttatgaatctttccaatttttaactccattcaattcaacaaacatttgcagggtggatactatgttgcactcacggagctacacagctcccagctgtataattttttttttattccatggaaaactagagtcaggtaattttcatgcaatttttagcatgaaatcactggactgggagccacaagacctaggttctgcttaca

SEQ ID NO: 763273 - DNA, 567 bp, Homo sapiens
tctcaataaactaggtattgagggaacatatctcaaaataataagagctatttatgacaaacccatagttaatatcatactgaatgggcaaaagcttgaagcattccctgtgaaaacaggcacgagacaaggatgccctctcttaccacgcctattcaacatagtattggaagttctggccaggacaatcaggcaagagaaagaaataaaggrcattcaaataggaagagaggaagtcaaattgtctctgtttgcagatgacatgattctatatttagaaaacccaattgtctcagctcaaaaacccctcaagcagataagcatcttcagcaaaatcgcaggatacaacatcaatgtgcaaaaatcataagcattcctatacaccaagaatatagacaagcagagagccaaatcatgaatgaactcccattcacaattgctacaaagagaataaaatacttaggaatacagcttataagggatgtgaaggacctctttaaggagaactacaaaccattgcacaaggaaataagaggggacataaaaaaatggaaaaacatttcatct

SEQ ID NO: 763274 - DNA, 649 bp, Homo sapiens
caaaagaagcagaacaaaaaattataaacaatatagaaaacttgaacttaattccatataaagaactctacataaaacatatgccatgtagacattttcttgaagtatacatggaacatttaccaaaatatatcatacttggtgtttaaagtaacatttaatatgtgtcaaagaattaaagtcttagagattattgtctctgaccacagtgaaataaatctagaaatcactaatataaagagaatttttaagaatwatcactttttgaaaattaaacaacacatatttaaataatccatggatcaaaaaaccaatcacaacatgaattgaaacatattttcagtgaatgcaaattaaaataggacatatcaaaacatgtggaacacagctatagaagaattatagacaaatttatagccttaagttatgatataaaaattaaaagcagacatggtggcgtgtgcctataattccagctacctagaaggctgaggcaagaggattgcttaaccttaggagatcaagccaaagtgtgcaacatagtgagacaccatctctaaatataaaataaaataaaataaaataaaataaaataaaataaaagatttccaatagatattctaagcttcctttcaaagatcatgaaaaa

SEQ ID NO: 763275 - DNA, 621 bp, Homo sapiens
cgctcttgttgcccaggctgcagtgtaatgacatgatctcagctcaccccaacctccacctcctgggttcaagcgattctcagcctcccaactagctaggattacaggcatgtgccaacrtgcccggctaattgtttgtatttttagagagacagggtttcaccatgttggtcagactggtctcaaactcctgaccccaggtgatccacccacctcggcctcccaaagtgctgggattacaggcatgagccaccacacctggcctcctgtattttttaaatataacttaattttgctattgtcctctttagttgaattatcatagtagatatccattgccagcattccttcttccattttagaactctgttccttctacccattggtgcccaccacagtacctcatcccccattaaagaagaagggacaaagatgcaagttggactttaccagtctttttcaggattttcctccctgaagattacaggaaacatcctttgactctccatttatgaaagctggaataatgggaatctagaaaaaccatgaagaaagactgcagggaaaaaaaataaagctaagcaaatatgaaagagtcctatttaaccaaaatggtcagct

SEQ ID NO: 763276 - DNA, 535 bp, Homo sapiens
ttaaattattatacttttcagatgtttctgaaatataaaaaatggctgctttaaaatgtattgtctataactcatagaaagaaaaagctaacacttatttaggtattaagcaagatacaaaggtgtatccaatagaaatacctttttgtccacaagaacatatcaaatctaatattcctgytacatatgatctaaatcactcattgattggtttatttaaagcaaaccttccttatcactctcattttataattattccctttgtctatattatctcagtgcttcaaattttttataaaactttaccgtaatcttcatcatttcatccaaagcctcttaaattccctacatcccttttagttgtggtatccttgaatccacatttttcaaaaaaaaaaaatattgacttgggattgagcaatgccatgggtgatataattcttaattaggccttacgaagctacttttgtaaacaatgaaaatttcattcctggcctcttatagcagtgaggctttacaatgtcacaatggattt

SEQ ID NO: 763277 - DNA, 540 bp, Homo sapiens
tgatggtattttgatgggaattgcattgaatgaccagattgcttttggcaatatggtcattttcacaatattgattctacccatccatgagcatgggacctgtttccgtttgtttgtgtcatctatatttctttcagcagtgttttgtagttttccttgtagaggtctttcacctccttagttaggtatattcctttatttttttttcagctattataaaaggggtcgaatgacaattcaatcgatgtcttctttaccaatttggatgccctttatttctttctcttgtctgattgctctggtcaggacttccagtactatgttraatagaaatggtgaaagtgagcatccttgtcttgttccagttctcagggggaatgctctcaatgcttttccattcagtattatgttgcctgtgggtttgtcatatatagcttttattactttgaagtaagtcctttttatgcctattttgttcagggttttaattataaagggatgctggattatatcaaatgctttttctgtgtctattgagat

SEQ ID NO: 763278 - DNA, 574 bp, Homo sapiens
ctattttgttcagggttttaattataaagggatgctggattatatcaaatgctttttctgtgtctattgagatgatcatatggtttttgttttcaactatgtttatgtgatgtatcatatttattgacttgcatgtgttaaaccatccctgcaactctggtatgaaattcacttgatcatgatgtattatstttttgatatgctgttcaatttggttagctagtattttatgaaggatttttgtatctatgtttaacagggatattgttctgtggttttctttttttgttttgttctttctgggttttggtattagggtgatactggcgttatagaatgatttagggaggattctctctttatcttttggaatagttttagtaggattggtaccaattcttctttgaatgtctgatagaattcagctgtgaatccatctggtcctggacttttttttttgttggcagctttttttattactgattcaacctggctgttagttattggtctgctcagggtttctatttctccctgatttaatctaggagggttgtatattttcaggaatttatca

SEQ ID NO: 763279 - DNA, 574 bp, Homo sapiens
ctattttgttcagggttttaattataaagggatgctggattatatcaaatgctttttctgtgtctattgagatgatcatatggtttttgttttcaactatgtttatgtgatgtatcatatttattgacttgcatgtgttaaaccatccctgcaactctggtatgaaattcacttgatcatgatgtattatctttttgatatgctgttcaatttgkttagctagtattttatgaaggatttttgtatctatgtttaacagggatattgttctgtggttttctttttttgttttgttctttctgggttttggtattagggtgatactggcgttatagaatgatttagggaggattctctctttatcttttggaatagttttagtaggattggtaccaattcttctttgaatgtctgatagaattcagctgtgaatccatctggtcctggacttttttttttgttggcagctttttttattactgattcaacctggctgttagttattggtctgctcagggtttctatttctccctgatttaatctaggagggttgtatattttcaggaatttatca

SEQ ID NO: 763280 - DNA, 467 bp, Homo sapiens
gcttttgatttgatatatatggtcatccactaaaccaataattaaagctaccttcatgccttaagtgtctatgtcagcactcaacattatgagcaaacttttcctacttcaaaggtataaagtaacatttaatatttatattaaagtaatacaaagtaatttaatgtatatttaatgtatatgtaatttatttatttttatttaatttataaataatttaatgtatatagtaatttgatattactcsgtagtttctagggagatagtctgtcaggctcactatacggagcagacaggcactgcagtcaaaaggacgaagtttcctttataaagcattgatgctgctaacctcaactgcaaactcttccttcccacattctttttgggctgtgacttatccagggtattaacttctcatttctagttccctgctttgggctcatatccagcttcatttatttgctagc

SEQ ID NO: 763281 - DNA, 551 bp, Homo sapiens
tactatccatggttatagttatctactagggatcttggtatcccctgtggatgaggggggactaaagtataccagcaatgaaaaagcgtaatttgaaattttaaaatacaatacctttaacattgatacctccaaagtgaaatacctagctataaatctaataaaatatgtacaaaatctataaaagggaaactataaaactctgatgaaaaaaatcaaagaactaaataaacgaagaaatattccatgctcatgaatggaagcactyaacattgttaagatgtcagctcttcccgacttgatatatagattcagtgcaaccccagtcatattttctagatattaacaaactaattctaaacactcagagtaatcaacacaatactgaagatgaaaaacaaagttggaggactgacaatactcaacttcacgccttattataaagctatagtaaccaagacagtatggtattgattgaaggacagacaaatagatcaatggaacagaataaagacttcaaaaatatacttacataaatatagttaagtgat

SEQ ID NO: 763282 - DNA, 551 bp, Homo sapiens
tactatccatggttatagttatctactagggatcttggtatcccctgtggatgaggggggactaaagtataccagcaatgaaaaagcgtaatttgaaattttaaaatacaatacctttaacattgatacctccaaagtgaaatacctagctataaatctaataaaatatgtacaaaatctataaaagggaaactataaaactctgatgaaaaaaatcaaagaactaaataaacgaagaaatattccatgctcatgaatggaagcacttaacattgttaagatgtcagctcttcccgacttgatatatagattcagtgcaaycccagtcatattttctagatattaacaaactaattctaaacactcagagtaatcaacacaatactgaagatgaaaaacaaagttggaggactgacaatactcaacttcacgccttattataaagctatagtaaccaagacagtatggtattgattgaaggacagacaaatagatcaatggaacagaataaagacttcaaaaatatacttacataaatatagttaagtgat

SEQ ID NO: 763283 - DNA, 551 bp, Homo sapiens
tactatccatggttatagttatctactagggatcttggtatcccctgtggatgaggggggactaaagtataccagcaatgaaaaagcgtaatttgaaattttaaaatacaatacctttaacattgatacctccaaagtgaaatacctagctataaatctaataaaatatgtacaaaatctataaaagggaaactataaaactctgatgaaaaaaatcaaagaactaaataaacgaagaaatattccatgctcatgaatggaagcacttaacattgttaagatgtcagctcttcccgacttgatatatagattcagtgcaaccccagtcatattttctagatattaacaaactaattctaaacactcagagtaatcaacacaatactgaagatgaaaaacaaarttggaggactgacaatactcaacttcacgccttattataaagctatagtaaccaagacagtatggtattgattgaaggacagacaaatagatcaatggaacagaataaagacttcaaaaatatacttacataaatatagttaagtgat

SEQ ID NO: 763284 - DNA, 571 bp, Homo sapiens
aataaatatacatgcatacagcatcagagcacctaatatataaagcaaatattgacagaattaaaggtagaaatggagtacaataccccactttcaataaaagatcaaagattcagatagaaaatcaggaaggaaacagtagacttgagtaacactacagactaaatggacatatgacatttacagaatattctacacaacggcaggagaatacacrtgcctctcaaattcatggaacactctccaagatagatcacattaggtcacaaacaagccttaaaaatttaagaggattgaaattataccaagtatcatttctgaccacaacagaataaaactagaaattagtagcagaaacgaacctggacattttacaatatgtgaatatgaatcaacattcttgattgactcaaagaaaaaaataaaaagagaaattagaaaatatcttgaggcaaatgaaaaggaagaaacaacatttcaaaacttatggtatgcagcaaaagcagtgctaagagggaagttcacagtgataaacacctgcattgaaaaaatacatgttatacataatata

SEQ ID NO: 763285 - DNA, 571 bp, Homo sapiens
aataaatatacatgcatacagcatcagagcacctaatatataaagcaaatattgacagaattaaaggtagaaatggagtacaataccccactttcaataaaagatcaaagattcagatagaaaatcaggaaggaaacagtagacttgagtaacactacagactaaatggacatatgacatttacagaatattctacacaacggcaggagaatacacatgcytctcaaattcatggaacactctccaagatagatcacattaggtcacaaacaagccttaaaaatttaagaggattgaaattataccaagtatcatttctgaccacaacagaataaaactagaaattagtagcagaaacgaacctggacattttacaatatgtgaatatgaatcaacattcttgattgactcaaagaaaaaaataaaaagagaaattagaaaatatcttgaggcaaatgaaaaggaagaaacaacatttcaaaacttatggtatgcagcaaaagcagtgctaagagggaagttcacagtgataaacacctgcattgaaaaaatacatgttatacataatata

SEQ ID NO: 763286 - DNA, 542 bp, Homo sapiens
accaggaggtgacctagccccaagatcagctgcagtgggggctggagtttgtgctggtagcctttattttctttgttttcttctttctttttttttttttttttgtttgagacagagtctcactctgtcacccgggctggaatgcagtggcgtgatcactgcaacctctgcctcctgggttcaagtgattctcctgcctcarcctcccaagtagctgggattacaggcacccgccactgtgggtgcgaagagtctcatcattcaagagcacttcttgggccagtgacccactatagcaggtgtagaaaagtccagacatttagtttcacagcaagacaattctgatgggtcacatatgcccctctgcaactgtccaaggctttttaagaccagcagcaaagctttacattccttctcttcaatcctacttctgcctcatcccttctacaggtgtgaatgcttaaaaatatcctacacactaaactctttctcagcatctgcttccagagagccaaatctgcaatgtacattcaaattaggct

SEQ ID NO: 763287 - DNA, 593 bp, Homo sapiens
atagtgaagaggggaaaggatcagcatcaccaggaggtgacctagccccaagatcagctgcagtgggggctggagtttgtgctggtagcctttattttctttgttttcttctttctttttttttttttttttgtttgagacagagtctcactctgtcacccgggctggaatgcagtggcgtgatcactgcaacctctgcctcctgggttcaagtgattctcctgcctcaacctcccaagtagctgggattacaggcacccgccactgtgggtgcgaagagtctcatcattcaagagyacttcttgggccagtgacccactatagcaggtgtagaaaagtccagacatttagtttcacagcaagacaattctgatgggtcacatatgcccctctgcaactgtccaaggctttttaagaccagcagcaaagctttacattccttctcttcaatcctacttctgcctcatcccttctacaggtgtgaatgcttaaaaatatcctacacactaaactctttctcagcatctgcttccagagagccaaatctgcaatgtacattcaaattaggctcattcgaggaggatttaataaag

SEQ ID NO: 763288 - DNA, 600 bp, Homo sapiens
aataagatacttttcagacaagctaatgctaaggaaattcattaccttcacacctgctttacaagaggtcctacggggagtgataaatatggaaaggaaagaccattaccagccacataaaaacagttaagtacatagaccactgacactataaagcaaccacacaatcaagtctgaataataacctggtaacaacacaacaacaggatcaaatccacacatgtcaatattaaccttgaatgtaaatgggctaactgtccccagttaaaaggcacagaatggcaacttggataaaagagcacgacccaaccgtatgctgtcttcaagagacccatctcatgtgcaatgacacccataaagaaaacattataccaatatccttgatgaaaacagatgcaaaaatyctcactaaaatactagcaaaccaaatccagcaacacatcaaaaagctaatctacagcaatcaaataggctttattccagggatgcaacgtttcttcaacatatgcaaatcaataaatgtgattaatcacataaacagaactgaaaacaaaaaccagatgattatctcagtagatgcagaaaaggcttttgataaaa

SEQ ID NO: 763289 - DNA, 659 bp, Homo sapiens
gtaggatacttcaacaccccactttcattgtctggatgacagatcatccagacagaaatcaacaaggaaacactggaattaaactacactctgtacaaatggacctaactgacatttactgcacatttcatccaactgytgcagaattcacattcttatcatcagcacacggaacattcttcactttagaacatgttaggacacaaaacaaatctcaataaattgaaaaaagtaaaatcctatcaaatatcttttctaaccacaatggaataaaactagaaatcaataacaggaagaactttggaaactgcaaaaatacatattaattaaacaaatcactccggaatgaccaatgagtcaatgagcaaatttttttaatgttgtaaaaatttcttaaagcaaaaacagaaacataacatacctttaaggcatagcaaacacagccttaagagggaagcttataacaataaatatttacataaaaagtggaaagactttaaataaaaaacaaaactaggtacctcaaagaactagaaaagcagaaataaaccaaagaatagaaagaaataattaacatcagagaagaaataaatgaaactgaaaataaataacaatacaaagggatcaataagtctgaaaagaccaataacagggaacaa

SEQ ID NO: 763290 - DNA, 570 bp, Homo sapiens
gacagtttgtcctcaatcttagggaataaagctcaggattagaaaaccacagttgaagccagtatttttgggaacatgtaacttaattcatgaaaacctgaggctcagtgtagacaagcttgagagtttaaaagtcttaggggttcagtctcaggggggtctttacacttttgtgttttacctccaggagccctgccaagttctcactgtgaaaattggagtataatctcttcatscttctggcagagggaggataaaaataaccactgtaatgtaagcccagagcagcctgcccttaccctctccttcaaggggaattacaagagcctaactaatgtgaggtaagaaaaacattcaatccattcaactcatcctcctctagctttcctgcttcacttaagtggggagaagctgagaagccctttcaaaggtcacagcccaggacacaggctcagtggaagatagcaacccaatcataagactatagaatgctgttttccccataccttacaaccacatcaacaggactactgtaaataatggagaattacaattgaaaaattgaaagtt

SEQ ID NO: 763291 - DNA, 507 bp, Homo sapiens
aacaagactgggattcttctgaggcagagagaagaaaaggagacctgggtcacgggacgtgggtagggggatgcacgcccgcacacacgcatgtgcacagaggtatgaaattcaaaatggtgctaaagaagtgtcaggctctaagaactactgccagaaagtgagtactaaattaaatgcatatgctcattagaatggaatttttaaagaaattaacaagcactctcctgttcacctctggaaagcagcagtgttacttctgagaattatgagctggaaaccagatcaaaggtagactcacgtggtgctccctctgccacctcccttcctcacacaccattcctaggagtccttcaggatttatgamggctctccctgcacccagcctgccatcctgcatccagatcttggtagtaatcaaccatgtggctagaatgggacctaccagaggtccttccgcaccataataccagggttcccacatgggactctctgcactgcccacac

SEQ ID NO: 763292 - DNA, 624 bp, Homo sapiens
ttcactaccgcccaccacagcccacttcgtttaaatttaggcacccaccaggcaaactgtacccagccacattctctgaaatgaagtcataaaattctcatctgtaacaccggcacttgttcccaggaaaacaagacaggtggggtagacagggccggcacccttctggggagtccaggctgtgcctcagaagagccctttgcaaagagttggttccgtgaccaggctcagcccacatggggctgtgtgaccttgtgacagccaacttcccctctacaaagtcagggtggactaactaamaggagcgctaaggcccatctaaatgtacagctctatggctaaagcccagatgccccacccacctcccaacacccagaaaatgaacagcaacccaagatgggggtagagcagggctaaattcattggtgtgacctggggctgctgtcattcttaagatctggctcttgcagtattcagttctcaggaaatgtctgacaacaggagggggacagaggattgagcccgcaggaaggctttggcaatgaaggctctgtggccaccctttggtcccattcaggcaagatcggagagattttgcccactcggactcaacaaactctgagt

SEQ ID NO: 763293 - DNA, 478 bp, Homo sapiens
ggatccaacatactatttgagagagaagttgtcctgacttccatgactcaagtgtgtgttgcataggtaacattgggggagagtctaagagagtttggagagagattcatatttagccacatcctcaaggctttctcatcagccccaaatctgactgagccttaaatcattaagctgaaaggaagagttaattttcattgggccttgttttcatatgaaagataattacaaayaactgcagtgagatgcctggtgagggttcctgttgcatggttcccagggaggggtagattcaagttactcctatttgtcagtcagtatttttcatttacctataaccttttcttatgaattaattccaagtgctctgttgaaggcttctccggacggagtctcagttgtatctgccttggcatttttccagcccctactgttccagctataggtgtttaattgacattgcactgagagaggatct

SEQ ID NO: 763294 - DNA, 610 bp, Homo sapiens
ggatccaacatactatttgagagagaagttgtcctgacttccatgactcaagtgtgtgttgcataggtaacattgggggagagtctaagagagtttggagagagattcatatttagccacatcctcaaggctttctcatcagccccaaatctgactgagccttaaatcattaagctgaaaggaagagttaattttcattgggccttgttttcatatgaaagataattacaaataacygcagtgagatgcctggtgagggttcctgttgcatggttcccagggaggggtagattcaagttactcctatttgtcagtcagtatttttcatttacctataaccttttcttatgaattaattccaagtgctctgttgaaggcttctccggacggagtctcagttgtatctgccttggcatttttccagcccctactgttccagctataggtgtttaattgacattgcactgagagaggatctcatgaacatttaaagccccagtgcatagaggcacaaacgcagtcagaggaagtggagtgactggcttcatttctcacttgaagggctatgacctattagagaagaatgtggaagccaagagtcaaagggagg

SEQ ID NO: 763295 - DNA, 495 bp, Homo sapiens
aaaatcaatcaatcaatcaatcagtcaatcaatcttgtggtgtatatgtgagtacatttgttatatatgtattttgtgtacattcattcaataaaaccctaaaggaaaattgataaatcaaggtacatgtgctttcaaattttgcagatatggccaaattgtaytgataaaagggggaatgatttagaatcatagcaaaacacttttcccatatacttttgaatcatcagtctggggcctctgatgccaggaataaactgaacacattagggaaaacattaacaagatatttcatcttttggagatttgagtttcttatctagaaagtggggtgataataaaacctaccttgagtgtgatttcaaaaagaggaacttatttttggattaaaaaaatagcaaatgaaaacaaacaaacaaaaaagacctccatgtagttacttatcaaatatacttagatattaataatttagtcacaattttctcattgtcatca

SEQ ID NO: 763296 - DNA, 675 bp, Homo sapiens
atacccggatccacttataaggaagggcttgctgctcttccacgtggaagcccatacagggttgccctcagctacatagaactttttcgtcaggtcacgtccttcccagaagagcccatatctctcactgagcaaagcgggaatgtgaaggcacaacctctacagcccaacatgagatactctgaaaagcattactccaaagcttccagyatcacaattcaatttcttcctctcatcttcactaataagcatcttgtttccaaactctttctcagcaactactcttatagaatctaacctgggacaataaatttaatagctatttttactcggattgatgtatttatggtagtaatgcttaccattgtattcctttcatttggtgagatagtctcctagaatatgaaaatgacattattttgacgaaattaacctttaaaatttaaataattaacatattaccaagctaaacatttcaattttcacatttgtattgtctttgtggtgtcagaaaggactacactaaaagttgttggatcagatcctgaaaacaagattatctaatgaaaattatctgtagtattttgatcattcaaactgatagaaataattttggcacaaaagaatttacattggagctttttgtctgtttcaattattttctactccttttac

SEQ ID NO: 763297 - DNA, 530 bp, Homo sapiens
atccagtgattaatgcacagagtctggattcagactctttcagtttgaattctagctgttctgcttagttttgtgaacttgggcaagttgcacacttctaagcctatttcctcatatataaaatggggccaagcataataactatcacataggtaggatagttgtgactatttaaagcaaaatgttatgaaccaaacagcatcattacttgacttatacatgtgtcaagaatactcatatattcatatatatatatatatatatatatatatatatatatatatcaaacttgacatactgttcaaatattttgatagattttattactgtgctgatagtggtccagttgtagtactgtaaaaggaagttaggtgtgtgatttggactakctagaaattacaatcaccctcagtatccttgggggattagttccagaccctcttaccctgcagatactatagtctctgcatactcaagccccttatataaataagattgtgtagtatttgagtacagcctacacacatcct

SEQ ID NO: 763298 - DNA, 640 bp, Homo sapiens
caagattcacctgcctcggcctcccaaagttttgcgattacaggcgtgagccaccatggctggcaaaaaaatttttttggtagaggcctggtcccagcggattgcccaggctgatgttgaactcctgagctcatgtgatcttcccaccaggtagctggtaccgccatgaccagctaattaaaactttttttttgtggagacgggatcccactgtgttgtccaggtaactcctgggttcaagcgatcctcccactgtggcctccccaaagtgcagggattataggcatgaaccactgcgcccggccagcttgatatatttaggtattgatatatccaaattgacgaattggttgccaacagaacctcatggttctctgactaaatgttaatgctagtcakggccctaagaacaatttcagatgttcatttaaatttattaaattgtagcaaataataatgaaagtcaccataatttaacatccacatgagtatatcttgaaaagacagactaattcatcagctacaacagcaggcataaactgggattgtcctgggcaacaaacttgccttgtggtcaccctacttaatggccatttgttactagattttgtcatttagactcatacaacagtttcctaaa

SEQ ID NO: 763299 - DNA, 622 bp, Homo sapiens
tcagtcatcacaaacatcaagatgtgaagtagatgctattagaattgttaaagaacaagcatcaagcatacgctactcaccccctactcccctgaaaggcaccaccttacttcacagaggtcttttgagtggctgagagtaagtgtaccgatctaaaggtcagcagacactaagttctggctttaccatttaataactgattagccacatgatcataraaaaatctctctctcaaactcactttcttgaaccagaaaatgggagtaacgctctacctgcttcaatcttgttacataaattaaaaacttttgtcaacgtgggctgtgaactgaggtactgcataatgtcatatacacatatgtaaagtttaggccagaagcagtgactcacacctgtaatcccagcactttgggaggccaaggtgggagtccaggaattcaagaccagcctgggcaacatagagacctcaaatccacaaaaaaaaaaaaaaaaaaaaaaaaacacaaaaattaggccggtgcaacagtcccagctactagggaagctgaggcaggagggtcactggaactcaggaggtcgagcctgcagtaagctataatggcgacactgcacttcagcctgg

SEQ ID NO: 763300 - DNA, 622 bp, Homo sapiens
tcagtcatcacaaacatcaagatgtgaagtagatgctattagaattgttaaagaacaagcatcaagcatacgctactcaccccctactcccctgaaaggcaccaccttacttcacagaggtcttttgagtggctgagagtaagtgtaccgatctaaaggtcagcagacactaagttctggctttaccatttaataactgattagccacatgatcataaaaaaatctctctctcaaactcactttcttgaaccagaaaatgggagtaacgctctacctgcttcaatcttgttayataaattaaaaacttttgtcaacgtgggctgtgaactgaggtactgcataatgtcatatacacatatgtaaagtttaggccagaagcagtgactcacacctgtaatcccagcactttgggaggccaaggtgggagtccaggaattcaagaccagcctgggcaacatagagacctcaaatccacaaaaaaaaaaaaaaaaaaaaaaaaacacaaaaattaggccggtgcaacagtcccagctactagggaagctgaggcaggagggtcactggaactcaggaggtcgagcctgcagtaagctataatggcgacactgcacttcagcctgg

SEQ ID NO: 763301 - DNA, 551 bp, Homo sapiens
gaattcaaagagagaagtgacaggaaacacctaaatgaaggagagggatccggagtctactcgaccaggattggctgggagcctggagagactccccaaagcggaaaagggaaaagagatactcagtggtccacattcccatcgggtactcctgcaatcctagccatgctaaagttyctcagccctcgtgggccatgaaactaacagagtgaggttcctgaagactatacaatgacattgctccagagagagaggtaacactgggtttcacacccccaaaccctaagcagctacagtacagtgtcattgagagcctggtccatgataaactgtaccctgccatagggctcaacagcccctgcatctccacatccctggaggcccactgatttcccctgcctacaactaacactgcagtttgctgctactacttgggctgaagcatcatgtgccaccagacacaatcttgtagatttgagaagtggaaacaccatgtattttcacatgtctggacaaagtccccctgcctgcagctgccatcactgtgctgc

SEQ ID NO: 763302 - DNA, 441 bp, Homo sapiens
gggaatgggagttattgtttaatgggtatagagtttcagttttataagatgaaaagatttatggagttggatgatggtgatggttgcacaacattatatatgtatttaacaccattgaactgtacacttaaaaatggttaagacagtaaattttatgtgatgggtatttcaacacagtaaaagtctggaaaacaattttatatctatattccatatgttaaagaaggtagaagaaataytgaggatgttaagtaggaacatagaagatatacaatattcccaattgaaattctggtaaaaacacaatgtctgggatgaaaaatatactgaataggataaacagcagaatagacaatgcagaagaaaagattagtaaatgtaaatacatttaaaacaataaatagcaagaaaacctgccaaaatgttgaaacacagaaggaa

SEQ ID NO: 763303 - DNA, 623 bp, Homo sapiens
ccttcctgggccaggtggtattctgacatccaggcaatgtcatgagccttgctggcagggtcacaagtctcaggatgggctcagagagactgcttctaatcctgagtgatgggttgacctgtaggcagatttccagggcctctgtgcatggggggagaggggagcttgactcctgctaagatctgaattcattttgaatgggctagtagagttgtttgagatcatatttaactcataataggaacagataatgagtctcttcaaaaacaaggttttattttgttattaaatagaatatttgttggtctcctcctctgtgctgagtatcaacccaggtgaagagayacagggaccagcaagacgtcaacatgtctcatggagttcacttcgtagaggatctaaaaccaaaaatatttatttttgtgcccaactggaatgctagttccttaataaaagagactctgtatatcttgtccttatcaggatctcagaactgagaagtatttgttgactgactggctcatgatagacatattcagtaagaactagcctgttagacgaagacattttcttctggtgcttactgaaaagtatttaatagacaaccaaaaactgatgatgca

SEQ ID NO: 763304 - DNA, 630 bp, Homo sapiens
ccctgcctgtgttcccccagtgtcattgcctgcagtcaatctcctttctaaaataaatcccagaactagctatgtctttgtccttttctgacatctgaagactggcatgatctgaaagcaatctatgccctctcgcctcaaacactctctaaaagcaaatatctaaaaatatctaaaagcaaattcctgcatccctagaaatctaccatggcaaaacacgcacacgcgcgcgcgcacgcacacacacacacacacacacatataatgattgtaggaccaaaataaaaaatctamggcatttttccttggtggtacccattgggttaatcaaatttcatctaaaataagtcatctcgacccccaggcagtcaccaggaagaaatttaagttcagtagtgattcagaatcagaggataaacacaaacatgtgtctttggcacacagagaaagcctggggacaggatgtggttgcaaaaggaatatttcccctttaagccactggttttgtgagacttttggtaagaaaagattaagaggtaattttcctctgagggcttacaggaaataatttatgaacgtaaatagctaccaatgttactgaaagttagaggatgcttaggtttgttagtt

SEQ ID NO: 763305 - DNA, 646 bp, Homo sapiens
tgcatttcaatgtaatgtttccttgttattaccatagcaaataataatgcaaaaaattattcctagaggattctttctaggttgcagaccaaaaaaaggtggcagcggtggggggagcttatagaagaaaaataaacttaagaaataaatacctaagtttatagtwtgagcgtttggttaaatagtggtgtaatttaccaaaatctaaagtagggaagatgggcaagaacaggttagggagcaggatggtgaggattaaggcagattctgctttggacatgttctgtgtgaactgcctatagaaaattcaaaaagaaaggtcaagtacacagttgggtatacaaatttagaactctgtagaagtttaggcaagtgacatcaatgtagaagtcatccatatataaatagtattaaagtaaagggacaaaaatgaagacagagaaagatcctggccaagacctggggttcattgcagtgtatctgtattattctgttctcaccctgctaataaagacatacccgaggctgggtaatttataaaggtaaaaggtttaattgattcacagttccacatggctggggaggcctcacaatcatgatggaaggccaatgaggagcaaagtcacctcttacatggtggtagggg

SEQ ID NO: 763306 - DNA, 625 bp, Homo sapiens
tcctctgttacctctgtcatatgatttatcattctgtaaaaaagtttgttgaggacaggggctggaaaggcttactgtctcaccaaggcctagccctgtgcttgatatatggtgtgttcttaataaatattggtctatatactagataccttccatttgcctcttcatgtctgccatccatcctttcccactctgctttctgccctaaggagaaggcccctcagggctatattattagggctcctatgccctctggttccactgagctcagccaaaggggagcctgaagaagggaacagtggaagaaaaaagagtaaggtcagaatatttccccagaaaaaaccaccagggctggccatgtcccttgatcaagtgttactgttccttccaagatgggctctacatgcctttctctcattccaggctctagtaacctcccatccatyccctcaagctttcagaactagggtgataacagctctcttctgctaaccctcaggtttgtaagactgtctttgatagttcccctatattctgtctattctttcataattagtccccttaaaaaaacttttaattaaaatactcactaatttactgattgatatatttgactgaataaatg

SEQ ID NO: 763307 - DNA, 498 bp, Homo sapiens
ttgttttgtgaattatggtttatttaattcatgctggctgctacaaagtaagcattagatggctacaattgtgccaaactcttgttggatacttttcctgagttcaaggtggaagttttcatgccctgcttccctgtagaaagaatagcatatttccagagcctttgwttaaaaaattaatcatctcaaaatagctcagtccaaataaaatgtaagcgagcactatttcatatttgatatttagagcaaatgctgtgggttgagtataaattcaaaggtataattagttatccttaactagttcttaattgtacattaaattaatttttcagtgaaactatgttctttttctttttccaattatgagctatgattcagggagacattttcacctctccgttatctatgcttttagagtctaaaatacctgctgacttattagcttcacctattagtatctgcacaagagattatgtcggtctgtaatttttatgagag

SEQ ID NO: 763308 - DNA, 643 bp, Homo sapiens
taatgaaaatttagaggaaacacaatgtttactgaaaatttgagaaactgtctccatgtgtagactattttattcgtgaaatgtattacttatttgatagactatccgtattggtccgttctcacgctgctatcaagaactacctgagactgggtaatttataaaggaaaggggtttaactgactcacagttgcacatggcttgaaaagcctcaggaaccttacagtcatggtggaaggggaagcaaacacatccttcttcacgtggtgggaggagagggcagtgcagagcgaagtagggaacatctccttataaagtcttttataaaaccatcagatcttatgataactcactcactatcacaagaacagcatggtagaactgcctgcataatcgaatcacctcccatraggtccctccctcaatacatgggggattacgatttggattacaattcaagatgacattttgggtggagacacagccaaaccataccactatcccttatcccttagagtccacttccagaggcaaatatgactgtattcctggaatggaccaatggagatgatcagagaagtctcatattagcataaaacagttgactaagtcttgagattggagtagaagttcatcagtgcag

SEQ ID NO: 763309 - DNA, 635 bp, Homo sapiens
aatcatttttggatgtcatgaaatattacttttcttttgatttttttaaaccacttaaaatgtggaaaacattctgctgtttcatggaaaacaggtgaacacctcaactaatacagttgctgtaagaaggcagctaagtaaatgggtttgaaaagcatctgctataggactcaggaactgaccacttttatctggttaaagaggattattttcaaggataactctcagtactgtggcttcagcactagsggggaaggtgatgtctccaatccgatagtagatccagaagaaagaaagggatttaggcataggaggacacagaggctaacaagtgcttttttgttttttcagtaattcagtctttagcaactctggtgtatgacattctcctgagggaaatattttaaattttgtgtgccttaagtaatttttttttcactcttggcaagcactcgcttacaattttgggtcaaaaaaaatacttttactatagaaagtatctgagagaaattaatgttcattactaatatcaatcctttagaatatgtcacctcctttgacattttcagaaaactgcctcaaataagccccaaatgcaaatgtgacccatatgccaatgccatatatctggctgt

SEQ ID NO: 763310 - DNA, 665 bp, Homo sapiens
gtggtccactcagtccatttctagagtatgaaaagaacagcacatggtaattaagacagtcaccgcatgtgcaacactataataataatggtcaggattagggacccaattttgcccatgtttatttgcagatgtgttcattttgatctgcatatcatgctgtggtgcttgtgttcaargctgtcataatgtgctgtgcatgtgttatatttccagtgacttctttctttgctggcaccaaggagcatctgattcagtgggagacaagttgaggagcattgcttccacgccattccatcttccctacctggtcactggccccacatagacaggttctctcaatccaaccacagaattcctcaccacaaaacactcactgttctccaaatgaatgtcacttgtaataattggccaacatttttatttttttaatctgtatctattatgatgttattttaaggcaacagattttatgcgtaattaactgataaagtagctgaggctaagagagattaaataattttctcaagtttccatagcaggtaagagatttctctaaagccaatgttcttagcaccccaaaaagagacaatggggtctcatggttaagactgtggatgttaaagtcagagttcaactcccagccttacctgtaaaaacaggat

SEQ ID NO: 763311 - DNA, 506 bp, Homo sapiens
attatttctaatactttcttatgagatcaaggagaaaggctcactttggtgctggtacattttcaaaatcattctattttgtgtgtgatcactcattacctaatttatatataaatatatatatatatatatattaaatagacaacagactcacaacttcaagcaatgctatctattgcataagataatgatgttattgtatttatttttatctttagaratactgctttcctgttttttgcagtgatataatgtttaagtaaaaaaaagtcagtagaatttaaatactagctaaatactacagatgatatttgaatgaaggaagtttgggaaacacaaaaccaagtgttctctaaggccttgctattctaagagaaaaatgtaccaagcaaacagaaaacagaagaaagcaggagttgctatgctaatttcagacaaaactgattttaaaccaacaaagatttaaaaagacaaagacagacattacataatgggaaaggattcaa

SEQ ID NO: 763312 - DNA, 572 bp, Homo sapiens
atgatatgacatcgatagaaacagtgtatgagagttctacttcctctacaatcttgccaacacttggtatggatcagttttctcattgtggttttaatcttcatttctctaatatgaattatgttgagcatttttgcacgtgctttttgaaacctatatcttctttggtgaattatgtgttcaaatcttttgcctactttttccattgggctttacgttttcttcaaaatgagttttataaactgtatattctacaaacaagtcttttatcwgctacatgattgtaaatatcttctcccacactgtggcttctcttttctttctcttaacagtgtcatttaaagaagcttttgttactgatgagacacaactacattttttcttttagcaaccttgcttttgaatcatatccaagaaaactttggctaatacaacatcgcaaagactttttcctaaaagttttagtttttacattcaggtctataatccattttggattaatactgtatacagtgccatgtatgcatcaaaattcagttttttgcaaacagatatccaaatactcaaggcgc

SEQ ID NO: 763313 - DNA, 572 bp, Homo sapiens
atgatatgacatcgatagaaacagtgtatgagagttctacttcctctacaatcttgccaacacttggtatggatcagttttctcattgtggttttaatcttcatttctctaatatgaattatgttgagcatttttgcacgtgctttttgaaacctatatcttctttggtgaattatgtgttcaaatcttttgcctactttttccattgggctttacgttttcttcaaaatgagttttataaactgtatattctacaaacaagtcttttatctgctrcatgattgtaaatatcttctcccacactgtggcttctcttttctttctcttaacagtgtcatttaaagaagcttttgttactgatgagacacaactacattttttcttttagcaaccttgcttttgaatcatatccaagaaaactttggctaatacaacatcgcaaagactttttcctaaaagttttagtttttacattcaggtctataatccattttggattaatactgtatacagtgccatgtatgcatcaaaattcagttttttgcaaacagatatccaaatactcaaggcgc

SEQ ID NO: 763314 - DNA, 649 bp, Homo sapiens
  misc_feature 1, 2, 3, 4, 5, 6, 7, 8, 9, 10, 11, 12, 13: n = A,T,C or G
nnnnnnnnnnnnntcagtatattaggtacatggtacatttattttttatatggtacaaatacactttttaatgtgtgaaataatagattttttaaagctaactttaatattttaattagcatctcttttaacaacaagatttcatgaatttttttaaaatcaacattttattgttacatatactctgaaacatgcttacattttacatagctaggctctaaatgccaatttataaatgacctggaaacatatagttcacaaaaatatattactaagtgcatgtagagtagkttatgaaattgcaactttaagaaaaagacttaatgaaacagtaaatgaaatgtattcaaatttataatgccttggatttatttcacgtcatattgtctgtattacagtttttcaatggaaattgtagattttaactttttattggtattatcgtatatttcctttgctaatttaattatttttgctaagtttttcttctttgcacagactaatccatagcaaaaactagaaagacttattagactggacgatataaggaaagattttcgggtgttttaaaataaagtatagctctccctaagcctatactttttatttattagaggtgatttctgtctgcctcatccatgctgtaaca

SEQ ID NO: 763315 - DNA, 621 bp, Homo sapiens
tagcctagctaaatatccatcactggtaaatagagcaaataagaaaaatgaaatgggagtaacaatggtgagatctttaaaactagatgaaactttaaaacatacagttgagagaaagaaacaatgagattcataaatatttaagaaaatagaaaaagcacagtagaaggaaatcggagtagagataataggaggaaagaggaaacaagtttgaggaaatatcacttgctaaatttatttatattatatttctatagatgaagcaaggatgatacagattcttttttctggatgaagcctggcttgaaaaaaaaacaaatggggctgggcacrgtggctcatgcctgtaatcctagcactttgggaggccgaggcaggcagatcatttgaggtcaggatttcaaaaccagcctgatcaacatggtgaaaccccatctctactaaaaatacaaaaattaggcatggtaacaggcgcctgtaaccccagctattcaggaggctgaggcaaggagaattgcttgaacccaggaggcagaggttgcagtgagccaagatcacaccactacaccccagcctgggtgatagagtgagactccatctcaaaaaaaaaaaaaaaaatag

SEQ ID NO: 763316 - DNA, 621 bp, Homo sapiens
tagcctagctaaatatccatcactggtaaatagagcaaataagaaaaatgaaatgggagtaacaatggtgagatctttaaaactagatgaaactttaaaacatacagttgagagaaagaaacaatgagattcataaatatttaagaaaatagaaaaagcacagtagaaggaaatcggagtagagataataggaggaaagaggaaacaagtttgaggaaatatcacttgctaaatttatttatattatatttctatagatgaagcaaggatgatacagattcttttttctggatgaagcctggcttgaaaaaaaaacaaatggggctgggcacagtggctcatgcctgtaatcctagcactttgggaggccgaggcaggcagatcatttgaggtcaggatttcaaaaccagcctgatcaacatggtgaaaccccatctctactaaaaatacaaaaattaggcatggtarcaggcgcctgtaaccccagctattcaggaggctgaggcaaggagaattgcttgaacccaggaggcagaggttgcagtgagccaagatcacaccactacaccccagcctgggtgatagagtgagactccatctcaaaaaaaaaaaaaaaaatag

SEQ ID NO: 763317 - DNA, 619 bp, Homo sapiens
caaaaaataaaaatgagccatggtggtgtctgcctatagttctacctacctgggaggctgaggtggaaggatcacctgagctggggagattaaggctgcagtgagatgtgatcaagccactgcactgcagcctgggtgacagagaaagatactgtcaaaaaaaaaaaaaaaagaataaaaagagaaaaatcacatattaggtcacaaaaaattaaaacaatttccaagatttaatataatctctgtctacaaagcatataaattataaacaacactaaaaagatggtaaaaaaaatagcaacctttaattggaaacaaaaaatgcactaaaaatagctyattggttaaagaagaaatgacaatgtcatgaaatatttaaaagtaaagacaacaaaagtaccacatgacaaaacttgtcggatggagcaaagtcctatagaaaggtaagtacaaccttaaatataattattttatttatttatttatttctgagacagagtcttgctctgttgcccaggttggagtgtaatggcacaatctcagctcactgcaacctccttctcccaggttcaagtgattctcctgcctcagcctcctgagtagctgggactataggcct

SEQ ID NO: 763318 - DNA, 606 bp, Homo sapiens
taagtatatatatatacttaataaccttattttttagatcctggaatgaccagtgcattaatattatccatgcaataaatagcttttctcagcattttagaaagtagaatgattgcagaagaggaaactgtaatagtcaacacacgaaaagatgttttaacttcagtggtcatctgggacaggcatattaaaatggmtatgaaataccatttcacacttgctatattagcaaacattaaacaatctaacagtacaagtgtgatgaaatgataaatagaaactataccccatttagagaacaatttggcaccatctagtagaattaaaacctagcattgaactcctaggtacacatcccacattgtcccttgagcacgtgcatagggagatatgtgtaagatgtttactgcaacactgtctattataacaaaagttagaaccacctgactttcaaaacaagactggataagatgtggtataaatttaatagaatacaacgtctgaaataaatgaactagatctatatatgactatatggaggaatttctaaaacacaatgttaagtgaaaaaaaagcagaacagtgtatactatgtgacacatattc

SEQ ID NO: 763319 - DNA, 599 bp, Homo sapiens
ttgagtatgtaaagcaggtgttagtttctttcttttttttttttttttttttgagacagagtctttgctctgtcgcccaggctggagtgcagtggcatgatctctgctcactgcaacctccgcctcctgggctcaagcaattctcctkcctcagcctccctagtggctgggattacaggcatgcacttctacgcccggctaattttcgtattcttagtagagacggggtttcaccatgttggccaggctggtctcaaactcttgacctcgtgatccacccaccttggcctcccaaagtgctaggattacaggcatgagccatcgcacctggcccagtgggtgttagtttctatatcacagatgagacaattcaggtaaatacattggacttattcttagttttttcttcagttttaagtttattatctgatcagattaagtcaagatctttaaattctgctgtcaaaatcaacattaacttctccgatttgataactgtactatggctatgtccttgttcttaggaaatatacacggaaatatttaggaataaaggaaaacaatctgctactcattctcaatggttaaaaaagattata

SEQ ID NO: 763320 - DNA, 599 bp, Homo sapiens
ttgagtatgtaaagcaggtgttagtttctttcttttttttttttttttttttgagacagagtctttgctctgtcgcccaggctggagtgcagtggcatgatctctgctcactgcaacctccgcctcctgggctcaagcaattctcctgcctcagcctccctagtggctgggattacaggcatgcacttctacgcccggctaattttcgtattcttagtagagacggggtttcaccatgttggccaggctggtctcaaactcttgacctcgtgatccacccaccttggcytcccaaagtgctaggattacaggcatgagccatcgcacctggcccagtgggtgttagtttctatatcacagatgagacaattcaggtaaatacattggacttattcttagttttttcttcagttttaagtttattatctgatcagattaagtcaagatctttaaattctgctgtcaaaatcaacattaacttctccgatttgataactgtactatggctatgtccttgttcttaggaaatatacacggaaatatttaggaataaaggaaaacaatctgctactcattctcaatggttaaaaaagattata

SEQ ID NO: 763321 - DNA, 606 bp, Homo sapiens
aacaatcccttcttttggaatacctcctgaaggacttgcctgaggctgttttacagctaacatttgttttaataagtagaaagagtatattataaaatacagactaaaaatatagtaaatacataaaccagtaacagtcatttattatcaagtaatacataccatacataattgtatgtgttacacttttatatttttatttttattaaaatttttttttgagacagggtctcactctgtcacccaggctggagtgcagtggcatgatctcagctcgctgtagcctctacctcccaggctcaagcgatyctcccacatcagcctcctgagcaactgggactacaggcacacatgaccatgcccagctaatttttgcatttttgatagagatgaggtttcactatgttgcccaggccgatttcaaactcctgagctcaagctatccgcctgcctcgaccacccaaagtgctgggattccaggaatgagccagggtgcccagcctgtgcaacacttttacatgactggcagcgcagtaggtttgtttacaccagcatcaccagaaacacgagtaatgcgttgtgctatagcgttaccatggctaccac

SEQ ID NO: 763322 - DNA, 600 bp, Homo sapiens
agtatattcacataattaaatattatgcagcagtcaaaacaatgaatttcaattatatgcaacatgtgaatgytgcttttgtccaggtttctgagaagaagatgacaaggtgagattaaacatagaaaatttttttaagggcaatgactatgagagaaaatggagacggagccctggaagggtgggggaatcatcagactaccatgcaagtctgacctagatttaggcaagaggaaaagaaggtggaatggaagtgaactacattgctgttaggtctaaggaagacttggcaaggccacctaggtgtccttaagccatcaggtgtcagggagccccatctctcccaggaatggggctgccctatgcctctgccacactcagtcattggctgggagcagggccccaggagcagtggggaatgtggccttaggacaactcagcaatgggggacgcagcatagaagtggggctcttgtcaattacactcccagtagttagagatctctgaggaattccagcggccacaacagatgtcttagcaacagaacattgagtgggaaaaaataagaagaatgcattcgggataacattttttgtataa

SEQ ID NO: 763323 - DNA, 600 bp, Homo sapiens
agtatattcacataattaaatattatgcagcagtcaaaacaatgaatttcaattatatgcaacatgtgaatgttgcttttgtccaggtttctgagaagaagatgacaaggtgagattaaacatagaaaatttttttaagggcaatgactatgagagaaaatggagacggagccctggaagggtgggggaatcatcagactaccatgcaagtytgacctagatttaggcaagaggaaaagaaggtggaatggaagtgaactacattgctgttaggtctaaggaagacttggcaaggccacctaggtgtccttaagccatcaggtgtcagggagccccatctctcccaggaatggggctgccctatgcctctgccacactcagtcattggctgggagcagggccccaggagcagtggggaatgtggccttaggacaactcagcaatgggggacgcagcatagaagtggggctcttgtcaattacactcccagtagttagagatctctgaggaattccagcggccacaacagatgtcttagcaacagaacattgagtgggaaaaaataagaagaatgcattcgggataacattttttgtataa

SEQ ID NO: 763324 - DNA, 628 bp, Homo sapiens
taatttactgttaaagcaataaaaagacaggttataagcaaggagaaaatatttataatcacatatcaaatgaaggacttgtatccagaatatataaagaactcaaaattcagtgattagaagcaacctattttaaaatagccaaaagattttgacagacacttcaccaaagaagatatatggatagcaaatataatgcttaagattaataaaattaataagatgaatgaaaagatgcttaaatataatcaattagtgaaatgcaaattaaatgacaattttaagtgctggtgagaatgtaaatcaacaaaaactcttctatactgctgacaggaawgtgaaatggtacagccattctggaaaattgcttgggagttttttataaagtttgatgtacatttaccagatgacccagcaatcccacttttaggtatttatcctagagaaataaaaacatgtttacacaaaaatctgtgcacaagtgtttatagcagcattattcataatcaccaaaacacaggaaacaaccaaattagcattaatgtctgaatggataaacaaaccgtgttccatttatgcaagggaatacaacttagcaataaaaatgattaattacaaatacagacaa

SEQ ID NO: 763325 - DNA, 466 bp, Homo sapiens
gctgtaaatacaaggtggattgtgatgaatgctatattagccatactgggaatgaagttcatgagagcacaaagaatggagatgtgaattccacctaggagaatcaggaaaaggttgttaatatgatacttgagcaggtagtaaaggctgctaaggagttaatgaaaacaaaactcaggaaaagaaattatttggtaaagcaatagcccaatcagagtcaggaaagtaaagaatatatctttacataactgggaagaattatatggstagctcagcttttccctaacttcagtcatctgagtaccccttgctagttttcacatgcccattttctgtctgctagtatttactcaatagtcttctttaaaatcaattcaaatgttttaattttagtaaattaacataaaatagaattttatatcaattcagacatcacttggcaggtggaactacaaaaatatgcaca

SEQ ID NO: 763326 - DNA, 623 bp, Homo sapiens
cgcccagtgccttaagcctcctgcactctgacctttgtctgagcgacctcaccaacaagcagcttggtctgagcttctaaacaaggcagctggctcccaagacagagagagaatagaagctataacttaagggagaatttctgctgtaacttattggccaaagcaagtcacagaccaactggcaaagtgatgccaccaaaagggcagttgggatagagggatcattgtgacctcctttggcaacacagacccttacgaatactgaggctgtgaacaagtgttgacttcttgatgttgatggctgcaggctagtgacagcaattgtccaggacagatccattgtcttcccacacagtagctccaggaccactatccctcacacacaacttttgctccctgtcgacttctttctctyccataaaatctgcagctgatatttacataaagtctcaatatcaagatagtaagatggtcactgcttgcagctccattgctttgcttactcttcgtcattgactttcaaatttttccacagaaatgaccctacaggctcagaagagcgatagtgttacaccaaggagactggccccattcaaaagcacatttccttcacgtctaaattc

SEQ ID NO: 763327 - DNA, 601 bp, Homo sapiens
aaaatagtttgggttagagagggtgcacatgaataagagagtaagtggtttttactacaaagttggagtcccatctccttttcattcactttagcattcaccagtgctaaagtggtggccggcatgggctgcagggagccgttggaagtgaagagtcacagagcctgggcatctcaaactctgaacccagggcgggtgataagcagaggcaggaagcagggtcagaagggtaagggagcrcgcgtcagtctgtgcttagggtgcattcacaccagagatcccaggacagctcgctggaaaacattttgaaacaggagtgcgttttacttgcatacagtgcttccctctggctcctggcacagcctggtgcagcggctgggtgggatccgtgcagccactgcttgtcccgccccttccccataaaatcacagggagcttttaccaaggaaatgctggaaaattagcactcttgcaatcttggtgctttttctaattgcctattggaatttgcaagtgattatcaggatagaatgaaaagaggttgcctctagctgaccctttctaggcctgccctgcaaactcccctacagcagaggtgagc

SEQ ID NO: 763328 - DNA, 553 bp, Homo sapiens
tgggcacaattcacaacagaatttagaactgtactcaacatgcctccctgcactaaatatatgtcattgctaacgtgtggctctgtcacagaagcctcccagctattcagaaactctcaggaggtcagaagggctacctttgtccagagctctggttaaagattaacaggctggagtctttgggccyggcagggcctaatgtaggctgctgtcacctctccggggtgaaggagctgtgcggggcaggcccagtgcccaccgggtgacaagaacaaaagccaccacacccagaggcaggatctagcatcttgaccccagctctccctgaacttctcggggcctctgtttcctcagttgtgacatagtggggttggacctgactcccagggtacatgacagaggaggtttgcaagggagctgggctggggtttggcctgctgctggggccctgagccctgactgccccatggaagcacagcagtgcagcccacttctgcgtctgttggggcctccagctttcctcttcagggttgctgaggaaggtctggcaagt

SEQ ID NO: 763329 - DNA, 553 bp, Homo sapiens
tgggcacaattcacaacagaatttagaactgtactcaacatgcctccctgcactaaatatatgtcattgctaacgtgtggctctgtcacagaagcctcccagctattcagaaactctcaggaggtcagaagggctacctttgtccagagctctggttaaagattaacaggctggagtctttgggcccggcagggcctaatgtaggctgctgtcacctctccggggtgaaggagctgtgcggggcaggcccagtgcccaccggrtgacaagaacaaaagccaccacacccagaggcaggatctagcatcttgaccccagctctccctgaacttctcggggcctctgtttcctcagttgtgacatagtggggttggacctgactcccagggtacatgacagaggaggtttgcaagggagctgggctggggtttggcctgctgctggggccctgagccctgactgccccatggaagcacagcagtgcagcccacttctgcgtctgttggggcctccagctttcctcttcagggttgctgaggaaggtctggcaagt

SEQ ID NO: 763330 - DNA, 500 bp, Homo sapiens
ggggtcccctgaagaggtaggaattctgcctccagactgcctttggactcaagactgcaacgtcgactcttgctggaatttccagtctgccacccctccctacagtttatgaacttaccaggccccacaagcatataagccagttctttaaaataaatctctctctatacatgtacactctatcagctccatttctctgaaaagctgtgactaatacacctttgcataagaaagaaaactaaaataatattttattgacctgaytgggctctagtaggaacaggaacagacctgagaggacaggtggctgtcagtgcccacagccagtgtacagcttctgcatacagaaactcttaaaaatgcatgagtttggcacagaactctgggagcagccaattgctctgtgaccctgagcaagtcacttcccttatctaagcctcagtcttctcatctatacgatgaagataatatctgttttataaagaaatatgttcttgtgg

SEQ ID NO: 763331 - DNA, 542 bp, Homo sapiens
taaataatttgggttatcagttgattcttaacacatagacaagtacagagcaaatggtagttcccatcccttaaataatctgagacacacacatatattttttcgtctgaaagatatgtaaacaatagaccatgaaaagaaccgaagttctccagaggtagaagcaactgtgagaatcctcttctgacccctcattcctcattgacttctgactaactcacaatgggggagcgttgcaatgattagcttcttttatgaatgatgtctcctcccagatctacgaaatgatgctggtgagacatggctatatgatygtaggagaccccatgggcggcaagacctctgcttataaagtgttggctgcagctctcggcgatttacacgcaggtaaagctcacatccctggcttccagggaggacagaactcctcgctcagttggctggctccatggagataatgccaggctgctagtcttgtcaggcctcgatcgtgacgtcagagctagaaatagaacatggcacacagatgtctgcaagcagaa

SEQ ID NO: 763332 - DNA, 593 bp, Homo sapiens
tccttctctcctggtccccctgtccctttgggtgtatatgcatgtgcatgcctgtatgtatgcatgtctgcaagtgtgttcgtgcatggctctgtgtgtgcatgtatgtctatatgtgcatgtctctgtgtgcatgcatgtgtgtgcatgtgtgtgtgtgtgtgcatgcatgcatgcgtgtataggtgtctgggtctccatttatttttcaractctttctctctgttcctttctttgtctctgtctcattcttttgctttccctaactctctttctctgcttctctctctctctctctctgtagctctcctggtcacccacacgtgactctgtgtttgttccacaccaagccttttgtctacctgaccttcatttttgtaatgacttgcagggagaagccttgactgagctcagctccacctacagatacctgcatttttcccaactgactgagagggcggaggccgctggagaagcctgagagaggccttgggtgcacacacacagcctggttcctttcttaattcctccaaactcagtgatcttgcctgcacgcctgcagtcgacttggggatgcagtgggtgctggcac

SEQ ID NO: 763333 - DNA, 641 bp, Homo sapiens
caagcctaactctcaaactctttaaaagcagagagttttctctggccagtagcagaaggaaaaatcaaagagactttatttgatagaaatatgatgtaaaggaggttctctgttgctgaaaagaggggtgccacaagtgctagagtggcctgtaagagctgacacctacccctgcagagctgtcaagacaatatctacctcagtcctrcagttgcaaagaaataaattctacctacaacctgaatgaatctggaagtggattcttccccagagactctagaagagaactcagtccagttgacaccttgatttcagctttgtgatgccttgagcagagaatccaatcatgtcatgcaggacttttgatcaacagaacggtgaaataataagtggatgttattttaaactgctaaccacatggaaatctgttacatagaaatagaatactgatacacctaggtattaacaggttgtctgggccaaccatagagccatggaaacaagtcattggagctaactcttcctcttctagtaatataaaacaaaagaaaatccacatatcctctccttgctccattagggagaaaataaaattttattctcctctcagacttcaaagacttgtttcagagggatccctg

SEQ ID NO: 763334 - DNA, 573 bp, Homo sapiens
ttcagacccagagtttgtgacaggtgttcctcaaggatcaactctgatcagttggtaagcactgcctagagcatgtgattgaggtgaactcagaggccacgtctaggcacagtgctacagagtgctgggattcacaagtgatgtcagctgagaacatagtaagagaaaaaatttgcatccctgccaagcctctgccaatattgactgaaaacattataattcatttatagaatcaagacctgatagaaatgactgcgatatgcttgcccatcaaaaatrccaaagttttagaatgcttggttctgaaggagctggttcattttccagagggtgatatttattatctaaaaggctgccttgtgtttgattttccttaccctgaatttacacactccattaccttctctaaaatccagtgcttcaggacataacacagtgtattccaacagtagatgttcaatgaacactgaactgaatcatatcacatacagcaggttaagtttaaaaagatactttgcacatattcacatattcattcagcatgacttgattgaataattagatacagtctct

SEQ ID NO: 763335 - DNA, 634 bp, Homo sapiens
aaaaaaaaaaagatacaatgtaaattaactatggagaatggcagccgggtgaataattaagaccccagacactgaagccaggatcttcagttcaaatcctaactgttgcttagtagctggaaacgttaacagtttcttaacatctcttgccttagtttccacatttctaaaatggggttaataatggtgcctatttagcggtattattatgaggattaaataagttaatatttggaaagtgcttaaaaccwtgcctcacatataataagtgctgaatatgcatcattaaagtgagcagtgtttttcttcttaaaaagcagggttctagccttacaatagttaaatttaatataatttcttccactaggtctatgctaacataataatcttatactaagtggatctgaattttaagaataaaaataatatgttatttttattaaataacttttttaatgagtagtaccttaagatttgtgaagatctgatatgtggaactttatttaagagcagtctaaatgctgtcttcttcagaatagtatgtatactgtgctatctttttgtaaaaaaggaggaatataaaggtacttgtgatttttttaaatgaatgagtaaaccgaaaataaatataaat

SEQ ID NO: 763336 - DNA, 637 bp, Homo sapiens
cagtccatatgaaatgctgtatggatgaccttttctcacaaatgacctcttacttgatcaggaaatggccaacttggtcaaagacataacttctttggaaaaataccaacaaaacattaaaaacctacctgaaggayatcacagagaaaagggaacagagttgttccaactgggagatctagtgttggtcaagtcccttccctctaccttcccatctatgaattccttgtgggaaggaccatactcagtaatcctctctactcccactgcagttaaggtagcaggaggggaatcttggattcaccacacccgagttaaactttggacaccccctgaggaacctgcaggaccatcagatcaggagtcccaagatcagccagaccagcctcaatacacctgtgaaccattggaggacttgcgtctcctatttcagaaggaaacatcccaaactaaaaaggctccttcagctgatcctgaggaaaaaccccttcctacttaaaaaagttaagtgaaaacctacataatctttaacacctctccttgcccctttaatggaatccttttactgtttcatcacattattaggcagtatactaaacatactctttgcagtaggattatatactgtagcttctgc

SEQ ID NO: 763337 - DNA, 613 bp, Homo sapiens
cctcatagaacagttagggaggagtctctccttttcaattatttggaatagtttcagaagaaagggtgtcaggtcctctttgtacttctggtaaaattcggctgtaaatccatctgatcctgggctttttttggttcataggttatttattactgcctcaatttcagaacatgttattggtctattcagggattcgacttcttcctggttcagtcttgggaggttgtatatgtccaggaatttataaatttcttctagattttctagcttatttgcatagaggtgtttatagtattctgtgaggattgtttgtatttctgtggatcagtggcaatgttccctttatcagtttttattgtgtttatttgatwcttctcttttcttctttattagtctagctagcagtctatgtctttttttttttttcaaaaaaacagcttctgtattcattgatttcttttgaagggtttttcatgtctctatctgattcagttatgctctgagcttggttatttcttgtcttctgctagctttgaggtgtttttttttgctcttggttttagttgttatgttagagttttgatttgagatctttctagctttttgatatagg

SEQ ID NO: 763338 - DNA, 623 bp, Homo sapiens
ttgattgtgagagttaatactacttaataaactcccctttacgcatatatctattctattcgctctgtccctctagagaaccctgactaatacacataccattgtgaaaattcagattgctaaggatatagagaagtttctaaaatttttcttgaggaaacaatgtgacctgcagaaaaatggcaagtctcatatcacattttccatcagcaatgttgaatgttagaagatagtacagaatgacattggatttctaataaataatgtaaaaaaagtcataaaatatcttctgctcccttgcaagggaggttatttgaggttgggctgcatctaaatgaggaagaaaaggtaagcagaaaaaatcttggcatcctggagactgtggggccaatttgtctctagaagagctacaaagggaaaccccagaaatacagccatgcagcaggcctggagggcaggcagtctaaacagaggcatcaraagaaatggtgattcagtaaaactatacttatttttctaggctttttctccatcccagtagatataaaatactaataaatttgaagacaagacaaaagggtgggaggaggaagaggatcagaaaaaaacaactattggatact

SEQ ID NO: 763339 - DNA, 561 bp, Homo sapiens
tctgttacagatgtttccatttccaacctttctttctttctaatatttaagactaagaatctctctcgaagcatacccttagctgcatcccacagttttttatattcattggcatttttatttggattttctaaattttattaatttgatattctaaagtataattgctgagcttcctaaaatttgtgaactttctagttatcttgctttcagaggcttttgcagccattattgtaatttactcacccagatatgctaraaaaatttcactggctagccagaagattaaattaaccagaatgtttttttctaagcattctgggtaattgtcaatttgttgctccacaaaggagtgctaattatggtatctgtaggtcattcaagctaaacgctaatatttctttcttcccactgcagatcagccatgtggccttgggaaaatctttcaataggttaaggtcccagatgccctcttggtaaaatatggaagcaaatcttattccctagagaagaaatatgaattcatgaatatacatacatattcatattcacactcgagaa

SEQ ID NO: 763340 - DNA, 493 bp, Homo sapiens
gcagcatagtgagactgtgtctttaattttttttttaattagttggacatgatgatcagcgcctgtagtctgagctacttcagaggctgaggtgggagattcacttaagctcaggagttagaggctgcagtgcactaagatggagccactgtactccagcgtggttgacagagtgagactctgtctcaaataaaataaaaaataaaaccacaaggrgataccaccacacacacatgctaacattaaaaagactgattaaccaagtatcagagaaaatgtcaaacaactagggctgtcatatgctgctaggagcatgaaaaggtacagtctctttggaaagcagtttgggagtttctcaaaaagttacactcatacccccaaatgacccaccatcctactcctaggtatttagccaacagagatgaaagcatacagaactgcacacaaatgttgggaacacgttgagcagctttatttgcaatagccccaaact

SEQ ID NO: 763341 - DNA, 655 bp, Homo sapiens
gaccctcaaccagatggagatgggcaatgcgggaaaaaccggatcctcgagtggaatccgtgttggaattcctgctatgtccttcattaactgtgtaaccttgggaaaaccatgtcacctctctgagctgcagtcctttgcgctataaaaatctcctaggtgtgttgggagtcagcgtgagcgggaactcccggcacacagtaggctgtgagtgcagactgctccatcactacctcccagcgcggaaggtggccgacctctccgcctggtagatcccatgtttcttgccagagaaggaaattggtccgtaaaggaacagacccaggaaacccctgcccactccgccctcggttgataaaccagggaacacagttcgaaggactgggatggacgagaagcagtgccggaagsgcagccgcgatttccggccggacccggctgactgtggctctgggtgttctccccacaccagcgtgccgctccgatctagcaaacaattatcgagcaccttctgtgtgcacaccctgttcagagagggaatgcggaaacaaaaggggggcaaagaatgggctagacggacagaaacaaaaatgcggagattcggaggcccagaagtggaaggaagcccctagccaaggccagcagccagaggcgg

SEQ ID NO: 763342 - DNA, 708 bp, Homo sapiens
atctgttacttaattgactggtttgaaccccagtttcctaatcaataaaataggaataataactgttgctttgcagggggattatgcggaaaacgcctggttctggcttcctccacttgtgccctcccctcactcactctgccttkggctctgcgcttctgcaagcatggtcacctgtggctgcacatgcagggcctctgtgctgctggttccctctgctgagagcaccttccctgatagccatggggctcacctcctgatgggggctgcattgtgtcccttcgcaaatgatacattgacgtcctaatccctggtgtctatgaatgcaacctcatctggaaatagggtctttgcagacataaccaagttaaaaggtggtcatactggagtagggtggtgtcttagtccatgttgcgttggcataaaggaatacctgaggctgggtaatttattaagaggtttatttggctgaggattctgcagactgtacaagaaggatggcattggcacttgcttctggtgaggacctcaggaagcatccaatcttggcagaaggtgaagtaggagtgggcgtgccacatggcaagagacggggcaagagagagatgctgggttcctttaaataaccagctttcacatgagctaatagaatgcaaattcactcatcaccaagggaatggcactgagccattggtgagggatccaccc

SEQ ID NO: 763343 - DNA, 528 bp, Homo sapiens
ttatatacgcactagctgtttccaacgccatcaccatctggagaccgggtataagtaatcttgaactctatatcaggtacaagttgcatagccctacgataaaacttgatggctaaaagaagaaataaagctaaattagctgtgaccacacatttttgtcatttcctttgattacccttaactgtggtttaatttggtaactttctttacaaacggccaaattctgtttttctacrtgcaacagcagttcagtgacacaaaactatttccaaaccttaatgctcagaaagaaacttttccctaaacttaagatgttgtattttactcttatatattagcccttcccatatttttcctcaccctcttacgtatcatgatttttaaatagttgtctttctttgggctctgaagatgcaattgctatagccaacaaaaatacttctctcttttttaagacaaggtctcactctgttgtccaggttggagtgcagttggcacgatcttggctcactgcagactccacctccc

SEQ ID NO: 763344 - DNA, 584 bp, Homo sapiens
aaaagtcactagatggtacaattcatatcttaagattgagcttcttcagagtttttactcctatcaaggacatgaatcctactttctggctatgtgcaggaaatagccagttgcatttttttcatatcctctggctcatataccagatatttatataaactggaatggaagaaaaacattgtatttttcattcacagaatcaaatcttaccaattctcagtaactgagaagaaaagcccatttgatctaatgaaaaatctgaactatatgaagaaccatatgctcatcatatataattattctaataaaaccttttaaagatatttaaataaaaccatttgtttaaaagtgaagaggkcattttaaatagctactatttattaattgcctattatgtgcaaggcacagccttaattaatcacacacacaaacatacatacgtcactaatagtaacaaaaaccctaataatgatgccaattaattatatataaatatgacaattttctcttttcattacgtacttaagctctacttgtatgattttaaatattataccaaaatttagaatcttgttccaaatgat

SEQ ID NO: 763345 - DNA, 578 bp, Homo sapiens
ttttaagttttaaaaattgtaattaatttaaatttagatttacatagctgcgtgtagctggtgactgctgtattggccagtgtagcactgaagaaatatcttcactacattcccctcaatcccttatcactgtggataggtatttttcctggggtgaaaatgaaaagggaacgtttataacaatgctagttttcagccttcttttttttttcgaggtagagtcttgctctgttgcccaggcgtgcaatggcrcgatcttggctcattgcaacctccgcctcccgggttcaagcaattctcctgtctcagcctcccaagtagctgggacaacaggcatctgctaccacacccggctaatttttgtatatctagtagaggcggggtttcactatgttggccaggctggtcttgaactcctgacctcatgatccgcctgccttggcctcccaaagtgctgggattacaggcttgagccaccacgcctggccccttcaagcttcttttgtggctaaatctgctctcctgaatgaacttaaggttatctgtcatctggaagctttacactatttcctaaggcc

SEQ ID NO: 763346 - DNA, 611 bp, Homo sapiens
acggtaatctttctgttgaatacattctaatagcattattttatattaacattataagtgcagttttttacttataatttaaaaggtttttttgttttgtttttttgtgaaacagagtctcgctctgttgcccaggctggagtgcagtggtgcgatcttggctcactgcaacctccacatcccaggttcaagcgattctcctgcgtcagcctccccagtagctgggactacaggcacgtgccaccatkcccagctaattttttgtatttttagcagagacggagtttcactgtgttagccaggatggtctcaatctcctgacctcatgatccgcccacctcagcctcccaaagtgctgggattacaggcgtgagccaccgtgccccgcctattttagatagatcttttaaaaacttgagaccgaatatacttgcaaagcaaactgtttatataaaaggaatattgaagattaatcatataaattataaataatttagtagaagatattttatccttttaatataactttacaatttttaattttttttttctccttaaccctagcccaccaagaaaacacattgtggagcgctatacagagttttatcatg

SEQ ID NO: 763347 - DNA, 627 bp, Homo sapiens
tgcatgatggaattagtctagaacctttttccttctatttcttatgactcttctatcactctttttttttttttttttttgtatttccacagggaaaagataccccttcacgtctttagtcccaaatacacaaaattacgtgactggcaccatgaagtttcagcacgtgctcttaacgtacagtgatttatgagccttgccccccaagcagccagcacataccttttcatttactttttttttttcaacttcatagcaaaatctgtattaaatttgccttatgaaaaaatagaactttttctatacttttctaacaatttcctattgttgtgagaaaaggaagatgaacatgttttgtgctagttggtagctcacaaatgtaaaaccaaaaaaaaaaaaaaatagaaaattaagggactagatctatttgkggatttgtatctgtttttgttgggattagggtagtaatcttggaaaacgaattattttcataagttgaatttggttagttggttggttgaagcagaggataatgagcaaataaagtccttgtctaatttggaaaatactttctttatattattaacatctcccaagattactttttaagttcattattatgttaca

SEQ ID NO: 763348 - DNA, 627 bp, Homo sapiens
tgcatgatggaattagtctagaacctttttccttctatttcttatgactcttctatcactctttttttttttttttttttgtatttccacagggaaaagataccccttcacgtctttagtcccaaatacacaaaattacgtgactggcaccatgaagtttcagcacgtgctcttaacgtacagtgatttatgagccttgccccccaagcagccagcacataccttttcatttactttttttttttcaacttcatagcaaaatctgtattaaatttgccttatgaaaaaatagaactttttctatacttttctaacaatttcctattgttgtgagaaaaggaagatgaacatgttttgtgctagttggtagctcacaaatgtaaaaccaaaaaaaaaaaaaaatagaaaattaagggactagatctatttggggatttgtatctgtttttgttgkgattagggtagtaatcttggaaaacgaattattttcataagttgaatttggttagttggttggttgaagcagaggataatgagcaaataaagtccttgtctaatttggaaaatactttctttatattattaacatctcccaagattactttttaagttcattattatgttaca

SEQ ID NO: 763349 - DNA, 565 bp, Homo sapiens
acttattaaggagaatcactgatgtgaagcttctaattcctcaaggatgctggagagcagaatattactcctccttgtaaatatctcttaaaacgacactggatacaacgcaaggtggcggaaagacatatgtttgtgttgaaactccaggattatcactatgttcttaccatttgctctccaagccaactgtacgctcacctatttgtcaaactttccttttctactgaagtgaattacaactccaggtaagtcctgtcattaaccagacagtccagaaatctgggttttaccccctatcgagttcccatctggtatgtgatcctgccaaccttaccagagtctcttcagaaaggacaatgtagttttgtgatgttgaaaaccacactgagaattcygtgagagtttacaagtcctcagataaaccactgttgacctgcaaaatctggtccctacaggtctggaccttgactccctctccctcctgaactcctagcactctcccctggccttcttctccttcctccaacatgtcacaaacactcctatctcagggcctctgtac

SEQ ID NO: 763350 - DNA, 647 bp, Homo sapiens
aagaaggcccctaagtgagtctgatgcaagctacaggtttgcctgacccaattgcaactgattggaccagaaatagctacgtgactcaaatgcagctaaagcataggcttcctattggtctatggtgtcttgtggtgagagaaagaggagctgggcaaaccaggcttcccctttgtggcaggtgaatggggaaacagtgatgctgaatgaggctgtgcagtagcattgaggccatgaagggtcaggaacatgctgggaacgggaactgtgactaagcagaagctgtgaagccaaaaacaacaatgacaaaaagacaacgaggaggggggargaaggcaagccaactggaagagaaaaaataagtgtgcagggaaaagcagaccttggagagctggggagtgaaccaggagagcagcagagtgaagttcaagaaagtccgctgctgaggtcccagagctgctgcagcctctaagccaactcctggttctgtttttcacaatgtgccagtgccttctgaaactaatctttctgttgtctgcagcttctgtcctgtgtattcttaaaatgtatcttttctttgcattttctttaaggaagtctttccccatgccctccacccccaccccggtgctttcaaggagtgggga

SEQ ID NO: 763351 - DNA, 597 bp, Homo sapiens
tttttttttgagatggagtctcactctgttgccaggctggagtgcagtggcgtgatctcggctcactgcaacctccgcctcccaggttcaagccgttctcctgcctcagcctcccgagtagctgggactaccagcacgtgccaccatgcccagctaatttttgtatttttagtagaaatgggatttcaccatgttggccaggatagtctcaatctcttgacctgatgatacacccaccttggcctcccaaagcgcaaggattataggcatgagccactgcgcccagccgctttaggctattttttaatctcgccatctttttcatctttgctccataggctggactmtaggtaatttcttctcatctttgtttactatttctgttctattataatctgctctgtattcattgagagtttaatttgaattatatttttccatttctaaatgttctatttgggacttctgaaacgtttggtcattctcattcctccatattttcaagcttctactttacttcctgttaccaaaaaagcacactttaaatatattctatctctaaaaattacagtaggtgctatctctacagatcttatt

SEQ ID NO: 763352 - DNA, 492 bp, Homo sapiens
caaaaactaatgtatgatgtgagaggtcaaggtagtagtttacttggtggggggcagtgattgggagcaagcagggtgctggtgatgttatacctctttatctgggtgctggttacacttataatgcctttcctgtatgtttgtcttacttcatttaaaaacaaactgtgagatgcttttgcaggaatggactgtttcatttcatcagtaagccagaagtttaatcacactaaaatgartattgtcctagttccattacaaaattgagtatgtagcctaaagaaaaaaatagtcacaacaataaatgaaaaatctattacaccatcacattttttaaaatcagcataaatgcctataatattctagtgtcaaattattcaaacatcttaaatatcaaatctctaatgttcacactaatttggtagctattacctactacaatactaaatatacgcaactcatgtctttaattagcatttgaaattttggcca

SEQ ID NO: 763353 - DNA, 571 bp, Homo sapiens
ttctcatattattttgttcccagaggctctggcattggagtcatcttcaaactatgacacagagctccagagaaacccagcatcggtcttccttttcctaagccaattcagcactgtgtcagccatttctatccacgccataaggcttgtgccccagatacagacctatgagtaaaagaggatccacacatttggttcctaccatagcagagagagatggaactattccgaaaggaaaggagaatgaccatctctattacctacaaagtgtgttaccggaaraccactgaacaggcctgctttacgaccttacttccctgggccactatttccttcagtgcaaaaggaagtcattaaactagaattcttcaaatcaaataatctacacactctaataataacacaaagtacaatgccactggtactttctttaatgcaaacactatatatttattattcattcaacccatactgcaaatttcttttttatatatttttttgtaactttgtcaagtggttggtttatttttaagctttcacagtagccaaagcaggcaggtttccatataat

SEQ ID NO: 763354 - DNA, 617 bp, Homo sapiens
tatgaaatactttaaaagccatatttatatattcacacacacatacatacacacacatatacacatacaaatgctttctctgtaggtttttaaaaattttgtttggactgatgttcaaaacacaatagagtaggtggatatactatgaaattcacatgcactgtttcagttttgccatcattaaactgtcatcaggcaggatacaaacagagctgaccaagcatgtgggcttgtagaaaataatgcatatttcacttccaggaggagctcaagtcgtttcctgcagatgaaacaataacttgaggacttwtcttaccctttttcctctttctggaagttagtaaataacataagcccagtcataaaatctgagattatgttttcagaatactttctctcttagctaatgagactatcgcctacattttaaaatgttaaatacactcagtgtaaaggagacaaacgtaattgtgtcatctcgtaccaaaatttgtcttctatagttacagggaatggtgaaagttctctgaacattctgttgtaaatttttgatagaagtagaaaacttaaacatggtagctacgtgtggaggaaagagccggagagattgtgtccac

SEQ ID NO: 763355 - DNA, 611 bp, Homo sapiens
ctctatctacacctgctatttttgtcaagtttccattcttttagttttaaatgtgatctatatgcagacaactccatgcacacatcttgaacctcttctctctctacctccactatttttgtagttttccattctcctagttttaaatgccatctatgtacagacaactcctacactatatctccaactagaatagtyttccaaactccagactccatatatccactttacaagtctagtagagacttcattcttaacatatccaacactgaactctcagtccacctcccattctattgctcctgcagttttttccacctcagtggatggtaactccattcttcaagttgcttagaccaacagcctgaaagtcatgcttgacttctcttttgcctaaacatcaagaagtcctgtatccagaagtcctgtatccagactatgaccatttctcttcactgtttcaagtcaccaccatcttctgtcttggttattgaaattgccttctaattgacctgacctctctttctctctccctactcccgtactgcttgttctcaacaatgcaaccaaaatgattagttagaatgtctgttatttcatgtcttctgtca

SEQ ID NO: 763356 - DNA, 610 bp, Homo sapiens
tggttttttttttgggtagccacacctcccatgagtccttgcccattgaaggagactgattgtcccctgttcccactgagggtggggtatgtagttcaggcataacctactcagtgtgctcccctcccctggctacagtgattgcttcaagcgtggatgacacaatatgtgggccaataagactggagaagaaattttctgtaacctctgagaagtatcctttctcttttctgaaagcttctggaaatgggcatctctctggttctctccaaggacatatgtragagcaagtatcttgagaaaatgtcagcagtcaaattaccactgtgaggtaaggctaagtcatattaccacctaggtaaggctagcctcagaggcaatctgccattgtggtaggcagaggaaaaatggaaagaaacctcaatgacattgttgagtcactgaattttacaatccagagttttttcttacttgtagacttctagatatatagaccactatatgtgcttttattttatattgaagctactttttgttgggcttctgattccttatatctaacatgcttaaactaacataactaaagactgactggaaatacagttgcata

SEQ ID NO: 763357 - DNA, 540 bp, Homo sapiens
atttcaggattttgcatcatgggcaacatggaaaagtcaaatttctcttttttggtctgccaagtttcatggaagggtataaaaagtccaacattttcaatgaaatggaaattgttataagccgaatatctttggaaaataacctattattgttcaaaatataaagtcatctatcctctgtggttgtcttttctgtctagctggtcattttggaattaaagaggacccaaatgtatctctaggacttcggctctgcacataatgagcttggctctccctttaatgccaattttaactcggcatggttctcctcatccagaaggtcaattcagctgttcacaaaacaataaaactacatgtttgtccttgtctttatgttttccwttttgcttgattaatgattatctggacacgggaatttaaaatgtgtaggttatataaagagacacattacaatgtaaatcttagttgtatccatgacccccaggccttctaccctaaatatctgtgtgtctttccacatacgtgagtgttccatgc

SEQ ID NO: 763358 - DNA, 495 bp, Homo sapiens
gaggccttccaagccatgaggaacaataagtcaattaaaccttttctttataaattacccagtctttggtatttccttataacaatgtgagaacgaactaatacagtaaattggtaccaaggtagtggggtattgctataagatacctgagaatgtggaagcaactttggaaccaggtaatgggcagaggttggaacagtttggtagggcttagaagaacacaagaaaatgtgggaaagtttggaattatctwgggacttattgaatggcttggaccaaaatgttgatcatgatatagataataaagttcaggctgaggtggtctcagatggagatgaggaactttttgggaactggagtaaaggtgactcttgctatgctttagcaaagatactggaagcattttgcccctgccctagagatctgcggaactttgaacataagagagataatttggggtatctggcagaagaaatttctaagcatcaaagtatt

SEQ ID NO: 763359 - DNA, 590 bp, Homo sapiens
cagacagctgaaatatatatttatacataattcttgaaattagaagttccaaatgttatctgaattagaccttgattcatgtcagaaccacaatcttagggaaaacttaaaatatgtcacattacctgaaactgcctgttttttcagaagtctttgatcactaccagtcttgaaagcttgagacctctgaaaatgagagacctagagtaatatgttttatgcagtaatgaagttacacctagcaagtctaggggctttatgtggagtcccactcatctcttaatccccagagcccagagctgacagacctaactatacaacagaaaaggagctgtcctgttcagctggactaaagacattcagacccatgatgcccattcagatacccatgaggcaatggtacagtggcagagcccttsccttttgaagacaggatcctccgtcatccactgggaagcctgcctcaggctgaggactcaggtcatgaagcacaggggctgatgttaggacaacgttcttctcacaaaaatataaagtgaaaaatgacttgtgggatttttttatcctttttttgatcaagattgaatgaa

SEQ ID NO: 763360 - DNA, 616 bp, Homo sapiens
gtggtcataggctaaatacttgccagtgtttactgagaaaaatatgaatgagataaaataagaggtggtactgggcattgaccaaaatagcactgaaaggtaacaattggcctgagaggcctgagggatgacaagcaatcagtcaagtaagaagttattccaggcccaaagaagacaaacatcgtaccttgaggcaggcccaggcatggcagaaatcagcttagtgtgtctagagtaggaaggtcaggttgaaatgtacaagtgaaggcagagctaaaaaagagaaaggcagcagccagatccttcaggccatagtaggtyaagtaaggagtgcagaggcaattggtttcagccagagagctacaagatttgattcatggtttatgtaagagatacttttggctgctctgtggatgaaaatctggagcggaagcaagcaggtcggttaagaggcttctaaagtatcagcttagaaatgatggtagctttagaaaaaaaagaaaaataaataaatgatggtagcttggatgaggatgctgacagtagagatggagaaaagtagatggatgtagcacacatatctgctgtaggagtcagtaagacttatggattgatt

SEQ ID NO: 763361 - DNA, 641 bp, Homo sapiens
tgtaactatcaataagcaagcattaattaacttggggaacattttctcaggacatgggatttaactccctggtgagggacaaaaagaatggggtaaatttgctgctgaattagctcctagcaatccagaaaaacaaaaaaagatgtctggtgctcagtaaagtggaaatatttatgttgccctcaccggtggtagaggatgaagtaaagagactgagggaaggagcatgctagaatgacataatcaatgtagccggtgaccactaataagtccagaagaaacaccattcaccaaggtcattagaaacatggtgagtgaggcaccagaacttcaatgatgactcttctcttcagrccatggctgatcataggagaagggggtcacagagctagaattcttaatatccatggaaatagtgcactctcagagtaatggaggccaggaagcagcatttaccctccacaagccaaaaagccacaattttcttgaaattcagcaagacaggtaggtgaccaaggatttgctaaattaaatttgttaatttattcaacttcaattacaaaagagcagctaacagagcttgatccacagggggctgagaagatggcattactagggtcaaactagatgcacagtcaata

SEQ ID NO: 763362 - DNA, 340 bp, Homo sapiens
aacatgagtttttagtatttaggcaggacgaatttaataagcaactcacttatgcatggttttaggtattggtgacacaaagacacatattagaaagtgtgcatcctacactgtcagttgttgtttacatacacagacttgtctcccttgctggygttctttcatgggtgtccaacctgtcaccttataagatagggaaggcaaacattgcccttggtccatagataaaacatgcttaacataaggttaagccaatcactgatgttccatttgatttattggtaatggcaggagtatttggcctagttgcatctaatgaaacatgaggggaattcagcat

SEQ ID NO: 763363 - DNA, 549 bp, Homo sapiens
ttctccattaaaagatatagaatggctgaaaagaacattggaaactgtgcaaatatataaaatttaaacaacatgctgctgaatgaccaatggatcaatgaaacaattaaaaaggaaattcaaaatatttctggagacaaatgaaaatgaaaacacaacatatgagttatagcaaattcagttataagagggaagtgtatagagaaaacaccttcatcaaaaagtagaaakatctcaattaaacagtctgttgttgcaccccagggaatgagaaaaacaacaacaaatgactcaaaatttgtggaagaaaaagtggtaataaatactagatcagaaataaataaaatagtggctaaaaacaaaacaaaaaatcattgaagagtttgcttttggaaaaggtaaacaaaattaacaaacctttagctggacaaactaaggaaaaagagagatgactaaataaataaaatccgagattagataaaggagacatcaaaactgataccagatgaatacaacatatcatcatagagtgttaggaacaactttatg

SEQ ID NO: 763364 - DNA, 452 bp, Homo sapiens
gcatctgacaagtgtctaatatctagcatctataaggaacttaacaaatttcccagaaaaaaacaacccataaaaatgtgggcaaagcacataaacagacacttttctgaagatatacatgtggccaacaatcatatgagaaaaaggtcactgtcactgatcattagagaaatgcaaatcaaaaccacaatgagataccrtctcataccagtcagaatggctattaataaacagacaaacaataacagattttgacaagtctatggaaaaaaaaggaacacttacacattgctggtggaaatgtagattatttcagccatagtagaaagcagtttggggttttctcaaataaattaaaacagaactaccatgtgaccccgcaatcccattactggtatatatcccaaagaaaatatatcattctactgaaaacacatgcactagcatgttaa

SEQ ID NO: 763365 - DNA, 635 bp, Homo sapiens
gtttatataaatatataaatatatttcttgttctatttagctactaaatattcctaagatcgttacctagtgcctaggtttggctttatatctaaattgaacaataatcaagatgaaaattgtgtgctccttgaataaatgtactggattcactggtcatcaggggagaccaactctggcccaaattctctttatcttttctattcatatttaaccaatcagaatcaattttggggggtgtgaggtgcttaacagaacagaaattcattgtatcattcttctggaggctaaagtctgaagtcaaagtgtcagtagtattgcttcttttggagggccctgaggaagaatctattccatgccatcccctagcttatgatgacggccatcacctcttggtatttcgtggctaatagatgcatcatttcagtctttgccttcatcttcacatggcattctccttctgtggctstgtgctatttttctttttcttttttttcgagacagggtctcactctgttacccaggctggagtgcagtggggagatcacagcacactgcagccttgaccttctgggcttaagcaatcctcccacttcagcaacccaagtagctgggactacaggcacacgccacca

SEQ ID NO: 763366 - DNA, 538 bp, Homo sapiens
gaattatttgaaatattttagattgtgcaaaactgtgagacttaaaataattaacatgtttacattttaataagcatttttccatattgaaagaattatccaagcacatattcaataaataaaattatttaaacctctttattagttcagaaaattaggactttgctatgaacattgatattctttgagttgaacatattttttaaaatagacaagttatatatggctattaaataaaactcataaaatgtatttcaatggaaatagttaataaaattactaaacttttgcactcagtrtgataaatatatgtcttgataatgtagtttgtgtttcgctgaagaaaccataatgggtagattttgatcttacagaaatgaagttaatttaaatttgccttcgcaattgtcttccaaacctcttgtgtattcctctctatacaattttatttctcttttagatatccattttgatttgggaattaattattaggtgatttttatattgatgatatttattgatgataccaatccatctg

SEQ ID NO: 763367 - DNA, 654 bp, Homo sapiens
tattgagaaggtagacactaaatgtaatcacctctataaaaaaagtagaaataaattttatatagacaaaagtgatcacaatataaccacaaatgcagagattgtagtgatgtggctacaagccaaggaattccaacagcctctagaagctggaagggggcaggaacaggtgcttcccttgagcatctggagagtgtattgcccaaccaacaccttgctttcagcccagtgaaatagattttggaatctggccttcagaaatgtgtgagattatatctctacaattttaggcttttgtggtaatttgttacagcagccatagagaatgaatacaacattgttacgggaatgaaaaaacaagccaaagactggggaaaaatatttgaaaagtgtgcatctaatgatgaacttgtatctggaatacacaaaacccttataactcgataataataatacaaaccatccaatttaaaaatgagcaaaagatttgaccagtcagctttaaaaaaawatatatatatatatataaatgtgtatatatatatttgtggtatatatttatatatgtgatatatattttatatatttgtgattatatatatatcacataagtatttgaaaaggtggtcaatatcatatactatactcttaata

SEQ ID NO: 763368 - DNA, 599 bp, Homo sapiens
catacttctgataacgtgattaaaaattttccatttggaccaacagtaagcatcaagtttaatggtgaaattctatagcaatgctgtccaatagaatttaaatcaatattgataatgttctctgcaatgttcaatacggtggcagtcgtcaaataaggctgttgatccattgaaatgttaataagaattttaaattgcatttaaggtaacttaaatatatatgtaaatatcacattagctagtggctattatattggaaagtgcaggcccagatgcaaacatcttaaattcatgaataaaacaaagatacatactatcrctccagttttttaccactttccttaaaagtttcagacaatgcaataaaacaacaaaatatgttgtaaaaagtgagaagaaaaagatgagagtttcagtgtgatgcttgtataagaataaacaaatcaacaagatggaataatgaatttagcaaagaatataaagattatgtaataatggtcataaataataatgaaatttttcattggtgagcatacactaaatagctgaataaatggtattagcaaaactggtatttggaaaaccattcagcatactta

SEQ ID NO: 763369 - DNA, 642 bp, Homo sapiens
cattcgcagggtgcttcagtgaaccaggagaggtgtgttacctctgtcaagccctcgggttcatttgtgatagagccaagaccagaacccaagtctctgcctttgctcctgtgtcccacatctaccagtatggacctgcttcctccagagtgggcgcatattgggacatgcggaacagaccacggtcttctgtgctgctgtaccaaaggcgtgtaccccattagtgagcagatcccccagcacccagaccctgtyccctccccacatccccttcttcccagggcttggcagcccaaggggcagcagagttaggggaacagcaatagctcggggtgcagagtctgtgctaagagtctaggctttggagccagactgcctggattcacatgctgcctgacacagagtgttctttaaagccctgtgcctctgtctccccatttgtaagatgccaaccacatagggcttttgtgaggcccaagtgagatgatctttgtacatggtttaaactgggcctcgcacacagagtaaatgccgacatcaacaccttactgtgaaagctgcctctggtctggccatgagctgaaccccttcatctctgcagagaagccctacacacctcccccacctctccctgccccacca

SEQ ID NO: 763370 - DNA, 642 bp, Homo sapiens
atttccattaccccggagaattctactggacagctcctttgagggcaccactgttggggacagaattggaacattcagtgctattgggggtcaaaatcagagtgggctttctggaggaggtgccccttccttaggccttgaaagttgtgaaacactargcagggcaggagggggcctgtggtggttgcagcacagacaaccgagtctgcagccttgcctcccattgcaagctgtgtgacaccaggcaagtgacttaagctgactgaggtgcatctgtaaaatggggctaacgcagctgcctctgttgggctgggcacatctggctgcttggtgcttgtgggtttgtcacatggtgtctaggaaagtctgggaggttcaggttccttcactgtaagaggcgatcacccgggcctcccagggccatgcaggtgggctaggtgtgtgggaggagtgtggggccctccgagtcctctttcccacagaggccaaggcagaaacaagcacagcctgactttgggtgggctccttggcctccatgggaaatagggagctccttggcccaagctcccagtctcaggtcgaaactaggccagggctggggagttaggggccatcagccaaggatcgacccaagaggtctgt

SEQ ID NO: 763371 - DNA, 630 bp, Homo sapiens
actaagaattttgcatatagctggcttgttcattttgcaatggttggggattgatttctcagggggaatcattgtttttttctctcctagtttataagacgtatctatattttaaatggctttatttatttatttatttatttactatatttttcgagatggagtctggctctgctgcccagactggagtgcagtggcaygattttggcttactgcaacctctgcttcccagtttcaagtgattctcctgcctcagcctaccgagtagctgggaccacaagcacacgccactgctccaagctaatttttgtatttttagtagagatggggtttcaccatgttgactaggctggtctcgaactcctgacctcaaatgatccacccaccgtggccttccaaagtgctgggattacaggcatgaaccactgcacctgactaaatggctttattttgaattgccggtgaaattaagaataatttaagaatatcttgtctcaatattagtatccaaaatgttctaggatgtccagggattgaaaattcttaaaaattgagctttaagtacttggaagaagaaaataaaattattatatttatatatgaactggtaatttacttagaaaatccaaa

SEQ ID NO: 763372 - DNA, 630 bp, Homo sapiens
actaagaattttgcatatagctggcttgttcattttgcaatggttggggattgatttctcagggggaatcattgtttttttctctcctagtttataagacgtatctatattttaaatggctttatttatttatttatttatttactatatttttcgagatggagtctggctctgctgcccagactggagtgcagtggcacgatttyggcttactgcaacctctgcttcccagtttcaagtgattctcctgcctcagcctaccgagtagctgggaccacaagcacacgccactgctccaagctaatttttgtatttttagtagagatggggtttcaccatgttgactaggctggtctcgaactcctgacctcaaatgatccacccaccgtggccttccaaagtgctgggattacaggcatgaaccactgcacctgactaaatggctttattttgaattgccggtgaaattaagaataatttaagaatatcttgtctcaatattagtatccaaaatgttctaggatgtccagggattgaaaattcttaaaaattgagctttaagtacttggaagaagaaaataaaattattatatttatatatgaactggtaatttacttagaaaatccaaa

SEQ ID NO: 763373 - DNA, 630 bp, Homo sapiens
actaagaattttgcatatagctggcttgttcattttgcaatggttggggattgatttctcagggggaatcattgtttttttctctcctagtttataagacgtatctatattttaaatggctttatttatttatttatttatttactatatttttcgagatggagtctggctctgctgcccagactggagtgcagtggcacgattttggcttactgcaacctctgcttcccagtttcaagtgattctcctgcctcagcctaccgagtagctgggaccacaagcacacgccactgctccaagctaatttttgtatttttagtagagatggggtttcaccatgttgactaggctggtctcgaactcctgacctcaaatgatccacccaccgtggccttccaaagtgctgggattacaggcatgaacmactgcacctgactaaatggctttattttgaattgccggtgaaattaagaataatttaagaatatcttgtctcaatattagtatccaaaatgttctaggatgtccagggattgaaaattcttaaaaattgagctttaagtacttggaagaagaaaataaaattattatatttatatatgaactggtaatttacttagaaaatccaaa

SEQ ID NO: 763374 - DNA, 570 bp, Homo sapiens
acataaagccccttaagtactcaaaatcaaaaatctttattgttttttcttttgctgagcatttttcctcccaagccctccccaccttttgtggaaatttagccacttcagaggccttgttcctcataatttggaactttcctttagatttgatcaagttggatagtttcccaatgaagaaagaaagaccaaaacaacaaaaacagaaacaaacaacggcaaaaaaaaaaaaagttaagcaaaaacacaaartatctcaaaatttatatgattactgagcactctaatggtaaggagaaattaagaccagcttgttgttaatcttaactttagacaagacaaaacccctattgagctacttacctagtgatgggtctcaggctgaagactgctgtctgttaccctagaagcaggaaaaaactcagattcatcttccgtgctgggagcaaggtcaaactccataaaggaattacctgccttccattgacatggaagcaggaaaacttgccttccttgttgaaagcaggtaaattttcagaaaaggagttgtgcagcaaaataaagtttaga

SEQ ID NO: 763375 - DNA, 539 bp, Homo sapiens
attttttcctggtaaaggatcttgccttgatgtggatggctactgtaagagtgatagttgctgaaggttggaacggatgtggcagtttcttaaaacaagacagcaatgaagtttgcttcatcgattgactcttcctttcactaaagattttcatttagcatgtgatgctgattgatagcgtgttacccactgttgaactactttcaaatttggagtcaaaaatctcaaaccttgtcactgctttatcgattaagtttatgaaatattctaagtcctcgatggtcatttcaacartgtttaaccttcaccaaaagtagatttcatcatttcatctaaagaaaccactttctttgctcttccacaaaaagcaactcttcatccatcaaagttttattgtagcaattcagtcacatcttcagactctacttctaattctagtttttgtttttgttttccaccacatctgcagttacttcctaccctgaaatcttgaactcttcaaagtcattcatgagggctggaatcaacttcttcaaaac

SEQ ID NO: 763376 - DNA, 539 bp, Homo sapiens
attttttcctggtaaaggatcttgccttgatgtggatggctactgtaagagtgatagttgctgaaggttggaacggatgtggcagtttcttaaaacaagacagcaatgaagtttgcttcatcgattgactcttcctttcactaaagattttcatttagcatgtgatgctgattgatagcgtgttacccactgttgaactactttcaaatttggagtcaaaaatctcaaaccttgtcactgctttatcgattaagtttatgaaatattctaagtcctcgatggtcatttcaacaatgtttaaccttcaccaaaagyagatttcatcatttcatctaaagaaaccactttctttgctcttccacaaaaagcaactcttcatccatcaaagttttattgtagcaattcagtcacatcttcagactctacttctaattctagtttttgtttttgttttccaccacatctgcagttacttcctaccctgaaatcttgaactcttcaaagtcattcatgagggctggaatcaacttcttcaaaac

SEQ ID NO: 763377 - DNA, 539 bp, Homo sapiens
attttttcctggtaaaggatcttgccttgatgtggatggctactgtaagagtgatagttgctgaaggttggaacggatgtggcagtttcttaaaacaagacagcaatgaagtttgcttcatcgattgactcttcctttcactaaagattttcatttagcatgtgatgctgattgatagcgtgttacccactgttgaactactttcaaatttggagtcaaaaatctcaaaccttgtcactgctttatcgattaagtttatgaaatattctaagtcctcgatggtcatttcaacaatgtttaaccttcaccaaaagtagatttcatcatttcatctaaagaaaccactttctttgctcwtccacaaaaagcaactcttcatccatcaaagttttattgtagcaattcagtcacatcttcagactctacttctaattctagtttttgtttttgttttccaccacatctgcagttacttcctaccctgaaatcttgaactcttcaaagtcattcatgagggctggaatcaacttcttcaaaac

SEQ ID NO: 763378 - DNA, 615 bp, Homo sapiens
attataggcatccgccatcatgcctagctaattttttgtatttttagtagagacgcggcttcactatgttggccaggctggtctcaaactcctgacctcgtgatctgcctgcctcactctcccaaagtgctgggattacaggtgtgagccaccgtgcccagcttcacaaatgttcttaatgccatgtagaatgatgaaacctagtcagaaggttttcaacttactttgtttagacccgtttatcagaggaatcattcttttagccttataaaatayattttttaaataataagactcaaacttcaaaattattccattattcatgggctgcagaatgaatgttgtattagcaggcatgaaaacaacatgaatcatattgtagatctccatcagatcttctaggtaactaagtgcattgtcaatcagctgtagtattttcaaaggaatctctttttttgagcagtaggtctcaatagtgagcttagaatatttagtaaaccatagaatatttagtaaaccatgctgtaaatagatgggctatctttcaggctctgttgatccacttatagtgtactagcagaatagatttagcataattctttagggacctaggat

SEQ ID NO: 763379 - DNA, 561 bp, Homo sapiens
tgggtttgtctccaaggcttgctactattaaggctatctgttgctctgtaacaaactacctggagacatggcggcaagtgttttattatagcacatgaatttgtgggttgggaattcagacagggccggcatgtccatctggcatcacctgaggtcacttgatattcagcagtgacaccaagcaattgagctggtctgaagggcccaagacggtttcactcacatatctggtgtgttgctgggtgagctggagrgctgcactcagtggggccggtgtctccttccatgtggcctcaggacctccccacatggtctgtcagcacgggagtcagacttcttacacggccgttggtgctccaagagaccaggctgccaggccttctaaaggctaagtggggaactcacggagcaccctctctgctgttctgtattataggccagagcagtgagaggtctgcccagattcaagaggagggaagacagacctccccttctgtggcaggagtaccatatcaaatagcttctggccatgtttcttccatcagtgcagctcacaagtct

SEQ ID NO: 763380 - DNA, 611 bp, Homo sapiens
gcctgggtgacaacctgggatctgatgttcacctgaggcccagagttcagctggtgcctatgtcagcctggcacctgatgcacacgggaggactaggtgcccacctgaggactggtgttcatggggaactggtgttcagctgtggcttgatgaccaactgggtcctggtgtcctcctggcacctgatgtccacctgggactgcatgcttacccagggcctggtgttcccctggggcctggtgtgcccctgagacctggggtccacctgggcctagtatccacttggggcctcatatccatctggaacatcatgtccacttggggccttttagttaccyagggactgggtgtccttctggcgcttgagtgtcctcctggggcctggggttctcctggggcctgggtgtacatctctggcctgatgtccaccttgggatggatgtccatctgggaacagatgttcacttgtggcctgagtgtccatcttgtgtctaatgtctacctgggatctggtgtttgcctgaggccttatatccacctggggcctgggcatccatttgaggcctgatgtctacctaagacccggtgtttaactggggcacagacttctt

SEQ ID NO: 763381 - DNA, 575 bp, Homo sapiens
acctgaggcctgatgttcacctgcagcctgatgtccacctggtatctgtgtgtcaatctagtgcctggtgtccacttgaggactaggtagacacctggggctttgtgttcaccaggggactggtgttcatcttgcacccagtgtccacctggaccctgtgtatcaacctgtggcctaggtggtcacttggagctttatgtgcacctggggcctgagagtttcctaggatctgatgaccactggggcccaggtatccacctgggacatcaggctccaagtgtatatccaggctccatgtggacaccaggccaggagaamgccagcccttatctgaatatcaggtcctagatggatgcccaggccccatgtgtacatcagtccccgggtatacactggactccaggtggacaccagcactcaattggatacacacactcaaggtggacaccaggccccacgtgaattcgtacactccaggtgaacatcaggtcccaagtggatacctggactccaggtgtataccagtctctaaattaataccaggcctcagatggtccttaggagccatgtgggca

SEQ ID NO: 763382 - DNA, 575 bp, Homo sapiens
acctgaggcctgatgttcacctgcagcctgatgtccacctggtatctgtgtgtcaatctagtgcctggtgtccacttgaggactaggtagacacctggggctttgtgttcaccaggggactggtgttcatcttgcacccagtgtccacctggaccctgtgtatcaacctgtggcctaggtggtcacttggagctttatgtgcacctggggcctgagagtttcctaggatctgatgaccactggggcccaggtatccacctgggacatcaggctccaagtgtatatccaggctccatgtggacaccaggccaggagaacgccagcccttatctgaatatcaggtcctagatggatgcccaggccccatgtgtacatcagtcmccgggtatacactggactccaggtggacaccagcactcaattggatacacacactcaaggtggacaccaggccccacgtgaattcgtacactccaggtgaacatcaggtcccaagtggatacctggactccaggtgtataccagtctctaaattaataccaggcctcagatggtccttaggagccatgtgggca

SEQ ID NO: 763383 - DNA, 572 bp, Homo sapiens
ttccaggtagacatcagatcaaaggggaacatcagtcccccagtggacatcaggcccaaggtggacactcaactagaggtttacatcaggccacatgttgacacctagtcccaggtggacatcaggccccagctagatacctaggcttccagtgaatttcagaacccaggttgacattcaggcccccagtggtcatctggcctcatgcgaacactcagacccaaggtgcaaatgatgtctcaactggataccaaacccctagtttgatacccaaggcccaggtggacaccakgtccaaggctgacactcaagccctaagtgaataccaaactctaggtgaataattcaacccaggtggtcattaggacccagctggataccagtccccaggttaacacaaggcccccagtgggcacctaggcaccagctggacatcaggccctatgtaaacacccgggtctcaggtgaacaccatgccccaggtggacatcaggccctaggtggatacggggccacaggtggacatctagccgctgggcaacatccagccccaggtggacataaccgtttcc

SEQ ID NO: 763384 - DNA, 649 bp, Homo sapiens
acgcaggggaatgtaaatcccctgcgatatggggagtaaaatcattctctctggctaggcgcggtggctcacacctgtaatcccagcactttgggaagccgaggtgggtggatcacgaggtcaggagatcgaggtcatcctggctaacatggtgaaaccccgtctctactaaaaatacaaaaaattaaccgggcgcggtggtgggcgcctgtagtcccagctactagggaggctgaggcaggagaatggtgtgaacctgggaggcggaccttgcagtgagccaagatcaggccactgcactccagcctgggcgacagagcgagggtctgtctcaaaaaaaataaaataaaatcattctctccctccctggatattatggtgggagcgcgagcgggctcgggggttgccaggcagctgctgcctgcacacagagggcgactgcagcttgggcrcccaggcggcggagcatggtctgggtggcctctggaatgcgtgagcgccagacctgaggatcaccctgggtggagccacctaccccggtcttcctctgctggagcctggagcagctggaatggccactattcagtcacaggggatagagttaagttttcttatcccacacatgcacacaaaaaggtaactattctgt

SEQ ID NO: 763385 - DNA, 581 bp, Homo sapiens
gtagaggtgaggcacctgtggcaggtgcccatccgtaaactgtttatccatgtgatccctgatgttcaccgggggctggatgtccccctggggctagatgttcgcctggagcctggtgtctacctggggcctgatatccaggagaggcttagttatccayctatggccatctggagccagatgcccacctgaggtctggtgtacacctaaggcctgatatctacctggggcttgggtgttcatgtgggacctgatgtctacctaagaccgtgtgttcacccggagcctgggtgaccatctgggttatgatgttcagctggggcccagagttcagctagggactgggtcaaccttctgcttgttgcacagctggggactaggtacccacctgggctccggtgttcactggggcctgatgtctgtctggggccttgtatttacctaggaccaatgcatccacctgaggtctgagtgctctaatggagcctggagttttcctggggcctggggtctgccttaggcttaagtgtacatctgtggcctcatgtccaccttgggatggatgtccacctggggatgga

SEQ ID NO: 763386 - DNA, 581 bp, Homo sapiens
gtagaggtgaggcacctgtggcaggtgcccatccgtaaactgtttatccatgtgatccctgatgttcaccgggggctggatgtccccctggggctagatgttcgcctggagcctggtgtctacctggggcctgatatccaggagaggcttagttatccacctatggccatctggagccagatgcccacctgaggtctggtgtacacctaaggcctgatatctacctggggcttgggtgttcatgtgggacctgatgtctacctaagaccgtgtgttcacccggagcctgggtgaccatctgggttatsatgttcagctggggcccagagttcagctagggactgggtcaaccttctgcttgttgcacagctggggactaggtacccacctgggctccggtgttcactggggcctgatgtctgtctggggccttgtatttacctaggaccaatgcatccacctgaggtctgagtgctctaatggagcctggagttttcctggggcctggggtctgccttaggcttaagtgtacatctgtggcctcatgtccaccttgggatggatgtccacctggggatgga

SEQ ID NO: 763387 - DNA, 581 bp, Homo sapiens
gtagaggtgaggcacctgtggcaggtgcccatccgtaaactgtttatccatgtgatccctgatgttcaccgggggctggatgtccccctggggctagatgttcgcctggagcctggtgtctacctggggcctgatatccaggagaggcttagttatccacctatggccatctggagccagatgcccacctgaggtctggtgtacacctaaggcctgatatctacctggggcttgggtgttcatgtgggacctgatgtctacctaagaccgtgtgttcacccggagcctgggtgaccatctgggttatgatgttcagctggggcccagagttcagctagggactgggtcaaccttctgcttgttgcacasctggggactaggtacccacctgggctccggtgttcactggggcctgatgtctgtctggggccttgtatttacctaggaccaatgcatccacctgaggtctgagtgctctaatggagcctggagttttcctggggcctggggtctgccttaggcttaagtgtacatctgtggcctcatgtccaccttgggatggatgtccacctggggatgga

SEQ ID NO: 763388 - DNA, 555 bp, Homo sapiens
ttcagatagctgcttaaaatgagtaaggaaaaacggatgtgtgcatcagttccaactgtttatggactaaaactagttgatttcttggttaagaacaaaaagtgacaacctaattaactgaaaattttaagtgggcaattatagttttagctttmacgtaaaatattaactattctccaatcttgcatttttaacctaatactcaatataaatcgccacatgccatgtttcagatcaaggttttacttgggatctctcatgagtttttcaaggttttaattatctgcaatgtaacaatgtaccagtaaccttactggcttaaaccaggaatttattctttttacatgtcacaattttctgggtcaagacactggacagggcaatgtgggttggctgcttcatgatgtccctggtctcatctggaaggactctagtggctggggacgtgaagcaggcaccagaaggactctagtggctggggacatggagcaggcaccaagccctctctttgtggccagcacggacttcctcccagtctggcagtgtcaggtagtc

SEQ ID NO: 763389 - DNA, 604 bp, Homo sapiens
taaaaaccctagaagaaaatctaggcaataccattcagaacacaggcacaggcaaagatttcatgatgaaaatgccaaaagtaattgcaacaaaagcaaaaattgacaaatgggatctaattaaactaaagagcttctgcacaccaaaagaaactatcatcagagtaaacaacctacaaaatgggagaaaaattttgcaattaattcatctgacaaaggtctaatatccagtatctacaaggaacttaaacaaatttacaagataaaaacaaacaaccccattaaaacatgggcaaaggacatgaacagacatttctcaaaagaagacattcatgcagccaacaaatatattttaaaaagctcaacatagctgatcattagagaaatgcaattcataaccacgatgagataccatctaacaccagtcagaatggctattgytaaaaagtcataaagccacagatgctgatgaggttgtggagaaatagaagtacttttacactggtggtgggagtgtaaattagttcaaccattgtggaagacaatgtggctattcctcaaagatctagaagcagaaataccatttgacccagcaattccatta

SEQ ID NO: 763390 - DNA, 528 bp, Homo sapiens
cctgtagtcccatctacttgggaggctgaggcaggaggatcccttgagtccaggaggttggggcttcagtgagccttgattggcccaccgtacttcagcctaggggacaaagtgagaccctgtcttaagaaaaaaaaaaaaaaagaaggaaaggctgggcaccgtgtaatctccagcattttgggaggccaaggtgggcagatcacctgaggtcaggagtttgagaccagcctggccaacatggcgaaaccctgtctctaccaaagatacaaaaattagccgggtacgacagtgcatgcctgtaatcccagctacttggaaggctgaggcagcaraattgcttgaacctgggaggcggaggttgtagtgagctgagattgcatcactgcattccaggctggacaacagaacaagactccatctcaaacaaaaacaaagacaaaaaaacaaagaaaatacagtacagtggaaagtcaagtcagaaaggaagtagaagcagaggtatagaggaagccaagtgtataataa

SEQ ID NO: 763391 - DNA, 462 bp, Homo sapiens
cttgtcatccccacagcacagagcctagggcacatagtaggtgttcaataaatgcttcttaattgcccagggtaaataagtcacctccccaatcaggtcacttcctcaattataggtacctggactggccactcccaagaggctgcattttttcttcagagccagctgtgatctcagttacctgcaaacctcaccatgggcctatgttttcaaaggatgttagacctattctaatctcactccactgaactgggcagacragatgatttgtaaagcatctcaggtctggcaaagcaaagtacatacttcttccaggcaaacccagagattcagagcttccaatctccttaaatactggagttcacaagaggaaaaaaccatggtgtaagttttaagtgactgacagcagaaaaccaacatgaggctcaggtgcacgctttgagcaccagctatcactaaacc

SEQ ID NO: 763392 - DNA, 539 bp, Homo sapiens
tgcaggtcagaaacctgactgtgctcaaatcaagggcagtgctgtgttcctttctggagcctacagaggggactccagttccttgctttctccagcttctacaggccgcttgctttccttgggtcgtggcctcttcctccatcttggaagaagccaggaatcacatcacttagaaccccgtgtccatcctcgcacctccttctctgactctcctgcctccctcttctaagaacccttgtgattacgttaggcccacctggataatccaaggcaccctccctctctcccagtcagctgatgagcaccttaattccacctgcaaccttaagtctctcttgccacgtaacatcamatagtcaggattgcagggattagggcatggacgtctttgggggcagggaggatcattatacctaccacagggctagtgttccctgctatagccccagtgactggaacagtgcctggttcatagtaggccctcaagaaagacgtgttgaataaattcatgaataaatacatgaataaccattaggaat

SEQ ID NO: 763393 - DNA, 605 bp, Homo sapiens
ttattctttttgcttaaaattgtgttggctattcagactcttgtttggttccacacggattttaaaatactttctttctaattctgtgaaaaaatgtcattggcagtttgatatggatagcattgaatctgtaaattgctttgggtagtatggccattttaacaatattgattcttcctatccatgggcatggaatatctttccatttgtttgtgtcacctctgatttctttgagcagtgctttgtaattttcattgcagagatctttcaccttcctggttagctgtattcctaggtattttattctttttgtggctattgtgaatggaattgtacgcttgatttggctctcagcttggatgctattggtgtatagtagtgcaaccaatttttgttctttgaytttatatcctgacgctttgctgaatttgtttatcagatctaggagcttttgggcaaagattatggggttgtctaggtatagaattatatcatctgcaaacacagatagtttgactttctctcttcctgtctggaggctgtaaatccatctggtcctgggctgcttctgtctggcaggctttttattaccgattcagttccag

SEQ ID NO: 763394 - DNA, 442 bp, Homo sapiens
accaggagaggggagatctgccatctctttgctttctttattctctagacaatttttttatttcttttaaaaacaaatacatgctttttggaaaaaagtaatcaggctgaactcagtggctcatgcctgtaatcccagcattttgggaggctgaggtaggaatgtcacttgaggccaggagttcaagatcagcctgggcaacagagcaagaccttrtctctgcagaaaaaaaatctttttattacctgggcagaggatcacttgagcccaggagactgaagctgcagtgagctatgttcatgcctttgcactccagcctgggcagaaagagtgatatattatctttaaaaattaaaaaattattattatttttgagacagagtctcactctggttgcccaggctagggtgcagtgccttaattgcagctcaatgcagctcag

SEQ ID NO: 763395 - DNA, 581 bp, Homo sapiens
tcatttgaacccaggagtttgagtccagcctgggcaacatggtgaaaccctgtctctagaaaaaaagtagaaagaaaaaagaaatatagtccatttatttagatagggaaactactaaaactaaaagggatagaatctggcttccaaccaggttggtcagactccaaacccacattcttagttgctactacctctttggatttaacaaaatcattaaccaccatagaagaaaaagcaacagaaagccttccaaaatgtagattacttaataaaaagcagtcaatgcaccacaataccctcattctccaataactagggtagttgagggatttctgacattcttatcccagttgtcacttttgagaggttagcagactcctctgagattctttgcctgattcctgctgagagaccaaaacagctaaaagttaaagccagttyaagtttccatggattctgactgctttactgggtcaattgtaataatattattaaaacacctaaacccctcagccaaacccagggtatatgaagaaggcttatcaaacaaaaacaatgtttggagaatctggataatagta

SEQ ID NO: 763396 - DNA, 551 bp, Homo sapiens
attcccagaaggaatggctcctcagggaacaaaatccgggacagtgctgggaaggcatgcactagtggcccccaggatcatgtctggtgttgatggattttcaattggggtactgaggaagagcagtggtttctgtagcaatcagaaagaccaggtaccagagaatctcagaaccagaagagattttggaatttacagggcagaggtcgtcagacttaagcatgcttcagaatcacctagaagctttgttataacagatggctagatcttgtcatactcagagtatcagagtaacagtccaaaattttgcatttctaacagtttcccaggtggaaggacaatggccgcactgcagtcaagtataggccgaggtacacatccggcatagcatgacacagcaggattrgagcacaggcacacaatcctgtgtattaaaccaccacagctatgtagccataacatgggagggctcatcacatgactctgagccactgttgtctgtgaggtgcataaatgcagcactgacagtgtgaaagagctgctgaacaaag

SEQ ID NO: 763397 - DNA, 676 bp, Homo sapiens
ggtgccttttacacaaatattgtgaatcacaataactgtgtttatcttctttttccttcagcaaataaggaaacatctgtgggggtgctgatatttatttatttttgaatgagcatcataatagtggaaatattttgtatgtgattatagaaccctggggctaaagcactgcccctgaggaggagcgacgagttaattggtaaataatgtagacattctcttctaattaagaagacttaaacgataaatccttgttttttaggtgacatcgcttggggcatctctataaaatgcaaggtcagcccagtggggaacgaaggyagtcctagcagagtgtgcctggcccaacaatctcaaattatactgccttttctggacctcagttttcccttgtttctctgcctcctggaggagctgagaaaccaggtgtagctctctgaactcaagcctctgatcttgtctggagccagctccttaggaagaatccatcagtgcagatccccactgtggccgccataaacctcctgcctaagaatcacattgacctacatgattcatgcactcagtgcaagcgaaaagaaggtgctctgtgtcctggggtgacagggcagaaaagaaggacagcctcttaaacacccacttaaagagagcttgatcctgaggctggatgtgtgct

SEQ ID NO: 763398 - DNA, 561 bp, Homo sapiens
aggcagacccaggacttgaaccaggttcacagatctgcattctaagatgttaaactgtggccatttctggatggcatgattacaagtgaaatttttaaaatattttttatttttatgtattgctaaaactttctacaatgaacatgtacttttcttttttttttttttgagttggagtttcgctcgtttcccaggctggagtgcaatggcgcgatcttggcwcactgcgacctctgcctccagggttcaagcgattttcctgtctcagcctcccaagtagctgggattacaggcgcatgccaccatgcccggctaatttttgtatttttagtagagacggggtttcatcatattggtcaggctgctcttgaactcctgacctcaggtgatctgcctgccttggcctcttaaagtgctgggattacaggtgtgagccacagcgccaggcctaacatgtactattattaaccgaagtgtttttaagcctttaagttattataactactttgtaacatactttaaaaattcttctccagtaaagataatccatactgcttactg

SEQ ID NO: 763399 - DNA, 561 bp, Homo sapiens
aggcagacccaggacttgaaccaggttcacagatctgcattctaagatgttaaactgtggccatttctggatggcatgattacaagtgaaatttttaaaatattttttatttttatgtattgctaaaactttctacaatgaacatgtacttttcttttttttttttttgagttggagtttcgctcgtttcccaggctggagtgcaatggcgcgatcttggctcactgcracctctgcctccagggttcaagcgattttcctgtctcagcctcccaagtagctgggattacaggcgcatgccaccatgcccggctaatttttgtatttttagtagagacggggtttcatcatattggtcaggctgctcttgaactcctgacctcaggtgatctgcctgccttggcctcttaaagtgctgggattacaggtgtgagccacagcgccaggcctaacatgtactattattaaccgaagtgtttttaagcctttaagttattataactactttgtaacatactttaaaaattcttctccagtaaagataatccatactgcttactg

SEQ ID NO: 763400 - DNA, 561 bp, Homo sapiens
aggcagacccaggacttgaaccaggttcacagatctgcattctaagatgttaaactgtggccatttctggatggcatgattacaagtgaaatttttaaaatattttttatttttatgtattgctaaaactttctacaatgaacatgtacttttcttttttttttttttgagttggagtttcgctcgtttcccaggctggagtgcaatggcgcgatcttggctcactgcgacctctgcctccagggttcaagcgattttcctgtctcagcctcccaagtagctgggattacaggcgcatgccaccatgcccggctaatttttgtatttttagtagagacggggtttcatcatattgrtcaggctgctcttgaactcctgacctcaggtgatctgcctgccttggcctcttaaagtgctgggattacaggtgtgagccacagcgccaggcctaacatgtactattattaaccgaagtgtttttaagcctttaagttattataactactttgtaacatactttaaaaattcttctccagtaaagataatccatactgcttactg

SEQ ID NO: 763401 - DNA, 628 bp, Homo sapiens
atcttggctcactgcgacctctgcctccagggttcaagcgattttcctgtctcagcctcccaagtagctgggattacaggcgcatgccaccatgcccggctaatttttgtatttttagtagagacggggtttcatcatattggtcaggctgctcttgaactcctgacctcaggtgatctgcctgccttggcctcttaaagtgctgggattacaggtgtgagccacagcgccaggcctaacatgtactattattaaccgaagtgtttttaagcctttaagttattataactactttgtaacatactttaaaaattcttctccagtaaagataatccatactgcttactgagcctagtaratgccacaagcttagtttgtcattttaatctacaaagtaaaaaatgggaagctgaggctctgagtaggtgagttgtattcccaaaatgacaagtgtgggaggcaggatttcaactcagagcactctggccctggaattacttattcttagcatgacaccagataccaccacatctgaccaaatgctctacagccattttaacgtctctgaagtccctgtccaatgttggtcaggtgtgcacacgtttagcatagctgaagtcactgcgtc

SEQ ID NO: 763402 - DNA, 551 bp, Homo sapiens
ttgcttggattctgtttttaccaacattataatatcacattagaaacattagtcacactttatggaggcatttatggataaaatatagatatattattctaatttatatagacatttatagctaaaaacaaaaaaatgctcagttactaaagaagcccaacgcagagctgcataacttaaatttgcattataattttcaataaacatgaatttttgcataggaatagactttgaatcagtagcaattatattttatttttgcatatttgtctgagaaatagcataataaacttagatcttaaaatttcyatgaataaaaactcaagcttgtatgttatagcagaatagtaataatcatctcaatgacaacaaaaaaagaatttgggatctagcaataaacttactacaatgagcttgctgcatttagagaaatacttctgagattcaggggttcccatttttgttgaagcactaaatatttgaaaaaaaaagataccattatccttcttaccatctacagatttgtgtatatgattgttaatagaatgtat

SEQ ID NO: 763403 - DNA, 638 bp, Homo sapiens
gttattggttgcaatcagcagtaattgcaggaaactttaagtgggttaataaaatttcttacaaatttgccaatttgcattctctaatgttaaaatctaaatttatgtatttttttaagtttttgattccaaatatgaaagttaagctccgcaaaagccaattttagaattttaaaaatttggatacaaatgtaatatgctagttactgayctatcaaaaattagatgcacaaacacaagctgacacacaaaaacataggacttaggtattcacagagatataaaattgaaaatgtttcaaatatatttaacatgttttttaaccctaaatttctaccctcaatataataactttatatcaccacaaatagtccaaacccacaaccttaaatgattttaaagtggtgttgtggggcagtgttcaagaattgtgaattacctgaaatgtattgacattaaaacaggttagcctgctactgtttcatggaggtcccagaaaacaagaaactactggatcagagaaaaagaacgcttttactcatggcaaagcaggaagcaggaactgtatgtttacatcagttccctttgccaggcccccaagtcccatggggcaatgtagaggagggcccagttatgca

SEQ ID NO: 763404 - DNA, 603 bp, Homo sapiens
ataacaatttatatacaaaaggatgtggatgcaaattctctaacattagaagatagactataataaagccatgaaaattctgaaaaaccacatcaaccgaaaaattctgtaattcagcaaagtaagaggagagggcacagaggaaggaattttcaaaatgagaagaagagctaaaaaaatttacctaccttacacctcatttcaagaagctactagaacatatgtttcccaaatatgacaaattaaattaaaaaagaaaatacactggatccagcagtgtgtttgccataaatgagtggtaaagagaaatctagtagagagtgaaaagccctcagcacaatgattctgtagcaggcttggaactcagtctatccagactgaactaagagaaccaagaggactcagaagasaggtcttgatgaaaatttaattaagtgatttcataaaatgtttgagaaagtggtaagttatataaaagtgagatcacatctcttttggtaagtttggaaaattatgtgatacatatatctggaaatacacaatcttttaaggcaattattatccataggaagagcagaaaggaaatgtaatcatggtaaaaga

SEQ ID NO: 763405 - DNA, 637 bp, Homo sapiens
accatatgattatctcaatagatgcagaaaagggatttgatcaaattcaacatcgctttatgataaaaaatatctcaataaattaggcataaaaggaaagtaactcaaaacaataaagaccatatatgacaaacccacagctaaaatcatactgaataaaaaaaaaactggaagwttttcctctaagagccagaacaagacaaaaatgcccactctcaccactcttatttaatatagtatgggaagtcctagccagagcaattaggcaagagaaggaaataaatggcatccaaattgtaaaaaagaaagtcaaattgttcctatatgcagatgacaggatcttataaatatataaacctaaacaccctaccaacatactcttagaatgaataagtgaattccataaagttgtaggatacaaaatcaacatacaaaatcagtagcatttctacacatgaacaatgaactagctgaaaaagaaatttaaaaggcaatgctattaacaataaatataaaatacctaggaacaaatttaactaaggaggtaaaggaccactagaaggaaaattataaaacattgaagagcatataaataaatggaaagatatactatgcttatggatcagaagaagtaata

SEQ ID NO: 763406 - DNA, 547 bp, Homo sapiens
aataaatataaaatacctaggaacaaatttaactaaggaggtaaaggaccactagaaggaaaattataaaacattgaagagcatataaataaatggaaagatatactatgcttatggatcagaagaagtaatatttaaacgaccatactacccaaagcattctacaggtttagtataatccctgtcaaaataccaatgacatttttcacagaaataggaaaaatcctgaaattcatwtggaactgcaaaagatgccaaataaccaaaacaatgctgagcaaaaagaacaaatctggaggccctaccaaactcaaaatatactacaaatctatagtaaccaaaaaagcatgatactggcacaaaaacagagacatagaccaatggaacagaatagagatctcagaaataatttgcttatccactaaggcactgattttggggaaaagcgccaagaacactcattggggaaaggaatgtctcttcaataaatggttctaggaaatgtaaatatccatatgcagaagaatgaaactatactcccacctct

SEQ ID NO: 763407 - DNA, 643 bp, Homo sapiens
atggttttgaaggttccttttggatttgatttccagttttattccactgtgggctgagagagtgcttgatataatttcacttttcttaaattctttgaggcttgttttgtggcctatcatatggtctaacttagagaaagttccatgagctgatgaatagaatgtatattctgtggttgttgggtagaatgttctgtaaatatctgttaagtccatttgttccagggtatagtttaaatccattgtttctttgttgactttctgttttgatgacctgtctagtactgtcagtggagtactgaagtcccccactactattgtgttgccatctatstcatttcttaggtctattagtaattgttttataaatttgggagctccagtgttaggtgcatacatatttaagactgtgatattttcctgttggacaaggccttttatcattatgtaatgtccttctttgtctttttaatggctgttgctttaaagtttgttttgtctgatataaagatagctactcctgcttgcttttggtgtccattgcatggaatgtcttttccacgcctttaccttaagtttatgtgagtctttatgggttagttgagtctcttgaaggtagcaaatagttagttggtgaattctt

SEQ ID NO: 763408 - DNA, 674 bp, Homo sapiens
aatcaccaacagttatgtcagctgttttgatgttagccattctaaccgagtttagctcgttatagtttgtagttccttaaagagtaacaatattgagtatttttaatgtactttcttttgcccttagtgtatcttcattgctgaagtttctatccaactatgttgcccatttaaacaaattgggatgtttgtcatcttattactgaattataagaattcactgtaaattctggatacaagtccttcgtcagttatatatattgaaatttttttatcagtccrtagcttttcatcttgcaactcttttgaacagcaaaatttttcaattttgatgaagttcaattatcaatgttttcttttattgattttgcttttggtggtataactaagaaatatttgcttaaccccagttcagaaatatttttctcctaagttttcttatacaaattctatagtttctgttcttacatttaagtctatgattcacttaaagttaatttttgtgcacagcatgatttaagagtcaaatcttaatttttgtatatgaatatccaatttgttgaagactgtccattctccattaaagtaccttggcatctttgtcaaatgaattgatcataaatgtgtgtttatttctagacactctaatctgttccattgatctacatgtttat

SEQ ID NO: 763409 - DNA, 633 bp, Homo sapiens
caaaattctcaaccaagaatactctacctggcaaagctgtctgtcaaaaatggagagacaaagactctgctaaacaaacaaagttaagggagttcatcatcattagaccagccttgcaataaatgctaaagtgagttcttcaagttaaaatgaaaggatgcaatacaacaacacaatggcataagaaaatataaaacacatttgtcaaggtaaatatacagacaaatacagaatgctgtattattgtaataatggtaaatcacttttaattctactataaaagttaaaacacagaagtattaaaagtaactatagcctaaaaatattaaaagagacaatataaagagatacaaattgtggcaccagtragataaaatgtgagggataagtgtaggtatagttttaataagcaattgaacgtaagttgttcacagtttaaattagacagttataagaaattttatgtaagccccatgtcaaccataaagaaaatacctatggaagtaacacaaaagaaaaagagaaagaaagcaaagcttatcagttttaaaaataaatgaaacacaaagacagtaagagagaaaaagatagacaaaataactacaaggcagacagcaatgaacaaaaaggcca

SEQ ID NO: 763410 - DNA, 554 bp, Homo sapiens
gagtttatttccaggctgccaatgagcagggctgagaacttgccccaggctataagcctccccactgagaaagcaagcagggctttcaggtttcctgcctccttgcctgccacagcttctgtcttgtgtctgcactcctggttcatccctcctccgggttctgtcccagaaactttttttttttttttttttttttgagacggagtctcgctctgtcgcccaggctggagtgcagtggcgcgatctcggctcactgcaagctccgcctcccaggttcacgccattctcctgcctcagcctcccgagtagctgggactacaggcgcccgctaccacgcccggctaattttttgtatttttagtagagacggggtttcaccgtgttagccaggatggkctcgatctcctgacctcgtgatccgcccacctcggcctgtcccagaaactttgcgttaggttgaagttgttacaaagttcagctggaagttttcttctccctgtggccttttctcaattctactggcagccctccccaaggatccctgtgagacaaag

SEQ ID NO: 763411 - DNA, 620 bp, Homo sapiens
tgctcgatggctacccactggatgctgtcatggtgctggtgcttgtgcctgccattaagggacctgtaggcagacttgcccagtccagccctgagcattgtggcccctgcctccctggggctgagtggggagatcagaacactgtgcactgcatgagtcagcagcccattgcctgaggcaacagagagcttcctccagtaaacaaagatcaagtatatactgagatgcattggctacagctggctcttacctgtaagrtacatctaccagcttgtaacttgaactgcacacctcaatataaaatctgctgacagaagtgcatagggctatagaagcaaagccaaaagaccctacccagcattctctacagtcaaacacacatccccagtgggagggggaagagaaagggaaaaaaatacaaaaatattatagggaaagaaaggaaatgaaaaaattctacctcaaaaaataattagatcaattacaaatcctagtgttacctaattagaaaggaaccagtgcaagaattctggcaccatgaaaaacttgaatatagtgacatcaccgaaggatcacagtagctctctagcaatagtccccagccaaaatggaaactcaga

SEQ ID NO: 763412 - DNA, 645 bp, Homo sapiens
aagaacctaaagtatatactgggatgccttccagaaaatgaaagtggagtcctttccacatatatatggtttatggtattaagaaatgctatctctgagcccagtccttgaacacagattctgggaactagaaccatggatgtaatctacaagacattcaataaagatctgtaatgtgctcatcaatagaacactgtgactgcagattggtaagtctctctggccattgccctgaagccttaagaaagggaccgaactgatatttgaggagactgagattttaagtagaacaaagtcaaatgaaatacaggaaaaaaaatagtaaaaggaaaaagacaaacaaaatctacagctttctaggggactaggacccgcagaaaaatcttctcgtgtcaaagactggcttgtgkggctgagcagatggcttagagttctgtctgaggaaaatcaaggtccagagacaaaatgaaccctctctcctctctttttagctcatgcaataaggatgtttattgtttaaaaataatctactgcaaatttactgcgtatttctgctggcaggcaaagattagaagagcagggcaggcgggcatcagcaaacatttctaattttaaaaccactttagttagacatacactgctgca

SEQ ID NO: 763413 - DNA, 561 bp, Homo sapiens
tttttcctggaaattcgtggaatattcagaaagcagaatagcactcatagtacatgctaatattaatgggctttataaacatacaatcaaatgattaaaagttgttttattacatcatcactaagaatgccagattaacctcaaactccaagaacccttcttcttactcatggaaattcctcctttattttgttctaggtttggatgaaatactgagttacaatggcttcttcagtttagctctctgagctctacttgctgaytttgtattttgtagatttaatcctagtaactgctgttagtataagttgcttagccttagtgatcatcatacgtaactagttggccagaaaaatgaacgagcaaaaaaccaaaacaggatacaacaaacagaatacgctcttatatccacagcaatggaatagaaacacttttctgtttcagacaaaaagctatctaccaaaatcctttctccctctgcataatacagaattgtagcttgaggttgaatagttaggcaagagctaaattcctcagtttcctttcagttatgggtgatca

SEQ ID NO: 763414 - DNA, 535 bp, Homo sapiens
caatgttccaatttaatctggggttcacacatgttcacatgaaaagttatggcatctcattctttctcaatcaatgccctcactttaaccgtagacaccctatgaagctgggagttcaacttgcattgtaatttagtcaattggcagatgaaattctgtgtttcattgtcagctgtttcagctttgtggctacaggaaataagaagctccttcagggcatatttagatgccttcaggtcatttatacagtgcttgagtttagaatttaaatccctgaacttatccttttyttttggcacttcatccagagctattataagcaaaaagccactcccgttgtattcattagtttttcaaaaatatttgaaaatataatatacagagccacttagctccttgcttcttataagtggctaactaggattatttaatggacatattttgtataattctatcactagattacactatggactatcagcactctccttatgaaaaatagactcattagaatctttattttacttcttttttt

SEQ ID NO: 763415 - DNA, 587 bp, Homo sapiens
agttttttgctctgataagattgttactatatctataaaattatatcataagaggcagttttaaataaaaaatgattgaataaatcctgatagctgaaattgtataagaatagtaattattgttattattaataagttcctttgaggaattattacttaaataatacagcaaacatgtaatgatacattctgaatacatcaataatgaagttttttagactacatgctttacagaaactttgaacargattttcaacctcaatttgcttcatataggagagaaaactctgtaactccttaaaagtacatctaaaaaagggattttctccactttcctcacacgtgcacgcatgtgtgtgtgtgtctgtcacctgtgtgaaagatgacagaagcagatagagctaaaagaattttctaaaaataaaatgcactgcagaaaagctctgagatctcacagagagtgccaaaatatcagtgcatcagtagccaaggggataaaaagggtataaaaattccatttccttaaactccacactttcctggaacaatgtaaagaagagagccgtgctgccaaataagaccttaac

SEQ ID NO: 763416 - DNA, 710 bp, Homo sapiens
tccattgggtcaagggtccaatacccccccagtaaacttacttgagcaaagcagcttgaggggtctagtggaagaagtttagtttttgtattgacggggacctttttttttgtctctcatcagggatggttaggacattctcaatgtcaatagcctttttgcttatggtaggcaaactgattctggcccaggggctggtgagccaggggctcttctctaggcatcccagatgttgatcttgcaatactttattgggatgagaaacactgagaggcaggggactgaaagcattttctaataattgcaattttgagctatttgttttattttttctacttcttttgccctgtttccattgttgtaaagtttaaagaccacattaagagttggctcatagggctttgtgtccccattgctgttttgtgtagcttcctcctaatgtcagggtagattractaataaaatatatgtccaggagagcctgcccttctaggaagtctgggtctgcaatcgtatatttcctgagcgcctcaaccaatacatgtcccaaatacatatggcttaaccatacatgtctttctccactttttttctatggcacagaaaacaggagacaatatttacaagtcatgacctaaattaaacagcatattcaacttaacaaattcctctataaacttttatggatccactgaaaaatggccatctgt

SEQ ID NO: 763417 - DNA, 634 bp, Homo sapiens
gaaggtaattttatgtgtaggtagttgttcaaattgatgcctatgtgaggagatgagggccaccttgctaacatcactccactccatattcacttttgaaatattttattgtcactttggctaaatggataactaagtattgtttcacattgatctgtgattccatttaattaagtattcaaattttttaatattttgccttccgaaaattaaatcataaatgtaatcttaaacttgaactgactttgaaatttcccatagggctctggaaaatctcaaaggatttcttctttgacttcataaaaatagagattaaaaaaaattaggtctgtttgatatgctcaagtgcataaaaagtattgtcacataagaaaaaaatgtgaccttccctagactgtatttgtataggtaaatasgaaaatattcttcatataaatttttcataaattttatgaagtatatagaattttgtcatttttggctgccccataatatgtcctggtataatgtgatcagtcataattccagttactatttaaaatgttttatgccatggaataaccgaattttctcattaaatgacctctcactagctcttaaatcacaatcattttaagtcttttgtcatccacag

SEQ ID NO: 763418 - DNA, 659 bp, Homo sapiens
aatggattttatccaaaagacaggcaataacaaatgctggggaggatgtagagaaaagggaattgtacactgttggagggaatgtaaattagaacagccactatggacaacagtatggaggtgcctccataaactaaaaataaaactaccatatgatccagcaatcccattgctaggtatataactgaatgaaaggaaatcagtatatcagagaggtatttgcacttgcatttttattcactgttcagaatagctaacagatgagtagattttaaaaatgttgtgcatatgcacaatggartattatttacccacaaaaacaaatgaaatcctgtcatttgcaacaacatggatagaactagagggcattatgttaagtaaaataagccaggctcagaaggacaaattttgcatgttctcactctaattgggagctaaaaatcaaagcaattgaattcatgaagatagagagtagaatggtgtttcccagagactgagagggtagtaaggagtttggaggaaagtagcaatagttaatgggtgcaaaaatatcatttaaaatgtgaataagatttagtatttgatacacaacgaggtgactacaatcaacagtaatttattgtataattaaaaataagagaatggaattggaatgttcc

SEQ ID NO: 763419 - DNA, 659 bp, Homo sapiens
aatggattttatccaaaagacaggcaataacaaatgctggggaggatgtagagaaaagggaattgtacactgttggagggaatgtaaattagaacagccactatggacaacagtatggaggtgcctccataaactaaaaataaaactaccatatgatccagcaatcccattgctaggtatataactgaatgaaaggaaatcagtatatcagagaggtatttgcacttgcatttttattcactgttcagaatagctaacagatgagtagattttaaaaatgttgtgcatatgcacaatggagtattatttacccacaaaaacaaatgaaatcctgtcatttgyaacaacatggatagaactagagggcattatgttaagtaaaataagccaggctcagaaggacaaattttgcatgttctcactctaattgggagctaaaaatcaaagcaattgaattcatgaagatagagagtagaatggtgtttcccagagactgagagggtagtaaggagtttggaggaaagtagcaatagttaatgggtgcaaaaatatcatttaaaatgtgaataagatttagtatttgatacacaacgaggtgactacaatcaacagtaatttattgtataattaaaaataagagaatggaattggaatgttcc

SEQ ID NO: 763420 - DNA, 659 bp, Homo sapiens
aatggattttatccaaaagacaggcaataacaaatgctggggaggatgtagagaaaagggaattgtacactgttggagggaatgtaaattagaacagccactatggacaacagtatggaggtgcctccataaactaaaaataaaactaccatatgatccagcaatcccattgctaggtatataactgaatgaaaggaaatcagtatatcagagaggtatttgcacttgcatttttattcactgttcagaatagctaacagatgagtagattttaaaaatgttgtgcatatgcacaatggagtattatttacccacaaaaacaaatgaaatcctgtcatttgcaacaacatggatagaactagagggcattatgttaagtaaaataagccaggctcagaaggacaaattttgcatgttctcactctaattgggagctaaaaatcaaagcaattgaattcatgaagatagagagtagaatggtgkttcccagagactgagagggtagtaaggagtttggaggaaagtagcaatagttaatgggtgcaaaaatatcatttaaaatgtgaataagatttagtatttgatacacaacgaggtgactacaatcaacagtaatttattgtataattaaaaataagagaatggaattggaatgttcc

SEQ ID NO: 763421 - DNA, 549 bp, Homo sapiens
tgggccccagtgctggggggccagctccgtgtgtggctcttgctaatgggacttcaacctgtgaatggtctggagcatccaggaatgcacagtagaccagctggcaggcttggcaggttcatcatgctggcaaatggagggttgagacrgtaattagtctcaacacagggaaccccatggcaagaaaatgagaaaggccatcagctttgccagtggagaaattatgccccgcagagaaagctctcccttctgcagtcttcctccatctgtgactcagcacccctgcctacaactaaacctgttcacctgtgctttgtccaaaacagccattgctacgttactccatggtggagcagccggccaaacgcagccaccctgggcaaaggcacctactctcagctccacctctggccagctgtgcaatcttggagaaattacagtttttagtcctgggcctggagcagagtaggcactcaacagatgcggctattaacaataataatattattatactcattggtgcacacaacttgtaagacagacagtagt

SEQ ID NO: 763422 - DNA, 655 bp, Homo sapiens
gtgatggcatttgttaaagaaatgaatctgtccaccagtagcatacaccttttcacttgtagtgtagcagtcttcctgttccttagctcaactgggtctgagttcttgtctcacaaccaggaagaatgaggcaaacagctaccagagagtgagtggagtagaattcattaagcgaaaaaaaaattctcaggagagaggggatgtgrggggtggtttccctccccaaagggaggaaagtcccccgtgtggctgggtccagggcctttcatggactcagaacagggagtgtgtgctgattggtttgtgagtatgtgaaaaaggctaaagtgaagacaccgctcaaaggtgagcacaacagtgtagaaaaccaattaagaaagggtaggtatacgtaaaataggtgaagggtggggatcagtcagaggaaagtggaccaaataggaaggcaaattctcaatttagtccaaggatttaagttgtagcttggctttcaggctttaaactgtcttcagcttggaggtggtatttcaccagggaccctcccttatctgcctaggcatttagctgtctcctgtcactatcagtaacatatggccctttgggttaaagtcctgctcatagacctaacaggtcccacactgctacaatcatttct

SEQ ID NO: 763423 - DNA, 571 bp, Homo sapiens
ttatgacaccatatacttaaatatatgttcatacatatatgcaagaaacctaagcacaacaaataaaaaatgatgcaagagaataagataagattttgtgtattgggaaataacagaagcgggtgaaaacaagatgagtgtaaaagaatgcagtatgttaatgggatggaagagaatgagggtagtgcagttggggtaaawggtttgccaaatagagaaggtgatgactggggagatgactttgtgggagacttgaacaggaaggaagggtctacaaaagtagtttaaagaaagagtattttgtagatgtaaggatggatgcttaacagccacacaaagtagacctaatagtacaggcatcatttcatatgagttagaagaaatgaacacaagttttttcctgcataaaattaaaaccaggccaagcacgacggctcacgcctgtaatcccagcatttggggaagccgagaagggcagattacctgcggtcaggagtttgagaccagcctgaccaacatggtgaaaccctgcctctactaaaaatataaaaataagccaggaatggtggcc

SEQ ID NO: 763424 - DNA, 624 bp, Homo sapiens
ctaagagagagggctccttcttctcccaccagggagttgtggtgcagtagaaaaagcagaatagacaaacctgttcttctgattattagtggtttgactctgaacaagctgcaaagtcagtttttgagcctcagtttcctcatctgtaaaatgagcatattctcccctacagagcactgctgtctgaacattaaacgaagtaggattcattaagctgctaacagaagttcaacaattcatctacatacaaactgagaacatttgtgagtgtttgttatttacatggtaatttgctaagaaccgtacaagcctggagggtctatcagtcttcctaacacttctgcaaagtagattgtagcagacagatcagatgttctgcttcacatctggagaacaaaggagacaagatgcttgtcttctgatttcagccatggttgcaggggatagttccttgcaggcttccattgcaagctgacagtgwagcctcttccctgggatcctctgatgccacaaacagtgggggagcttactctgtctcagcacatgtggagctcagaagtgcagagggcaacttgacaatggggaatggagccaggggataaatatcccaggagccaggcgcag

SEQ ID NO: 763425 - DNA, 597 bp, Homo sapiens
gcagcttttccaggcacacagtgcaagctgtcagtgaatccaccattctggggtctggaggatggtggccctcttctcaaagctccactaggtggcgctgcagtagggactctatgtgggggctccgacccccacatttcccttctgcactgccctagtagagtttctccatgagtgccctgcccctgcagcaaactcctgcctgggtatctaggaatttccatacaccttctgaaatctaggcagcagttcccaaacctcaatttttgacttctgtgcacccacaggctcaacactatgtggaagctgctaaggcttggggcttgcaccctctgaagccacagcccaagttgtaccttggctccttttagctgcagctggagtggctaggactcaggcaccctaggctgctcacaacaggggtccctgggkccagcccacaaaaccatcttttcttcctaggcctctggacctttgatggaaggggctgccatgaagacctgtgacatgccctggagacattttccccattgtcttggggattcacatttgactcctcgttacttaaacaaacttctgcagccagatcgaattttt

SEQ ID NO: 763426 - DNA, 620 bp, Homo sapiens
ttgggtccctgctgtaccctttatgagcaatgcggtcttggaaaattaatactactccaggggcctcagttttctcatctataaaatggagataaatgagatacactttgataggaaggttatatgggattcaccgagataataagacagtacatggaaaatgctgcgcatagcatttatttattttaatttttttttaagacagagtcttactctgttgcccaggttggagtgcagtggcatgatctccgctcactgcaatctccacctcctgggttcaagtgattctcctgcctcaggctaccgagtaactgggactacaggcgcgcgccatcatgcccatytaatttttgaatttttagtagagacggggcttcaccatgttggccaggatagtccgatctcttgacctcgtgatctgcccgcctcggccttcccaagtgctgggattacaggcatgagccaccgtgcctggccaaacataaacttactttcttacctcttctgctgaactctatttgcttcttttcccatacgtctttatccagaagagcttttagcaacaaagttacccaatgcccttccctagtctctccttgcaactggctctcagcaggggg

SEQ ID NO: 763427 - DNA, 611 bp, Homo sapiens
atgagcagctggaagaatggagagttcgggggatgtagttcctacctggctttccaacagtgtgtaagcccagaattcttacataagcccatggagaagggaaaggaatactggtaacgacaagattgaattctccacctgccaggcatccagagactcagagcagatttaagtgaagttacagaaataggaatgtgacatttcctacatccgggtgtgctggagcaaatatattccttctctggtttgtggggaaggagaatgctaacagacaagactccaggattttgctcttaaacctggtgcctacagatgcattttctactggatgcagacagaagctccatatagacatatccatcrctgcatctctcatgccttctgttctccctaattttccctttttcacccacagaggaagaaagttccagcatcacttctggcctctcaagagtgagttaggtggccaggtggggttattcatgcctgtaatctcatactgaaggggtggcctgcccctccacacctgtgggtatttcttgtcgggtgggatgagagacagaaaagaaatcagacacagagacaaagtatagagaaacaacagcgggccc

SEQ ID NO: 763428 - DNA, 528 bp, Homo sapiens
gaaacagaggaaagaagtggggcttctaatagttcctgcaccagtggcctttgagatgaaaccttcttgccaaggtctggggctgtgctgtgtgttctagacccgagactggaagctaggcctggctacagtcctagctgagctggggaattgcaggacagcatcctgcttcattaggacacctccaagcccagcttagacgtggattccaggtgaccccctgtttactttgagcccagacagaggacagaaaagtgtgcaagggtttggaccctcatcacagccgttgactctgtaaggcatatgggtttgtgcacgtgtgtgagcacggccgtgttttttctgtgagtttcaagstcgaggttgtgtttatgcagggttaggcttgccaggtaaaatacaggaggtccaattaaacctgaattttctcattaaccttttttttttttttttttttttttggtgcaaatatatcccatgcaatatttgggacctgcttactctaaaaaatgatttgttgtttatctg

SEQ ID NO: 763429 - DNA, 502 bp, Homo sapiens
cagcggcggagagggagcagccagttggtgtgtctcagaaaatcccgctgagttccgaggcctcctagatgtggaatcctgctgagagttgttcccaggtcagagaatggagagagcctgtgcatgatgggatatccccgcctagatctttcagtgagtctctgcctcagctactcttaggatyagggggagaaccatggtgtcagacatccggaaagaagacgggatgaatgttttacctctgaagtacatcccaaatgtgggagttaacttcagctttgctggggtctatttggccagtgaaactctgcctggttccttcgcacatccggaagccacttcacggggggccgtcgcaactggaaccacacacttggcatcggcggttgagccaaatggggactcgtggtgcaagcaacgctccccacgtgttagcgtgcgtgagatgcggttggcggaattttactaggtgcgtgttggtagagtggggctgaggttttct

SEQ ID NO: 763430 - DNA, 622 bp, Homo sapiens
ttcctcccgcagacgggaagctgaaaggaaatcaaccagggtgacctagaggagaaaaagaccaggggcccggggtgacactcgccctcagataatcagaagattccgtggatccttttccattcggcagcggcttctctggaggtttcccggaaaacatgtggaggagagccttcctctgcgggtcttgttgcctgcagaacagaagaaggtcaggccgtgccccctggttttccccaggagacagggagaaccccgtctggggcccagccccattccgtgtyttgtgatacagaaatggacatctggtgccctttccgcctctgcaccttccctcacgtgcgaaccttcccatcctccaggtggccctctaggcttcccaactaaggactgtgatttggattccatcgcttttcccgctgtcgtggggaacctgcacgaagcgcccccgcctctccccgtccctgaatctcccagagcccaaggagctcctgggtgtggaaccccggaggacacggagctccggcctatttctctgcagcgttccttccctggcccggagacggaaaggcacacggtgtgcaggtgcagagacaccatgtccttgggaggccgtacccta

SEQ ID NO: 763431 - DNA, 600 bp, Homo sapiens
cccagccccattccgtgttttgtgatacagaaatggacatctggtgccctttccgcctctgcaccttccctcacgtgcgaaccttcccatcctccaggtggccctctaggcttcccaactaaggactgtgatttggattccatcgcttttcccgctgtcgtggggaacctgcacgaagcgcccccgcctctccccgtccctgaatctcccagagcccaaggagctcctgggtgtggaaccccggaggacacggagctccggcctatttctctgcagcgttccttccctggcccggagacggaaaggcacacggtgtgcaggtgcagagacaccatgtccttgggaggcmgtaccctaagagtggtgaaaacccctcccactgctcaccttggtctctcttccttctctcccttatccttgttcaagggccccgggttggcttcaccccggggcttccatggtttcaggttttccttcccttcctttttccccaaggtcgctggaaccagggctgccttccagcacttcatggggcacctggtacttctggccgtgtggccaaaggccccgcagtttttgcacttgagctgcgggtggaaa

SEQ ID NO: 763432 - DNA, 442 bp, Homo sapiens
ttttaacactcaacttctttcttgttttttccacttgtcaactcatgaacacctcaaccttgttacatccaaagccaaactcatggcttggagtggtaggtgatggctgtaatcccagtgctatgggaggcagaggtgggaggattacttgaggccaggagttggaagccagcctggaaaacasagtgagactccctatctacaaaaaaaaaaaaaaaaaaaaaaaaaaaaagctagcatggtgatgtgcatctgtaggatctgtagtcctgctacatggcacgctgaggcaggaggatcacttgaccccaggagtttgaggctgcaaagagttatgattgcaccaatgcactccagcctgggtgacacagccagagaccctgtcttaaaaaaaaaaaaaaccaaagccaaactctctttttcctcctccttctccatgggc

SEQ ID NO: 763433 - DNA, 524 bp, Homo sapiens
acatttgtgctggtatgggcccatgatcatacctgtggctctatgctcagatgagagagtcaacatctctgtaatggctgggtccagatatgagagttgacacctgcctataagctaggctaatgagtcaccacctcatgttgcctgatgttcacatatgacagtcacaattttaactctgcactgcatccacatgtaaaatttaagacctcaccagtaggctctgtccatggatgagggtgacaatcttaacaattggcaaactgtgcaaatataaaacaatctcgttttctggaccctgttatgacactttctggagcactggagggctytatacaatatgggagagactgtaattttctttaaccttcctacaaaggggagagccagaatcttacccattttcctaagcccacatatgagagatagtatgtctcctattggctgatttcagatatgagagtcaacattgcaccaatgatctgaacaaagatatatgtcacaatctcccctgtggataggga

SEQ ID NO: 763434 - DNA, 606 bp, Homo sapiens
ctgtgttcatgtgggaaaatgacaatgtatactgtgtgtgggtgtgcatacaactgtcacaattttccctgtgagctgggccctgttagtacactctctatactacccaaaggctttatacagtgtcaatgagaatcacaattcagtctgagatcttcatctttgtttccccaagggagaatctttyccccccccaccaagatggagtcttgctctgttgcccaggctggtgtgcagtggcacgatctcagctcactgcaacctctgcctcctgggttgaagcaattttcctgcctcagcttcccgagtagatgggattacaggcatccaccaccatgcccagctaatttttgtatttttagtagagatggggtttcaccatgttggccaggatgtcttgaactcctgacctcatgatctgcccgccttggcctctcaaagtgctggggttaagtcgtgagccaccgtgtctggccagatcttcatctttgtatgcaaccacaaccatacctatggccctatgcccagatattagagtcaacatctctccaattggctgggtccagatagtagagtcctcactgcttatgttctgggtttagaact

SEQ ID NO: 763435 - DNA, 606 bp, Homo sapiens
ctgtgttcatgtgggaaaatgacaatgtatactgtgtgtgggtgtgcatacaactgtcacaattttccctgtgagctgggccctgttagtacactctctatactacccaaaggctttatacagtgtcaatgagaatcacaattcagtctgagatcttcatctttgtttccccaagggagaatcttttycccccccaccaagatggagtcttgctctgttgcccaggctggtgtgcagtggcacgatctcagctcactgcaacctctgcctcctgggttgaagcaattttcctgcctcagcttcccgagtagatgggattacaggcatccaccaccatgcccagctaatttttgtatttttagtagagatggggtttcaccatgttggccaggatgtcttgaactcctgacctcatgatctgcccgccttggcctctcaaagtgctggggttaagtcgtgagccaccgtgtctggccagatcttcatctttgtatgcaaccacaaccatacctatggccctatgcccagatattagagtcaacatctctccaattggctgggtccagatagtagagtcctcactgcttatgttctgggtttagaact

SEQ ID NO: 763436 - DNA, 606 bp, Homo sapiens
ctgtgttcatgtgggaaaatgacaatgtatactgtgtgtgggtgtgcatacaactgtcacaattttccctgtgagctgggccctgttagtacactctctatactacccaaaggctttatacagtgtcaatgagaatcacaattcagtctgagatcttcatctttgtttccccaagggagaatcttttccccccccrccaagatggagtcttgctctgttgcccaggctggtgtgcagtggcacgatctcagctcactgcaacctctgcctcctgggttgaagcaattttcctgcctcagcttcccgagtagatgggattacaggcatccaccaccatgcccagctaatttttgtatttttagtagagatggggtttcaccatgttggccaggatgtcttgaactcctgacctcatgatctgcccgccttggcctctcaaagtgctggggttaagtcgtgagccaccgtgtctggccagatcttcatctttgtatgcaaccacaaccatacctatggccctatgcccagatattagagtcaacatctctccaattggctgggtccagatagtagagtcctcactgcttatgttctgggtttagaact

SEQ ID NO: 763437 - DNA, 606 bp, Homo sapiens
ctgtgttcatgtgggaaaatgacaatgtatactgtgtgtgggtgtgcatacaactgtcacaattttccctgtgagctgggccctgttagtacactctctatactacccaaaggctttatacagtgtcaatgagaatcacaattcagtctgagatcttcatctttgtttccccaagggagaatcttttccccccccaccaagatggagtcttgctctgttgcccaggctggtgtgcagtggcacgatctcagctcactgcaacctctgcctcctgggttgaagcaattttcctgcctcagcttccygagtagatgggattacaggcatccaccaccatgcccagctaatttttgtatttttagtagagatggggtttcaccatgttggccaggatgtcttgaactcctgacctcatgatctgcccgccttggcctctcaaagtgctggggttaagtcgtgagccaccgtgtctggccagatcttcatctttgtatgcaaccacaaccatacctatggccctatgcccagatattagagtcaacatctctccaattggctgggtccagatagtagagtcctcactgcttatgttctgggtttagaact

SEQ ID NO: 763438 - DNA, 585 bp, Homo sapiens
cgtcccctatggaaaagcccatgtaaaagtggagagtaacatcaaatagatgatgggtccaggaatgtggcaaaatgtctcctgtagccagggtctaggtaggagattcacatcacatgggtgttagacccagcaatatgttacaacagcccatgtgggcagggcacataaatgacaaacacattacctgggtgcagagaccagtgatatgtcacaatgccctctttggcagcaccaaggcatgagtacagggtcacatcatccacatacttkttccaacaatatgtcccaatcccatctgtgcactggccccaggcaggagagtcaaatcactcaggctatgtgcagagacatgtttgacaatcacacatgcagaaaggctcagggataacatgaataatttttcacatattcccatcctaggtatgagagtcaataccaggccgggcatggtggctcatgcctgtaatcccagcactttgggaggctgaggtgggtggatcacaaggtcaggagttcgagaccatcctggccaacatggtgaaaccctgtctctactaaaaatacaaaaattagctgggcatg

SEQ ID NO: 763439 - DNA, 608 bp, Homo sapiens
agtgtaagagcagctaagggaatgccaggctttagtagccaaagtgcagccctaagaagctggagccacttgcttttttcagtgcaggcacaataccaaaaacctggagccaacacaagctgcaggtaattaacatttattgttcccctttcagggaatgtcacacacgcaaatgatcaaaggtcagttcctgatcaacataagtaaataagcctgtttaagataaattcttccacactcccttgtacctactgcttgctctctgcctcagggttatagaacagctgccttcagctattctcccctggagctctgcaggaccttccaacatttcagaaaatttgcgttctttcyctatcctttttccaccactctgaccaatctcccacatctcccctttttctgtttttttgcatcaggttttgttgattgaagcatacagatctgagcagcgacaggtttgactggtgcaatggttacagtttgtgttccagctttgcaccctagaaccagtaaataacataagacaaacatgagtataatcaatattattcttttccaatcaaggattgatatgtaatgttacttggcacctgagtccaatgtgt

SEQ ID NO: 763440 - DNA, 561 bp, Homo sapiens
aaatcggttgctggagaaacataagcataccctctaccccaagttattattttacctattttccaactttttgttatcagatctctccaccaaaccagttgttctgcttctgtcattgcarctggtttctgtagatgctgttcatctgctgataacatctggcctttgggcaggctcaaaaaatttaaggttaataatgttagattcaattgtatatatgaggtgtcccatagtccctgtttatccccctttttgcttttgcaacagctgtttcaatgagagattcgttcttttcactatggcttgtccttgagaattatatgagataccagtaatgtgtttaatattccatatagagaaaaatgtagcttgagctttgctctagcttggggcattgtgcattttaactgaagctggaatgcccatgactgtgaagcattgcaggagatgccatttaacataggcagaagattcccttatttggcatgtagcccaaataaagtgagaaaatgtatctacacatacatgtacataagccaatttaccaaaagaaggaacatg

SEQ ID NO: 763441 - DNA, 552 bp, Homo sapiens
ctatggcttgtccttgagaattatatgagataccagtaatgtgtttaatattccatatagagaaaaatgtagcttgagctttgctctagcttggggcattgtgcattttaactgaagctggaatgcccatgactgtgaagcattgcaggagatgccatttaacataggcagaagattcccttatttggcatgtagcccaaataaagtgagaaaatgtatctacacatacatgtacataagccaatttaccaaaagaaggaacatgagtgacatccatttgccgaagagaattaggtwccaatcttcaaggattaactcctgtaaaagatgtagaatgcaccatttggcaagttggacattgttgaataatggctttatcctctttccaagtaatactgtacctgtgtttgagaccagagtcattaacatgggttaaattgtgaaagtgtctagcattagatattgcagtagcaactaggcaattagccatctgattccctgcagtcaaaggtcctggaagaggtgtatgagctctaatatgagtaatgtaaa

SEQ ID NO: 763442 - DNA, 552 bp, Homo sapiens
ctatggcttgtccttgagaattatatgagataccagtaatgtgtttaatattccatatagagaaaaatgtagcttgagctttgctctagcttggggcattgtgcattttaactgaagctggaatgcccatgactgtgaagcattgcaggagatgccatttaacataggcagaagattcccttatttggcatgtagcccaaataaagtgagaaaatgtatctacacatacatgtacataagccaatttaccaaaagaaggaacatgagtgacatccatttgccgaagagaattaggttccaatcttcaargattaactcctgtaaaagatgtagaatgcaccatttggcaagttggacattgttgaataatggctttatcctctttccaagtaatactgtacctgtgtttgagaccagagtcattaacatgggttaaattgtgaaagtgtctagcattagatattgcagtagcaactaggcaattagccatctgattccctgcagtcaaaggtcctggaagaggtgtatgagctctaatatgagtaatgtaaa

SEQ ID NO: 763443 - DNA, 645 bp, Homo sapiens
ccatggtgtatatgtactacactttctttatccagtctatcattaataggcatttaggttgattccatgcctttgctattgtgaattgtgctgcaatgcacatatgcatgcatgtgtctttataatagaatgattcacattgctttgggtaaatacccaataatggattgctaggtcaaatggtattttgtctctaggtcttcaaggagttgccacactgtcttccataatggttgaactaatttacactcccatcaacagtgtatacrcgttcctttgtgaaaaaataattttaattttctaaaaggttagctttctaagacaaatggtatgcgaggaaatttccacaggcctaagccatccagctgctcttctgagaggctacactcttcctcctcaggctgtcctctaagagatgacccaggggatgatattcattagacactccaagagatatggccactgtgggcatcttgggttatccctgacggttctgaaaatcatgaacaagaaaagacctgagggctgccacaaagggccctggaatttctccaaagcaaaacttcaaccgaaagacctactaacaaggtgtatgcaccagggaagataaaaggacagtcacagagattttttttctttttaaca

SEQ ID NO: 763444 - DNA, 534 bp, Homo sapiens
ttcccagtcttgcatttagaatccatctcgtggctcgaggaagtgtctgctcatcccatgggagcagaatttatttttggagtgaaagattccataattctttcttaaccagaaacagagaaaaggcactgcctggtgaagcacagagcacacccctttaataaccattctctactctcatcctgcggctgtggtacgcactcctctcttgtattggtgaaggctgttccaggtacatctgactctcggtgcttcttggctgccgcgtacgtgggctgagttccatcacacaagagcaaggaggggagaggcgctggcatgaaggraagaggctgtcagcgtgcccgggacctcaccatcactgctgcacatggacacccaggtggacccaggaggggagccctgggctcagcatgtggctcccttcctgtctatggccactttgctttcccacctggatgtgccgattcacacctcccctggcagtgcacgggactccctgtcgctcgacatccttgccgatacttggtgttt

SEQ ID NO: 763445 - DNA, 629 bp, Homo sapiens
agggtgaccccagggtgtctccccaggaaaacacattggaatgtggtttatggtaacctactcagttgaactgcaatgaatctgagctaatgttgtgttgtcatagcagagggtgggggtccgcaggagtctggaaactgagagccaagcagtgaggctctcagggtgtctccaccgctgcccagagctctgcttctagatcatcagtcctgctaggttgaaacatcccttgaagacagccaataacctctggtcaaattccaggatatccaaggaaaatcttagctgtcacttggtgtcttcaatggagtgactaagtaagaaggcaagtctcacaaagatgagtgccctcgctcagctctccaaccagaacctcacccactgtcaattagtacattgcttttctggcttttaattagcgaaagaaacatttctgcataattattgytggcgttggcagcccagatctagcctttactgggtgcgagacactgagccaatcatttagctctcctgctctcagttcctcactgacaaggggataataacagtacctatcttatgcattgctaagggagattaaaatagagtaatccaggaaaaatgctctgcatttcatgtgtccagta

SEQ ID NO: 763446 - DNA, 599 bp, Homo sapiens
aggaaaagtgggcacattcttctaggaccctggggatcctcagactctttgaaagtctgcctgacaaatccatcttcgatgagggaaacagtgattcattcgacaaatagtcacagttctaccattggctgtatacacagcacccaattgcaacacccgcatgcccccgcccccaagcactacataatttgctgtgttttgttttgtctctcgggttttataactttggccactttcaagaaatccaccctgtgggagctaattttcacacgatggctcgttgcttccgctttccctttatcaatgccgccctccatttccggtggcgttttgatgagctgcatcagtggcagacattagccgggccctcttcaactctggaagcctgaccacaaaggcaaattccctcctggtctctktagtgtgaaacttcttgtaattcttttccccaaagtcactcttatggtgctccagagagaaggccgggccttctgtgtgtcttacagagagccttcttcaggactctttcttctcctaaaattccccacaatttccaatccccctttgctgttccctccacatcttatcacattgaagcc

SEQ ID NO: 763447 - DNA, 596 bp, Homo sapiens
aactaccataactgggggcctattctggaccactcagtaacacttatctgtgcaacagccccgtaagtgaggtatcatgtcatcatcattatcctcattctaagagtgaggaaagttaagtgcacatagctgactcaygcaatgtccattgctagagagttcaagcccccggattcatactcagctctgcctgactccaagcctgtgttctttccatcatgccacgtgatcgagtcaaggtgtcaaggaaaggttggggggaaaattccaggggtgggaggggacgcaaacaactacagagaagttcaaaggcagaaggagagcaagacctaaagaaagagaaaaactcacttgcctttctgactagaccagcggttaaaaataaaagaaaaagattccctccaaccttcctcccccatctgctgacattaatatcaggtgaactcatttgatgtaactaaagagagcgagcactcatcctgcacgacagggaaccaacatattgcactcctccctctctcttcccactccttccctcctccctcccagaaggcatggtgttgtgtttccagttagtggccaagaataacaaatta

SEQ ID NO: 763448 - DNA, 581 bp, Homo sapiens
aggctctctgaacactatgagagctgtcccgggtccctgagagctgcccctgggattggaaccttgcagagcccatttaggtggagatcacaggcaaaactctacatcccaggagacccaatttactcccctctgggagtaactctatatcccgggacacccacttcactcccactttacacatcctctggggatgcgtcatagcaatgatagtagctgctctggcaggggcggccctgagtggtaattaccgtcaggggggcattcctccgtgtggcatgactggtacttggctctccgacccaggcagtatcttcctccattctgaggctcggggtccttgcactcacggtgtgaaaactgtactcctcctccacaggtccgagaacattctccccagggtccccacggtgcccagcctccatctrccacgggctgcaacatacaatggcacactgaatgaggagcaaaggccaggaggcttcagtatctgtgtcactgggtggccaatgccctggcttcctcatctagtcattatcatcttggtgcatggagtgccgtaaactgcctcaatcatttgt

SEQ ID NO: 763449 - DNA, 590 bp, Homo sapiens
agccgtgcaaccatccatcctcttcccattcaagcccttcagcctgcttccatagtagaaaacatttaaatctgtaaaccaaagggtatagtccttaaatctgagcataatacctttcgtgtattttgtggttatttcgaaagatgtgtagccagcatgtcatgggtggaattgtatctccaaaaagataggcagaagtcccacacccagtacctcagaatgtgagaatgtgaccttatttggaaatagtctctatagaggtaatcaagttcaaacgaggtcatgagggtggccctaatccaatagcactggtgtcatcataaaaaggggaaattcaaacacagagrtggatacatacaaaggaaaaatgttgtgaagatacagaaagagaatgccatgtgaggatagaaggttagaatgatggttctgcaaaccacagaaacccactgactgctggcaaatcatcagaggctaagaagaagcaaggaaggatcctctttttcaggtttcagagtaaacatcgcgatgacaacaccttgactcatgactttgagtttacagaattatgaaacaataaatttctattgttt

SEQ ID NO: 763450 - DNA, 571 bp, Homo sapiens
gctaaatatgtacaaaataatgtctgttataataacaatggagcacctgctttaaaatatgaaatgagaccaatctcagaatggtgaaaattcactggactgagagaccaatatttttgtggttcagggaaatgatttagtgagaacaagcagaccatgattcatcatttctttttctcacatttttgcatccatttacataaataaatttaagaattatatctacttacttttttcctaaaataaatttattttraaatggcaacatatggttttagagttagaatggtactaacttgattaatagagggatttttacaagtaaagaaaccagtaatcttaatgagtcagataccagtcaaagaaaatacaagtggttcataacaccttataatgagagattccatgcagccactatttcaaaacatgttcatgcttgtaaagaaacaggacataaaacatggctccatgaatcaggaaattaatggtcatccttttaggatgtcagatctttagagaaaagcaggacttgtttttgtaaagtaatagataataatagtgaccaattgat

SEQ ID NO: 763451 - DNA, 618 bp, Homo sapiens
agctgtttcattgatactgcttcccttgtgcaaataggagataataggagaataatgtctacataacacagcagttgtgtcttagttcatgtataattttttttccagcaggttaatgttttaaagtggtcagagtaggctttcttacaactaaagaaagagccttagcaatctgtgaattaactctggaaatctacagaactgcaggtggagactaggttagtggcttcaagaattgctaccctttctactatgccaagcttcttgggtaaactgttactgcagataacaaagctgcaatgacatttcccttctattaaaaaaaaaaggtacactctggataagatttctaatatttgttaaataatctactagaagagagtgtcctctaggatctctccttcaaagggaaatcaccagaaccaggagttaaaattgcraagattaactgattggacataaatacaaagagagatttaacaatgctggtatttctattaggagggttaattattctcattagtgtcttggttgcaaaattccatagcttatgaggaatttgtcccaattctattctttccataagctctcttatttttagtgtccaattttacagag

SEQ ID NO: 763452 - DNA, 666 bp, Homo sapiens
acatgcaaatgctactcacaactgagccatctaccatctagaataatttttctttcctccacaacttttaatttccactggaattgtgtagtttattcatttgcttgtcattttgtataactatcacaaatttaaccacaactctgccagggtctaaatcacctctcaaaatgatgagaagtgtctgttatagtatcagaagcatgacagttcgtactgttctacattattgtcaacacttgatgtcgtcatttaaaatttttaatcattctggaaggcatttctatrgatatatcctacagttgttttaatctgcattttttggtggctaatgaaattgtgcacttttctatttctttattagacatgtagctatcttcttttataatagaattatttcatccttttccccatttttaattggattgtactttttcttaatgatttgtaaaaattctttattctggatactagtcttgaggttagatgtattataaatttattctcctactttctgtgtctttttactcttttaataaggttgtttgatgaatgtaagttcctaattttaatgtaggacaattatctattctttacaggaccagctacataatttaccgggcttagaacaaaatcaaaatgaaggatcctatattcaaaaattat

SEQ ID NO: 763453 - DNA, 626 bp, Homo sapiens
cacaacgtgaaaactcaatcaaggtgaaatagataatctgactagccctatagccttcaaattcgttgaattcataaatttaaaactcttgaaaaagacacttctgggcccacgtgcttccactggagaattttacaaatattttaagaagaattaacaacaagcttgcatgttctcttctagctcacttgatgaagcctattcgacatcactagttattagggaaacgccaatcaagaccacaatgagatacacgcctaccagaatacctaaaataaaaattataatagcagaaacaccaactgttgttgaggatataaggaaactggattactcatcaagattgccagtgaaaatgtaaaatagtgtcatctttctggaaagcaatttggtagtttctttaaaaaactgaaaaaaaactgtacatgrgattaccatacagaccagaaattacactctcgggcatttatctcagataaataaaaacctatattcacaaaaaagcctatacacaaatgttcacagcacctttgtttgtaatagccaaaacccaaaatcagcacagatgtctagcaacaggtaaaatggctaaaaaaactggtacatccataccattgattactact

SEQ ID NO: 763454 - DNA, 642 bp, Homo sapiens
ggatccttatactcctcacccacaatccccaataccagttattatatattctattcaactcagaaaatatggcaggacatatgttaagtaatcagccaggttcacatacaaaacaagtgagagctgtggcccgagatcacaataaaccaagtttcaccaaccggttaacgtacacacacgattcaatgagatattaaaaacagataattaaatactaaaatgaacagtatagacagtagttcagtggatggagtgactcgtttgttaacaattattgtgtgctaacaatattctaggtactgggctagatggtgagtatataatgttgaatgattcagaatccatgtgctcaaggaatttgtagtctactaagggagtggtgcaacttaatctataacttattatttattcagcaaattcttgttgaaaactatcacagaatctatcctagcagwgctgtgaatatagctatgaataaaaaagaccaaaatgtctgcccagataaaggatacattgtgcatacatacactggggagaggcagacaaaaaaacaatgtagtttgagtgtgtgtgcgtgcttgcatgcgtgcatgcaggcatgtgcatatataatgctaaaacatgataagtactattaaaaaa

SEQ ID NO: 763455 - DNA, 620 bp, Homo sapiens
aaaaaaaaaaaaagaaagaaaaagaaaagaaaacaaacaaaaaaacccagcactctgggaggccgaggcgggtggattacaaggtcaggagatcaagaccatcctggctaacacagtgaaaccccatctttactgaaaaatacaaaaaattagctgggcatagtggcrggcggctgtactactcgggaggctgagacacaagaatggtgtgaacctgagaggcagagcttgcagtgagctgagatcatgccactgcactccagcctgggtgacaaagcgagactccgtctcaaagaaaaaaaaaggaattcaggaggttagttattaagctaatcagggaggaaccaaagaaaggcaaagctcagtgcaaggaaatccaaaacatgatacaagaagtgaggggagaaatagtcaaggattatcaagaaatattcaatagcttaaagaaaaatcaacaaaaaaaattcaggaaactttggacacacttttaggaatgcaaaatactctggaaagtctcagcaatataattgaataagtagaagaaacaaattcagagcttgaagacacggtctttgaattaacccaatccaacaaagaaaaagaaaaaagaataagaaaat

SEQ ID NO: 763456 - DNA, 620 bp, Homo sapiens
aaaaaaaaaaaaagaaagaaaaagaaaagaaaacaaacaaaaaaacccagcactctgggaggccgaggcgggtggattacaaggtcaggagatcaagaccatcctggctaacacagtgaaaccccatctttactgaaaaatacaaaaaattagctgggcatagtggcgggcggctgtactactcgggaggctgagacacaagaatggtgtgaacctgagaggcagagcttgcagtgagctgagatcatgccactgcactccagcctgggtgacaaagcgagactccrtctcaaagaaaaaaaaaggaattcaggaggttagttattaagctaatcagggaggaaccaaagaaaggcaaagctcagtgcaaggaaatccaaaacatgatacaagaagtgaggggagaaatagtcaaggattatcaagaaatattcaatagcttaaagaaaaatcaacaaaaaaaattcaggaaactttggacacacttttaggaatgcaaaatactctggaaagtctcagcaatataattgaataagtagaagaaacaaattcagagcttgaagacacggtctttgaattaacccaatccaacaaagaaaaagaaaaaagaataagaaaat

SEQ ID NO: 763457 - DNA, 635 bp, Homo sapiens
acatggacacaaagaagggaacaatagacactggtgcctatttgagggtggagggtgggaggaaggtgaggattgaaaaaactacctatcaggtactatgcttacctgggtgacaaaattatctttacatcaaaccccagcgtcatgcaatttacccatgtaacaaacctgtacatgtactccttgaacctaaaataaaasttggaaaggaaaaaaataattgaaggtgacaggtgaggggggctgttggttggctcagtggcaatatcgacaatctgagaaacacaggtggcaattttgtggggagggggaaatcttcctcaacaaaattagttctgtgtttaaaaaaaaaaaaaaactttctgagctgtaaaaatgccaaaagaataaatatgacaagcatcgcataccactgaataactgaaatgcttgtcctgttcttcagcaattgacattagcataggtgcagctgcatgcctagtgcttgctgaaaaggatattgataatttcaggacatgtaattctcagctgtcctggggaaaagcataggcatggaaagtgcagccgacaggaaaacatgggagggacttgatcacagatcctgtgctatgaattttgagtactaaaaattctgc

SEQ ID NO: 763458 - DNA, 635 bp, Homo sapiens
acatggacacaaagaagggaacaatagacactggtgcctatttgagggtggagggtgggaggaaggtgaggattgaaaaaactacctatcaggtactatgcttacctgggtgacaaaattatctttacatcaaaccccagcgtcatgcaatttacccatgtaacaaacctgtacatgtactccttgaacctaaaataaaacttggaaaggaaaaaaataattgaaggtgacaggtgaggggggctgttggttggctcagtggcaatatcgacaatctgagaaacacaggtggcaattttgtggggagggggaaatcttcctcaacaaaattagttctgtgtttaaaaaaaaaaaaaaactttctgagctgtaaaaatgccaaaagaataaatatgacaagcatcgcataccactgaataactgaaatgcttgtcctgttcttcagcaattgacattagcataggtgcagctgcrtgcctagtgcttgctgaaaaggatattgataatttcaggacatgtaattctcagctgtcctggggaaaagcataggcatggaaagtgcagccgacaggaaaacatgggagggacttgatcacagatcctgtgctatgaattttgagtactaaaaattctgc

SEQ ID NO: 763459 - DNA, 622 bp, Homo sapiens
tagggaaaagcttcatgactttgaactgatcaaagattttaagggcaaaacctcaaaagtttaggctatgaaaccaaaaataaacaaatgagatcatatcagactaaaaagctcctgcacagcaaaagaaacaacagtatacagagaccacctgtagcatgggagtatttgcaaactattaatcctacaagggattaatattcaaactatacagcaattcaacagcaaaaaccaaaatagcccaatatttaaaatgarttaaatgatcttagtcaacatttctcaaaagaatataaatggccaacaagtatatgaaaaaaatgctcaacaacgctaaccaacatggaaatgtaaatcaaaaccacaatgacttttatcaccatagcccagttagaatggctattattaaaagacaagaaataacaaatactagtgaggatatgaagaaaaggaaacatttattcatagttggtgggaatgtaaattagtataaacattgtgaacgatgaagtttcctcaaaaaaaaaaaaaaaaaaaggaactagtatataatccagcaatcccactttggagtataaatccaaaagaaaagaaaataaattagtatgtaaaagaggtatct

SEQ ID NO: 763460 - DNA, 591 bp, Homo sapiens
tgacctcattccttgccctataaagccctgcagtagtctgtaagcggggctgcctcctctgcgtttgtcaggaggtagcctgacgggactgacaataaatcagcttgcctgaacttgggtctactggcctcattcctttcttggctgtccttccaattatcccttacaattaatacattattattaactgaagttatttattcagattccctgagtttaaccccacgtattatatcagttcyaggattctatccaggacatcacattatatatagttatcatgttgcttttggcttctcttagctgagacaatttctcaaagtttccttgattttgatgaccttaatagttttaagaatacttgtcatgtattatataagatgttcccatattgcaatttgcctgatatttttatcataattagttgtgtgttatgagtttgggtagaaagaccacagaggtaaagtactttttaaatcacgtcatatcaagggtacatgtcataaacatgacttattactattaaagttgaacttgatcacctggctcagacaatctttgtccagtttctccagtataaagttacactcc

SEQ ID NO: 763461 - DNA, 601 bp, Homo sapiens
ccatgtttcccctcacctaggtatcaaagtacctacagttatgggtgggtaactagactaaaaatgtacctttcttgctcagattaaagcccggcttattgactcagggcagctttaatcggtttatttggaagctctgcttgttcacaggtacagagcttttgcagaaccgactctgtacctggcagccttgaagggrcttggattcaaagcatattcttgagccacgccatctttaatcaaactgcaggtggaatttgtagctgttagaatagctcctattcctttcatttctttttctgtttttttactcttccatctcagcctaaaaagaaaaacacgttaatttgagccataggaatttagaatttgttttttcttttgcttagatatgtttgactaaagcttcctttttcacaggtttattttttccaacattttattatgaaaaaaatatatacagaaaagttgaaagaattttacagcgcgcacccacatattcaccacctaagattgtgccgctggcatcatcccacgtgctttatcaccgttctctccaccttttcatccttctattcatccatcagtccctcacattttt

SEQ ID NO: 763462 - DNA, 595 bp, Homo sapiens
ggacattgactgcttagggcttgggcatgagctgcctcttcacctgagcctgagccacaggtaccctctgcacctaccacgctgatgcactgggccagggagagcgccgtctggatggagatgagctgtgaggagctggyggctgggcggatcaggttgttgtaacaggttttgttcagaaggtcgtccatcagtttctgctcggcatgggccatgcggcagtcccctgggtaaacacacagacatgctgggcccttgtgcagctgtctcccactgcagctgacagctatgaagcaggagctgagagggccagggagcacagacaccctgagagctggctgaagcagtgaaggtgctggccggcctggctttccctggggacttcaaatgacattcacgacagagctcagctacctcctccccatgccatacctcttcctcctcctcctccctccgtcaatgaacagcatcccacgctctacacatctgatacaaaactgggtgtctcttcctgactcctcccttggttcacccaagtggccaccaagtcctgtctgtcctcccatctccacggctacagccatgtccctgcctc

SEQ ID NO: 763463 - DNA, 693 bp, Homo sapiens
tgcaggcccattggctgcctagccagtggtgatctcgctcccaccctcatttcttctttgttaacaaaaccatgacctcattaaatactggacacctataaacctcatggaccctcctccagcctccccaccgtgtaccggtgagtctaagtcaactctagtcatttcattcctctggacattgactgcttagggcttgggcatgagctgcctcttcacctgagcctgagccacaggtaccctctgcacctaccacgctgatgcactgggccagggagagcgccgtctggatggagatgagctgtgaggagctggtggctgggcggatcaggttgttgtaacaggttttgttcagaaggtcgtccatcagtttctgctcggcatgggccatgcggcagtcccctgggtaaacacacagacatgctgggcccttgtgcagctgtctcccactgcagmtgacagctatgaagcaggagctgagagggccagggagcacagacaccctgagagctggctgaagcagtgaaggtgctggccggcctggctttccctggggacttcaaatgacattcacgacagagctcagctacctcctccccatgccatacctcttcctcctcctcctccctccgtcaatgaacagcatcccacgctctacacatctgatacaaaactgggtgtctcttcctgact

SEQ ID NO: 763464 - DNA, 480 bp, Homo sapiens
acaggaaagatgaaagtattttagagcaatgtgggtggattcaaagtgaggttttgaactagatcagttttttttttttttttttttaaacagagtctgactcttattgcccaggctggagtgcagtggtgctatcttggctcmctgcaacctctgccacccaggttcaagcaattctcctgcctcagcctcctgaatagctgggattacaggcacctgccaccaagcccggcaaatttttgtatttttacggggtttcaccatcttggccaggcagttcttgaactcctgacctcgtgatccacctgccttggcatcccaaagtattaatttttttttttttttttgagacgaagtcttgctgtgtcgcccaggctggagtgcagtggcccgatgtcggctcactgcaagctccgcctcccaggttcacgccagtctcctgactcagcctcccgagtagctgggactacaggcgcccgc

SEQ ID NO: 763465 - DNA, 480 bp, Homo sapiens
acaggaaagatgaaagtattttagagcaatgtgggtggattcaaagtgaggttttgaactagatcagttttttttttttttttttttaaacagagtctgactcttattgcccaggctggagtgcagtggtgctatcttggctcactgcaacctctgccacccaggttcaagcaattctcctgcctcagcctcctgaatagctgggattacaggcacctgccaccaagcccggcaaatttttgtatttttacggggtttcaccatcttggccaggcagttcttgaactcctgacctcgtgatccacctgccttggcatcccaaagyattaatttttttttttttttttgagacgaagtcttgctgtgtcgcccaggctggagtgcagtggcccgatgtcggctcactgcaagctccgcctcccaggttcacgccagtctcctgactcagcctcccgagtagctgggactacaggcgcccgc

SEQ ID NO: 763466 - DNA, 580 bp, Homo sapiens
cattgactcagaggatcctcattgagatgagatttccccgacttccttggtaaagcagcatgagcacgttattttatgccatttaatttaaaatgatgcaagcacacattttgtaggagaggtgaaatctgtgtctggggacagcccctgacagacagggtggcatatggcgacatctgtgtggcaggtctggtgggagccatggaaggaccagggcagggcacgcaccctcctaactgaggtctggtgggagccatggaaggaccagggcagggcacgcaccctcctaactgaggtctggtgggagccatggaaggaccagggcagggcaggcaccctcctaactgaggtctgctgggagccatggaaggaccagggcagggcacgcaccctcctaactgaggtctggtgggagctatggaaggaccagggcagggcacrcaccctcctaactgaggtctgctgggagccatggaaggaccagggcagggcatgcaccctcctaactgaggtctgctgggagccatggaaggaccagggcagggcacacaccctcctaactgaggtctgctgggagcca

SEQ ID NO: 763467 - DNA, 507 bp, Homo sapiens
gtctctactaaaattacaaaaagagtatttaagtggtgcagattaaatataaccaagattgtggagatatttaaaacacgaaattaaaaatataatagatgcactgttgcaaattactatttgaattatagatcattttcctattgcctagaaacaatgcatagctaaaattccctaactacttttacgacacatacttagaaggttttaaaaatgcctgtagtcccagctattcggcagggcaaggcaggagaatcacttgagcccaggagttttagaccagcctgggcaacacagtgagggcccwtctctaaaaaaaacaaaaaaaaaagaaaacttcggaaatgtttcttgaactaacttaaaagccgccttccacttctcactttgaattagtttgaattaatttacaaactgcaatatattttaaaggagcttattgtagaaaataagttgataaaaaaataaggatatatctttagggatttgtctttagggacttgttac

SEQ ID NO: 763468 - DNA, 599 bp, Homo sapiens
gcccaccccaatttcagttttcctctaagagttagccactattatcccttcagagtggatattcaggcttttctttcctggcatggacatacatatgtaaatgtacatatataaaaataattagtgacaccatgcatggtagctcacgcctgtaatcccagcactttgggacrctgaggtgagagaattgcttgaggccatcagtttgaagctgcagtgatctatgattgtgcctctacactccagcctgggtgacagggtgagaccctgtctcttaaaaaaaaattcgtatttggggttagtagtagtacctacctcataggttattatgggatcagtacagtaggccagacaaagtgcgtatgctattattttgcatgtagtaagtaccagcatatactacctgttatccagaaatttgctgaaatgtgccttgtattttctctctttcgattttgatcagtcttcctagaagtcatcagtttgagttttttcaaagaaccagttgttggttttattgattttgtttgttttctttttcattgatttctgctttactctttattatttccttttttctgctggctttgggttccatt

SEQ ID NO: 763469 - DNA, 599 bp, Homo sapiens
gcccaccccaatttcagttttcctctaagagttagccactattatcccttcagagtggatattcaggcttttctttcctggcatggacatacatatgtaaatgtacatatataaaaataattagtgacaccatgcatggtagctcacgcctgtaatcccagcactttgggacgctgaggtgagagaattgcttgaggccatcagtttgaagctgcagtgatctatgattgtgcctctacactccagyctgggtgacagggtgagaccctgtctcttaaaaaaaaattcgtatttggggttagtagtagtacctacctcataggttattatgggatcagtacagtaggccagacaaagtgcgtatgctattattttgcatgtagtaagtaccagcatatactacctgttatccagaaatttgctgaaatgtgccttgtattttctctctttcgattttgatcagtcttcctagaagtcatcagtttgagttttttcaaagaaccagttgttggttttattgattttgtttgttttctttttcattgatttctgctttactctttattatttccttttttctgctggctttgggttccatt

SEQ ID NO: 763470 - DNA, 599 bp, Homo sapiens
ttgtgccttgattcatcagtcacagagtggccttatctgatgttcgtgttctgtaaacttgtcctgtcatttgttctgtgaaatggcctaacattgacattaacaggccagctcctgactgtcaggactgctttttctttctcctcccctgaccaggctggagtgcagtggcgccatcttggctcactgcaacctccgcccccgggtttaagcagttctccagtctcagcctccagagtagctgggattacaggtgcccaccaccgtgcctggctaatttttgtatttttcatagagatggcgtttccccatgttggccaggctggtctcgaactccttacctattgatccgcccacctcggcctcccaaagtgttgggattacaggcrtgagccaccatgcctggctctttttcatgctgtataaaaatttaggactgaatttaagaaatggaaatgtgctaatgatggaaattaggaactggaaacaattctcagattatatttaatatgatactgttgagattccaaatcaaatccgtggcacactttgaaaggcacactatgtccgttttaacagttgcatgagaaataagtatg

SEQ ID NO: 763471 - DNA, 481 bp, Homo sapiens
caaatgtcgtattcccttgagtgcctaaagatagtctgaaactcctggagcacggcccacatggagctgtgagttctgaccactgttagcctcttatcatgtgcattgtggtagggtttggactgaaccccagtgcacgtattcactgctctcctctgactgaagactagaagagtcaaagctttccattcactcgttaaacttcaggggccctgaatgtttttggctcactttttaattttattttttatattattttaattttttaaatttaaattaaaaattttttttgacagggtcttgctctrttgcccaggctggagtacagtggagtgatctcaactcactgcagcctctacctcctggtctcaagcagttctcccacctcagcctcccaagtagctgggagtacaggcgcgccaccacctctggctaattttttgtatttttggtagaaatgcggttttgccatgttgttcag

SEQ ID NO: 763472 - DNA, 597 bp, Homo sapiens
ccaagcgtggtggcgtgtgcctgtagtcccagctactcagaaggctgaggcaagagaatggtgtgaacctgggaggtggagcttgcagtagccaagattatgccaccgcactccagcctggtgacagagcaagactctgtctcaaagaaaaaaaaaaaaaaggaattctgggtttgaatcctgcctctccatctgctctgctagggatatgatttagggcaagttgctagacctcatcgggcctctcttttcacatctgtataatagaggtgttattgtttcacttccatttgtgaaattttcatgagatttgttattgttgtttttatgttaatccctagtacatggcctgctgtaaacactcaggacacccaggatatggtctttgctgtttgattttcctcatccccagtckcaaggggaagccaggacaatgagaacagccacttgccatcaggagtcactgaaagggccccaggatgggatggtggggagataagaaccatgagagaagttggcacaaaggagttatgggacaaagggtccaagataggcagaaaagaaaatgttgccagttgatggggaagaaaggaagtc

SEQ ID NO: 763473 - DNA, 517 bp, Homo sapiens
aaagtccaaggattctggctgtccgcctgcaacattcattgcagcgtaaaggagagttagagagtgttctctctgatgtcatggccacacagaagaagaaggcaaaccaggtgagtccaaccacctgccccatcccctgggagyctgcctttgcagatggaggagtgagcctaaaggtcccttctgcaggatggcgtgtcctgcccagaaggcagcatggccatttcttgctacttttttgtatggtttttagtggcagcctggggctgagtcagctgctgtgggtgagttgggggtcactgtgtggagtgagcactggacgcagagcttggaggccaagtgcctgccccgcccttacctggctgtggtcttgggcaagtcctaggtggggtattgggtacttgtactgtgaaggtacagaagagtacctttagtatgttaccatttctgtagaaagaggaaacgtgtgcatgtgtgtgtgtgtgtgtgtgtgtgtacatactatgataatatacat

SEQ ID NO: 763474 - DNA, 517 bp, Homo sapiens
aaagtccaaggattctggctgtccgcctgcaacattcattgcagcgtaaaggagagttagagagtgttctctctgatgtcatggccacacagaagaagaaggcaaaccaggtgagtccaaccacctgccccatcccctgggagtctgcctttgcagatggaggagtgagcctaaaggtcccttctgcaggatggcgtgtcctgcccagaaggcagcatggccatttcttgctacttttttgtatggtttttagtggcagcctggggctgagtcagctgctgtgggtgagttgggggtcactgtgtggagtgagcactggacgcagagcttggaggccaagtgcctgccccgcccttacctggctgtggtcttgrgcaagtcctaggtggggtattgggtacttgtactgtgaaggtacagaagagtacctttagtatgttaccatttctgtagaaagaggaaacgtgtgcatgtgtgtgtgtgtgtgtgtgtgtgtacatactatgataatatacat

SEQ ID NO: 763475 - DNA, 496 bp, Homo sapiens
aaaaaaaagtaaataaataaaacccaatacaatacagctaatatgatttacctaagaagctgttgtatgagctgaaccagaggcaaacactgtttgccagaagactcacagatccccgtattaataaggtctttatccaatggagtcctccttctatgaaatgttgaggcatttgcytcctgttcataaatttctttttccttccgtgcttctttttttgtatcctgtaattgacaaacagaaattgtttacaagtgatctcattaccaggtgtgaaggcacacaggctggctgagccctgaccccagtgccaagctatcccagcctctgtggctgccacacccatccacccacaggccccccacctgccctgttggaaaccccaactcatttgtgcagtttcaaacagtgtcttctttttacagatccaaggtccaggctgcctctgctgatgctctccagcctccttctgtgaagtccctaaaatccttaaccc

SEQ ID NO: 763476 - DNA, 655 bp, Homo sapiens
aatatgatttacctaagaagctgttgtatgagctgaaccagaggcaaacactgtttgccagaagactcacagatccccgtattaataaggtctttatccaatggagtcctccttctatgaaatgttgaggcatttgcctcctgttcataaatttctttttccttccgtgcttctttttttgtatcctgtaattgayaaacagaaattgtttacaagtgatctcattaccaggtgtgaaggcacacaggctggctgagccctgaccccagtgccaagctatcccagcctctgtggctgccacacccatccacccacaggccccccacctgccctgttggaaaccccaactcatttgtgcagtttcaaacagtgtcttctttttacagatccaaggtccaggctgcctctgctgatgctctccagcctccttctgtgaagtccctaaaatccttaaccctgctaatggctcacacaaaacccaatgtgatcggctccacacacgcagcatccagctgctctgtaaggacaagaaggagctagaattctcacacacaaaagtcctggttcaaatgcaaatggcaaagccactttgggaaactatgaacacacacttaccccaggacctaacaaattccactccaagtgtttatccaaa

SEQ ID NO: 763477 - DNA, 536 bp, Homo sapiens
tgagtttttgtttacacattttttaatttcttttaattcctgttcccatcccagcaccctgagaggacgaggcaggcagataacctgaggtcgggagtttgagaccagccccacgaacatgaagccccatctccaccaaaaaaawtaaataaataaattagccgggcatggtggctcagcctgcaatcccagccactcgggaggctgaggcaggaatattttctccctcccttagataaaagatagcatataccattgtgcactttgttttttgacctggggtggggtctcactctgtcactgaggctggagtacagtggtgtgatcttggctcaatgaaacctctgcctcctagactcaagctgtcttcccaccccagcctccagggtagctggaaccacaggtgtgtgccaccacacccggctattttttttgtatttttggtagtgactgggttttgccatgctgcccaggctgatatcgggctcaggcgatccacctgcctcagcctcccagagtgttttcaaagtgctggg

SEQ ID NO: 763478 - DNA, 536 bp, Homo sapiens
tgagtttttgtttacacattttttaatttcttttaattcctgttcccatcccagcaccctgagaggacgaggcaggcagataacctgaggtcgggagtttgagaccagccccacgaacatgaagccccatctccaccaaaaaaattaaataaataaattagccgggcatggtggctcagcctgcartcccagccactcgggaggctgaggcaggaatattttctccctcccttagataaaagatagcatataccattgtgcactttgttttttgacctggggtggggtctcactctgtcactgaggctggagtacagtggtgtgatcttggctcaatgaaacctctgcctcctagactcaagctgtcttcccaccccagcctccagggtagctggaaccacaggtgtgtgccaccacacccggctattttttttgtatttttggtagtgactgggttttgccatgctgcccaggctgatatcgggctcaggcgatccacctgcctcagcctcccagagtgttttcaaagtgctggg

SEQ ID NO: 763479 - DNA, 610 bp, Homo sapiens
ttaaatacacagaatacaatttatttaacataaaaaactactccaatattttctgcatttttaatatgctcacccaaagaaagcattaatttgcatctttgatgttaaacagatagcctaatcaagtcactatcaagatcaagactaaaagttacagcttttttcttttgatgcctttcagatatatctatttatatataaaaatatatatacacacacacatacatacacacacacatatatatgtagttatgtgtgtgtgtatatatagttacagttttggccaggtgcaatggctgacacctgtaatctcagcmctttgggagaccaaggctgaaggcttgcttgaggccaggagtttgagaccagcctgggcaacgaagcaagaccctatctctacaatttttttttttaacaaaattagccagggatgatggcatgcacttgtagtcccagatacttgggaggctgaggcggaggatcccttgagcccaggagttcaaagctgcaatgggctgttactgtgccactggatcccagtctgagcaacagagcaagactttgtctcaaaaacaaaatttataattaaagataaatagttatagtttta

SEQ ID NO: 763480 - DNA, 582 bp, Homo sapiens
atatattctcagggttttgttgytattgtgaatagaatctctttttttttttttttttttttgccacggagtctggctcctttgcccaggctggagtgcagtggcgcgatctcggctcactgcaagctctgcccctccaggtttaagcagcctgttgcccaggctggaatgcagtagcatagtcatagttcaatacagcctcaaactcctgggcccaaatgattctctaagctaatatttttaattttttagagatggagtttcattcaaggatcactaaaggccagtgatcctcccgcctcagcttctgaaattgctgggattacaggtgtgattgagccatggagcctggccagacatgggctattgattctcgctgttactcttttccctttccttctaatccttgtattgggaagcaaacagtatggaaattttatttcttcattttattgatacgtagatctctgcttagaagacaattttagttttaaattataaatgtttcgttcattattcatagaaaactagatttgccatgggatatttataagtgttgcacgaatgaagggttttctagtc

SEQ ID NO: 763481 - DNA, 430 bp, Homo sapiens
tccagcactttgggaagcctaggcaggaggatcacttaagccaggagttcaataccagcctgggcaacatggcaaaaactcatctctacaaaaaatacacatattagccaggcgtggtggcacacacctatagtctcagctactcagaggttgaggtgggaaaattgcttcagctcaggagctcgaggctgcagtgaacggtgatcacgccaytgcactccagcctgggtgacagagcaagaccctgtctcaaaaacaaacaaaacaaaacacaaaccaagggtgagagagatgttagatgtttttgtccttgttacagatgtaaatgctcagttggaaagagggaagtatttagagtgaaaaagtttcggtggaacacacacaaaaataggaagatcaggtataactgttccaaaaaaaagagtatggc

SEQ ID NO: 763482 - DNA, 580 bp, Homo sapiens
ggatccactttctcttgctgataatttccattcatcttaatacacttttaaaattaacccaaatcatgctttgcctgcctttttccttgtttagttttattttttttcaatctcaggtttctttccatttttcccttctttgtaacctttcaatgattaaatcatttgacatttatatataataatatgcaactttgcacaagaaattatttgggttactatatagatgtgaagatgtctagattcaratatcaaggacatttttatgtctaagagtagctatgtcacaagaatatccttggcataaataaacactctttttttctgggtctgtgagctgatgtgtgacaaatacagagaataatatttttctctcactttagcaacttctcagaagtttagaagaagtggaaaatagcctttgaccttatgcatgccttgtgttcctacagtagaaatagtgatggacatcatgttgtattttaggctgttaaactgagaaagcagccgaaatgccagctttcatagtcctggtccctggcatacagcttgtctgagactgatcgtaaagacaataata

SEQ ID NO: 763483 - DNA, 621 bp, Homo sapiens
ttggtatttgaagctgctgtcttttggatggggctttttgcttttctattatttgatgctcttgaggttttgactatggtataaattgggtttcatggattggtttcaattctgaatgcttttctggagccaaagctcacctcagcactcttgggctgcatgctgtaatcctgggggatgggggattagtcctgtggctttgctctctggccccttgagattaagcacctgctgtgctggaggtgctgaggtgttcccagttcacttgcaacaacactctggcaggggctgctggcaaaattgctccagtggggcagtgggagtctccacacacatgtgcaccaatggaggaggctgcaggcgagtacrcatcagtagggggaggctgagggtgggtgtgcactggcagggaaagactatgggcaggtatgcactgacagggggaggatgcaagcaggtacgtgctggcaggggaggtcatggttggagtgtgccagcagggggagacaatgggtggatgcataatggtaggggtccaccaggtcgttttcttactccaagtttcagttttgttaacctgtactataaaatgactgaactgtaatttttaaagttttctta

SEQ ID NO: 763484 - DNA, 519 bp, Homo sapiens
agtcaccactcctagacctctgtctctaggcatctcccaggaaggagaagtggaaaggaaagagaaaagagctcagtctctggtgcccaagacattgtgcaaaaaaaaaaaaaagatggagtcgaaaactttggtttacacaaaaaattaggaagttattaaatactacaaaggttttatgaaagctcaggcctggtcttgattgttttcccccaacaaacaaagttagggtctaaaggggtcctgaaaaggaaaagtccctcccctggttataccaatgggtggtcttggagtgtgctgtttacactcatataatctttacagtcagktattggatggcgaggtatctttcaatctactttctagtcaccgattgttcctatgcgtgcattatatagatgacagaactgaggtacagagaagacaaagtcacagagctgctcagtgggtagagccaggactcagactccagagtcatgctcctaaaaccatggtacactgcctcatggtttcacttta

SEQ ID NO: 763485 - DNA, 617 bp, Homo sapiens
aagattagtttgtccaagctcaaacaactgatcagtacccaagtcaagacaaatccaagccaggtttcaaagctgctgcatgtaatcagtaggttatacttcctctgcttttctagctactgtttgttgtatgggtcaaggtttggtcaggaagaaggagagccctcacaagtggtttaggagaggggttatagaacgagggagcacagcctgaccaccatcacacattagagagagaactaagccaggactcccctccacttcagacttggaacccctacaaactggaatctatcttctgatcccagggagttagactccgtagcttatcacttttgggaaatgcttagatagcgctaatgtagcgaggtcaggaaaataagggtcacttagtccttacatacaaaggagacgcaagtgttggtatgtgtgtgcatgtgtgttggggggaggaaggggaggctggaagcttctgraaggattacttaatgaacagatggtagctatgcatttggcaaggccagaactcagtcacagcccttaatactcatgtctggtcaagtcaagggccaaatcctagacctctcactgatgaacagtagctcatggaattgaac

SEQ ID NO: 763486 - DNA, 615 bp, Homo sapiens
cacaacctaattctgtcaagtagaagcagccaacatggtcaggaagtaggtattaattacctgctttctagccaagatcagccttctacatttatatgctcttgctcctatagctgtgttgacaaggaagaaagtattcaaggtgaggttgaggactttggtgagtttgggtgcattaattaaawgctagagacaagggaaaactaacaataaactagagtactgctaaagaaaattggtctgaaatcaaagacgggacgaaacaacaaacaatcaaataaccctatttaaaaatgggcaaaggtaaaaaaaagaacaagatcatgtcctttgcagcaacatggatggagctgaaggccattatcctaagcaaatgaacacagaaacaaaaaaacaaatactgcacgttctcacttacaagtggaagctaagcattaagtacacatggacacaaagaagggaacaatagacactggtgcctatttgagggtggagggtgggaggaaggtgaggattgaaaaaactacctatcaggtactatgcttacctgggtgacaaaattatctttacatcaaaccccagcgtcatgcaatttacccatgtaacaaacctgta

SEQ ID NO: 763487 - DNA, 634 bp, Homo sapiens
catggacacaaagaagggaacaatagacactggtgcctatttgagggtggagggtgggaggaaggtgaggattgaaaaaactacctatcaggtactatgcttacctgggtgacaaaattatctttacatcaaaccccagcgtcatgcaatttacccatgtaacaaacctgtacatgtactccttgaacctaaaataaaasttggaaaggaaaaaaataattgaaggtgacaggtgaggggggctgttggttggctcagtggcaatatcgacaatctgagaaacacaggtggcaattttgtggggagggggaaatcttcctcaacaaaattagttctgtgtttaaaaaaaaaaaaaaactttctgagctgtaaaaatgccaaaagaataaatatgacaagcatcgcataccactgaataactgaaatgcttgtcctgttcttcagcaattgacattagcataggtgcagctgcatgcctagtgcttgctgaaaaggatattgataatttcaggacatgtaattctcagctgtcctggggaaaagcataggcatggaaagtgcagccgacaggaaaacatgggagggacttgatcacagatcctgtgctatgaattttgagtactaaaaattctgc

SEQ ID NO: 763488 - DNA, 634 bp, Homo sapiens
catggacacaaagaagggaacaatagacactggtgcctatttgagggtggagggtgggaggaaggtgaggattgaaaaaactacctatcaggtactatgcttacctgggtgacaaaattatctttacatcaaaccccagcgtcatgcaatttacccatgtaacaaacctgtacatgtactccttgaacctaaaataaaacttggaaaggaaaaaaataattgaaggtgacaggtgaggggggctgttggttggctcagtggcaatatcgacaatctgagaaacacaggtggcaattttgtggggagggggaaatcttcctcaacaaaattagttctgtgtttaaaaaaaaaaaaaaactttctgagctgtaaaaatgccaaaagaataaatatgacaagcatcgcataccactgaataactgaaatgcttgtcctgttcttcagcaattgacattagcataggtgcagctgcrtgcctagtgcttgctgaaaaggatattgataatttcaggacatgtaattctcagctgtcctggggaaaagcataggcatggaaagtgcagccgacaggaaaacatgggagggacttgatcacagatcctgtgctatgaattttgagtactaaaaattctgc

SEQ ID NO: 763489 - DNA, 480 bp, Homo sapiens
ggctcatgcctgtaatcccagcactttgggaggctgaggcaggaggattgcttcagcccaggagtttgagaccagcctgggcaacatagggagaccccatctctgccaaaaatattttaaaaaattagccaggtgtggtggctcatrcctgtggtcccagctacttgggaggctgaagcaggaggatcgcctgagcctgggagttcgaggctgtggtgagctatgattgcaccactgaacttaatgtataaatatgaatcattttgggaataaatgaacaggaaagtatgacagttgcagatgttgagatagagaaaaacatatgtggagacacaccaagagagacgtagacacatacagaggtatacagaggcagagctaggcagagagagacctcaacagaaacaaaccttagacatgctcttaaatcggcctgaatctaaatctattgatttagatactttgagtaatataggtgta

SEQ ID NO: 763490 - DNA, 632 bp, Homo sapiens
tgatttgtagtttaattttacgaaatttgaaatcctttcaaatatgtaattatttttcaggctcaacataacacaagaatgctagctacttatgcagctattgatcctagagtgcagtatttgggatatactatgaaagtgtttgctaaggtatttatgaaaaaattaatgatctgctttgttcatgataattaaaatgaaacataactaatgtcagatttgtgaaaaattttgtctcagttttgtttatctgagcttttaaaaaagaaactttcagtattatatagcttgaatagatacctatcagagtagggtggctctgtctttttttcctgtatgtattctattcccatgtgcaactgactagtcagtttctcagcagtaacatttctcaatgcagtgatttyagccccaggcatgggagttggcatatcatcctagttaagaatttctgagttaagaaatcttatatttgagtttagtgataagtttttctgacccagaaaacaaaacaataccaataataccttacgcttctcctattataacacttgttatgacattgaatttagttttctcattcttttgctaattgtgtaaactaggtgagaacaggaacctctgtttctcta

SEQ ID NO: 763491 - DNA, 498 bp, Homo sapiens
atagttttgaaacactctttttgtagtatctgcaagtcgatatttggatctctttgaggccttcgttggaaacgggatttcttcatatacaactagacagaagaattttcagaaacttctttgtgatgtgtggattcaactcatagagttgwaccttcctttcattagagcagttccaaaaccctctttttgtagaatttccaagtagataattagagcgcattgaagcctatggtagaaaaggaaatatcttcatataaaaactagacagactcattctcaggaactacttcgtgatgtgtgcattcaactcacagagtttaacctttcttttgatagaacaggtttgaaacactctttttgtagaatttgcaggtgtatatttagagcgcattgagacctatggtagaaaaggaaatatcttcacataaaaactagacagaagcattgtcagaaactactttgtgatgtttacattcaactcagagagttgaacat

SEQ ID NO: 763492 - DNA, 498 bp, Homo sapiens
atagttttgaaacactctttttgtagtatctgcaagtcgatatttggatctctttgaggccttcgttggaaacgggatttcttcatatacaactagacagaagaattttcagaaacttctttgtgatgtgtggattcaactcatagagttgaaccttcctttcattagagcagttccaaaaccctctttttgtagaatttccaagtagataattagagcgcattgaagcctatggtagaaaaggaaatatcttcatataaaaactagacagactcattctcaggaactacttcgtgatgtrtgcattcaactcacagagtttaacctttcttttgatagaacaggtttgaaacactctttttgtagaatttgcaggtgtatatttagagcgcattgagacctatggtagaaaaggaaatatcttcacataaaaactagacagaagcattgtcagaaactactttgtgatgtttacattcaactcagagagttgaacat

SEQ ID NO: 763493 - DNA, 519 bp, Homo sapiens
tttggaaacactctttttgtagaatttccaattggatatttagagctctttgaggcctatagtagaaaaggaaatatcttcatagaaaaactagacagaatctttctcataaactactttgtgaagtgtgtgctcaatgcacagagtttatcctttcttttgatagaatagtttttaaacactctttttgtagaatttgcaagtgtgtatttatagggctttgaggyctatggtagaaaggaaatatgttcacataaaaactagacagaaatattctcagaaactactttgtgatgtttgcattcaactcacagcgttcaacattccttttgagagggcagttttgaaacactctttttgaagaatttccaagtggatatttagagcactttgattcttatggtagaaaagaaaatatcttcgtagaaaactagacagaatcattctcagaaactactttgtgatgtgtgcgttcatctcacagagtataacctttctttttatgtagaagttcggtaa

SEQ ID NO: 763494 - DNA, 389 bp, Homo sapiens
acagtcttatgttataatgttggacactttaggcctcagaaacaggcctcaggaaacaaaatttctctctgacctattcctgtcctcctttcacctgtccaaggcagggctctaatctaatcatgggtcattccagagagggtcctgccccataccctagaggaaggaatgccacggaaaggccaagtaaagtctaagcagacaggccttgctgggtttagatcaggtgytttatgtgcaatcacatttgtccatcatgcttatgtaaggaaacctccgtaaatacccaaaaggacagggttcggagagcttccagacagctgaacacatggagcttcttggaggatggtgggtccagaaagggcaaggaagctccatgtcccttctcc

SEQ ID NO: 763495 - DNA, 631 bp, Homo sapiens
aaatcaaaaagttctgtcctccttttccattttattatttccagagctacatcagttttgtaatactgtcctaagcagtacagatttctcaactagaattgctatgactaaaagtaaacactttacatatattataaattgkttttttttatttttacaatgtaaatggggtttaagtgtttggtaggagttttcttttaaccttcagtttagtctagattcatagagtggaaaactccttttaagaaatatataggctgggtgcagtggctcacgcctgtaatcccagcactctaggaggctgaggcaggtaggtcacctgaggttgggagtttgagactagactgaccaacatggagaaaccccttctctactaaaaatacaaaattagccaggtgtggtggcacatgcctgtaatcccagctactcgggaggctgaggcaggagaatcacttgaacccaggaggcagaggtcgcagtgagcagagatcgtgcctttgcactccagcctgagcaacaagagggaaactccatctcaaaaaaaaaaaaaaaaaaaaaaaaagaaccttttaaggttacatttaagacatttaacatttaaactattattttcccattactagcaagataa

SEQ ID NO: 763496 - DNA, 631 bp, Homo sapiens
aaatcaaaaagttctgtcctccttttccattttattatttccagagctacatcagttttgtaatactgtcctaagcagtacagatttctcaactagaattgctatgactaaaagtaaacactttacatatattataaattgtttttktttatttttacaatgtaaatggggtttaagtgtttggtaggagttttcttttaaccttcagtttagtctagattcatagagtggaaaactccttttaagaaatatataggctgggtgcagtggctcacgcctgtaatcccagcactctaggaggctgaggcaggtaggtcacctgaggttgggagtttgagactagactgaccaacatggagaaaccccttctctactaaaaatacaaaattagccaggtgtggtggcacatgcctgtaatcccagctactcgggaggctgaggcaggagaatcacttgaacccaggaggcagaggtcgcagtgagcagagatcgtgcctttgcactccagcctgagcaacaagagggaaactccatctcaaaaaaaaaaaaaaaaaaaaaaaaagaaccttttaaggttacatttaagacatttaacatttaaactattattttcccattactagcaagataa

SEQ ID NO: 763497 - DNA, 631 bp, Homo sapiens
aaatcaaaaagttctgtcctccttttccattttattatttccagagctacatcagttttgtaatactgtcctaagcagtacagatttctcaactagaattgctatgactaaaagtaaacactttacatatattataaattgtttttttttatttttacaatgtaaatggggtttaagtgtttggtaggagttttcttttaaccttcagtttagtctagattcatagagtggaaaactccttttaagaaatatataggctgggtgcagtggctcacgcctgtaatcccagcactctaggaggctgaggcaggtagrtcacctgaggttgggagtttgagactagactgaccaacatggagaaaccccttctctactaaaaatacaaaattagccaggtgtggtggcacatgcctgtaatcccagctactcgggaggctgaggcaggagaatcacttgaacccaggaggcagaggtcgcagtgagcagagatcgtgcctttgcactccagcctgagcaacaagagggaaactccatctcaaaaaaaaaaaaaaaaaaaaaaaaagaaccttttaaggttacatttaagacatttaacatttaaactattattttcccattactagcaagataa

SEQ ID NO: 763498 - DNA, 617 bp, Homo sapiens
cctactaacaatttgatttagctctataagactcattttggacttttgaactccagaactataagaactaaactataaatttgtgttgttttaagccactaagtttgtggtaatttgttgcagcagcaacaggaaactaatacaactttcgaccactctcaaaatttagaaatctgaagattaactctttcttctcttagatcctccaattctgatcacttaccgtgtcttgtaattctgtctaaaaatctctctcctttctcccactgctactgttttagtttaagttctcataatttgcctggacagttgtagtatcaaagggtgamcagaggttgggagggatgttggtagaagagaattagttctcccctcaaaactattataaatacacatgtaaactaagtacatgtactatgcatgctatgcaaattcagcctcagggaccttctctaaccacccccctttaaaaaaattagatcactttccccccaactcttcccacatagaacattgtacttggagtgcttgagtagtctactaactggtttccctgccctagctgcagcctgttttcccaaaatccaatcttcaaatggggctgataaatcttttta

SEQ ID NO: 763499 - DNA, 551 bp, Homo sapiens
aacgaagtcgtctactccctccaggagtcttagtataatttagaacaccaaagagagtgtgattattcctttcaaaacacaagaaatgtcagtaagaatacaaagaaaaacgcaagaaaatttcatttcactttgtaattaaataatcctataatctacagcaatgattcttttttttttttttttttttgaaacagagtctcgctctctctcccagtatggagtacagtggcgcgayctcggctcactgtaagctccgcctccaaggttcacgccattctcctgcctcagcttcctgagtagctgggactacaggcgcccgccaccacgcccagctaattttttgtatttttgtatttttagtagagacggggtttcaccttgttagccaggatggtctccatctcctgaccttgtgatccgcctgccttggcctcccaaagtgctgggattacaggcgtgagccaccgcgcctggccagcaatgattcttaaactttactgtgcatacaattacataaatttctaattcagtaggtctaataaaaagca

SEQ ID NO: 763500 - DNA, 633 bp, Homo sapiens
tgtggccagttttgatcatttcagaactgtttacctaatcagtgaattattttaagttcttttcttttcttccctgatgtttagccattatggggccaaataactccataaggtagtctaacagggaaaaacatcaagtaagttagtattgttagggactctagcaagtcctaggattaggaaatagggtaaaaatttaaaatttagayactagcccatttaactcatccatgtcaacttggattaatatattatggaaaattgcaatctggatctgtactgtacattcaacttctttttaaatcatagattctgtgtactatgcattctccagcatccatatggataattttaatttctgtatcttcagcatccatatggataattttaatgctaatagtccccactgggatgtcattaacttaagaaatcatttttatttttatagtacaaagcaaatgaatgtataggcacatttatttcaatcaagtcataatctgaacctaaaatgcaaagcaaaacattaacgtgcatttaatacgtatttcaagtctttgtaacagagaataaaaatcattacaaaattaaggtatgagacatcaagtcactaatgatagagttgattagacaatg

SEQ ID NO: 763501 - DNA, 575 bp, Homo sapiens
tgaaatatgcattattcattgttatttgctatagccaccctaccttgaaatagagtaccagaatttattcttcctgcctaactgtaactgtgcatccattgaccaacttctcccagttcccccagcctcccatccccagcctatggtaaccatcatgctactatttctatgaaatcaacattttttatatttcacatataattaagatcatgtggtatttgtctgtgcctggtttatttcacttaacatagttgtcctcaaggttaattcatgttgttgtaatgacaggatttcctcctgttttatggctggatagtattctagtktgggtgtgtgtgtgtgtgtgtgtgtgtaattttttattcatttatctgtagataggcatttaggttgattccatatcttgactattgtaaatagcactgtaataaacatgggtgtgcagatatctctttgacacacagatttcatttcctatggatatataaccagtaatgggattgctagaaaggctcaaagaactcacattaagaaaaggacagtctttttaaaaaaatattatatagggggccagg

SEQ ID NO: 763502 - DNA, 575 bp, Homo sapiens
tgaaatatgcattattcattgttatttgctatagccaccctaccttgaaatagagtaccagaatttattcttcctgcctaactgtaactgtgcatccattgaccaacttctcccagttcccccagcctcccatccccagcctatggtaaccatcatgctactatttctatgaaatcaacattttttatatttcacatataattaagatcatgtggtatttgtctgtgcctggtttatttcacttaacatagttgtcctcaaggttaattcatgttgttgtaatgacaggatttcctcctgttttatggctggatagtattctagtttgggtgtgtgtgtgtgtgtgtgtgtgtaattttttattcatttatctgtagataggcatttaggttgattccatatcttgactattgtaaatarcactgtaataaacatgggtgtgcagatatctctttgacacacagatttcatttcctatggatatataaccagtaatgggattgctagaaaggctcaaagaactcacattaagaaaaggacagtctttttaaaaaaatattatatagggggccagg

SEQ ID NO: 763503 - DNA, 621 bp, Homo sapiens
ttaacaaaagaagtatagaacatatataatgaaaactgtaaaacatagcaaaacgtaaagacctaaataattggagatacattcaaagctcatagattggaagactattttttaaatggcaaatcttcacttagtgatatgtagactcaatacaacccctatcaaatcctakcagggtgtgtgtgtgtgtgtgtaagtgtgtatcgccccagaaattgacaagctaaccccacattttaaatggaaaagcaaaagagacggaataaccaaataatctgaaaaggaagaaatgcattcctgggtccaaaatttgaacaaatatactaataaagatacttcagtattatgacaaatagagacctgaaaaacaaagaaatagatttgagattacaattaaagtcagctgaggttcaacaaatgtgccaaggaaatttaatgaataaagtagaatcttttcagcatttcatactagaattatctatctctgtgcaaaaagatgcatttagacaccttaccttacattatactcaaaaattaattcatcataaatcatactaaatgttaataataaaagtaaaaatatatattacatatatgttcatatatatgaacacatagaaa

SEQ ID NO: 763504 - DNA, 620 bp, Homo sapiens
tgaaaacaaagttcccatataactacatgctatagaatgacttcaactcttttctcatcaaatgtaagttgatgagactaacagttaagtaagctaggtttctgtacttctttcatttaggccttttggaggtattaattacttcttcataaatttgataattattgaaatttgactattcttattctcttttcttgttctatatgttggaacatttatttggtaaattatcttcaattataggtcactgttttctattgtacttcctttctctcattttatagaatcgattttgggtccattcttctaagcctttcaacccacatcttaaccactaatatagacattctgawttttttttttttttttttttttttgagacggagtctcgctctgtcacccaggctggagtgcagtggcaccgtctcggctcactgcaagttttgcctcccgggttcacgcaattcttctgcctcagcctcccgggtagctgtgactacaggcgcccgccaccacgcctggctaatttttttttttgtatttttagtagagacggggtttcaccctgttagccaagatggtctcgatctcctgacctcgtgatccgcccgcgttggcct

SEQ ID NO: 763505 - DNA, 573 bp, Homo sapiens
ccaatcagacttttcaccgatatcaacctccatctccaagacttgccactatttatggtcttacaaaatagtcctgaattcactcttgtttaagttattatatttttcatgataaatgtagtgcagattattgaaaatgtaagaaataaagaaaaaaatccactcgcaacacaatctcaacataaccatttttggtatgttggcacatttttcccatcatttttcccagcatgtgtagtagttgttgttattgtgtagttttaacagctttatygaggtataacttatacactacaaaatgcattcatttttagactaagtattaatgttttggtaaatttatagatttatatatccatcacccccaaaagttcactcctgccacttgtcagtcaatccctactcccgccccaagccccaggctaccactgttctgctttatttctctatagatgtgccatttctggcaatttcacaggagtggagtcatatgatatgtgtttcttatgtctgtcttctttcacttagcatgtttgaggtgcattcatgttacagcatataccagtagtctat

SEQ ID NO: 763506 - DNA, 636 bp, Homo sapiens
aggaaatgatgtttgaattacagtctaaagaataaagaggaggctgggcgcggtggcttatgcctgtaatcccagcactttgggaggctgaaatgggcggatcacttgaggccaggagttcaagaccagcctggccaccatggtgaaaccccttatctactaaaaatacaaaaattagccaggcatggtgacacatgactgtaatctcagctacttgggaggctgaggcatgagacttgcttgaaccaaggatgtggaagttgcagtgagctaagattgcaccactgcactccagcccaggcaatagaacgagattctgtctcaaaaaaataaattaaataataaataaataaataaataaataaataaataaataaaataaaaaataaataaagaggagtaattaggtaatggtgtgtgtgtgtatatatttgtgtgtgtgcacrtgcgcactagcgcttaccgctgtggaggagggaggatattccagagagagaactgagtgtatgcaaaggcctggaaggagagagatgagaaggggcaagtgtggctggagaggtgggtaaaggcagggaggacccaggtcactcagggccttaaaggccacggtgaggattctggctgagggacaatgaa

SEQ ID NO: 763507 - DNA, 565 bp, Homo sapiens
tctccactgagtgacctaggacaataatggaatgcccacatcccttgtctcttatggtctgagttacaaagttatttgtgggcaagagattggtgtttcagaaaacttttcattcccatatagtctacatccaatcaacagaactggcagtacagctcctccacaactcatcctcatttcagacawctcgggaagaaactctcaggcaaacacttcatttatccctgcccatccagaggtactcactcctcttgtctaagttttaataccagcttcacatgcctacccttccttcccatcatctctgactcacacatgttcaattcctccaccctggaattagaagtgctcaggggagaaaattactcctctctcaatgcccatgttttttttttaattcataggatttatctctagtgcactattaatctaaaaagttgatttgcctttctaagaaataacacacatagttgaaattcattcttacaaatgaaaaggcctggcattagctactttgtctttcatgtaacttgctttatcttccacagcattctcaagtaaaaag

SEQ ID NO: 763508 - DNA, 628 bp, Homo sapiens
aatacccctcccaacaatgacagaatatccatattcttttcagatgcctgtggaacatatagtaagatagagcatattcctgggccataaaataaatctcaacaattttaaaagaattgaaatcataaacattgtgtattatggacttaattatgtccccccycccccgtgccaaaattcatatgttgaagccctaaccccttagtgtgattttttgaagacggagcctataaaaaggtaattacggttaaatgaagtgaatatggtgaggtgaataaggttacatgaggtgaatatggtggagccctaattcaaaatggcttatgtcttgatgagaagagtaagagacaccagggatatacactcacagagcaaaggccatgtgagggcatagtgagaagatctgccagcaccttgatcttggacgtgtggcctccaaaactgtgaaaaaaaaaataatttctgtggtttaagtcaactagcctatggtactttgttgcggccatgctagaaatcaataatagaaagaaacaggaaaatctccaaacacttgttaactaaacaacacagagttagctctctatatctatgggttctgcatccatggattcaaccaaccacagataga

SEQ ID NO: 763509 - DNA, 442 bp, Homo sapiens
gttaggactggtaacctgtttatgcttacttttcactgcactgagcaaactcccacctcacctatatgaacttgtagaacagtctgtggtgttctcttgaggaattcttgctttctctaagcatatttcttgttgctcgcacatttcattaataatttgattaaaaattgggtgccttagttgaaagtaagcatggagctggcttgtgcctctaaggagatttgacctagccattgctgaatagcaatctacatcacattatggcaagcttaaccagtgtttttrgtaatatagacggtaataacttctttttggtaatatagatgtcaaggaaacagagggaaacctggttccccaaactcaggctgatgtacttagactgactgaccttttaaagtctgttgtacatcatagttttggaggatctaggtcccagcgaaaa

SEQ ID NO: 763510 - DNA, 591 bp, Homo sapiens
catgtggaagggaaggtagaggaagaaaagaaacagagggagaaggccaatgtctctgtcttttcaagtgaaacacgctcatttagattcatatgcgtgaaagcatataatggtaatattatggtaaaatgctatgagtgtgagcatgtatgtgtacatgaggctacacttgggatgccatgcaagtgtatgtgcagcctttgctcagttattccaggccctcaacttcttctccaaaatggaagggtgtcaagggactcaatagcaaatggattgggctctatgttctctgtcagacctgtgtggctttgctacatatccaggctgagaagatatccttttccayattcccccaaaccctctgttatttgactgtcctgttgccaaaattctgagggtatctgcaatgtatttccaactttgttataaaggaatttcagtccctgagatatcctggtagctaaccatttgacacagctattttattaacctagtccttgcagcttcctggagggatgccggaacagggaaaatgatggtatctgcttgaaaaacatgaaaattaatggggactatatccgaatgaactta

SEQ ID NO: 763511 - DNA, 600 bp, Homo sapiens
caatatacaacaaatcttaagagcttttgaggatgattttttttctttctttcttttgtatgtacctacaaaattttctataatggatctctattgattttatattttttactttctatttgtcttggaatttctattactttatttataattcactctagattttaggtactagacaactactattaactctctggagaatggtactataaatctgaccctttctgtcatttttttttcctgtggtacactagtgtctcacaaagagtccacagaattcacacggtcatgatattttatagaagaaatcattttatgggaactttcttttgttaatagatccttccaatgctagacattattctgtataacartgctaaagttggtatgcctaaatgctaaacttggtatgctaaagttggtttaaaaattaacctatatacaatcttcttgaataactcttcaactttaaataaatttcttatttaaaaaatcctcctatatataattaaaaatactgatgaatttgactacataaaaataaatgcttatacagtaaaaagtcccataaacaaagttatcatctaaacaagaaacctg

SEQ ID NO: 763512 - DNA, 590 bp, Homo sapiens
tattcaaggtctttgtaccatctgggaaaagggtgtaagtggcaattacaataacatttgatatgccaagaatgaatgttgcaatcatcagtgtaagcactagaagaacagttaaggggtgcctaatattcaaattaatacaggagtaaaaagtcaaaaaaatttaaaatttagtaaatctgaaacaagccaagaaaayagtgatgtggttaagtctatctttagagagaaatgcaaggctttacaaatgcatatattagaaaagaagaaaagatatgaaaaaaatcaatgaaccaagcatccattttaagaagtcaggaaaaagccctgcaaattaaacatagaaaagaagaagtaaataaagtgtagaagttaatgaaataaatgtacaatagacaagataaacaaagtcaaaaccaacccctcaataatttgagagaaaatatgagagcaaccaagcaaaaaatccaccaatgtcaatagtatagaaggtgagattataaatctacccagaggaaaacaagtcattatatgaaaaagatacttgcacatgcatgtttatagcggcacaatttacaattgcaaaaatg

SEQ ID NO: 763513 - DNA, 552 bp, Homo sapiens
aaaaatccaccaatgtcaatagtatagaaggtgagattataaatctacccagaggaaaacaagtcattatatgaaaaagatacttgcacatgcatgtttatagcggcacaatttacaattgcaaaaatgtgaaaccaatgcaaatgcccatcaatcaacgagtggataaagaaactgtgattatayatatatatatatatatatatatcttttgtgatatgtttatatcattcttttaaagaatgggaagagggagcactgccttattttcctcctgaggtcagcataacctgaataccaaattgaacaagggtattgtaagaaaagaaaattacacatactttattatttcataatcaggatgaaaaacatcttaaagtactaacaaactgaataaggagatattatggtcaagttggcaaggaaaaaataatactctcattacccataaatgacatgactgtattcacagaaagaaaaactgtagaaaaaagtgaatttagcaaggtcacgagacataaaatcaatataaaattaatcatttgtatttcc

SEQ ID NO: 763514 - DNA, 614 bp, Homo sapiens
tatttattattttctatgaaaatcaaaataaaaccaccgaatcacacagacaaacaagcgagcacatgttagagcacttgaatcctaagaaaaagttgctgggtggccgatttcagtatgagaagtttctaacatacccttttataataaatttatatctaatattgcaaattctacaaagcaagtgtgggaacaaatttgttgagtttttaaagttgaaatttggcaaaaatgtacttaattaaaatgaaaagtatccatcaggagctttgaaatgtataaattaattcacatttgaagarataaaccaactgctcggggcacttccattagagtgatccaaaattgatgcacctcacagaatagatattgcttctttttttcttcctggaaggatcatatataatattttaaatttctataccatccttcctccaggcagtataaagtacttcataaaccttatgttgatgatgttaacatacttgtgagactaaataaatggtaagcaacatgctccccagcttataaacaaatcaaaagctcagagaggaacagaattttatttccaagatattttgattcgtttctcttttttccctcacttagaataa

SEQ ID NO: 763515 - DNA, 598 bp, Homo sapiens
atgagcttcccagcctaatactcatgttcatccaactaaacttgactgcttctgagctacatcactttttaggctcaaattggccaagataatgtgtaaagctgcccaattttaaagaaggtaaatgaacttgaagatttaccttgyccaaatccctgaagggagagcaagagagggctagggaaaaaggcatgtcaggctcgaggtcagacccaaggtcacagagacctcccttccattgcaaagaaaaaattatcaattaactgaagagttctcttcctactgtgattccctctctggtaagatggtcctcagaggggaccaccttgacttctactgcattatctccatccaccttagtcaccagctacatatgaggttaaaagacagagagctgaagcatcagtaggtgcttgagcagttggcagaaaactcacctgcccaagtgggctcctacttgtggtcctctgtttccctgtatgtgacatgagggaagagggctaggctacatggatcaaatattttctaaagtgtgaaaatgctccagttcctaattgtttaatgtgaggctcaggatcctgtttttttttttttgttt

SEQ ID NO: 763516 - DNA, 530 bp, Homo sapiens
acattcctactatttactaatagccatttcccctccatttccagaaaaatggagaattgcacatatatttttgtcttcctgaaattaagcatggccgtgtgaattgctttggctaatgaaatgtaagagtgatggggtcagtagacgggcacacttatttgctcaagtttgttctgccaagcttgctcttctcctgtcattttgagcttggaagcacatgttgacatggaagttattgtcacatgtatttgaccatggcatggaggccagctactttggagacccagctacacttgcaatgaactttacatgagcaagaaatagatctctgttgagatttgggtgtgatttttcagtgtagcataacctaggctagattggctgatatttgcarcactctttagctagccctgtgccagttgttgaggatacagaggaaaacaaatcattgtgtgtgcccttgacatggcagggagtgagaaacaagatggcagaggagaagtcttatatcaggagcaatgaaaaagaga

SEQ ID NO: 763517 - DNA, 600 bp, Homo sapiens
aggctaatgtttattcactattttgaatgtgccaggtaccatgctaagaaatgcacctgcatcatttatttgtacaatacctgtgtaggtagcctcatgcccattttatagatgaagaaacagaggtctaaaaactcaccccaagttttcactgctaatgaaagagattgggcatttaaacacagtaaatgccaccatcaggccccagctcttaactcttaggctctaatarcagcaagcactgggtaggaaccttctaaaggaagaataagcatcagcataggaagatgagagaacagaatcaggaaagatcacttctaaggtctctgccaacattaagagtctctgatttaatgattccatcttttaatttctccattttcagtttttgtatcttactactttgaatagtacctggggatcttttaggttccctaagctttgtgcctggtaataataataattaggctgtcattaaaggcttcacaccttgcaatcaccttttagaggaagctctttagaccctttacaagcaaaacctcaatgtccccctgcattaggtaagatttgttttgcatactttgtagggaggggactttt

SEQ ID NO: 763518 - DNA, 683 bp, Homo sapiens
tggtgtgctgtgctgagtcacggttagagagaagtgatcattcacaacattcttcctggggacaattgctcagatggcaaatagctctgaccttgggacttttggggaggtcatcttcttctttttatatacccaataactgagttatttaaaaacatctgttaaatgtctagagtaaagagtgcttattacggttaaatgtsaaggtgagctggggaaagtgaaagagactttttgcaaaggaaattcatccagaagccatttccaagcactgactaacttgacagtatccatttgtttcccttttgagtcataggagcagttattgtcattagtatgatttcaatccatatatgggtttaacaaatgtgctgcagaaacaaccatattcaacgagacttcaaagagctcacctaccatcttactgacgccataaaacatattgaagcaaactggcactaatttattatcatcattgccttaaacagccatcttcttaatccttctgattgatatcacttcccaactattcaacagatgagccattatgcatgttgaatgcatatattttgggtggcattttaaaatttaagtttcccctgggcgtgatgaagctgactcaatacatatggatcccattatttccaaacaaatattctgtcatattaacgccgtccatgttg

SEQ ID NO: 763519 - DNA, 522 bp, Homo sapiens
ccaaattatatttgctgttttatttttcttatctagtatgtactgaagtggtaagaagagatcatatttcttatgtattaagtgacagttcattaatttactaaattaaggaatatgtatcaaaagcttactatgtagcaagcaccatttaaagttatgtaatttccccaaactcaaagagataamagtaaacagtgaagaagcaggtcagtatatctgacccattgccatttcactatctgttcttctccctatgtgctttggttggtaaaatttgtgtcagaataccagcttactaataaatgaaattgacctgcaactctctcaagaaacatttatgctaagtgtagctcttagcagaagattacagctactgggaaattctcagcaacagagaagaggatgcaagtgaaatgaaaagcaattgggcagtctaattgagaaagtaatgatgatactcagtatgaaaatagatattctgatggcattaccttccctaggatattctcatactaatctatg

SEQ ID NO: 763520 - DNA, 623 bp, Homo sapiens
aactttattgcaagtagactgtgagcttcaaagaacttacagcaacacaaatttatctcctaatattcatctgtatgacattatctctctgcttaatttccatagagatatgaataaaggaaagaaattgaacctatagaagcaatggttttggtctgctctttgagcctgattaaataaaagattttaatagacaattttaaaaagttttatgaataagatcttgcttataattttattatggctgtattgtatgtctaatattgtaaataataatttttattttattatagctaatattcaagtgatgtttaaagcatgmtcggtactgtgttgaacacttacacattttcccctttaattgcccaacaatcctaaattgcaaactatcacaattttattgataagaaaacgtaggattatttaggaaagtcacactgctagtgaataatagagctaggaaacaacttataagtaggttatctatatccggaacttttattcacactgttttattaagtagatagattgccattttgttcatttgtatgtgtgtgtttgtgtgtatgtgtggtgtgtgtgtgttttctatatccttattatgtttatattaaactgtatat

SEQ ID NO: 763521 - DNA, 607 bp, Homo sapiens
ctttatgcttttttattccttttaaaattttttgtctaatgggttatttcaaaagacctatcttcaagttctaaattgtttcttctgcttcatctagtctattattgaagcttttagattttttttatttcattcaatgaatttttgagtttcaggatttctgtttagttctttttatgatacctatctctttgataaatttctcattcatattctgaactgtttctttgatttacktgtattgtttagtgtgttctttggtatctcactgagcttctttaatattattatttcgaattctttttctgggaattcataaacttctttttcattgaattattttactggaaaattattgtgttcctttggagtgtcatatttccttgctttgtcatgtttcttgtgtctttacattgatatctgcatgtctagtttgacagttccttcttccaattttttggatttgttttcatgaaggaggacttattcctgaagatgtttctatggtgttggtggaatagggcacttttgcttttattctgggtgtgcatgatagtgtagtatccatatgatttcttcagtagatagtattgataatgcctgtggc

SEQ ID NO: 763522 - DNA, 607 bp, Homo sapiens
ctttatgcttttttattccttttaaaattttttgtctaatgggttatttcaaaagacctatcttcaagttctaaattgtttcttctgcttcatctagtctattattgaagcttttagattttttttatttcattcaatgaatttttgagtttcaggatttctgtttagttctttttatgatacctatctctttgataaatttctcattcatattctgaactgtttctttgatttacgtgtattgtttagtgtgttctttggtatctcactgagcttctttaatattattatttygaattctttttctgggaattcataaacttctttttcattgaattattttactggaaaattattgtgttcctttggagtgtcatatttccttgctttgtcatgtttcttgtgtctttacattgatatctgcatgtctagtttgacagttccttcttccaattttttggatttgttttcatgaaggaggacttattcctgaagatgtttctatggtgttggtggaatagggcacttttgcttttattctgggtgtgcatgatagtgtagtatccatatgatttcttcagtagatagtattgataatgcctgtggc

SEQ ID NO: 763523 - DNA, 603 bp, Homo sapiens
tttgttttcctttcacaccctatactggacataattaactcatgtccagaaggaaaatgtgtgaaggccaaatgtttttctcatctactattgttccaatacttgaaaacaacaacaacaacaacaaacctaagctaggaagatttgaacatttaaaagccagataattcttttagaaaaggttaaattgttaggacacagtgagaggtcttgagacttttggagggacttaagaattcaagaccctgtcaatgatttgacttgcctacagaaagtaaacataaaacacaaagggaacccctagttgcttttcaataacatggcaacttcatggtccccctcccacccccgcctctctgcacacaccctctcttgccattgcagaaagatractaatggcttatatacaagagatagcagttaatataagacacatgatgttatacaataattaggcaaaattagagtatttacatttcaactaccttggttctttattttttacaaaagtgaaaaatagtgatgggttgatacagccccctggtaaagctcaagttgtcactttcaacttttatgcaggatactttgaggtgggaattttta

SEQ ID NO: 763524 - DNA, 536 bp, Homo sapiens
aagttaaccaaggaggtgaacaatctctacaagaactacaaaatactaatgaaagaaattgaaggtgacaaaaagaagtggaaaaacatcccatgttcatggatcagaagaattaatatcattagtatgaccatattgcccaaagcaatctacagattcaatacaatccctatcaaaatgccaatgtcattcttcacagaattagaaaaaacaatcctaaaatttatatggaaccaaaatagagcccaaatagccaaagcaatcctgagyaaaacacaacaaagctggaggtatcacgtcacctcacttcaaaatatattacaaggctatatagtaacccaaacaacatgatattggtataaacatagacacaaagaccaatggaacagaaaagagaatccagaaatagtcacatatttgcagccaatggatcttcagcaaagcctaggagaacttaggttaaggaaaggataccatgttcaataaatggtattgggaaaattggatagctactttcagaaaaaggaactggatcc

SEQ ID NO: 763525 - DNA, 532 bp, Homo sapiens
tatatacactgagaatcacatcaggtaatgttaaaattttgcttcaaggctattctatttacccacatgtttatactttacattgttgtttcttcattcttaattttcccttcttttatctcctttatgtttgaaaaactttttttaaatttagggtagttctactgggaacaaaaatctcttagttttccttcacctgggaatgtcttttgatttcctacttattttcctgaaggatattttcacttgaaagaagattctgggttaagrgttcttttcttttaacgcttgaacaatgtgtatcatttctttctggcctttgtggtttctgacaagaaacgtactgtcatttgaatccttgctcctctgcaagtagtgcttcatttctctccagctactttcacggtgtttttttgtttggttggttggtggtggtggttgttgttgtttggtcttcagttgtctaaagtgtgattaaaatgtgtctaggcatgaactttttgagagttaccacatttaaggctcacttacc

SEQ ID NO: 763526 - DNA, 638 bp, Homo sapiens
ctaacatactgaatggtgaaaagctgaaagcctttcttctaaatactgaaacaagataaggatgcccactttcaccacttctattcaacataatactggagaccctagccagagcaatcacgcaaaagacagaaataaaaagcatccaaatcagaaaaaaaggaaatcacgttgtttctcttcagatgaattgatcttaaatcttaaaaaacctaaacgctctaccaaaaaactcttggatctgataaatacactcaataaagtcgcaggatacaaaatcaacatataaaaatcagtagtatttgtatacaccaataatgagttagctgagaattaagtcaagaaggcaatctcagctgggcacatggcttatacctgcaatccyggctagtaagaaggttgaagcggcaggattgcttgaggctaggggttcaagaccagcctgagcaacatagtaagacccccccatgtattaaaaaaaattgagaaaacaaaaagtaaataaaaatttaaaagaatgtaatcctatttacaatagccataaaaaattacttgggaatatatttaaccaaggaggtgaaagacatctataaaacacttctgaaaaacattaaagaggaggcaagcaaatggaaaaa

SEQ ID NO: 763527 - DNA, 548 bp, Homo sapiens
ttgagatggagtctcgctctgtcaccaggctggagtgcggtgacaactgcaagctctgcctccatgggttcacgccattctcctgcctcagcctcccaagtagctgggactgcaggcgtgtgccaccacacccagctaagttttgtatttttagtagagacggggtttcaccatgttgggcaggatggtctcaatctcctaaccttgtgatccgcccacctcgkcctcccaaagtgctgggattacaggtgtgagccaccgcgcacagccaaaattcttaccttactaaaaattcttagcttgtgaagaaaactaagaccaactagcttaagaaaaaaatgtgttgtctcatataattgaaaagcaaagttggctttagccataactagatcggggagcttaaaaactgtcattggtacttaatttctccatctttccaactcatggttctatctttttctttgttgattgtgcttccaggcagactttccccttatgatatcaagatggctcaccagcagctccaaactcacatctctgccagcatg

SEQ ID NO: 763528 - DNA, 580 bp, Homo sapiens
aaagcacaggctttctgccttaaatgtgacatgattttttttcaattaactgctatgtttagcagcaaactgtgcctttcgtgtgtgtgtgtgtgtgtgtgtgtgtgtgtgtttgtgtgtgtgtgtgtgtatgtgtgtatgtctttcttagctttgcaaacaaagagttttctcaaactctgttttcttttctgttgaccttggagaaagaagtaaataggaaatcaagtataatccactctcccctggtcactcatatttatggtaactcttctggattcttcagtgaagacttttcaccaaagggacaccaagatataccatgtgatggaattgtagccaaatctactaagcagttaaaccaagcaaatacagtgaggacagcagtatttgctatgcaaaytgggcaacttttgacaccatcccgcctctgcagcccgcaaaggcgggaggcagcctttgctagaatgcagggccctttctcaggcctctaggcttctgctgctatgattcccctcccccaccacactgggcctttgaaacctggtcatcttgctgtgttctcttgcccatcttctct

SEQ ID NO: 763529 - DNA, 613 bp, Homo sapiens
tcacattcttcaagataacataataatgatgcttgtttcatgaaagaagggattaaaagaagactgaagatcacttagtacagtgcctgacatgtaacaaatgctcattaaatgttattattattattataaaatcaatcatatgtgcaacttgatgaagccctgggggatgaaaaaggggggctcattggcagacaatttaagcagcttggaaacgtatgttggcatacctgtgagcacatatgataatattgcataatgaatcctctaagttccattctattgtcaaaaaaatttgtttcagaaatggagctacaacttattccagagttagacttttgtggccatggtgaacaygatccttttaaatagagagaagggcctgggtaagtttaaactgaattaggttctcagttctcccaggctttgactttgtcatctgtcacttccctctcaaagggctggcaaagcccagggcagttcaggattctctcatctgaagttctgtccgtcgattctgaggggagtctggggctgctgacagtagatggcctgcctctcacatctcactattctttgatctcacagttacaattgtgttgcttttggtttt

SEQ ID NO: 763530 - DNA, 550 bp, Homo sapiens
agccttttatcaaaaaaaaaaaatgcatcattcacaaacatttccaaccatccttgtcttttgatcagcaggtcttcatttttattcaatcaaatgtattattttcagaatctgttatgaatcatgcttcagatgttatagtaaataaaactttgacttcacttcatacaattttatcctaattttcttctrgaaaccttataggtctttgatccattttgagttgcctttcatgtatgaggaggtgtatgggtagagattgtttgtttagtatatggttattgaactgcagcaattctctttccagctactctcacctaggaacttcagccactcttatcttcctggaattccatctctgcctctgcaactggagatatctaggctctgccagtaccttcctctttacttggcagcctgggagttttctcttggtagtaagctgaagcaattgtagggctcacctcatttatttctcctctctcagtgaccagttgccctgcactgcctgaggcctgaggtcagaaactcttgtttctaatatgttttc

SEQ ID NO: 763531 - DNA, 550 bp, Homo sapiens
agccttttatcaaaaaaaaaaaatgcatcattcacaaacatttccaaccatccttgtcttttgatcagcaggtcttcatttttattcaatcaaatgtattattttcagaatctgttatgaatcatgcttcagatgttatagtaaataaaactttgacttcacttcatacaattttatcctaattttcttctagaaaccttataggtctttgatccattttgagttgcctttcatgtatgaggaggtgtatgggtagagattgtttgtttagtatatggttattgaactgcagcaattctctttccagctactctcacctaggaacttcagccactcttatcttcctggaattccatctctgcctctgcaactggagmtatctaggctctgccagtaccttcctctttacttggcagcctgggagttttctcttggtagtaagctgaagcaattgtagggctcacctcatttatttctcctctctcagtgaccagttgccctgcactgcctgaggcctgaggtcagaaactcttgtttctaatatgttttc

SEQ ID NO: 763532 - DNA, 623 bp, Homo sapiens
gcacatccaggtagaaatccagaacattaactgagtcctacgtaaacttacaaaaatgttccaaagtgtaaaaccacaatctatgagatagggttacaggggcacttgtttcttcccaagggactcactgggagctaccagtggtctcaatctgattcactgtctgagtctgtttgggctaagtctcataccatatatcgggtggctgagaccacagaaatgtattctcagatgtctggargctggaatgtccaagatcaaggaaccagcagattcggtgtccggcctcataaatcacctgctgtcttctccctgtaacctcacagggcagaaggggcctccctggggcctctttcataagatcactcatccattcataagggctccactcccacgacttaatcccctcttaaaggctctatccccaaataccatcaccttgggaatgaggggttcaaaacagaaatttgagggggacacagacatccagaccctagcactcaccttcctcctatttgcacatcccatcgacctttcaatccctgttgatggttaggaataggaaaatcactggggatgacctccccagacggtgtttgattaggtgactaagtgaggaacgg

SEQ ID NO: 763533 - DNA, 627 bp, Homo sapiens
gaaataatctacccaatttcatgctacagttgtgtaaccttgtatacagttccacatcttcagagaaccagtttaatcatttgtaaatggcacaataatttctaccctgcctattttatgaggctttagagtaacaaaaccagcaaatgccttgaaaactatgagaatttctgcacagtgagacatttctaccagttttcactatgttcctaggctttgcagcttgatgtggaaagagccagggatggtaaagaggagagaatttgaagaattctttatctaaggccacagtcagtaaaaagaggacagaatccctttagtgggctttgctagaaataaagcaaaaatgaaacgaaagtagtatgttggtgatctctaaagcagctaacttctgttttatagaaatctrggtttgtctagccaaatattaagaagtattactttgcataaacaaaacagatttatagcaaatacatctaaatttacttattcaaataaaatgttgcttccctcaagataaccacatcttcaaaaaagacacatttattccaactactatgcttgcctctctcacacccccagttcaaaatatttttagatttgcttcacacttggtttgtaaaccaa

SEQ ID NO: 763534 - DNA, 627 bp, Homo sapiens
gaaataatctacccaatttcatgctacagttgtgtaaccttgtatacagttccacatcttcagagaaccagtttaatcatttgtaaatggcacaataatttctaccctgcctattttatgaggctttagagtaacaaaaccagcaaatgccttgaaaactatgagaatttctgcacagtgagacatttctaccagttttcactatgttcctaggctttgcagcttgatgtggaaagagccagggatggtaaagaggagagaatttgaagaattctttatctaaggccacagtcagtaaaaagaggacagaatccctttagtgggctttgctagaaataaagcaaaaatgaaacgaaagtagtatgttggtgatctctaaagcagctaacttctgttttatagaaatctgggtttgtmtagccaaatattaagaagtattactttgcataaacaaaacagatttatagcaaatacatctaaatttacttattcaaataaaatgttgcttccctcaagataaccacatcttcaaaaaagacacatttattccaactactatgcttgcctctctcacacccccagttcaaaatatttttagatttgcttcacacttggtttgtaaaccaa

SEQ ID NO: 763535 - DNA, 580 bp, Homo sapiens
aaggaaaatattatctaactgtatccaaagaacttctataatcctacttgaacaagttaattcctagactagaccttgatatcctcatgtgtaaaatagagacaataattcctactttataaggttgttctatcaattatataagataatgcttatgaactgatagttggttcttttaataactattttttataaatctgatattcagtgattatagtttttccttaaagcyatagctagtaactctagctaatattaacctctctccttttttacattacagcgctccaatttcttttgtttgtttgttttttctttttgagacagagtcttgctctgtcacccagactggaagtgcagtgccccagtctcagcccactgcaacctccaccccctgggctcaagcaatcagtgctcagcgatcccaaagtgctcggattacaggcgtgagccaccatgcctggcctagagtgcttgaatttcaaatgctttattttatattgtcttttaattgcttaatgacttgtggtctgactagatagacaagaattatttggaaagaagggagattaaaaggcca

SEQ ID NO: 763536 - DNA, 535 bp, Homo sapiens
accctccaaatatttttattttattttatttttggagacggagtcttgcactgtcacccaggctagagtgtagtggcccaatctcggctcactgaaacctccacctcctgggttcaagcgattctctgccccagcctcccgagtagctgggactacagccgtgcrccaccaggcccagctaatttttgtatttttagtagagatggggttttgctgtgttggccaggttggtctcgaactcctaacctcaggtgatctgcctgcctgccttggcctcccaaagtgctgggattacaggtgtgagacaccgtgcccggcctcaaatacatatattttaaatgaactctcagcagaattcagaatgctcaatcaagtccttcacttcgtactctagattgctggtaaatacggcctaaaaaaaaaaaatcactgctaggtcatacattgaaaagagaaaagtgtgcaaaacattaaacaaaagaaaatagtaataaaaatctgacattttttataggaataacattttgaactgaaa

SEQ ID NO: 763537 - DNA, 535 bp, Homo sapiens
accctccaaatatttttattttattttatttttggagacggagtcttgcactgtcacccaggctagagtgtagtggcccaatctcggctcactgaaacctccacctcctgggttcaagcgattctctgccccagcctcccgagtagctgggactacagccgtgcaccaccasgcccagctaatttttgtatttttagtagagatggggttttgctgtgttggccaggttggtctcgaactcctaacctcaggtgatctgcctgcctgccttggcctcccaaagtgctgggattacaggtgtgagacaccgtgcccggcctcaaatacatatattttaaatgaactctcagcagaattcagaatgctcaatcaagtccttcacttcgtactctagattgctggtaaatacggcctaaaaaaaaaaaatcactgctaggtcatacattgaaaagagaaaagtgtgcaaaacattaaacaaaagaaaatagtaataaaaatctgacattttttataggaataacattttgaactgaaa

SEQ ID NO: 763538 - DNA, 587 bp, Homo sapiens
aacaagatcttgtaaaccatgagcagtctttcaaaacttctgtttcaggagaacacacatcatttccatctagtttctttagaaaaagtaagttcatggccactcttgagttcaacatggtaaggatgtacacacctcctccaggaagagatcacaggtcttcaagccaatgtaataacttatcacaaaaatccaaaatctaggaactgttgataaccatagtaaacagatggttatcattttctaaaattgttaaaaatacagttgaccctagaacaacatgggtttgaactgtgtgggtccacttacacgggacyttttttcaaaacagttacacccagcaagactgcttctcctgcctccccttccaccttctccacttcttctgccttttccacccctgagacagcaagaccaacccttctccttcctcttcctcagcctactcaatgtgaagatgatgaggatgaagatctttatgatgatccagtttcatttaatgaatagtaaatacattttttcttcttcatagttttcttaatgacattttcttttctctagcttactttatcataggaatacagtat

SEQ ID NO: 763539 - DNA, 600 bp, Homo sapiens
tcagctcactgcaacctccacctcctgggttcaagcgattctcatgcctcagctacccaagtagctgggattacagacgtatgccaccaagcttggctagtttttgtatttttagtggaaacggggtttcaccgtgttggccagactggtcttgaacgcctgacctcaagtgatccacctgcctcggcctcccaaagtgctgggattacaggcatgagccaccacacccggccaaaagccctaagttttcaaataatgtattcagtggtaaaatctgacctgaattaacatgagactatttgttatatagtatatactatactttgtgtgaatattcatgtgtttcaatgcagaaatttcaatgtgtttgaytttggggtgctagagatactatgcatactgttccaaaatccaaaaaattctgaatcccaaaaatacatctgactccaaaggtttaagagaagggtttggggacctacaatataattaatatttactgagaacttacaatgttccaggagctattctaagtactttatatttgttaacttgttcaatttaataagcacaactgtggtgtttctaaaagatgcaatccaa

SEQ ID NO: 763540 - DNA, 602 bp, Homo sapiens
ggcactttgaactttgcattctttttttttctttgaaatggagtttccctttgttgacctggctggagtgcagtggcgtgatctccgctcactgcaacctacacctccccggttcaagcaattctgcctcagcctcccgagtagatgggattataggtgtgtaccaccacacccagctaatttttttgtatttttagtagagatsgggtttcaccacgttggctaggctggtctcgaactcctgacctcaggtgatccacccacctcgccctctcaaagagctgagattacaggcctgagccaccaaacccagcctgagctttccattcattttgaaaaacaccaaagggcaattatgaatctaatgatttggaaatgaaagggcccctcaataccagactgccctcctttatcttttgatctctatctcaagttttgtggctagttccagagagtctgagttctctaacaactgtggacttgggctcttctaatgattgttcctaagggacccttcaaggaaccacttattgtgtggcttgttctagtggtccagtcccaaagttcagtccatcccaggaaggatgtcaagaaaagagggt

SEQ ID NO: 763541 - DNA, 637 bp, Homo sapiens
aagagctccacaaacatgagacattgctattgccatatttaagccatgggctctagaaacccctgaagttatatataaaattttatgagtgtgtacattttttggggggagaaaagtttttatcaaattccccaaaaggttaagaaacactgaaaagaaaaaaagtcctttgacccagaaggatactttgacccagaaggataccaaaataaaaacagcacatccttatctgttgttctgaaccttcccatgctcacacctctgccttgtgcgccatcctccctccacctgcccgtacctcgcagacagcatcaggcaggactcggaagtctcaatctttagagcgtagggcactttctccatcacagggcggctgacctggaaaaccaacagcagcctccttcagggtggggcagggaggggcaagtgtagacmggcttctcctggcagcagatgaacagagggaccatgtccacctactgccgttctctagcctcagggcatacctttctgtgatggtaggtgctgtggaaggtgcctggctgccagctccatcattcttggccactcacccaccgctgggaaggctgcagagcgtcatgctcagggcccagcccgggcaaccccaggtgcactg

SEQ ID NO: 763542 - DNA, 637 bp, Homo sapiens
aagagctccacaaacatgagacattgctattgccatatttaagccatgggctctagaaacccctgaagttatatataaaattttatgagtgtgtacattttttggggggagaaaagtttttatcaaattccccaaaaggttaagaaacactgaaaagaaaaaaagtcctttgacccagaaggatactttgacccagaaggataccaaaataaaaacagcacatccttatctgttgttctgaaccttcccatgctcacacctctgccttgtgcgccatcctccctccacctgcccgtacctcgcagacagcatcaggcaggactcggaagtctcaatctttagagcgtagggcactttctccatcacagggcggctgacctggaaaaccaacagcagcctccttcagggtggggcagggaggggcaagtgtagaccggcttctcctggcagcagatgaacagagggaccrtgtccacctactgccgttctctagcctcagggcatacctttctgtgatggtaggtgctgtggaaggtgcctggctgccagctccatcattcttggccactcacccaccgctgggaaggctgcagagcgtcatgctcagggcccagcccgggcaaccccaggtgcactg

SEQ ID NO: 763543 - DNA, 631 bp, Homo sapiens
gagtggaggcaattctcactgagcagacctaggtacctgtcgaactgcaggatgtgagtggcgtggtgatcaaacccctgctcccgggccaggaagacgtcagctaccttctgctggctctccctgcagccaggaatggggatgggacagtgagaactcagccttgtaaccaacgcagggttagaagcagggggcctggagtcayatccctgggtgcagatcccagctcaacccttgcacagttgttttactttgagcaaatgacttaacacttcggagttcggctttcccatcaatcaaatggagatactatttcatatggtggtgtttttatccgtctccattcccccagtgcaacaaaagtggaacccgggggtccagggactgctcaccaatttgacagcctttcctccagctcctccaggatgccttgatgaaggtcgtggatggctgggagttcactcaggccctgcctcagctcctcccgggccaatgtgtctctgccttcatggtccatgtcatccaaggccctcatgacagctccatggaaatcctgaaacaccaaaaggtctgttacccacaggttgataggactgagcacaagtcctccttggcagatttcccctggggc

SEQ ID NO: 763544 - DNA, 631 bp, Homo sapiens
gagtggaggcaattctcactgagcagacctaggtacctgtcgaactgcaggatgtgagtggcgtggtgatcaaacccctgctcccgggccaggaagacgtcagctaccttctgctggctctccctgcagccaggaatggggatgggacagtgagaactcagccttgtaaccaacgcagggttagaagcagggggcctggagtcacatccctgggtgcagatcccagctcaacccttgcacagttgttttactttgagcaaatgacttaacacttcggagttcggctttcccatcaatcaaatggagatactatttcatatggtggtgtttttatccgtctccattcccccagtgcaacaaaagtggaaccygggggtccagggactgctcaccaatttgacagcctttcctccagctcctccaggatgccttgatgaaggtcgtggatggctgggagttcactcaggccctgcctcagctcctcccgggccaatgtgtctctgccttcatggtccatgtcatccaaggccctcatgacagctccatggaaatcctgaaacaccaaaaggtctgttacccacaggttgataggactgagcacaagtcctccttggcagatttcccctggggc

SEQ ID NO: 763545 - DNA, 523 bp, Homo sapiens
acacagtccagagagatcaatggacttttaaaagaaatcacctttgtggagagaaaatgagatatccccatttggccaatgcttggtaagtgtcaggcacctgtgctgagtgcattcacttgcaatggtctttaatcaatgtagcaaaactaacctaggcttggaaggggagggatgatggagagtgggaggcaggtrccgaaaaaggtgctgaggtctgctgggaagcgggcgaagggggcgcttcactctttgcctctccagtcacctctcaacatgcaggcatggcctggcagatgggtgggttgggtgggggcatttcacccttcctagcccatttccctgcagtggttgtgtcccccgcagaacaaatgcctaagccccatatcaccccgtgatgcttcctgggatgccacctaccagtcacatgcctaggcctgctcttcacctctgcccatttctgcaaatgtacattgtgggaaaggattcatgactctgagaaggggtgtatggaaaggctggg

SEQ ID NO: 763546 - DNA, 523 bp, Homo sapiens
acacagtccagagagatcaatggacttttaaaagaaatcacctttgtggagagaaaatgagatatccccatttggccaatgcttggtaagtgtcaggcacctgtgctgagtgcattcacttgcaatggtctttaatcaatgtagcaaaactaacctaggcttggaaggggagggatgatggagagtgggaggcaggtgccgaaaaaggtgctgaggtctgctgggaagcgggcgaagggggcgcttcactctttgcctctccagtcacctctcaacatgcaggcatggcctggcagatgggtgggktgggtgggggcatttcacccttcctagcccatttccctgcagtggttgtgtcccccgcagaacaaatgcctaagccccatatcaccccgtgatgcttcctgggatgccacctaccagtcacatgcctaggcctgctcttcacctctgcccatttctgcaaatgtacattgtgggaaaggattcatgactctgagaaggggtgtatggaaaggctggg

SEQ ID NO: 763547 - DNA, 570 bp, Homo sapiens
tttgattatacagatttttacatcaacttaaagaaaataatttaagtggcccatactttgaaagttattgtccaggaggtacgtatactcaaaatgtaaacctaaaatgaaactattttttaaatcctatttaggctgggcgcagtggctcacacttgtaatcccagcactttgggaggctgagaggcaggtggatcacttgaggtcaggagttcgagaccagcctgaccaacatggtgaaacccgtctctactaaaaatacaaaaactaactgggtatggtggcgtgtgtctgtaatcccagctacttgggacattgaggcaggagaatcacttgaactcgggaggtggaagttgcagtgagaygggatcgtgccgctgcactccagtctgggcactccagcctgggcaacagagtgagactccgtctcaaaaaaaaaaaagaaaagaaaagaaaagaaatcctatttaaataaaactcctttgcaaaaatgacaagtgctatattttaaagatatagaaaatattcaagatctgtttgaattgtgctgtttcatacaccatgaaagtg

SEQ ID NO: 763548 - DNA, 600 bp, Homo sapiens
cacacataggttcaagcatggcctgaaccacacacgagctttaagatgcaagacttctgaaagggtcagaggctgattttccctagaagtctcttcaggttcaacaaagaatgggtcctttgtttcctataggattgcaaaataaattagcacaaagctctgctggctatctacttccctgatgtaaaccataatgctatacaagcccaacagcaagctattcaatgaggatatctgcacacagaaaaagcaacttgagtataaactaaaagaatccgtgatcactgactcatttatgactggctaggggaaatcagttacattattagtgattcaggcaaacattgcatcaggttacatcacaggaagaaactcaaattcaaactgacaatttataaaaaggctgcttttctttgcagtaaagraaatactcacaccactctagattaagaagattgagaaccactgagttctgtttaaaaatcactgtttgaaaatctcttgcaaaagcatggccaaataccaatggtttgaaggactaaaaaccctgggaaaagtcaacttcatatagcaaagggttgttgtgaggattaaaaaaca

SEQ ID NO: 763549 - DNA, 647 bp, Homo sapiens
aagttaaaaggaaggaagccgtattcccgatggctagtgtttaatgactacaggtttccaggctccctttaatcttgggagcaaataaatctactattggacttctccctgcgtgacttttaacatttctgatactctctcttcttcctctttacagaagagaggtatgataactgaagttgtactttgcatattgaagtttaaagatacttcctctccccttttcacccctatttcaaatgatgtgataaaatcctcttgataggctatatggagaacatttgtcaatagttttatctatgcatggaagtcttcaaaaagtatatcttggattgtctaaaactgaatagatttcttatttatctgaargtatacagactgccaacattttagacttatctctcagtctctgccactgaacttttatatatggctgctatcaaaatataaccggtttattttcatatttggaactaatataacagtatcacaaaatcttttacagtaagatagtttgtaataccagccgacccagctgcttaactgagtccttaaatcatttaatatatgggactgtaaatagagaaatctgtacattatgagatctgatttctggttatgcctatagatctttattttctttatcc

SEQ ID NO: 763550 - DNA, 593 bp, Homo sapiens
tacacataaatgtgtacattatatgtgtacacataaatgctgatgaactctatagtcaaaaactaattatagttggaggcatattttaagaatttaaaagtaaaacttctggttaaacttaatggattaagtctacatatttactttattttattttagagtgctactaaaaacttaaaagtaaattaaacaggccaggcgtggtggctcatgcctgtaatcccagcactttaggaggccaagtcgggcggatcaggaggtcaggagatcaagaccatcctggctaacacggtgaaaccccgtctctactaaaaatacaaaaaattagccgggcatggtggtgggtgcctgtagtcccagctacccgagagactgaggcaggagmatggcgtgaacccggaaggtggagcttgcagcgagctgggattgcgccactgcactccagcctgggctacagagcaagattctgtctcaaaaaaaaaaaaaaaaaaaaaaggaaattaaacacgtacacaggtatgcacacacatacaaagagacattttaaaccaataaaagctaaaagaatgggaaaggaaatgacagcaaatgaa

SEQ ID NO: 763551 - DNA, 593 bp, Homo sapiens
tacacataaatgtgtacattatatgtgtacacataaatgctgatgaactctatagtcaaaaactaattatagttggaggcatattttaagaatttaaaagtaaaacttctggttaaacttaatggattaagtctacatatttactttattttattttagagtgctactaaaaacttaaaagtaaattaaacaggccaggcgtggtggctcatgcctgtaatcccagcactttaggaggccaagtcgggcggatcaggaggtcaggagatcaagaccatcctggctaacacggtgaaaccccgtctctactaaaaatacaaaaaattagccgggcatggtggtgggtgcctgtagtcccagctacccgagagactgaggcaggagcatggcgtgaacccggaaggyggagcttgcagcgagctgggattgcgccactgcactccagcctgggctacagagcaagattctgtctcaaaaaaaaaaaaaaaaaaaaaaggaaattaaacacgtacacaggtatgcacacacatacaaagagacattttaaaccaataaaagctaaaagaatgggaaaggaaatgacagcaaatgaa

SEQ ID NO: 763552 - DNA, 617 bp, Homo sapiens
tctgccttcagcctccctaatctatccattctccctaatgacttaatacctatcacaacaattatatacattccccatctccccttgaaaaagggtatataagtgtctgaatctgtgatattctgaaatatacatgtggtttccctcctgcttcctggcatacaacccytaaaatccttggaatctccaaagttctttctttttgtatgctaaagtagactgatagcttcagagtaagactggtcacctgaaagccaaaagcatgattagagggttgggactttcagccctaccttccaacttccaccaagaggaaaggggctgaaggtccacttgctcaccagtggccaatgggttaatcaatcatgcttatgtaatgaggccgccatagaaacccaaaaggacagggttcaaagagcttccagatagctgaacatacggagtttcctggagggtggtgggcccaacgaggaaatggaaattccatgcgggtatacctcacccgcctagagaggaggtcttcggaatcccaacttgaagccagtagaccagaagttccagaggcctgcttcttgatgaatagataatgaagagaaaaaaaaaaaggaagaaagaaa

SEQ ID NO: 763553 - DNA, 513 bp, Homo sapiens
gaatctgtgatattctgaaatatacatgtggtttccctcctgcttcctggcatacaacccctaaaatccttggaatctccaaagttctttctttttgtatgctaaagtagactgatagcttcagagtaagactggtcacctgaaagccaaaagcatgattagagggttgggactttcagccctaccttccaacttccaccaagaggaaaggggctgaaggtccacttgctcaccagtggccaatgggttaatcaatcatgcttatgtaatgaggccgccatagaaacccaaaaggacagggttcaaagagcttccagatagctgaacatacggagtttcctggagggtggtgggcccaacraggaaatggaaattccatgcgggtatacctcacccgcctagagaggaggtcttcggaatcccaacttgaagccagtagaccagaagttccagaggcctgcttcttgatgaatagataatgaagagaaaaaaaaaaaggaagaaagaaaaaga

SEQ ID NO: 763554 - DNA, 509 bp, Homo sapiens
cattgagaccttgttaaatgcagattctgattcagcaagtctggaatgagtaagagtctgcatttctaacaagttcctaggatcctactgttctgagcatgacactttgaaaagcaatgcttaggcggggcgtggtggctcacgcctgtaatcctagcactctgggagacagaggcaggcagatcacgaggtcaggagatggagaccatcctggctaacatggcgaaaccccgtctctactaaaaatacaaaaaaatagccgggcgtggtggcgggcgcctgtagtcccagctactcggaaggctgagacaggagaatggggtgaacccgggaggcggagcttgcagtgagccgagaccgtgccactgcactccagcctgggcgacagagcaagactccgtctcaaaaaaaaaaaaaaaaaaaaaaaggaaaagaaaagraaagcaatgcttagtcaacagcaggcatcttcagacctgctgcccatttttgtaaagttttattggaac

SEQ ID NO: 763555 - DNA, 666 bp, Homo sapiens
acatctatcacaaacacacaaatgtaataagaaaaaaagtttcatttctgtggtcaggaacctgatgcaaaattattccattgcatttggagattataaaggcataagtggaataggggtggcttctgctggtcaccagcaaaggaagctgtttcccttctgcctcctctgctgtgttgcaaagtgtctgctttgtcatccaggagatggacaacagtggtgtctgttttttggatggcatttgttagagagcataaggtatgtcctgtgactctgcttctcactgggcagttccaaaacttgccttagcattggaataatgaaactgctttaataagaacagtgagatcctttgtcaaacccagaccggttgaaaagaaacacataagaataaggcctgtccatctataattttacacaggttattcatactataattaaccagggagtcactactctygtcttgcctcattgggctggataaattaatcaatcaaattagcaacttttgccacgcattcattaggatgtgtagacatgactccagggcaggccagtcttcaactaggagcagtgggtagggaatggaaggtgacaattagaaggatatgccaaggctgagccaatgtaaggagcattgaggcatcatataggaaagcccaatat

SEQ ID NO: 763556 - DNA, 620 bp, Homo sapiens
cagccgatgtcgagatgctaggatccgcctcctcctggctcagtgtaatggtgagatgtgtggagaagagcggggcccagtgcctgggcaatgactggacacctgcggtagggaaaaggacccggtgtggacttagggtctcagagtctgacaccctccccacatagccttggtgcaggggacactgacccgggtaggactcctggacagggtgactccagatcagctgtttgtgagtgtgcaggatgcagctgcttatgccctggggagcctgktaaggggcagtagcaccaggagcgggagccaggaggcactgggctgcggcaagtgaggcaggggtaagtggctggagacccagggagaggggtttgggaaagggtctgaggaagatcaagaagaaaagggtggggacggaatgaatagtagattgaagaccaaatcagggagcccgggctgagctatgggtgaggaactgaagaactcagatccctaagtaggtggggtacccctgagaggactgccacatttcattaaggaagaggggtgcctaatctattcctgacatgtctcctctcttctccaggagctcactgacccaaagatttgcaccgtgtgggtct

SEQ ID NO: 763557 - DNA, 629 bp, Homo sapiens
ctctcacggtaagtgttacagttcttaaagatggtgtgtccggagttttttccttctgatgttcggatgtgttcggagtttcttccttctggtggcttcgttgtctcgctggcttcaggagtgaagctgcagaccttcgcagtgagtgtyacagctcttaaggcagcacgtctggagttgtttgttcctcccctccagagttgttcattcctcccggtgggttcatggtctcgctggcctcaggagtgaaactgcagaccttcacggtgagtgttacagctcataaaagaagtgtggacccaaagagtgagcagcagcaagatttattgcaaagagagaaagaacaaagcctccacagtctggaaggggactcgggggggttgccattgctggctccagcagcctgcttttattaccttagctgacccacccacatcctgctgattggtccattttacagattgccgattggtccgttttacagagagctgattggtccattttgatagggtgctgactggtgcatttacaaaccttgagctagacacagagtgctgattggtgcatttgtaatcctttagctagacacaaaagttcttcaagtccccaccagattagctagacacagg

SEQ ID NO: 763558 - DNA, 629 bp, Homo sapiens
ctctcacggtaagtgttacagttcttaaagatggtgtgtccggagttttttccttctgatgttcggatgtgttcggagtttcttccttctggtggcttcgttgtctcgctggcttcaggagtgaagctgcagaccttcgcagtgagtgttacagctcttaaggcagcacgtctggagttgtttgttcctcccctccagagttgttcattcctcccggtgggttcwtggtctcgctggcctcaggagtgaaactgcagaccttcacggtgagtgttacagctcataaaagaagtgtggacccaaagagtgagcagcagcaagatttattgcaaagagagaaagaacaaagcctccacagtctggaaggggactcgggggggttgccattgctggctccagcagcctgcttttattaccttagctgacccacccacatcctgctgattggtccattttacagattgccgattggtccgttttacagagagctgattggtccattttgatagggtgctgactggtgcatttacaaaccttgagctagacacagagtgctgattggtgcatttgtaatcctttagctagacacaaaagttcttcaagtccccaccagattagctagacacagg

SEQ ID NO: 763559 - DNA, 623 bp, Homo sapiens
aagagtgagcagcagcaagatttattgcaaagagagaaagaacaaagcctccacagtctggaaggggactcgggggggttgccattgctggctccagcagcctgcttttattaccttagctgacccacccacatcctgctgattggtccattttacagattgccgattggtccgttttacagagagctgattggtccattttgatagggtgctgactggtgcatttacaaaccttgagctagacacagagtgctgattggtgcatttgtaatcctttagctagacacaaaagttcttcaagtcccyaccagattagctagacacagggcactgattggggcatttacgaaccttgagctagatacagggtgctgattggtgtgtttacaaaccttgagctagacacagagtgctgattggtgcatccacaaaccccgagctaggcacagagtgctgattgctgcatatacaatcctccagctagacataaaagttctccaagtccccactagactcaggagcccatctccaattacccactagactcagaagcccagctggctttgcctagtggatcccatgccagggccgtgggcagagctgcctgccagtcccacaccatg

SEQ ID NO: 763560 - DNA, 636 bp, Homo sapiens
tcccatcccccagaggaggagcggttatgaatttctggcatgtttggggttcagagaatgttctcaaccagagtagataccaaactgagcaatactatgtcacaaaggggccgttttcagcactgtaaaatttccttatttcttctacaacttagagctggtgttaaggtataaggttatcagaaaagaggatttaagtccttctgggcacataattccagcataacatgaaaaatgtcaagtttgggatgggagaasagctgccaagtcagattagttcaattcttttctacctggcaactgttgacaattggctgctgtttgtcatagattcatggagaactgaaaaacaaacaagcaaagaaacaaaaaacagtctttctgaactaaatgcctcaagcttcaggtcattttaaaaggaaaaggctattttaatcaccctgtttggagttcggccctctgaaggccattttaaggtatcccatttaggctgtttatttcagtaaaaaaaaaaaaaaaaaaaaaagctgagggtaaccagctctttgatagcatgtctatgagatttgtctcttgacttccttaaagctgtcttttctgagttagaaatactctccagaagaattgcctgtgaaa

SEQ ID NO: 763561 - DNA, 602 bp, Homo sapiens
ctgatatcagaaggcaagtaaatcattataagattcaaaatgtccatttagatatttaaatactttttcttttaatatgcagagctttaaaaaacatccaatacataaagattaaaaaaaaagagaagtacaaattgaaaaaggaattacagattgcacaaaggtatagacatgcaaaaataatgttgtagaggggaaataggtaaacaatgtataatgaatgagatgcgaattttgtcttttttttttttactgtgtctattggaatgtgaaatttgagtcatcaaaaacaatgcattatgaaataaaatagggactataagargtattcttacacataattaaccaaatcaatggaaatttaaaagaattctaatttgcaagatgaaaaatgcttctgacgctcactgctatacaagtgagtaaaactcctgaaaacagtattatataaaacttaaactgcatactatattccaagtgctatcaggtcagggatattgtatatttcatccatcaatatataccgagtattgagaacagatagaaagaccacagatgctcaacttaatggtttctaattgtctggaaatcttcaaattata

SEQ ID NO: 763562 - DNA, 614 bp, Homo sapiens
tatctagaaaaccccatagtctcagcccaaaatctttatgagctgataaacaacttcagcaaagtctcaggatacaaacaacagtttaggttcagcaaaatcccaggacaccaaaaacagtcaggcccagagccaaatcaggaatgaactcccattcacaactgccataaaaagaataaaacatcwaggaatagagctaactagggaggtaaaagatctctacaagaagaactacaaacactgctcaaagaaatcagacattacacaaacaaatggaaaaacattccatgctcatgggtaggaagaatcaatacccttaaaatggctctactgcccacagcaatttatagattcaatgccatgcctgttaaactaccattcacattcttcacagaactaggaaaaattattttaaaattcatatggaaccaaaaaggagcccagatggccaaggcaatcctgagcaaaaagaacaaagctgaggcatcatgttacctgacttcaaactatactacagggccacagtaataaaaacagcatggtactggtacaaaaactgacacatgaaccaatggaacagaatagaggatccataaataaaactacacacctac

SEQ ID NO: 763563 - DNA, 614 bp, Homo sapiens
tatctagaaaaccccatagtctcagcccaaaatctttatgagctgataaacaacttcagcaaagtctcaggatacaaacaacagtttaggttcagcaaaatcccaggacaccaaaaacagtcaggcccagagccaaatcaggaatgaactcccattcacaactgccataaaaagaataaaacatcaaggaatasagctaactagggaggtaaaagatctctacaagaagaactacaaacactgctcaaagaaatcagacattacacaaacaaatggaaaaacattccatgctcatgggtaggaagaatcaatacccttaaaatggctctactgcccacagcaatttatagattcaatgccatgcctgttaaactaccattcacattcttcacagaactaggaaaaattattttaaaattcatatggaaccaaaaaggagcccagatggccaaggcaatcctgagcaaaaagaacaaagctgaggcatcatgttacctgacttcaaactatactacagggccacagtaataaaaacagcatggtactggtacaaaaactgacacatgaaccaatggaacagaatagaggatccataaataaaactacacacctac

SEQ ID NO: 763564 - DNA, 614 bp, Homo sapiens
tatctagaaaaccccatagtctcagcccaaaatctttatgagctgataaacaacttcagcaaagtctcaggatacaaacaacagtttaggttcagcaaaatcccaggacaccaaaaacagtcaggcccagagccaaatcaggaatgaactcccattcacaactgccataaaaagaataaaacatcaaggaatagagctaactagggaggtaaaagatctctacaagaagaactacaaacactgctcaaagaaatcagacattacacaaacaaatggaaaaacattccatgctcatgggtaggaagaatcaatayccttaaaatggctctactgcccacagcaatttatagattcaatgccatgcctgttaaactaccattcacattcttcacagaactaggaaaaattattttaaaattcatatggaaccaaaaaggagcccagatggccaaggcaatcctgagcaaaaagaacaaagctgaggcatcatgttacctgacttcaaactatactacagggccacagtaataaaaacagcatggtactggtacaaaaactgacacatgaaccaatggaacagaatagaggatccataaataaaactacacacctac

SEQ ID NO: 763565 - DNA, 534 bp, Homo sapiens
gggggctttaaattctctctctctctctttccctccctctctaggaaccttgggaaaagatatcagttctaaattcataacatccagacaaggttctgtctctttctctctatagttttacaggagaatgggattgtttactaaatggtttgcgataaaaatctctcctccccmaaaaggaagacagaaaagagaaacttggagcctagtggcaggagggcaccagaagagtgattcagtatcaattatagtgtatggggtcaccaaaaggcaattcaattaaaaaacaaatactagaaccaagtatgaatttgcagctattaataggaacttgtcctctataataagcatgaaaaaaaagggggagaacaaacataatttatgccaaagaaacttctggtgctcttcttacttgtttgtgtaagtagaagtctggttctgccaacataaaagtaagtgagacccaggttatgtcatttctatctacagaaaaagaaaccttatactggaggtaacagaagggagcctgaaaac

SEQ ID NO: 763566 - DNA, 535 bp, Homo sapiens
aagcatccaacctctgagactcagccgctgagccagcccacagagggtcaggagctctgcccgccagcagccacctgcccctccaggctccaggcagccactgcccccactcctggggaagcccagtgatcccagtcacagctccctgactccggggagcagcattcaccccgagtctgctctgaggccagacatcccctcataggccacctcccatgccgaaaccctacacacccacggggctgagaggagccagggctgccactcaggcctcggcaccgagaagtccrgcaatgcccggacccctgctccctgggggcccagatggcacgttcaggctcccatatcagggctgcttctgagaagggcggggtcttgaagcacaaccccctccactccccatggcccgctccccacagaacccacccaggggctcagggccgcagacccccgtaagtcaggtccctcggcccgtgagcccagcgcactcacttgatcttgctgaagacgatgtccacgtcagtgacggtcacgt

SEQ ID NO: 763567 - DNA, 535 bp, Homo sapiens
aagcatccaacctctgagactcagccgctgagccagcccacagagggtcaggagctctgcccgccagcagccacctgcccctccaggctccaggcagccactgcccccactcctggggaagcccagtgatcccagtcacagctccctgactccggggagcagcattcaccccgagtctgctctgaggccagacatcccctcataggccacctcccatgccgaaaccctacacacccacggggctgagaggagccagggctgccactcaggcctcggcaccgagaagtccagcaatgcccggacccctgctccctgggggcccagatggcacgttcaggctcccatrtcagggctgcttctgagaagggcggggtcttgaagcacaaccccctccactccccatggcccgctccccacagaacccacccaggggctcagggccgcagacccccgtaagtcaggtccctcggcccgtgagcccagcgcactcacttgatcttgctgaagacgatgtccacgtcagtgacggtcacgt

SEQ ID NO: 763568 - DNA, 551 bp, Homo sapiens
ctcaaagtctctctgccttggaggtgacttttgggatccatccataggtcaagtttatttagctgtccatgttatcccagttaagatttggaaaagagaatgagttggaaatcgattcttaggctataatttctgtcacctgatatcccttttcagatggctactaagctggcctttcctttccctgcagtctgtacactcaaactttcattaacagttcgtactgtgagaacataattctttgggaagaattctttgggaaggatatgtagcaggcatgtaaaagtaatagaggcaacaagtgcctgagaaacagggaatattggttgaaatggtgactaatcctcagagattttggagagaaacttggatttgctaggtacatgagatggggttctaacccaatttaattaaatttgaaagarcaaatatctgtagcattcaaaggaatatccaggcagcaatcatcttcatgataattagactatcattgaacggcatcctttctctgaaactccatttatgtcccaattacttaatgaaacttttct

SEQ ID NO: 763569 - DNA, 591 bp, Homo sapiens
acctaatggcgcaaacagaaatgaaaaggtatgtagggtggtggggctggaagtgggagttgccctttgggatccctcattttcaatgcatttggaagggagggtctgtgtttgttatgcagaaactttagaatgtagagtccctgtcttgttccccagcctgggtcctggagatctgaagttcatgctgtaaaatgcattaccacatcatgttgggaattcctggctcccaagggctcacagcatttggycaccagtgaatcagcatgtttaaattatgtgcatctcagggttaaatgtttttcaactcagatgcatgaagtgactgatgagcccaaggtttggcaccctaccccacacccccttgtactaatttaggaacatgaaaaggatcccttagaagcctcagatgggatgtcagtttctcctcccctttcctattctctttgaattaaagctttaaatgacaaacttttcttccacccactgtctcatcagatctggaaattctgacttcccttcctggggtttcatctgtttgtaacaacttctccataatgtgacttactgtgaaaccaagcaaagaagtta

SEQ ID NO: 763570 - DNA, 585 bp, Homo sapiens
agttgaaatgaaggaaaaagtgttaagggcagccagagagaaaggttgggttacccacaaagggaagcccatgagactaacagtggctcgctcggcagaaactctacaagccagaagtgagtggtggccaatattcaacattcttaaagaaaagaattttcaayccagaatttcatatccagccaacctaagcttcataagtgaaggagaaataaaatactttaaagacaagcaaatgctgagagattttgtcaccaccaggcctgccttacaagagatcccaaaggaagcagtaaacatggaaaggaacaactggtaccagccacggcaaaaacatgccaaatcataaagaccatttatgctaggaagaaactgcatcaactaacaagcaaaataaccagccaacatcataatgacaggatcaaattcacacataacaatattaaccttaaatgtaaatgggctaaatgccccaattaaaagatacagactggcaaattggataaagagtcaagatccatcaatgtgctttattcaggagacccatctcatgtgcagagacacacataggctcaaaataaaggg

SEQ ID NO: 763571 - DNA, 585 bp, Homo sapiens
agttgaaatgaaggaaaaagtgttaagggcagccagagagaaaggttgggttacccacaaagggaagcccatgagactaacagtggctcgctcggcagaaactctacaagccagaagtgagtggtggccaatattcaacattcttaaagaaaagaattttcaacccagaatttcatatccagccaacctaagcttcataagtgaaggagaaataaaatactttaaagrcaagcaaatgctgagagattttgtcaccaccaggcctgccttacaagagatcccaaaggaagcagtaaacatggaaaggaacaactggtaccagccacggcaaaaacatgccaaatcataaagaccatttatgctaggaagaaactgcatcaactaacaagcaaaataaccagccaacatcataatgacaggatcaaattcacacataacaatattaaccttaaatgtaaatgggctaaatgccccaattaaaagatacagactggcaaattggataaagagtcaagatccatcaatgtgctttattcaggagacccatctcatgtgcagagacacacataggctcaaaataaaggg

SEQ ID NO: 763572 - DNA, 585 bp, Homo sapiens
agttgaaatgaaggaaaaagtgttaagggcagccagagagaaaggttgggttacccacaaagggaagcccatgagactaacagtggctcgctcggcagaaactctacaagccagaagtgagtggtggccaatattcaacattcttaaagaaaagaattttcaacccagaatttcatatccagccaacctaagcttcataagtgaaggagaaataaaatactttaaagacaagcaaatgctgagagattttgtcaccaccaggcctgccttacaagagatcccaaaggaagcagtaaacatggaaaggaayaactggtaccagccacggcaaaaacatgccaaatcataaagaccatttatgctaggaagaaactgcatcaactaacaagcaaaataaccagccaacatcataatgacaggatcaaattcacacataacaatattaaccttaaatgtaaatgggctaaatgccccaattaaaagatacagactggcaaattggataaagagtcaagatccatcaatgtgctttattcaggagacccatctcatgtgcagagacacacataggctcaaaataaaggg

SEQ ID NO: 763573 - DNA, 687 bp, Homo sapiens
acttttattacattaaattatgtcccttctatgccaattttgctgagggttttaatcataaagggatgtcccttctatgccaattttgctgagggttttaaacagcaaaagcttttaaaggaatgctggattttgtcaaatgttttttctgcatctattaagatgatcatgtgatttttgtttttaattctgtttatgtggtttattacctttattgacttccatatgttaaaccacctctgcatacctggtatgaaacccactggatcatggtggattatctttttgatatgctgtttgattcagttaactagcattttgttgtggatttttgcatctatgttcatcagagatattggtgtgtagttttcttttttgttatgtcttttcctggttttggtattatggtgatactggcttcatagagtgatatagggaggattccctctttctctatcctgaggaatagtgttattggattggtaycaattcttcttcgactgtctgatagaattcagtgaatccatctggttctggactttttttttttttggcaatttctaacttaccacttcaatcttacgcctataattaggtcagatcaaagttgtctatatcttcctggtttaatctaggaaggttgcatatttccaggaatttatccatacgcctctaggttttctaagt

SEQ ID NO: 763574 - DNA, 642 bp, Homo sapiens
ctttgttgactttttctcttgatgacctgtctggtgctgtcagtggagtattgaagtcccccactattatgatgttgctgtctatctaatttctgaggtctagtagtaattgttttataaatttgggagctccagtgttaggtgcataaatatttaagattctgatactttcctgttggacaaggccttttatcattgtataatgtccctttttgtcatttttaactgctgttgatttaaagtttgttttgtctgatataagaatagctactcctgcttgcttctggtgtccatttgcatggaatgtctttttccacccctttaccttaagttatgtgggtccttacrtaatctggaatgcagtaagtacttggttggtgaattcttatccattctgccattctatatcttttaagtggagcatttaggccatttacattcaacattagtattgagatgtgaggtactattctattcactatgctatttgttgcccgaataccttggttgtttaaaaaattatttattgtgttgttgttttataggtcctgggagatttatgctttaaggagtttctgttttgatgtgtttcgaggatttgtttcaagatttagagctccttttagcagttctcataatgct

SEQ ID NO: 763575 - DNA, 628 bp, Homo sapiens
gtgggctaattgcccagatgtactctactacttgaatacctatatatgtgcttggtgtaacttctgtcatttgaggcaaaaggtaaaaatccaatggagatataataatgcaaatgtgaagtattgggagcccactgtgcgtcatatttgggaagacagggctttacaaatataaatacaaaagccatgtaaatatttatgatcgttttgttagctatatataacagatatcttcttctagtaatttcattgacactaatcaatgtccatattttttaacagaaaggtttcyacattcgcacaattcctagtatatttttaattccttaagtatatttaagaatattccagaccacaagactctaaggtgttgcacattttatcagactaaaatgtcaacatatattaatatagaaccatacgattttattcagcaagcatgtcataaaccaaattttctcaccaatgatgccaggtagataaagtcaattaaagtaagtataactattaaaaaaattcagaaatttcactgtatgactcagttacccgggaactttttctaaagtttacattatcttactggatctcaagattctaactcatatactttgtattccctccctagaac

SEQ ID NO: 763576 - DNA, 562 bp, Homo sapiens
cattctacaaaatatttcaaacctggtatccaatgcaatcctcacaatactcctaatgtagagttagggtggtattatcttgatttgcagttgaggatacagacccagggaagaacttggtttaggtcaaacagctcgtgagtggcaaagcagctctggagacttccagagacttcccttgccacagtcctatgcttcccttctaactgtgggcaagcttctaaaaaattaatatctaagctgctgggaggactcatctttatgttttttttccagatgaattmgtggcagtatgtcttcttcaaaaaattatggatgaaatgaacaaagagataaactcagtttattcatattctttgtctccaggttctatttacctctgactctgcaatgatgaataaattgttcgcttatctgatgatcaatttctgtctttaaaatggagaggataatacttgtcacccactaccatcactagaatgaaggaactaatgcttctaaagtgttgtgaaagagatgctctagaaatagaaatatgaggcttttattgaacacatttaaa

SEQ ID NO: 763577 - DNA, 630 bp, Homo sapiens; identical to SEQ ID NO: 736315

SEQ ID NO: 763578 - DNA, 642 bp, Homo sapiens
ggattgtgtctcttcaaactttgttgcactatcagaagggaggatgttaatgctccttttctctgtatgcagttagatagctgcaagttcagggaagagaggaggtaagtgttgagagctgtatatagaaaattagtatttgaaaaatacaacgggaataatctttacttcatacttggaaagagaccattaaaaagcattcaaaagtcttgaacaattcaagtttgatttgtccatttagtgaatcatgcttgaatactacgtgcaggattctgctaatcttggaagttattccagtgagaaagacagwtatgacccctggactctagggtgttacacttatctgctacactttctcagtaaagtccagtttttgcttttggcatcatttaaaactgaaaacctcagaatgtactgaagtttaactgttaagctcttctctgattatgttgtgaattatttgttaggtaagatccctctcctctgaaggtgaaaggtgctgttctcctgaagggagtggccattcctattgtcaattgtaaagaaattaatcccagggcaggaaatgaagtcagggagacagatgctggaccgtagtgaaggagaaatgcttctctgggggccttaggagagcccactgtc

SEQ ID NO: 763579 - DNA, 626 bp, Homo sapiens
tgtttctgtactgtagcggtgcaaatgtggcataagaaaaatatgacaaagaagaaaagaaacaaatttaggtacagtatgttacttaaaaagggaataatccaggttaatatacataccaccataggaaatgtggatgcttcagaaatagagaatgtttgcttgtttcttatatcacccattttcataaagcagaatkgtttttatgaactgcagaatgactccttgcagtgctatactccttgttgcctctgagattggtttggaaggagcagtcattattttttaaattgcagtgtttgtccaagtttctgagatcattttgttgtagtttcaatagatattccaaatgtgaatgtctgaatataagcagtgtacacaaatctttttttttcctttccccttgagggcttgctctggagagggaaattaaacaaacaaacaaacaaaaaaggcctaccttgtaggaaacgtttctatgtgatgactcaagtaatctctccttttaactacttttctattctgttttactttgatttcaaaactgctcagcataccaagttgtggagaatcactttagttctttagtttaaggggacagtttctggcttggcttgatgggccca

SEQ ID NO: 763580 - DNA, 455 bp, Homo sapiens
cttgataaatatttgttgaatgactaaatttgtttacaatttggtgatattaatctttctttttgggaaaagtgtaccaagatgtgttcctatctggcccaatatcacttatgttagtaaaaacagctgtttctgttttactcaaagaacagagcaaacatccaattgacagccataggctgtcagaattgcacttaccctctgaccaggaaggtacagaagtgccagacttacctgcctgatgctgtcctcgtgatgccktcctagaaagagcctcatgtggttggatcctggcaggcctatcatagcaatcctatagatataatcaggcacaccctgacacctttgtgacatattatagcatcatattatgtttttggcaagggttttttttttttagtttttttgtttactgaaaagtaggaattgtgttttagtcaccttgtgtcttgcac

SEQ ID NO: 763581 - DNA, 614 bp, Homo sapiens
gctccgtcccgggctgggggtgcccataggagaactcacccacaaccccgaaccctccgggcagagatggagcctggggcacagaacagtgtggaccccacaggttccagagggttgggagcgattagacccctcgggatgaaatgtggatggagaaattggcagactgagattctaaacaagtcacaggcagcctcttttccagtgcgggagattatttgtagacactattacgaggtaaatggaagggaaatgagatagtctgccccccggggcctcatctgtccttccccagacaaagggygaccagtgagggccgagtcttcggagctggaggagagagacagagacgaggggcaggtcagcttgccgggagacaggtgtggcagcagctgacggggctcagacgtggtgtcacgtaatctccatcttcatgacaggtccccagaaaatcacgatgaaaactttgcatcgggaaatctcaccatttatataaaccaaggcgaatgttgcatctaacaataaaatacaggaatgtatttgaatgtttttttgttttttttttcagttccaactaaggaggcatttgtgggtgctttattcacacccggatg

SEQ ID NO: 763582 - DNA, 614 bp, Homo sapiens
gctccgtcccgggctgggggtgcccataggagaactcacccacaaccccgaaccctccgggcagagatggagcctggggcacagaacagtgtggaccccacaggttccagagggttgggagcgattagacccctcgggatgaaatgtggatggagaaattggcagactgagattctaaacaagtcacaggcagcctcttttccagtgcgggagattatttgtagacactattacgaggtaaatggaagggaaatgagatagtctgccccccggggcctcatctgtccttccccagacaaagggcgaccagtgagggccgagtcttcggagctggaggagagagacagagacgaggggcaggtcagcttgccgggagacaggygtggcagcagctgacggggctcagacgtggtgtcacgtaatctccatcttcatgacaggtccccagaaaatcacgatgaaaactttgcatcgggaaatctcaccatttatataaaccaaggcgaatgttgcatctaacaataaaatacaggaatgtatttgaatgtttttttgttttttttttcagttccaactaaggaggcatttgtgggtgctttattcacacccggatg

SEQ ID NO: 763583 - DNA, 569 bp, Homo sapiens
tctgcaggaggggccagtgattgactttgggtgtacactgtccctccacaccacttccctgtcttccatggttttttgtattcattttcttccacctcccaggcactgacccccagtagtgaccctggggggagaccatgccaggaagcacactggctggggcgaccctgaggcatcccagggagaggcaggagccagaggcagcaggagctgaaaggagatacctgttctctgcaggtctgtgctgtgcaccctctgcacccacgaggcatcctcagaagtggggagggagaaggagggatggaggagtcttttagcatagtgtggcctccatcttccctccccaggacaccrgggaccatcctgagggtggcctgagttgagggcccctctgcagaggctggcagtcaggcccacatcccgagagcgggacagggacatttggccaggcagttgaagctggaggttcagacggccgtttatttggggatttatgaccttaagggtccctctggagtggagaagagcagctgcctcctctgctcagcctggacacccctcctgcctgt

SEQ ID NO: 763584 - DNA, 599 bp, Homo sapiens
tatcgttcagggatccccttgacctcagtaaaagccccccttaagtccaccaaccttctgagagcctccacttggctctggtggggcagtgccctggaagagaggtttggggctgctgatcctggccaagggtcttccagaatgacgctactcaatgtccaggaatcataggagcccagtgtcttggcctcaccaggctctgtcaccccctcaaccctgtggccctgcagttcttgaagctcaggtcccagtccttggtgacgactgaacaaccctggcctctgcttacttcttcaggaagctggagccttaccctgttagcaacgtctttccagcatccctgggagagaagcagcttgccagccctctgggcttggttttaaacctgcaactggagcrtggcccagaggtatgtgtgtgcctgggccctgcccagtgagcgggagcctggctctgagcatcctgcctgaacatccccagcccctggcggggcgacgccactgagcaagacaccctgggaggtgaattcggcaatgggatggcacaaaggcccagctttcccatctaatgagacaacttccaccgaactcacaacaccg

SEQ ID NO: 763585 - DNA, 565 bp, Homo sapiens
gattacgtttattgatttgcgtatgttaaacaagccttgcatcccagggatgaagcccacttgatcatggtggataagctttttgatgtgctgctggattccgtttgccagtattttattgaggatttttgcattgatgttcatcagggatattggtctaaaattctctttttttgttgtgtatttgccaggctttggtatcacgatgataytggcctcataaaatgagttgggaggattgcttcttttcctgttgattggaatagtgtcagaaggaatggtaccagctcctccttgtacctctggttagaattcagtataatattggctgtgggtttgtcataaatagctcttattattttgagatacgtcccatcaatacctagtttattgagagtttttagcatgaagggctgttgaattttgtcgaagatcttttctgcatctattgaagatcacatgaatgaaatgaagcgagaagagaagtttagagaaaaaagagtaaaaagaaacagacaaagcctccaagaaatatgggactatgtgaaaagaccaaatctacgtc

SEQ ID NO: 763586 - DNA, 602 bp, Homo sapiens
tttaaaagcaatgagagaaaagtgtcaagtcatatataaacaaatcaccattagactaacagctaatttctcagcagaaatcttataggccaggagagaatgagaaggtgtatttaaagcactgaaagaaaaaaaaaatatgccaccaaagaatagtatacccagcaaagctatccttcagaaatttaaaaaaawatattatttcacagacaagcaaaacctaaggaactttcgtaacactagcctggccttacaagacatgctcagggaaatctcacatctggaaatcaaaaaataataaccatcatcatgaaaacatgtagaattataaaactcactggtcaagcaaatacacaaagaataaagacaaaggaatcaaacctcagcattacagaaaaccacccaatggtaaaagtaaacaataagagaggaaggaaggagcaaatgataaaccaaataactggaaaatgatcgataaaattacaggaataaattcttatctattaatagtaaccttgaatgtaaatggattaaattccccattgaaaagatataaactggctaaatagatttaaaaaaaaaaggacccaatataaattgtc

SEQ ID NO: 763587 - DNA, 602 bp, Homo sapiens
tttaaaagcaatgagagaaaagtgtcaagtcatatataaacaaatcaccattagactaacagctaatttctcagcagaaatcttataggccaggagagaatgagaaggtgtatttaaagcactgaaagaaaaaaaaaatatgccaccaaagaatagtatacccagcaaagctatccttcagaaatttaaaaaaatatattatttcacagacaagcaaaacctaaggaactttcrtaacactagcctggccttacaagacatgctcagggaaatctcacatctggaaatcaaaaaataataaccatcatcatgaaaacatgtagaattataaaactcactggtcaagcaaatacacaaagaataaagacaaaggaatcaaacctcagcattacagaaaaccacccaatggtaaaagtaaacaataagagaggaaggaaggagcaaatgataaaccaaataactggaaaatgatcgataaaattacaggaataaattcttatctattaatagtaaccttgaatgtaaatggattaaattccccattgaaaagatataaactggctaaatagatttaaaaaaaaaaggacccaatataaattgtc

SEQ ID NO: 763588 - DNA, 583 bp, Homo sapiens
ccttagatctttatatgaatgaatgaatcttaccctataggtaaatacgtacattccataattaatgctataataataacaggcttaacattatgttgttatctatgaggtgcatcttggccagaaacattgttaatattaaagaaatgattcaaaacatgtaacatttctacaatatgttaatggttcccccatagaaattatctcatttggatctcaataacctctgctgtataggaagcaaaaaggttattttcattctacaatttcaatctatgatgagcaaactgagatttacagaagttaagtaacttacccaacagcatagggctgggaagtagtaaacttggtgggattcaaactcagtaattttgaaaacagtctagtgttcttatcatttgttgaaggtaacataatgaaawcttttacttttggaagagaggaaatgtgaagattcttgtccctaatattgaatcactatggaatgctgggtaaacattaactctcactattctttagtttctagttaaataaaattactgtgatatttatcaatgattaacatttggaaaaagcttaaatg

SEQ ID NO: 763589 - DNA, 455 bp, Homo sapiens
ccgcaatacggaacaatccagaggaggtttctgctgagttccacggggacttctactcccaaccaggtggacttactcctcctaaggaattgcaatctatttgctaactgctgaaaacccccttaacaaaactctctaggactgtgtaaaattgagccagaaggttacagagtattcctcctccagaaccctctgcctcaaggcaaytgtgcttcgactcagcagaggggagccttctgtctccaggacacctggagtcctgctcctcctcaccatacctggaccagctgactctgctcaccgcctggctctcacctgtgcctgggcctgacccacggtgtctgaacacacctgttctgttttccaagggactgacctctgcaccagctaggaaccagactcagccagccgtcaaccatgctcctgcacatcccagttctcctgggcaggtggcc

SEQ ID NO: 763590 - DNA, 519 bp, Homo sapiens
gctagatcatttccaccagcaatccaaggtgctcaagtagctcccatcttaacacagaacaaatcaccaaagagcctcggcaactgcttctgtgcttctgcccctgcctgtcctgggtgagctcctgccatgttcctcgctcctttcatggacacttcatctcagccccacctgtcgggctctgtggtttcggtggatctgcactataagagtctccaagtccattcatgtttcccagcttcggagagtgagctccaggcttcccatttcatccaggttcatagaggtgtgcacattgttgctcagcgcttccacctkgagcccctctggtgcttgggtttccaagacaacacctggatgctccagaatcgagctcctcctcccttcccggaactctgaatccccaagcatctcccaaatcaatcctgggcccaggaatcccagacaaatgcaatttttaatctcacaggacaaaccataaacactgaggtgttcatagtacttacttctttaaaggct

SEQ ID NO: 763591 - DNA, 574 bp, Homo sapiens
aacaaaaaataatccatttacaagtctgaatgtgatcgaatgtgttgggaacatgtcagcattcccttgctttcagtggtttctgctgtctctggctatcttgtagtttcaaagacaagctggagatttcccacagtaagaaaacaacctgacctgtatgtttctagactgctcgacaagtgagaaaagttaatagcctcacgggcagggctccatagaatggttctgagaaatgttgcagataaagtaactcctatttgagtgcacgtcctttctaaaaattgggaggacatgcactgaaccagacataaccctgcgtttgtcagcggcagacagcagtgggatctcgacttattatagactgaagacactggagcatctccaagacacactgaataggtaggattccagaacgaggagctgayggctcccaactccctcacattattcttgtctgattgtaacttattcgtgtccttgaaatcttaaagtgagggagatttttaaatagtctgtttggccctcttgctataaaacttctcaagtactcattaaggtgcatgtgaagacacat

SEQ ID NO: 763592 - DNA, 593 bp, Homo sapiens
acatacaccctctctctcactaatggtacatgctgatattttctatttgcttttattctattccacttttaaaggttgctcattgtgacacactaaattgatttcatgaccctaatggcatgcgactcatatttgaaagtcgctgttctagaacacctcccctgccacttaacattagttcactgtcccagagtaagtggcaagaaagttgcttttcctaaaacttttttcagatttttgactgagctcttagctggacctccacgtgaggactctatttgcacatcaggaatgctggcccagtgtccttagaggggcactatgggcagtgtggacaacagtgttttgctctgcatgcactaccagcgtctatcaccctggccmcttcccaccaccggctatcagcaggggcccctagtcattttcacaagcggacatgggcccgcccccatttccagttgcccctggggatgagaaccaccgtcaggtcttgcctaaatggcaagctctaaatctgtttacttcctggcaccccattctcccatagctggggtcagcccattgagcagctggggtccagagctctaggaagc

SEQ ID NO: 763593 - DNA, 618 bp, Homo sapiens
gcatcttttacctccagcccaattgccacaacctggcaggtccagcgctgcaaacctcacatctcacccgtggagaggcagttcaactcaccccccattccctctgcaacaccacttctggcctctgatctctccaattagagcagtggtctatggatgaactagcagaggtttgctacttttctgtaagaatatctgaatatcgtgtttcatgttrataatatatatgttgtatgtttgaaacagagtttcactcttgttgcccaggctggagtgccatggcgcgatctcagctcaccacaacctctgcctcccggttcaagcaattctcctgcctcagcctccagagtagctgagattacaggcacatgccaccatacccggatacttttttgtatttttagtagagacaaggtttcaccacgtaggccaggctagtcttgagctcctgacctcaggtgatccacccggctcggcctcccaaagtgttgagattacaggcgtgagccactgcacctggcctgtgtcctgtcttttcaactggtagttggatggggatgcaatttgtgcttgaagaagatagagacccaggactctgtacccccttcctgagaacct

SEQ ID NO: 763594 - DNA, 618 bp, Homo sapiens
gcatcttttacctccagcccaattgccacaacctggcaggtccagcgctgcaaacctcacatctcacccgtggagaggcagttcaactcaccccccattccctctgcaacaccacttctggcctctgatctctccaattagagcagtggtctatggatgaactagcagaggtttgctacttttctgtaagaatatctgaatatcgtgtttcatgttgataatatatatgttgtatgtttgaaacagagtttcactcttgttgcccaggctggagtgccatggcgcgatctcagctcaccacaacctctgcctcccggttcaagcaattctcctgcctcagcctccagagtagctgagattacaggcacatgccaccatacccggatacttttytgtatttttagtagagacaaggtttcaccacgtaggccaggctagtcttgagctcctgacctcaggtgatccacccggctcggcctcccaaagtgttgagattacaggcgtgagccactgcacctggcctgtgtcctgtcttttcaactggtagttggatggggatgcaatttgtgcttgaagaagatagagacccaggactctgtacccccttcctgagaacct

SEQ ID NO: 763595 - DNA, 585 bp, Homo sapiens
aaacagaaataccatttgacccagcaatcgcattactgggtatatacgcaaaggattataaattattctactataaagacacatgcacacgtatgtttattgcagcactattcacaatagcaaagacttggaaccaacccaaatgcccaccaatgggtgtttatagactggataaagacactttgtcatatatacaccatgaaatactatatagccataaaaaaggatgaattcatgtcctttgcagggacatggatgaagctggaaaccatcattctcagcaaacttacacagaaacagaaaaccaaacacgacatgttctcactcataagtgggagttgaacagtgagaacatgtggacacagggagaggaccatmacacactggggcctatcagggggtgtggcgcaaggggagggatagcattaggagaaatacctaatgtagatgatggtttgatgggtgcagcaaaccaccatagcacatgtatactacctatgtaacaaacctgcacattctgtacatgtatcccagaacttcaagtataataataataaaagaaaataatcaagacccaacccaaaa

SEQ ID NO: 763596 - DNA, 529 bp, Homo sapiens
tgccagtattttattgaggatttttgcattgattttcatcagggatattggtctaaaattcttttttgttgttgttgtgtccttgccaggctttggtatcaggatgatgctggcctcataaaatgagttagggaggattccctctttttctattgattgaaatagtttcagaaggaatggtaccagctgttgtttgtatccctggtaaaattcggctgtgaatccgtcttccaaaaaaaatccaggactttttttggttggtaagctattaatcattgcytcaatttcagagcctgttattggtctattcagggattcaacttcttcctagtttagtcttgggagggtgtatgtgtcgaggaatttacccatttcttctagattttctagtttattttcatggaggtgtttatagtattctctgatggtagtttgtatttccgtaggatcagtggtgatatcccctttatcattttttattgcatgtattctctcttttcttctttattagtcttgctagctgtctatc

SEQ ID NO: 763597 - DNA, 661 bp, Homo sapiens
ttatatggtttttattatgttgaggtatgttcctgctataccctgttttttgagggtttttttttttttatcatgaagggatattgaattttatcaaatgctttttcagcatcaattgagatgatcatgtggtttttgtccttcattctgttgtgggtatatcacactgattgatttgtgtaggttaaaccatccttgcacccctgggataaatttcacttggtcatgatgaatgatgttttcaatgtgatcttgaatttggtttgctgctattttgttgaggatttttgcaacagggtttattgggaatattagcttgtagttttcttttttcatgtgtctttgtytggttttggtatcagggtaatactggccttgtagagtgagttctgaagtattctctcctttattttttggaatagtttgagcaggattggcattagttcttcttcaaatgtttggtaaaaatcagcagtgaagccatcaggtcctggacttttctttgctgggaggctttttattacagctttaatctcattacttgttatgagttatggtcagttcagattttggatttcagcatggctcaatcttggtacattttatttatataggaatttatacatttcttctaggctttccaatttattggcatatactt

SEQ ID NO: 763598 - DNA, 618 bp, Homo sapiens
taatttcttttactcacaagtcagtgaaaaggagtttaataagttctgttagtgttccctcctcagtaagaatgtaacaattaattcatatcccactaagttgtagtaaagacgaattctctgcaaatccagtaaattatctgagtggtagagaacttcatgttttattctcatcacataaattaaaaaatacttaaaaggaggatgagtcaaggctgtagttctgatgatgacaaagactttcttcgtgttagacaagactgctgcaataatatatataaaaaaaatagtgcagcacttgccaatgtggaaattagagagtcacaatttttgtgacgctcttgaccagaatagcaaataagatgtatggccaggcgttgtacatttcacttatattgtaactctaagctttctttttcagacagagctaattggtaaaggggttttccaaacawttaaaggcacaaaatatatttttaatcatcaggaagctactgaaaaattagtaattcgcctatttaatggcattaatacgcacacaacaggaaaagcagaatcttatagccttgagggaaggcagaatttcattctaattgcatactgattggaaatgggata

SEQ ID NO: 763599 - DNA, 595 bp, Homo sapiens
taaaagcaagctactagaacaacaaataaatttagtgaggcagtagaacatgaaatcagtaaaaaaaatcttttgtatatctacatactagcaatgaacaactagaaattagaataactttttaaaaactttttattttatttattattattattattttttgagacagagtcttgctctgacattcaagctagaatgcactggcacattcatagctcaatgcaacctcgaactccctgttttggtctcccaagtagctgggactacaggtgtgtcaccacaacttgttcatttttttaatttttatttttagcagaggtgaagtctstctatgtggcccaggctggtcttgaactcttgggctcaagcaatcaacccgcctcagccttccaaagtcctgggattagaggtgcaagtcaccacatctggcctaaaataactttaaaattctatctatttatggataaatttaacaaattatgtaaaatgcccatacatggacaattacaaaacatgtctgataaaatactcgtatttagaaaaatataaacaactctcaaaactcagtaacatgaaaacaaataaaccaataaaa

SEQ ID NO: 763600 - DNA, 595 bp, Homo sapiens
taaaagcaagctactagaacaacaaataaatttagtgaggcagtagaacatgaaatcagtaaaaaaaatcttttgtatatctacatactagcaatgaacaactagaaattagaataactttttaaaaactttttattttatttattattattattattttttgagacagagtcttgctctgacattcaagctagaatgcactggcacattcatagctcaatgcaacctcgaactccctgttttggtctcccaagtagctgggactacaggtgtgtcaccacaacttgttcatttttttaatttttatttttagcagaggtgaagtctgtctatgtkgcccaggctggtcttgaactcttgggctcaagcaatcaacccgcctcagccttccaaagtcctgggattagaggtgcaagtcaccacatctggcctaaaataactttaaaattctatctatttatggataaatttaacaaattatgtaaaatgcccatacatggacaattacaaaacatgtctgataaaatactcgtatttagaaaaatataaacaactctcaaaactcagtaacatgaaaacaaataaaccaataaaa

SEQ ID NO: 763601 - DNA, 595 bp, Homo sapiens
taaaagcaagctactagaacaacaaataaatttagtgaggcagtagaacatgaaatcagtaaaaaaaatcttttgtatatctacatactagcaatgaacaactagaaattagaataactttttaaaaactttttattttatttattattattattattttttgagacagagtcttgctctgacattcaagctagaatgcactggcacattcatagctcaatgcaacctcgaactccctgttttggtctcccaagtagctgggactacaggtgtgtcaccacaacttgttcatttttttaatttttatttttagcagaggtgaagtctgtctatgtggcccaggctggtcttgaactcttsggctcaagcaatcaacccgcctcagccttccaaagtcctgggattagaggtgcaagtcaccacatctggcctaaaataactttaaaattctatctatttatggataaatttaacaaattatgtaaaatgcccatacatggacaattacaaaacatgtctgataaaatactcgtatttagaaaaatataaacaactctcaaaactcagtaacatgaaaacaaataaaccaataaaa

SEQ ID NO: 763602 - DNA, 578 bp, Homo sapiens
ccatgactggagtgaaaacttcctcaatgctatttaaccaattaaatggtactttttccgagaccactcatagaagaatcagcacacacttgcccattcagagcccataaaaacaccggactcagccacatagagggcttaggtcccctttcttctgagagctttccttctgtcactcaataaaattcttctctgccctactcactctttgatgtgtgcatacctgatycctcttggtcccaagacaagaacacagaacttgctgagctgtgggcagcaagaataagcaggggcaagctgtaacatgcccctgcttgctgaactgtgggcagttgaaaagagagagagctgtaacatttcctgggggctcagatcttggaacttcccatgcataagctataacaccacttaggactccacagtttctggcatctctgagttttcaggcaccaccacattccccttgtcttgtctagacactggtgcccaatacagaagtcacttgtagcactgccagtccagctgtgggctgagtgcagagctgtggtgggtgcaggatccatactgacagcataagc

SEQ ID NO: 763603 - DNA, 578 bp, Homo sapiens
ccatgactggagtgaaaacttcctcaatgctatttaaccaattaaatggtactttttccgagaccactcatagaagaatcagcacacacttgcccattcagagcccataaaaacaccggactcagccacatagagggcttaggtcccctttcttctgagagctttccttctgtcactcaataaaattcttctctgccctactcactctttgatgtgtgcatacctgattcctcttggtcccaagacaagaacacagaacttgctgagctgtgggcagcaagaataagcaggggcaagctgtaacatgcccctgcttgctgaactgtgggcagttgaaaagagagagagctgtaacatttcctgggggctcagatcytggaacttcccatgcataagctataacaccacttaggactccacagtttctggcatctctgagttttcaggcaccaccacattccccttgtcttgtctagacactggtgcccaatacagaagtcacttgtagcactgccagtccagctgtgggctgagtgcagagctgtggtgggtgcaggatccatactgacagcataagc

SEQ ID NO: 763604 - DNA, 703 bp, Homo sapiens
acaggggcaggggaaggtacacaggctaaggagtccatgaaatataaattcagatctggaaagtcaagaaccttataaaggtctatttttgaaggtagaacatataatattatatttaacatttataacttcatatatatatcataaacactttgatatgaggtatattggtttctatgtattctctagtcctgaacccaccaaatgttaagtgtaggctggttatacatttatatcacaatatatagaaaataatttaaagaagactattacatagtaactattaaatatctattctgatattgatatgactatcaggatgcacttgtagagcttaaaaaatggaaacacgtgagacggatttgaatasatgaactgtgttgtgtcattacagtttggttttcttttaatttgtccttttgaataattttgtatgaatgaaacagtatggacttaaaggtaaaaacagtgatgataaaatcaaaattagaaatttaaaacttcatgtcagttgatgatagcactcagggcggggtggggatgggaatcaccttttagatgttaagataaaaacatattatttagccatgaacccactaactataatctgattcttactgttctaaatagcaggctataactatgcttcatatataggcatacacatatttaaaaattacttgaactaaacatttaagatctg

SEQ ID NO: 763605 - DNA, 593 bp, Homo sapiens
aaggaggagagaggcagggcttggcttcctgtataggaacccacagcacaaggagagcctggaaccctgcaacgtggtgtcagcgggtcctcctcaggcacctctttttaaatattcattcacaccaactcttttcttctctatttcacaggattttggccctgcctctttttttaaataaattctatttttttagagacagggtctcaytctgttgcccaggctggaatgcagtggtgcaatcatggctcattacacttcaaactcccaggctcaagcgatcctccctcctcgggctccggagtagctagaattacaggtatctgccaccacaccctgctggtgcttgtctggaattggggtggagccactctgagaatgtgaaacatctcaccaccatcatcaaggtccagggcagtgtggccccgtgtaagatgtggtccaagacctttctggaggcttccagtaatggtctgccctgggccagctgactgcagagggttcagctgcaaaggtgtctcagtgaggagcaggacttggggcgaggctcccctcactgcctgccaggtgctccctagggctgattataactt

SEQ ID NO: 763606 - DNA, 451 bp, Homo sapiens
ggggtttacgacatacaaaagtaaaatgagcagtaacagtagcacaatggaagggaagcggatcagtggaatattcttgtatcatattcacttctcataagtcaaaaatattaatgcaaggtaggctatgataaattaagaatgtatattatagtttttagagcaacctgtatcaacaacagcaacaaaaaaatttactctctcaggaagtgataggtcaagtaggctaaaaaaatctattagatttgagaagatatgaattaggtcaactaacttaacattattggcatttacagaacacaataaccawcaactccagaacatacattattttcaagggcacatcagatattaaccaaaatagaccatgtgctgagccataaggtaagtctcaatgcatttgaaaaagacttaaattacacagacagtactctctctacatggaagtaaa

SEQ ID NO: 763607 - DNA, 451 bp, Homo sapiens
ctctatttgtatgttatgactttttaacattactatctttattataatcattacctaacgatgtgaaaagcatcattgcatctttggatcactatgatttctgaacgaactgggtaatgattattttccgagttataaaggtgatgaaattgaaagttggtgaagtcagtttgtcattcattccttcattgattcattgtttattycgtaagtgtttactgagtgcttcctaatgttactgcagctctgaatatacaaagatgacatgtccctgccctggaggagcacttaagctactcgaggaatggatagctatagataactaacagtgtgtgatcagcattaggaagcaaataattaccaagcattagaggggtgcacagcagggtgtcagattaattctgacaagggagttggggtgcctttcatagacaagggaactaagctaggc

SEQ ID NO: 763608 - DNA, 460 bp, Homo sapiens
agtattaagtgggtgggatgttgagaacatgtggagagtacaggaagatgaggcttggaaaggtcacgtcggttgtaaatgacagagttgggaaagtacagggttttctgcttcccagtttgatgtttttcctttagactaggttctttgttatttagtttttttcyccctaaatacatcattagcaccctctatatatgccatgttgaggaatatgacaactaggagtttcacttgacaaggttatccatttaagctagaggtgtagcttgcatttggtccatgtacaggtcagggcgtgttcctatggatcagttaaggtgacgtgagtgggggctaaggcccagacattctcatttaagtgttctgcccgtgaagcaaatgtcattttaatcaaccccaagttgcaagcactcttacctcatgaccttagccctagtttagagggctcacagattat

SEQ ID NO: 763609 - DNA, 585 bp, Homo sapiens
agcaatccaatggacagtccatgttccacataattatcaactcactttccctgctcgtgaaattgctgttaatttttaacaagtgattgggactgtctatatttagaggattacctagtaaccaaagctcatgacacatgagatggttaagttttcctaccagacctaactgtgatatttcctgactttaatatgtttttatgtcagccctcttaatattcagtttacctcggttttatcwaatgcttagcattttttatgagggggtggatgagcgaaaaatagaaactcataaaactggaatttcatttcttttgaaaaatataactgagatcagtgaaaaaacattgtcccatagagggtatgggaaacttggactcaaaaaactcgggtttgagacttggctctgcaagtgtagatgtggctgtgtggggtaacctcaagtaaaccacttttcctcagtttcctctttcgtaaaatagggatagtaagacttgtcttttttcatatatagggctgtataaagttcacatgaagtactgcatttgaaaattttctgtaaatgggaaatgttatgcaaatgta

SEQ ID NO: 763610 - DNA, 525 bp, Homo sapiens
ttgatttcatcaaatgttatgtaattttaatgaaagttcagatttgaagagatttgctaacattgaatcaccaaatttctgtcaaataaggcatagtagagacagctgttaaaaaaaaaaaagacttggcaacgaattaraaaaatggagattctatttccagatttctccccaggtgtctttaagtctttccaccactttaaagaaacaaaatctgaagattgtaaatgaagtattacgaacaaggtttttgcaaaatagacgaaacagaacttttatcagttgaccgatatggacgaaagaggcctctgatttacatcataagatttgcaagtgaatgcacatttatttgcttgaaattaaaattacttttggggggagattcttcccattttccatgtttaaaattaacctattaatgaccagtttggaccacatcagatagaaagtagctaccgtctgtatttgagtccatgtgaacatatctataaaactaagtttctgaaagtgggattatacagtgga

SEQ ID NO: 763611 - DNA, 631 bp, Homo sapiens
ccggatggatcaaggagttttcttggcctcattccacttcccttccctggtggctcccaccctaaggaatatgaccttaggagtccctgtgagcacctttgcaatactgctgctttccttagaggggggacctcctctctgggcagctgaggccaggaagcagaactccatcctacacagtaataaagagagtgtttcagcacagatggggagtctggagccctaggttgtatttctagctgagctgcttaragtcctcaggattagccacaagtcctttaacctccaggcatctcaaggctccacagagactgaaatcctttccctcccattttgtgcaaatggtgggaggataaattcagtcatgactgtttaatgcttctgtgccctccggagaaaagaaagaacaaaataccagggagagaaacttttttaatagcttgttggtggaagctgatctttgctgccactgtgccctggcttctaatcccacatctgactttggctcagggccatgagccacagtgcttggtttctgcagactcactgaacagcaaaccaaatggaaccatcaggcccgatggtgagaattgtgtgtctgacacacagatgaaggggaggcttcacaccg

SEQ ID NO: 763612 - DNA, 676 bp, Homo sapiens
ccataggttttatttttaattttaattttaattttttttttgagatgagccttgctctgttacccaggctggagtgcagtgacacgatctcggctcattgcaacctctgcctcccgggttcaagtgattctcctgcctcagcctttagagtagctgggattacaggcacgcgccactgcacctggccttgaaaagcttcttttaccctctgaaaatacattttgacacaattcgttaaagtcttgcagcatttaattatattagagtttataagagtgaaagatacatgaggttctattagcagcgtaggccttccagtaattatttcataaggggtcaatctgtatatcccagtgagaatggatctgattgccattagtgctaayggtagtacctttggccaagtcaatccaattgattcagttaccttcgtcaaattcatttttaaaaatgccttttgtcatttttatctttccaaaagactgagggtgatagagacaatgctagtaccttgtgcttctaacattttaactcttttataatttgtccaaatggattcctgtgtcactagagattttgacagggatgtctcctcaagcaggggcccccaacccccagcaggcccccaagacttactggtctgtggcctgttaggaactgggccacacagcaggag

SEQ ID NO: 763613 - DNA, 589 bp, Homo sapiens
cttctttcttctttttttgagatggagttttgctcttgtcgtctaggctggagcacaatggcatgatctcggctcactgcgacctccgtctcccaggttcaagcgattctcctgcctcagcatcccgagtagctaggcttacaggcgcctgccaccatggccagcttatttttgtrtttttagtagagatggggtttcaccatgttggccaggctgatctcgaactcctgacctcacgtgatccacccacctcagcctcccgaagttttgggattacagacgtgagccaccgcacctggcccaggaaacattttcttctggccaatactctggcccttttgactgtaaggaagtatgtgaaagggggcagtttgcatgtttgcggagtgggcatatgtgtgggagtttattgagaaagatggggaaatggtaagatttgtctcctgggggttagcacccctcccgcttatgggcttggtgtggtttaaagaaagtgagatgcagaaatgctgatcaaggtggctctgggtctcatcctgtgagccctgaatgccccatgcaggaagggcaccatctcaggagtcagctg

SEQ ID NO: 763614 - DNA, 570 bp, Homo sapiens
aggttttggatttgggagcatttcagatcttggattttcagatttgagatgctcaatatgtactttgttgtgacagcaacaggaaacttacacagtcaggagagaacttctacacattcagatgtgtattgcaattatttccccagaagttaactgagccgactgtttcaggtgacagtggaagcggtcatccctttaacggtgccatccctttaacttcatgatagcatagatgtacacctgccagcagtcttaaaagatcagacttagagccatctgactttttttttttttttgagayggagttttgctcttgtcgcccaggctggagtgcaatggcgtggtctcagctcactgtaacctctacctcccaggttcaagtgattctcctgccttagcctcccacgtagctgggattacaggcatgtgccaacacgctcggctaatttttgcatttttagtagagacggggtttcaccatgttgaccaggctggtctcgaactcctgaccttaggtggtccacctgcctcggcctcccgaagtgctgggattacaggcgtgagccactg

SEQ ID NO: 763615 - DNA, 512 bp, Homo sapiens
tcccagcactttgggaggccaaggcaggtggatcacgaggtcaggagatcgagaccatcctggctaacaaggtgaaacccagtctctactaaaaatacaaaaattagccaggcatggtggcgggcacctgtagtcccagctactcaaraggctgaggaaggagaatggcttgaacccgggaggcggagcttgcagtgagccgagattgcgccactgcactccagcctgagcaagagtgagactccgtctaaaaaaaaaaaaaaaaaaagcacagcatagtttctatggtaatctttacataacctcaaatcattcataatagagtatcaaatgaacccaaattaggagaaattcatcaaaatggctgatctaagccctttaaaagtgtcagactcccaaaaaaaaaaaaaacaacaaagagatagactgagagtcagttataaatttcaaaagactaaagagaaataacaattcaatacaatgtgggatcccaagacaggatcctgaaacag

SEQ ID NO: 763616 - DNA, 632 bp, Homo sapiens
atatagggctggaaaggaatttcttagaaataatgtatagtaacaaagacaccgtgacagataaggagaagttagtccttggaaaggagccaattttagaagtttgtggaaaatacagcataacactaaagagaagtgtagttgcacttaaagcagcaaagtaatgacctcctacttattcaaagatattcaacgcatattttgaacttaggtcttaatttattcatcatttcttttattcctgcttttgaatttaaagacataattgtgagcaatagaaggacttgctttrgggctaccttgagtttcaataatcaccattagttttatcattgtgtaatcctgggctaatgttaatttcgagtaaagaaggaagagtggtttgttccacactaaaatgcgtttcgtatttagttcagttgaactggttttctaaaccctcaaggtttattgtgttttattttgaaggaaggggtcgattacttgctaagaacttttcacagaaacttattgctaaccttaataatagtcactgaagttggcaatcaaaagagaggatgaaggtgagcaaaactgctttgtcagcatagtagtttcatggctgatgttgttaaaatactatgtaaaatgac

SEQ ID NO: 763617 - DNA, 659 bp, Homo sapiens
  misc_feature 1, 2, 3, 4, 5, 6, 7, 8, 9, 10, 11, 12, 13, 14, 15, 16, 17,18, 19, 20, 21, 22, 23, 24, 25, 26, 27: n = A,T,C or G
nnnnnnnnnnnnnnnnnnnnnnnnnnngcaaataaacctcatttattacagaatacctgtaagaaagggacctcttatccagatgcacagacttatccccaaatatcatctatgcttaagataccatattatgggtggtaggttgaccaccaagggaaatggatggctaatgattaccagatcctactatgttacctttccccaccctcctcacggcaagcacagcaacagaaaacatcccagaaagtacaggtccttttcttcacagaaataaaccacacacaacaaatctatcccatcagaggtggaatttatttcccacagactctagatttaaatttattaccactgcaatccatggctcaaaggtgacaaaggcattgctataatactcagttctagcttaatagtataaacttggcaaccaaacactgtaaaaggattggaaagtggtgttctttctatacatcargctgactcaatttgcaagagagtgagttccagtaagaaacatatcatttggattctggcaagggtgatggattttcaggctctgtttacctggctctgaagatgatgaggttttaagatctgaggatgaaaatgaaaggttttatgatagttttttacatttgggaatagctttttacattaggggc

SEQ ID NO: 763618 - DNA, 561 bp, Homo sapiens
aatcatgcatgcttaatttttaaaatatctttactcatttttgaaacatatataaaagaaatcataacaacatgtaaaatgttgcatagggcttttgtcacttaatataatacaatgtttagggaacattcattgattttcattagtatatagyattacgtattgtaaatatgttatatatatttatctgttctgctccttattgacattaagttttcttccagtttagcaccatttgaaataaagttgctatgaaaattgtgcaattattttgtacatataagcatacatttccacagggtatatacctaggagtgaaatttactgggtaagggggcatgtttattcaaacatatgagataatgtgaatattttttccaaagtgtttgtgtcaatttgaacttcttccaggaactttatgagcattttatttactccactttgccacttatgcttagtattattatgttcttatctgttggttacaatgtggttattaaaagcacactgtagtaacaatgtgcttttaatctgcattttctaactaggtgttgaggactt

SEQ ID NO: 763619 - DNA, 584 bp, Homo sapiens
cttgtttcttgagtgccagcctagccacagtagattagaggagaagtagattcttgaggttcctggctccaggctctggctcctggatggcatatctggacctgccgtgggctggaaagaaactcgatgccctgaaagaaaggacaaaagcctaacaagacttgccatgtgctgaatgaagagggcttgggccttgaatttgtgttgatagtagccaggcagtggtcacgatgtgtattaacaataccctgtgctgtattccctcaggtcttacgcagcaaagttccagkgtggtagccatggggtgcctgtgtcactcatccactagctccaggcaactcagcacagacagactctgtttgtttgtgggaaagtaaggaaatagaacaagagtctctgttgggtaatccaaaaattttctcagatcttaataaagactaccgaggaggtatctctaaaaatctgcaagagtcacaacattattggacttacagtgccctctaatgcagattcagttgcagtgaccagagacttaaatcacaacactcaattctctttgaatactggaaaatccttccaaaggg

SEQ ID NO: 763620 - DNA, 616 bp, Homo sapiens
gctggaataaatgctccctgtgaggacgctggctgaattcagcccagtattggtttctgctgtgacaggcagcactgagttacaattcaagtctcatattcactgtactctccctctctcaactgcacagattcttttcctgcaccatgcagctatagccaagagatgggagaggggtgttgtaagcaattcgagatgtattttctgccctcttcagtgcctaaatataaagacaggtacggtgattgctcacgtgattttcagttcttataaaggtgcttttttattctttcatttctttttttaatatttttggtggttttttttttttttttttttttttttcgcggggatagttgttcaatttgttgttgctgatggccgggggaacggggagtgtattaccactggaggcttcttttcagccatcttgctctgcctscaggataaaatgtcttgtaaggctggtcaactagcaacaagtttcctcaatttttgtttgtccaaaaaagtcttcatttcttcttaaaatctgaagaatattttcaaagggtacgtaattctaatttggtgtgttttgtcaatgctttaaatattatatttcactatctttttg

SEQ ID NO: 763621 - DNA, 555 bp, Homo sapiens
gtctgatgccattatatagtcgcctgaatgacttaaaatttaaaaacatcttataatagcatatgtgaatgagattgtagaaaaactgaaacttatgcttcgttgaatgtgtaaatttggacaaaaactttgaaaagctctttgatataatcaattaaaactgaatttacttctacttatgactcagaaattacattcctaagtataaacccaagagaaatgtatgtgtgtgtatactraaagacaagtacaaggcatttcacagcaatcttatttataataaacttcaagtggaaactaactaaatgattagaaacagtagaatggataaattattctatattcacataatggaatattatataataactgtgaatgaacaaaccacatctttatacaagaatttcctactatcccatattgaatgaaagaagccaggcatagtgtagaaaatatataacttattctatatgaaattcacattcaagcaaaactaatttattgtgtaggtcacgacggtgattacttttgttttgcctgaacagtggttacttt

SEQ ID NO: 763622 - DNA, 632 bp, Homo sapiens
gcagtttttccatcctcaccctcctcccagcttccaccttcatgtaggttccagtctaggttgttcccttctttatatcctaatgtactcaaagtttagctcccagttataagtgaaaacatttggaatttggttttctgttccagtgttagtttgcttaggatactggcctgctgccttttatgtccaaaayggtatttcccaggttgcagctccatccatgttgatgcaaaggacatgatctcattcttttttatggctgcatcgaattccatggtatgtatgtatgtatgcatgtgtatatgtgtgtgcatgtgtgcatatgtgtgtgtacacatacatatatatacatatatgtgtatatgtatatatttgtgtatatatatgtgtgtgtgtatatacatatatgtgtacgtgtgtgtgtgtatacacatatatatgtatataacattttcttcatctagtctgccattgatgggtacttaggttgattccatgtctttgttatggttacttgtgctgtgctgaacatgtatatgcatgggtctttatgatggaatgatttgtattcctttgggtatatacccaattatgggatttctaggtcagaaggtaattctgttttatttgag

SEQ ID NO: 763623 - DNA, 632 bp, Homo sapiens
gcagtttttccatcctcaccctcctcccagcttccaccttcatgtaggttccagtctaggttgttcccttctttatatcctaatgtactcaaagtttagctcccagttataagtgaaaacatttggaatttggttttctgttccagtgttagtttgcttaggatactggcctgctgccttttatgtccaaaacggtatttcccaggttgcagctccatccatgttgatgcaaaggacatgatctcattcttttttatggctgcatcgaattccatggtatgtatgtatgtatgcatgtgtatatgtgtgtgcatgtgtgcatatgtgtgtgtacacatacatatatatacatatatgtgtatatgtatatatttgtgtatatatatgtgtgtgtrtatatacatatatgtgtacgtgtgtgtgtgtatacacatatatatgtatataacattttcttcatctagtctgccattgatgggtacttaggttgattccatgtctttgttatggttacttgtgctgtgctgaacatgtatatgcatgggtctttatgatggaatgatttgtattcctttgggtatatacccaattatgggatttctaggtcagaaggtaattctgttttatttgag

SEQ ID NO: 763624 - DNA, 632 bp, Homo sapiens
gcagtttttccatcctcaccctcctcccagcttccaccttcatgtaggttccagtctaggttgttcccttctttatatcctaatgtactcaaagtttagctcccagttataagtgaaaacatttggaatttggttttctgttccagtgttagtttgcttaggatactggcctgctgccttttatgtccaaaacggtatttcccaggttgcagctccatccatgttgatgcaaaggacatgatctcattcttttttatggctgcatcgaattccatggtatgtatgtatgtatgcatgtgtatatgtgtgtgcatgtgtgcatatgtgtgtgtacacatacatatatatacatatatgtgtatatgtatatatttgtgtatatatatgtgtgtgtgtatatacatatatgtgtaygtgtgtgtgtgtatacacatatatatgtatataacattttcttcatctagtctgccattgatgggtacttaggttgattccatgtctttgttatggttacttgtgctgtgctgaacatgtatatgcatgggtctttatgatggaatgatttgtattcctttgggtatatacccaattatgggatttctaggtcagaaggtaattctgttttatttgag

SEQ ID NO: 763625 - DNA, 599 bp, Homo sapiens
gtaccatgctgttttagttactatatcatgatagtatagtttgaagtcaggtaatgtgatatttccacctttgttctttttgcttacaattattttgattagtcagggtcttttgtgttccatacaaattttagaatagttttttttctaattatataaaaaattacattgttattttgatggaaatagcattgcatttctagattgctttgggcagtatggcyattttaacaatattgattcctctaattgatgagcatgaaatattttttcacttgtttgtgttgtttactatttcttttaggagcgtttcacagttatccttgtagagatctttcacctcttttgttagatgtattcctaggtatgtaatgtttttgtggctattataaataggaatgtgttcctgatctggatctcagcttgaatgttattgatgtatagaaatgctaccaattttgtacattgattttgtaccctgaagctttactgaagccatttatcagttccagggaccctttggtagagtcttcagtgttttctaggtatataataatatcatctaggaaaagagataatttcactacttctttttctat

SEQ ID NO: 763626 - DNA, 466 bp, Homo sapiens
agcaggattataacacattccatacaagaccagtgaatatactacagtaatttgattggttacggactgctacattcccagaaaaatcattttgttactttttgaggaggcctagtgatctgagagtgtcttaaatatttagaggraaataaggcagtagttgcagctgcatgctgcgtgattcaaactgcataaccacattcctctaaaggctcagaataatttaaagttccaacaacttttatttaatttcacaccagtaatttatgacataggaataacacgtaataactttctgttagaaattagtattgcatacccctaaaaatgtgaaactttgagagacttcacaatttacttaactatatatttcatctaatttaagcaatattcacttactgtggtatggatgtcatctatttaataattttagctttgcagcttatattattctataattacatca

SEQ ID NO: 763627 - DNA, 624 bp, Homo sapiens
cagaagaaggccctgcaacaggtccagtctgctgtgcaagttgctctgccacttgggccatatgagccagcagatccaatgatgcttgaggtgtcagtggcagatagagatgctgtttggagcctttggaaggcccccataggtgaatcacagaggaggcctctaggctttaggagcaaggccctgccatcttctgcagataactgctttccttttgagagacagctytttgactattactgggctttggtggaaactgaatgtttgactataagtcatcaattcaccatgagacctccactgcctatcatgaactgggtgctttatgacccatctagccatatactgggtcatgcacagaagcatttcatcatcaaatggaagtggtatatatgtgatcaggcttgagtaggtcctgaactcaaataagttacatgaggaagtggctcaaatgcccatggtctccactcctactaccctgccttctctctcccagcctacaccaatggccttaaggagagttccccattatcagttgacataggaagagaagactagggcctggttcacagatggttctgcacgatattcaggcatcacccgaaagtggacagctgcagcact

SEQ ID NO: 763628 - DNA, 606 bp, Homo sapiens
tgcttaatcaagctacactgactttacatccaacagtacctaacccgtccacattgttgggtttgctgccagctgaggacagctggttcacctgcttggacctgaaagacgctttctttcctatcagattatcccctgagaggcagaagctgtttgcctttcagtgggaagatccggagtcaggtgtcactamtcagtacacttggaccgggcttccccaagggttcaagaactcccccaccatcttcgggaaggcgttggctcgagaccatcagaagtttcccaccagagacctaggctgcgtgttgctccagtaggttgatgaccttctgctgggacaccccattgcagtcgggtgtcccaagggaacagatgccctacaccagcacctggaggactgtgggtataaggcgtccaagaagaaagctcagatctgccgacagcaggtaccttacttgtgatttactatccgacaggggtcggaacgcagcccaggatcagaaagaaagcaggtcatttgcaatctagcggagtctaagagcagaagtcaggcgagagacttcttaggagctgtggggttttgtagactgtggatcccaaactttg

SEQ ID NO: 763629 - DNA, 220 bp, Homo sapiens
atgccctacaccagcacctggaggactgtgggtataaggcgtccaagaagaaagctcagatctgccgacagcaggtaccttacttgtgatttactatccsacaggggtcggaacgcagcccaggatcagaaagaaagcaggtcatttgcaatctagcggagtctaagagcagaagtcaggcgagagacttcttaggagctgtggggttttgtagactgtg

SEQ ID NO: 763630 - DNA, 611 bp, Homo sapiens
ctggcagggaaacatgaatcattcacaccttcattagaatatgcagcactgtgtcagccatgccttgagcatagagccatcctaaaccatgtgggggacaccaagagaagcttctgaggatgctccccagcatactcacagttatgaagactccacctgagtcactgcagcaagtcagtgacatcttagatgatagaagatgggtcacttactggcaagcctgtatcaacacccccccttagcaactgtccctatcactggccaaacttaggtactacacgatctgtagaygaatcacttctaaattaagcatgaagatttccaaattagttcaaaatgatctaacatctagacagaaggtacataacggaggacgggaacataaggagtgggaaaaaatagaaggttatgttctttgagaaaacaatttattttcttttgaaaggcaggacctatttttgcaaaaaatgactgactcactttattttttggatcattgtaaaggaaagagagtgtgtgtaatgcgttgctttacaaccaaataaagatgtcatgtggacattaagctttctaatttggtttatattattccagctacaatcaaaatgcac

SEQ ID NO: 763631 - DNA, 581 bp, Homo sapiens
gtaaaagtaacagtaataatgacaatatgtgacattggacttagccgggcctggtggcacacacctgtcatcccagctacttgggaggctgaggcaggaggattgcttgagtccaggagtttgaggctacagtgagccctgtcgtgccattgcactacagcctggacaaaagtgaaatcctatctcaaaaaaatgaattagtagtaataataattattgagtatttagtatgtgatatggtttttggctgtgtccccacccaaatctcaccttgaatagtaatagtccctacatgtcaagggtggggtcagrtggagataattgaaacatgagggcagcttccccacactctttttcgtggtagtgaataagtctcacgagatctgatggttttataaatgggagttcccctaacacatgccctcttacctgctgccatgtaagacatgtcttgcttcccctttgccttctgccatgattgtgaggcctccccagccatgtggaactgtgagttaattaaacctctttcctttataaattacgcagtctccggtatgtctttactagccgagtgagaacag

SEQ ID NO: 763632 - DNA, 620 bp, Homo sapiens
cttggccttctgtgcttgtcatatgctttgaattaacagacctattaggaatgagtatttgacaggaaacagacaatgtggcttccagtcctaactctgccaccagctagctataggcctttgagcaaatcaatgtttttttgtcccatagtttatcaaaagacagctccaaatttgttcattcctttaaaatatgtatttctttttgcaagatgaaaaagttctgggccaggtgctatggctcatgcctgtaattccagcactttggtaggctgaggcaggaggatcaggagtttgagaccaggctgagcaacatggcaagactcttgtctcttcaaaaaaatttaaaaattagcagggtgtggtggcatgcacctgtagtaccagctactccaactccaaaggctgaggcaggcaggaggatcacttgaggcyaggaggtcaaggctgcagtgagctattccagcctggatgacagtgtgagaccctggctcgaaaaaaaaaaaaaagttctgaagatctatttcacaacagtggcagtggaaatattactactgaactgtatacttgaaaatagttaagatggtaaaagaataatgtaaaagtcagtgttggttggc

SEQ ID NO: 763633 - DNA, 514 bp, Homo sapiens
tgtatggaagaagtaatatatgagcaatctattttctctgggtgaagacagcaatgggcatatttcacttccattgttaattggggatagtattgctctaggccaagacactaagtcagctaagcgctgactaatcgaggaagtgtttgcaggtgcactgggcccaaggacacacaggcctcttgtactttaacttacatgtggtgttctcagacctgcatgaccaattctgsaatagtatctgccacagaaaagacactgtgtgaaattcttgtgcagctcttccccatctaacctgttcctcacaatggtgaacacccaggggaagtgaaaggaagtgccccagactgagactgggaaccgtcacctcccactggatgagcaatgggagacgcccaggagtgtgaattccctgcctccataatgccttttctctcccaaagcattagtcttggagagatgagcaatgattggtaactctcctctctagttaaatctgaatttccagttgctt

SEQ ID NO: 763634 - DNA, 597 bp, Homo sapiens
ggtagtagtgtggggtatgatgtgttcgaggtgcctatgaggcattcaagtagagatgaccagcaagcagttggatatatgagtcagagaaacaaaagaagtagcaaatttttttttttttttttttttttttttgagacggagtctcgctctgtcgcccaggccggactgcggactgcagtggcgcaatctcggstcactgcaagctccgcttcccgggttcacgccattctcctgcctcagcctcccgagtagctgggactacaggcgcccgccaccgcgcccggctaattttttgtatttttagtagagacagggtttcaccttgttagccaggatggtctcgatctcctgacctcatgatccacccgcctcgacctcccaaagtgctgggattacaggcgtgagcaaattttaaataagaagaaacagtcaacagcatcagacatagtaggtatgtccaacaccataatggctgaaaagtgcccacctagtctggcaattagtaggtcattggtttattaataaccggcatgttaaagttgggtcaggatgagctcagagtgtagaagaaaaaccaattgccaaactcctccg

SEQ ID NO: 763635 - DNA, 588 bp, Homo sapiens
cccttctcttggggtaataccagtcatcagatgaaaatcaaatatagtgtttatcagttccatgtctactttggaacagaaaaaaactttgcaataacattttaaaatgtttactcattatcagtagctgttatgatagaatgctggtatatgctcttatgaatcatctaatgttgcatcctcagtgtacaggtgaagaacccaaagcctatagagtttgaattgcctgatttcccagtacttggtgggaaatgcttgcctcttcctccaaagtagggccgtttccactccacccccacacagtgccagtcaaggagctgttcgtcagaacgttgaaacagcctcactttggagytcaggaattcaagcttcatacatggaagttgacattgttgtggcatttgatcagatcttacttttaaggaattagtcatagttgtttcccagttatctcataggcatatttggttcttcctagaatatcatagatgtttcccattctaatcattgcagtaatatattatacatcaagaaaaactggaagggaaaataatccaaacaccagtattttgtaaagatacaaaaata

SEQ ID NO: 763636 - DNA, 666 bp, Homo sapiens
acattatcctttcttcattgagctgtctttgcaccctggtgaaaaaattattggccatattcacgtgagtctgtttctgatctatgttttttttttcctttctaaattattgtcttgattaacctagctttatactaagcattaaaatcagcctctatgagccctccaactttattcttcatttacaaaactgttatggctattctagttcttttgcttttccatacatatttcagaatctgcttgttgatacctacaaaaaatcttgctgggattttgrttgggatttcattaaatctatagattaatatgggaaaaattggtatcttaagaatttgggttttctagtccatgaggatattattttccttcatttatttaggttttcttttattcctttcatcagccttttaatttaacttgttcaacattttgtagttttcaacatgtaggtcctacagatagatgttttgttagatttatatctaagtatttttgtttttggagttgttatagatggttttgtttttcaatttttgtttcaaatttttcattgctaatatagaaatatttttgtatgtcagccttgtatcctttgaccttactagatgcgcttattagttctgggagctattttgtggatccttggcattttctatgtaggca

SEQ ID NO: 763637 - DNA, 581 bp, Homo sapiens
actgttgaatgacaacaaaatgtggtatctccatagaatggaatattattcagcataaaatgaatgaagtacaaggtgagcatctctagtccaaaaattcaaaacctaaaatgctccaagatccaaaaccttttgckagctgacatggcatcgcaagtggaaagtttcacacctgacctaacatggtgggtcttcgtcaaaatgcagatgcacaacacacagtttatttagtgttcccagtggaaaaaagatcctttcagccccttttggctgtgagagtatcttttctgcacatgcccaaattgtcccacagaagcacactcataaaatgtaagaaaatgtcatgtgtgcagttcggacacgccaacagcatatttctcacaatgacccatgtggagccaagacctatgtgccttatttacagtgttttgttttgcttatactttgttctgtggcataagggtattgttgaaaataccagcaaggcccggagatacctctgtgggtaacagtaataagaaaaagagaatgcctttgtttatggatagcacaggaagtccagttgttggagaagctagaca

SEQ ID NO: 763638 - DNA, 619 bp, Homo sapiens
tcttttccactaagtggggagagcgtcttaaaattaaagggaaaaaaactgcatgtagccccctgagctacaattggtaatctagtactcagggtagtactcttggtacaagatggatgggcacctataacaacaacamtgcccagaaagagacaacttttgaggcacctgtttatactgctcccacctgcattctccttttagctagaacttacatgagctgcctgtgggactctctccctccctcttgttaagagtaagaacagagcatacattttgtaaattagtgactgttccacttttcaaggctagaaggaagtgaggagccaaggtagtgcatcctatggccttaattccactatattgcctgtagactcctacccaagacatcatgaaggatatagatatatggaagaaatttttaaaaagtccatctaaagaagttattttatcctctttaataaaggcagtattttggcatgagcaaatagtacttatttgcataaataataaagtatatttacttctctatctgtcacacagcccatttggatgacttccatgatgtaaaataaggcatgttatggtattaatatcattagtcctgatgattcattat

SEQ ID NO: 763639 - DNA, 510 bp, Homo sapiens
ctgcctcagcctcccaagtacctgggattacaggtgtgcatcaccatgcccaactaatttttgtcttttcagtagagacaccatttcaccatgttggccaggccggtcttgaactcctgatctcatgtgatccaaccacctcggcctcccaaagtgctaggattacagatgtgagccactgcacccagctgtttttatttcttttggatatatacctaggagtagaattgcttggccatataataactaagtttaattttggggggattgtcaaaccgtcttccaaagcagctacaccattctacattcccaccaggagtgtataagggcttcagcttcttcacatccttgccaacacttattatctgttttttwaattatagccatcctagtagggatgaagtagtgtctcactgtagttttgatttgcatttccctaatggctaaatgaataatgctcagacatacttttgcgtgctttttgccattcatatatcctttttagggaaa

SEQ ID NO: 763640 - DNA, 604 bp, Homo sapiens
atgaaaactaaaaatgaagtatgtgtagagaaagagtggattcattgaggaaatgttgacaaaaagacaaggggagttttggtgggggtaagacatattgagcttaagatttaggaatgtaaagaagagggagcttcttataatggctcactgttgtctttagggcatcatgaggtgaaaggcactgcatatatgacccacaacataaaaccagagccagggaggtactcacagtggtgcacacctttaatcccagctacttgggaggctcaggtggaaagacggcttgagctcagaggtttgagactagcctgagcaacatagtgagacactatctctcctctyctcttttcctctcctctcctcttctctctctttggggttcaccagccctccctcccatcttctacacccttgcagataacacaaagattgaacaactctgccacatcttcctggtgtccttgagagagttgggattgtcagcaaactctcattctgccaataacaccctgtccattgtctctgtaaggctgataatgggttccagacaggacttgaatctgcaaaaataaattccttcatgttactccttacaaagacc

SEQ ID NO: 763641 - DNA, 596 bp, Homo sapiens
aaaaattcgtaagccaggctctttcttccacaatcttaaatcttgcctcagctttcttctctctgcaagagacatcaaggtgtttttcccggtgtaagaaactgtgatccttgagctcacagacgctgagatcatacaagtttcaatgttaaaagattaaaattgtcaagtgttcaggactttggtcagccaagagaaagaatctcagcacatgaacttcccccacgaacttcagaaaccaargagcatcagacactcccgcccttcatctcagacacccgtaactagagattttttccaagccaagatactgttttctttttattttgttttattttattttttattttatttattttattgtttattttcaagacactcttcctctgttgcccaggctggagtgtagtggtccgatctcggctcactgcaagctccaccccaaaggtctgagcgattctcgtgcctcagcctcctgagcagttgggactacaggcacctgccaccatgccctgctaatttttgtatttttggtagagacagggttttgtcatgtccccaggatgatctcaaactcctggtctcaagtgatccac

SEQ ID NO: 763642 - DNA, 568 bp, Homo sapiens
aggaacagactagagaatctctggcagtactaaagagcccctcaggattggtagtcacacctttacgtgctggcgagagagtaaatggatgattggtaaaagttggggagtgtgaattcagtcttgggctttttgacttctaggtgaagtggcatctcccagtagaagcatccgctgggcagctgcagtggtaacaccgggtgatgatatttgaagtcatcaatcagagcctcccctgcygagaggttctttgtgaggagtggaaaggggtgcgccctctgggccagggacagggcttgctgaactcggttttagcctcaactttttctttcctcctcagccagatgcctttatagatggagcacctgacctcatgcaagggccctcatcactgaagctggagacgaaattggttcttagagagtgtagaaagggacgactgagaactagccccggggcatgattgcaggggaccctgttttctctcttgtgacacctgttgtagatatgtgaaatgagacagttatgcttgtccctcttcacagcagaaggggaaaagtcaaactgg

SEQ ID NO: 763643 - DNA, 564 bp, Homo sapiens
tagggctgctttttctttttctgtgaagaatgtcattgcattttgatagggattgcattgaatatatagattgctttggggagtatggtcattttaacaatattaattcttctgatccatgaacatgagacatcttgcagtttctttgtgtcctctttaatttctttcatcagtgttttgtagttttccttgtagaggtattttacatcattggttaaattaattcctagattttttatttattttatagctcttgtaaatgggatttatttcttgatttctttctcagttcattattggtgtatgggaacaccactgattcttgtatgttggttttatatactgcaacttaattcacttatcagttctaagarattttttggtgaagtctttagattttctctatgtacaattatgttatctgcaaagagggacaatttcacttcctctctttcaatttggatgccttttatttctttctcttgactgattgctctggcaaggacttccagtaatatgttgaatcagagtggtaaaagtgagcatccttgtcttgtttcagtt

SEQ ID NO: 763644 - DNA, 590 bp, Homo sapiens
ctagagtgcagtggcacgatcacagctcactgcaaccttgacctcctgggctcaggtgatcctcccatctcagcctcctgagtagctgggactataggtgtgtgccaccatgcctgcctattttttagaattttttatactgatggagtctcactatgttgcccaggctgatctaaaactcccagrctcaatcaatgctcccccttcagcctcccaaagtgttgggattacaggtgttagccaatgtactatgctttgatctttattatttctttccttcactaattttgggtttggcttgttcttgtttttctagttccttgaggtacaacattaggctttttatttgaaatatttcttcttttttgatgtaggcatttattgctataaacttcccttttagcactgcttttgctgtatcccataaattttgatatattctgttttcattttcatttgtttcaagacttttgttgttgttgttgttgttagacagagtcttgctctatcatccaggccggagtgcagtggcacaatcttggctcactgaaacctctgcttcctaggttcaggcaattctcatgcctaag

SEQ ID NO: 763645 - DNA, 590 bp, Homo sapiens
ctagagtgcagtggcacgatcacagctcactgcaaccttgacctcctgggctcaggtgatcctcccatctcagcctcctgagtagctgggactataggtgtgtgccaccatgcctgcctattttttagaattttttatactgatggagtctcactatgttgcccaggctgatctaaaactcccaggctcaatcaatgctcccccttcagcctcccaaagtgttgggattacaggtgttagccaatgtactatgctttgatctttattatttctttccttcactaattttgggtttggcttgttcttgtttttctagttccttgaggtacaacattaggctttttatttgaaatatttcttctttttwgatgtaggcatttattgctataaacttcccttttagcactgcttttgctgtatcccataaattttgatatattctgttttcattttcatttgtttcaagacttttgttgttgttgttgttgttagacagagtcttgctctatcatccaggccggagtgcagtggcacaatcttggctcactgaaacctctgcttcctaggttcaggcaattctcatgcctaag

SEQ ID NO: 763646 - DNA, 621 bp, Homo sapiens
aaactcctgggctcaagcgatcctcccacctcggtttcccaaagtgctggacttaatcctgatttaaaggagtatctctgcaacaaagttccatccacaccccagactgcaacaaagttcgttataaaatgcttttcaaaagtatttatgagtaattagtgagtttcaatggaactgtaatccattttttaaaagtttttaggacactccctggtagtctagtggttaggattccgcgctcgccatcaygacccgggttcgattcctggtcagggaagccttccttctggctgggcgctgtggctcacgcctgtaatcctagcattctggggggctgaggcgggcagatcacctgaggttaggagttcaacaccagcctggccatggtgaaaccccgtctctactaaaaatacaaaaaattagccaggcgtgggtggtgcatgcctgtaatcccagctactcaggaggctgagacaggagaatcgcttgaacccgggaggtggaggttgcagtgaactgagatcgtgccattgcactccagcctgggcaacaaaagcgaaactccgtctcaaaaaaaaaaaaaaaaaaaaggttttaggtcgttcaaaagaactttcaatt

SEQ ID NO: 763647 - DNA, 623 bp, Homo sapiens
gggactggaattatttaaagataagtttgccgaatatgatgcagtgtatttgggaaataaattatgtgtttaaaactaactctacaaacttttcaaaaataaatttgccataagttggatatgatctaggaggaggtaagtaaaggggggcccaatataccagtggaactcatgcctttcactcccccttcagcgtgggcctagttttacctcgawaagggagtgcccggccatcacttggttttatcattgttagcattattccttttgctgcactgtgctcccagaataaaaggaaatagaagataaccttggaatggttttttggtgttggggtggggtggggcgggggagttgttcattttgttgttgttttttgctctgcaaaataatacaaatcaatttaaaacagaatgatgcataactaagaattcattctcatcttagcaaagtcagcaactcctcttagtacatctgtgggaaggaaaattttactcaagggaacttgagaccttttgcaaggaaagaaatcaagaccctatccccttttctctgagatttggagttagggagcttgggctgtgtgtatttaggctggtcacagtgaaagtcaatgagttttc

SEQ ID NO: 763648 - DNA, 522 bp, Homo sapiens
aggaaataactgcagccaagtgcagtagttcacacctataatcccaacactttgggagactaaagcaggagaattacttgaagccaggagttcaagaccagcctgggcaacaagtgagaccctgtctctccaaaaatttaaaaaaaaaaaaaattagcyaggcacagtggcatgcctgtagtctcagctactcaagaggccgaggtggaaggtgggctccttgaatccaagaggtcaaagctgcagtgagctatgattgtgacactgcactccagcctggggtcggagggggagagagagaaagggagggagggacagacggagagagggaagaaagggaaggaagatcactatttaatcgacttcgccattattaagaagattaaatgtagtcatgtgccacttacctaaagaatggtatagtgaaaatagttacttcagtttaacaaatatttatttggcactaactttctgtcagtgaaaatggaaacaaaacttgatatccagtctctgctgtgcact

SEQ ID NO: 763649 - DNA, 522 bp, Homo sapiens
aggaaataactgcagccaagtgcagtagttcacacctataatcccaacactttgggagactaaagcaggagaattacttgaagccaggagttcaagaccagcctgggcaacaagtgagaccctgtctctccaaaaatttaaaaaaaaaaaaaattagctaggcacagtggcatgcctgtagtctcagctactcaagaggccgaggtggaagrtgggctccttgaatccaagaggtcaaagctgcagtgagctatgattgtgacactgcactccagcctggggtcggagggggagagagagaaagggagggagggacagacggagagagggaagaaagggaaggaagatcactatttaatcgacttcgccattattaagaagattaaatgtagtcatgtgccacttacctaaagaatggtatagtgaaaatagttacttcagtttaacaaatatttatttggcactaactttctgtcagtgaaaatggaaacaaaacttgatatccagtctctgctgtgcact

SEQ ID NO: 763650 - DNA, 522 bp, Homo sapiens
aggaaataactgcagccaagtgcagtagttcacacctataatcccaacactttgggagactaaagcaggagaattacttgaagccaggagttcaagaccagcctgggcaacaagtgagaccctgtctctccaaaaatttaaaaaaaaaaaaaattagctaggcacagtggcatgcctgtagtctcagctactcaagaggccgaggtggaaggtgggctccttgaatccaagaggtcaaagctgcagtgagctatgattgtgacactgcactccagcctggggtcggagggggagagagagaaagggagggagggacagacggagagagggaagraagggaaggaagatcactatttaatcgacttcgccattattaagaagattaaatgtagtcatgtgccacttacctaaagaatggtatagtgaaaatagttacttcagtttaacaaatatttatttggcactaactttctgtcagtgaaaatggaaacaaaacttgatatccagtctctgctgtgcact

SEQ ID NO: 763651 - DNA, 630 bp, Homo sapiens
agacccttattagtagttctgctttttgccctttgaagcgtgtgatctttgtgcctactccctgttcttacaccccctccccttttgaaacccttaataaaaacttgctggttttgaggctcagggggcatcagggtcctacagatatgtgatgtcacccccagcagcccagctgtaaaattcctgtctttaaactgtctctctttatttctcagccagctgacacttactgaaaatagaaagaacctatgttgaaatattgggggcgggttcctccagtaatctggggacagtgtacatttcttagctcagcatttcatctaggatttggggcaaacctggtgggcttagcattgtcaccaaaaacctagactggggatagaggtggaaataggtgttcacctgctgagtagcagagttaggtaggaagacttttagaaaaataggtaaarccacagaaggataaggagattgacagagtcagcaagttaagactaagcacaagatatataaagacagcaataaaattttgtggacaaagggaaagaaaaggattgtagttttactgtagagtcaaaggaaaggagacatagagaaagacgaaaagaaatgaacactcagtgatgacct

SEQ ID NO: 763652 - DNA, 610 bp, Homo sapiens
agccaaaattgaggtgtaaaataaacatgcccacataaatggttgattatgttcttaaatgaaggagaaaatagttgcagtgatgttaagtcatcaaccatttaaaatgttgcttttgaaagagatgaatcaaggragggatggatgtgaattttccttgcctaaaaagctagtgaaaattaagagtgacatgaacaggattaaaactttattttatagtggtactgagatgaaacatcacactatctgacttcatagcttaaaaatataatcaccccaccaacttctcactcttttcaaggattttgtgagtaaccagctttaatttggaaaacctagacttctacatacagattgttatgtttgtgagtatgattatttctatcattttgttttacattgtgctttatcattcaataattaatatctatcattttccattaactaatttattttatgaccatttattattattattaccctatggtagtcaataattactgatacatattccattgttttttgggatttgatatagaatcagagaagtttgttgccaactcctttttagttgaatatatattgtttttgtcttatatttagtttttgt

SEQ ID NO: 763653 - DNA, 643 bp, Homo sapiens
ataacttacagtaagaaaagttggtagatatttcagcaatgccataaaatatgcttccatttaacactttgagacaaccaatacactatttatattattgagacaaaacaaatctaagatcacagaaaaatatttattttaatagaatggtatttaagtagatagttttttttgttgtgtttttgtttgtttgtttgtttgtttttgagatggagtctccctctgtcgcccaggttggagttcagtggcccagtcttggctcactgtaacctccccttcccaagttcaagcagttctccctgcctcagcctcctgagtagctgaaattacaggcatgcaccaccacgcctgtttaatttttgtgcttttagtaaagatgggatgtcactatgttggccaggctcgtcttgaactcctgacctcaggtgatctgcccaccttggcctcccaaagtgtaagtagrtagtctaaatgattatgggtttcaataggttttgttaatttgttttagttgacatacaagagcactacaaaaccacattattttattttaatttttatcagtaaacttcattatattaaaggccacatattgcccactgaatatgattttgataagcacaacttctataatttacaactt

SEQ ID NO: 763654 - DNA, 575 bp, Homo sapiens
ccaaaggaaaggaaatcattacacttaagaggcatctgcacctccatatttattgcagctgtcttcacaataaccaagatatggaattaagctaaatatccatcaatggatggatagataaaaaatgtggtatatacatataccaaatttgtatatacattcatatatatatatatatatatgaataatattctgccataaaaagaatgaaattctgtcatttgcagaatcatggataagactagcgaacattatgttaagtggaataagtcagacwcagaaaaattaatactgtctgtccttacccatatgcaggagctaaacaaatttgagctcattaaagtaaatggtagaattgtggttattagatgttgggaaggatgtgggagcagaggttggttaatggacacaaaattatagctatattggaggaataagttctgttgtagtgctctatagctggtcgcatggaaataactataatttatggtatattttcaaaaagctagaagagaggattttgaatgttgtcaacacaaaagtatgataaatgtttgaggtgtttgaaatgctaa

SEQ ID NO: 763655 - DNA, 598 bp, Homo sapiens
gtaggtagggctaggctagatttgtgaagtagatgagtgagtgaaggagtgagtgaaagagtgaatgagtgagtgaacgactgaatgagtgagtgagtgaatgggtgaatgaaaaaataagagagtgagtgagtgagtgagcaagtgaataagtgaacaagtgaatgagtgagtgagtgaatgagtgattgagcgaatgaatgagagcaaatgaatgaatgagtgaatgagtgactgagcaaatgagtgagtgaatgagtgagtgagtgaatgagtgaatgagtgagtgaatgaatgaatgaacgaatggatgagtgagtgaatgagtgagtgagtgaatgggtgaatgaacaaatgagcrggtgagtgagtgagcaagtgaataagtgaacaagtgaatgagtgagcgagtgaatgaatgaatgaatgagtgagtgagtgaatgagtgagtgaatgaatgagcgaatgaatgagtgaatgagtgagtgaatgagtgaatgagtgaggaaatgaatgagtgaatgagtgagtgagtgagtgaatgagtgaaggagtgagtgaatgaatgaatgagtgaacaaacgaatgagtgagtga

SEQ ID NO: 763656 - DNA, 481 bp, Homo sapiens
tcataattaccccagacttgcagataagcacaagcccactggaattatttcccagggaggaacacactcagaaagtgtgagaaggggacttcagtatagatgttacttccagaggccgttaagttcattcctctgcttcccaaccagaacctggaagagatccattagcttccttggctgattcctcctaacagctaccaccccctgagctactaaacagtgycatattgcccctctgttcttcataaggccagaggaccattcctgccaaagtgacctcagagcctggactctgggtttctggggtctctctgttctctgctccccattctgctatttacatatgaggtcccctgtaggagggcctggtgctaggtgtcccggcgagatgtggacatctttctggctcttctccttctcttatctaagtcctcacatggtgggaaaatacctctctaatgttatgtagaaagagaaggag

SEQ ID NO: 763657 - DNA, 471 bp, Homo sapiens
aaagagtgtttaaaaactgctctatgaaaagaaaggttcaacactgttagttgagggcgcacatcacaaataagtttctgagaatgcttctgtctagttttcaggggaagatatttccttttgcaccataggcctgaaagccctccaaatgtccacatccagatagtacaaaaagagtgtttcaaacctgctctatgaaagggaatgttcaactctgtgacttgaatgcaaacgwcacaaagaagtttctgggaatgctgctgtctgctttttatatgtaatcccgtttccaacgaaatcctcaaagctagacaaatatccacttgcagattccacaaaaagagtgtttcaaaactgctctctcaaaagaaaggttcaactctgttagctgagtagatacatcatgaaaaagtttctgacattgcttctatctagcttttattggaagatatttcctttttcactgtagtc

SEQ ID NO: 763658 - DNA, 496 bp, Homo sapiens
gagggcgcacatcacaaataagtttctgagaatgcttctgtctagttttcaggggaagatatttccttttgcaccataggcctgaaagccctccaaatgtccacatccagatagtacaaaaagagtgtttcaaacctgctctatgaaagggaatgttcaactctgtgacttgaatgcaaacgtcacaaagaagtttctgggaatgctgctgtctgctttttwtatgtaatcccgtttccaacgaaatcctcaaagctagacaaatatccacttgcagattccacaaaaagagtgtttcaaaactgctctctcaaaagaaaggttcaactctgttagctgagtagatacatcatgaaaaagtttctgacattgcttctatctagcttttattggaagatatttcctttttcactgtagtcctgagagcgctccaaatgtccacttccagatactacaaaaagagtgtttcaaacctgctctatgacagggaatgttc

SEQ ID NO: 763659 - DNA, 496 bp, Homo sapiens
gagggcgcacatcacaaataagtttctgagaatgcttctgtctagttttcaggggaagatatttccttttgcaccataggcctgaaagccctccaaatgtccacatccagatagtacaaaaagagtgtttcaaacctgctctatgaaagggaatgttcaactctgtgacttgaatgcaaacgtcacaaagaagtttctgggaatgctgctgtctgctttttatatgtaatcccgtttccaacgaaatcctcaaagctagacaaatatccacttgcagattccacaaaaagagtgtttcaaaactgctctctcaaaagaaaggttcaamtctgttagctgagtagatacatcatgaaaaagtttctgacattgcttctatctagcttttattggaagatatttcctttttcactgtagtcctgagagcgctccaaatgtccacttccagatactacaaaaagagtgtttcaaacctgctctatgacagggaatgttc

SEQ ID NO: 763660 - DNA, 565 bp, Homo sapiens
gggaagatatttcctttttcaccataggcctgaaagcgctccaaatgtccacatccagatactacaaaaagagtgtttcaaacctgctctatgaaagggaatgttcaactctgtgacttgaatgcaaacatcacaaagaagattctgggaatgctgctgtctgctttttatatgtaatcccgtttcgaacgaaatcctcaaagctagacaaatatccacttccagattccacaaaaagagtgtttcaaaactgctctctcaaaagaaaggttcaactctgttrgctgagtagatacatcatgaaaaagtttctgacattgcttctatctagcttttattggaagatatttcctttttcaccgtagtccttagaacgctccaaatgtccacttccagatactacaaaaagagtgtttcaaacctgctctatgaaagggactgttcaacactgtgacttcaattgaaacatcccaatgaagcttccgagaatgcttctgtctagagtttatatgaagacaatcccgtttccaacgaaatcctcaaagctatccaaatatcctcttgc

SEQ ID NO: 763661 - DNA, 565 bp, Homo sapiens
gggaagatatttcctttttcaccataggcctgaaagcgctccaaatgtccacatccagatactacaaaaagagtgtttcaaacctgctctatgaaagggaatgttcaactctgtgacttgaatgcaaacatcacaaagaagattctgggaatgctgctgtctgctttttatatgtaatcccgtttcgaacgaaatcctcaaagctagacaaatatccacttccagattccacaaaaagagtgtttcaaaactgctctctcaaaagaaaggttcaactctgttggctgagtagatacatcatgaaaaagtttctgacattgcttctatctagcttttattggaagatatttcctttttcaccgtagtccttagaackctccaaatgtccacttccagatactacaaaaagagtgtttcaaacctgctctatgaaagggactgttcaacactgtgacttcaattgaaacatcccaatgaagcttccgagaatgcttctgtctagagtttatatgaagacaatcccgtttccaacgaaatcctcaaagctatccaaatatcctcttgc

SEQ ID NO: 763662 - DNA, 481 bp, Homo sapiens
ttcattgggatgtttcaattgaagtcacattgttgaacagtccctttcatggagcaggtttgaaacactctttttgtagtatctggaagtggacatttcgagcgctctcaggactacggtgaaaaaggaaatatcttccaatacaagctagatagaagcaatgtcagaaactttttcatgatgtatctactcagctaacagagttgaacctttcttttgagagagcagttttgaaacactctttttgtggaatctgcaactggatatttgtctagctttgaggatttcgttggaaacgtgattacatacaaaaagcagacagcagcattcccagaawcttctttctgatgtttgcattcaagtcacagagttgaacattccctttcatagagcaggtttgaaacactctttttgtagtatctggatgtggacatttggagcgctttcagacctatggtgaaaaaggaaatatcttcccctg

SEQ ID NO: 763663 - DNA, 490 bp, Homo sapiens
tttgtggaatctgcaactggatatttgtctagctttgaggatttcgttggaaacgtgattacatacaaaaagcagacagcagcattcccagaaacttctttctgatgtttgcattcaagtcacagagttgaacattccctttcatasagcaggtttgaaacactctttttgtagtatctggatgtggacatttggagcgctttcagacctatggtgaaaaaggaaatatcttcccctgaaaactacacagaagcattctcagaatcttatttgtgatgtgcgccctcaactaacagtgttgaagctttcttttgatagagcagttttgaaatcctctttttgtaaaatctgcaagaggatatttggatagctttgaggatttcgttttaaacgggattgccttcatataaactctagacagaagcattctcagaagcttcattgggatgtttcaattgaagtcacagtgttgaacagtccctttcataga

SEQ ID NO: 763664 - DNA, 490 bp, Homo sapiens
tttgtggaatctgcaactggatatttgtctagctttgaggatttcgttggaaacgtgattacatacaaaaagcagacagcagcattcccagaaacttctttctgatgtttgcattcaagtcacagagttgaacattccctttcatagagcaggtttgaaacactctttttgtagtatctggatgtggacatttggagcgctttcagacctatggtgaaaaaggaaatatcttcccctgaaaactacacagaagcattctcagaatcttatttgtgatgtgcgccctcaactaacagtsttgaagctttcttttgatagagcagttttgaaatcctctttttgtaaaatctgcaagaggatatttggatagctttgaggatttcgttttaaacgggattgccttcatataaactctagacagaagcattctcagaagcttcattgggatgtttcaattgaagtcacagtgttgaacagtccctttcataga

SEQ ID NO: 763665 - DNA, 591 bp, Homo sapiens
ttcaaacctgctctatgaaaaggaacgttcaaatatgtgacttgaatgctgacaccccaaagacggttctgaaaatgcttctgtctagattttatgtgaagatattccagtttcgaacgaaatcctcaaagctgtcaaaatatccccttgcagaatatacaaaaagagtgtttcaagagtgctctctcaaaagataggttcaaccctgttagttgagtacacacatcacaaaccrgtttctgagaatgcttctgcgtagtttatatgggaagatatttcctttttcacaataggtcacaaagcaccccaaatgtccagttccatatactacaaaatcttgtgttcacacctgctttatgaaagagaatgttcaacactggcacttgaatgccatcctcacagagatttttctgagaatgcttctgtctaggttttgtatggacatattcccgtttccaacgaaatcctctaagctatccaaatatccacttgcagactgtaaaaaaagagtgtttcaaaactgctctatcaaaagaaagattcaactctgttagttgagtacacacattccaaacaagttttggagactgc

SEQ ID NO: 763666 - DNA, 600 bp, Homo sapiens
agatggagggaaagaaccccaattgctcaatgagtgtctggatccagccatgcctgaaggcatgtttctagattttcctttaattgaactagtaaaattcacttctatcttaaagttgtttgagttttgtttctgtcaatcctgtggcatctagaggaacatattacttcctaggattgttgtaaaaatcaagcgagataatatacataaagcttttagcatggcgaatggcacatggtaagtgcttaacaagtgttagcacatgttatagcaaatagtgtgtgccaagccctgtgttcggtaccagagaatcagaggtggatgagactcggtgcctgccttgaggatctcacactagtgaaggagacagataagccaacagacaggcataaaacactataaaatgagattaggtactsggtctcatagcaatacagaaaaactattgtttggaaggagtggtggagtaggtaggttaggaaaagcttcccagataacaagaggataaaaggagtcttttttattttattcttttttttttttttttgagatggagtcttgctctgtcatccaggctggagggcagtggcacgatcttgg

SEQ ID NO: 763667 - DNA, 605 bp, Homo sapiens
aggccaaggcgggcggataacctgaggtgaggagtttgagaccaccctggccaacatggtgaaaccgcatctctattaaaactacaaaaatcagctgggcatggtggtgtgtgcctgtaatcccagctactagggaggctgaggcaggagaattgcttgaacctgggaagtggaggttgcagtgagccaagatcatgccactgcattccagccttggggacagagcaagactgtctcaaaaaaaaaaaaaaaattcttacctcctggaagtattttactagtgttggtttctatttgacactaaacacttccccaggccagtgyattagcagttagctccttactgaatattatctgtagcaaacagtagctgactcctagctctcttcagtgaacttgaattgaaatttatagaattctcatgacttctatttcatcttgaaacccagatatttcttccttttcctagtgatttacctttcaattatatgtagactgaaccagtcccagctgtctttagttggtctctattcaaacactgtacttttgtttcttgattacatcttcaattattttagttatttctgagattctcccctgtaatt

SEQ ID NO: 763668 - DNA, 626 bp, Homo sapiens
tagtcccagctacttgtgaggctaaggcaggagaattacttgaacccgggaggcagaggttgtagtgaacagagattgcaccactgcactccagcctgggtgacacagtgagactgtctttccaaaaaaaaaaagatgtccacattcaaatccctgaatctaggaatrtattactttacatagccaaaggggccttgggagtaaggattgtgagatgggcagaggagcgtgtatcatccaggtgggcacaatggaatcaatcacaagcgtccttataagcgggaagaagaagcgtcagactcaggcgatacgaagatggaagtggtgattgcagtgatatacgatcaaaagccaaggtatgtggaaagccgtcagcagaaggaagaggcatggaaacgggctctcccctggagcctccagaaggaaccagcctttgattttagctccgcaagacgcgtttcagacttctgacctccaggcttataataagataagtttctgttgttttaagctgctacatttgtggtaactgattatagcagcaataggaaacttagaagagctatttttacaattataagcaaagctgcaagaaacaatgtgtatctgacattttgcatttgggc

SEQ ID NO: 763669 - DNA, 626 bp, Homo sapiens
tagtcccagctacttgtgaggctaaggcaggagaattacttgaacccgggaggcagaggttgtagtgaacagagattgcaccactgcactccagcctgggtgacacagtgagactgtctttccaaaaaaaaaaagatgtccacattcaaatccctgaatctaggaatatattactttacatagccaaaggggccttgggagtaaggattgtgagatgggcagaggagcgtgtatcatccaggtgggcacratggaatcaatcacaagcgtccttataagcgggaagaagaagcgtcagactcaggcgatacgaagatggaagtggtgattgcagtgatatacgatcaaaagccaaggtatgtggaaagccgtcagcagaaggaagaggcatggaaacgggctctcccctggagcctccagaaggaaccagcctttgattttagctccgcaagacgcgtttcagacttctgacctccaggcttataataagataagtttctgttgttttaagctgctacatttgtggtaactgattatagcagcaataggaaacttagaagagctatttttacaattataagcaaagctgcaagaaacaatgtgtatctgacattttgcatttgggc

SEQ ID NO: 763670 - DNA, 574 bp, Homo sapiens
tttaagacagtcattctgagctgttatagtcttagggttttctgtactactaaaacttattgacgacatctaaccaagaacttgaattaaatttttttttttaaaaaagaaaatcacccaaatacacattaaaaacctcttacaacatatgtgcacattcatagataccctgtagaacttgattttgtgtattaaaaccttgtagaaaagttcagacagtgcacacaatgactgcaacttggtctttgcaaaatcagtgatatatatttcagatctatccacattgacccagcgaggtatttgatttattgtatgatctaaygatatgccatgtgatgactgcagcatatttaattatgctttcttcatgctgataccatatggtcataaatatgatgacataccagcatggatatgcttacgtggttggttttattgatttgtactatattagaaatgaaacagaagtattagaaatcctagcaagcatagctgtatctctcccatggctgtgttgattgcaacagtttccccttaaagcatgtctttttgacatgtcatgaccctgagaaaa

SEQ ID NO: 763671 - DNA, 574 bp, Homo sapiens
tttaagacagtcattctgagctgttatagtcttagggttttctgtactactaaaacttattgacgacatctaaccaagaacttgaattaaatttttttttttaaaaaagaaaatcacccaaatacacattaaaaacctcttacaacatatgtgcacattcatagataccctgtagaacttgattttgtgtattaaaaccttgtagaaaagttcagacagtgcacacaatgactgcaacttggtctttgcaaaatcagtgatatatatttcagatctatccacattgacccagcgaggtatttgatttattgtatgatctaatgatatgccatgtgatgactgcagcatatttaattatgctttcttcatgctgataccatatggtcataaatatgatgacataccagcatggatatgcttaygtggttggttttattgatttgtactatattagaaatgaaacagaagtattagaaatcctagcaagcatagctgtatctctcccatggctgtgttgattgcaacagtttccccttaaagcatgtctttttgacatgtcatgaccctgagaaaa

SEQ ID NO: 763672 - DNA, 574 bp, Homo sapiens
tttaagacagtcattctgagctgttatagtcttagggttttctgtactactaaaacttattgacgacatctaaccaagaacttgaattaaatttttttttttaaaaaagaaaatcacccaaatacacattaaaaacctcttacaacatatgtgcacattcatagataccctgtagaacttgattttgtgtattaaaaccttgtagaaaagttcagacagtgcacacaatgactgcaacttggtctttgcaaaatcagtgatatatatttcagatctatccacattgacccagcgaggtatttgatttattgtatgatctaatgatatgccatgtgatgactgcagcatatttaattatgctttcttcatgctgataccatatggtcataaatatgatgacataccagcatggatatgcttacgtggttgsttttattgatttgtactatattagaaatgaaacagaagtattagaaatcctagcaagcatagctgtatctctcccatggctgtgttgattgcaacagtttccccttaaagcatgtctttttgacatgtcatgaccctgagaaaa

SEQ ID NO: 763673 - DNA, 623 bp, Homo sapiens
atggaactcggagtatgtatttgcctagacctgacagaatccttgcagggtttcagcttctggtgcagatgaattccacctcagcaacgtaccagtcgactttagtcccacgcacccgccctgccccaatccccccaagccaccgctgctgccctcgcccctgcagcagcgctggtccctctctctcccctctggatctgcaatattcrgtaccatcagcctagcctgcctaatgaagtgagatgtttcatgtgttccctgtgggttagttaatgtcttgccacactcaggatgccagttagggtgtaggtcttccatgcccacaattgcaaagggctcacagttcgcgtgtgccttaatccaccgcggcccgccacgcggcacaagcgtggtctcggaagagttaccgcgagatgatggagccgcaggcctgctggggcggagcggcctcaggacacgcccacagcctttgcagtaactggctgacgcccaccgccttcgcaatgattggccgctggaggtaggcgggatttccgggcacggcttccggcgtccttccctctcagggtagctccagctgtccctcccgcagttggccctgtggtgttccgaagccggttacg

SEQ ID NO: 763674 - DNA, 623 bp, Homo sapiens
atggaactcggagtatgtatttgcctagacctgacagaatccttgcagggtttcagcttctggtgcagatgaattccacctcagcaacgtaccagtcgactttagtcccacgcacccgccctgccccaatccccccaagccaccgctgctgccctcgcccctgcagcagcgctggtccctctctctcccctctggatctgcaatattcggtaccatcagcctagcctgcctaatgaagtgagatgtttcatgtgttccctgtgggttagttaatgtcttgccacactcaggatgccagttagggtgtaggtcttccatgcccacaattgcaaagggctcacagttcgcgtgtgccttaatccaccgcggcccgccacgyggcacaagcgtggtctcggaagagttaccgcgagatgatggagccgcaggcctgctggggcggagcggcctcaggacacgcccacagcctttgcagtaactggctgacgcccaccgccttcgcaatgattggccgctggaggtaggcgggatttccgggcacggcttccggcgtccttccctctcagggtagctccagctgtccctcccgcagttggccctgtggtgttccgaagccggttacg

SEQ ID NO: 763675 - DNA, 611 bp, Homo sapiens
aaaactaacaaggttaaaatgttggagaagtcttcagaaagactacaaaaccgtctgcctcaccataaaacgtttattttttagaggaatagtacaggtcaaaggaaatcattagatgtattgatactaaagtttaagacatccggaacattctatgtgaagcattctgtgactgaagaggataacggtaatgaaaacttttttttttcacctaaatcagaagtgaaccagctaagtttctcaggcgcgtagcataatgaatttaaatgttcgtagtttaaatagtggaaagtaagtgttttgtcttgtgaggttcccacgttaattttttcttgaatattttgacagtggatgttgtaagtaatggtttagtaatatgttcttacagataggaataatctagagtggttgggatagtatcagttttttttgagrtgaagtgtacagctttgtcgccgaggctggggtgcagtggctctgtcttggcttatggcaaccgctgccttctggatccaagctattctcctgcctcagcatcctgagtaactggtattagatatgtgtgccgcacagcggggccaatttttgtatttttagtgcagacagcgttt
